United States Patent Application Publication US 2026/0103690 A1 - sequence listing, part 42

SEQ ID NO: 198501 - protein, 416 aa, unidentified
MKEWKEITHYAGFDWARDHHVVVIVNQQGQIVADFEFEHSVEGWKSFGEKTAGFANLAVAIETSQGAAVDQMLQRDYTLYPVNPAAAASYRQRKAPSGTKTDHIDGWSLADALRVDGQGWRALQPADELSTQLRLLCRDEVALIAQRTLLVNQLQQALVEYYPAALEAFEDWVSPATWDFVLEFPTPEALTKAGKRRWEKFLHTHRLWRPETVEKRLTIFSQADQFKASAPVTKAKSQLALSLCKLLRTLQQQLDQYREQIEALFKNHPDHDLFGSLPGAKKMLAPRLLAAIGSDPGRYGTFQVLQSFAGTAPISFESGKIHKARIRWNCDKFMRHTMHLWADCFHRVSPWGQAYYRKKRQEGMTHACALRCLGQRLLKILFRMISDKKPYDAELHARNQKKHGSCVLALIEKPAV

SEQ ID NO: 198502 - protein, 350 aa, unidentified
MDVLHAHCCGIDVHAKFVVACCRHIGSTGSVTKTSRTFGTMTADLQALAAWLTSEAVTHVAIESTGVLWQPVWNILEPHVTIVLVNPRDVRQVPGRKTDVTDAEWLAQLLQYGLLRSSFVPPVAIRALRDLTRGRAKLVDQTTAVTNRIHAVLHDANIKLGSVATDILGVSGRAMLQAIVEGETDPSRLADLARHRLRSKLPTLRRALEGRVTDHHRFLLRRLLGQLAFLEAEIAIYDARIAEASAPFVAILARLDTIPGVDRRTAENLFAELGAEMSVFPTAAHLASWAAIGPGNHETGGKQLKGTTRHGHRWARRALTEATHTLFRQAPRRPGTQSHLGDCGVVVGSS

SEQ ID NO: 198503 - protein, 399 aa, unidentified
MLAVGIDISKSKSVAAILNQDGSMHTSPFEFHHTQPELDAFIKYILNSNQSVTILMENTGHYHYPVLKAFREAGLPVCMVNAYQIKKFGDMDLRKAKTDKKDAVRIARYALEKSYSLVPYTSMEQKYEDLKFLARQYNQRMLTLKTNKVFLLNLLDETMPGITNILPLTSRTPETSLSVLFINRFKSYDRIKKMGKSRFLDAFEKITRKSRNRQTKTYGLAIYEAALRNITTRGENEYTLAAQDQCLELVCESQKAADSIILKMQTLAETLPEYAVLRSMAGVGDRLGPLILAEIGDIRRFHSGKALNAYAGNDAPPYQSGTFESHNRHISKRGNAALRKYCFEVMQALKLTQPQDDPVYLFLLKKEQEGKPYNVAKMAGVNKFLRIYYARAMETLKQQ

SEQ ID NO: 198504 - protein, 366 aa, unidentified
MKKISTVVLEGMQIFKENQLTIGLDLGDRISRCCILDEAGQIILEQELPTTAKGIEQVFSKIPRSRIALETGTHSPWISRQLGQYGHEVIVAHARNVRLISESSRKDDRLDARTLGRLARIDPTLLSPVRHRSAKAQMHLTVIRARAVLVSARTALVNATRGLTKSNGQRLPQCGTEQIHREIAQGLSQELRDALDPLLREIESLNERIAECDTRIEQIARELYPEVARLKQVKGVGPLIALTYVLTLDDPYRFRRSRDVGCFLGLRPGRRNSGRSEPQLHISKEGDRYLRTLLVQGAHYVMGPFGQDSDLRRWGLKLAERGGKNAKKRAVVAVARKLAVLLHKLWVSKEIYEPLRNNRNAMAQVA

SEQ ID NO: 198505 - protein, 392 aa, unidentified
MYIVGIDIGKNHHEASIVSPEGKQIGRSLRFATTHKGADSLMSFIFKNIGNSPCVFGMEATGHYWYPIYSFLKAKGYTIYVINPIQSDSLRKMYIRQTKNDSIDSFLIAEVIRFGQFGTTSMADENILAMRQLCRYRDSVISSRTEIKLRIGTIMEQIFPEYEKQFSSLWLSTSMGILEKYLTPENIENAPIDELFEIIKDKSHNRLTKAKAISIKEAAADTFGIKIAQDAFSFQLKQLIDRMNFLDKQIEALDIEIMKYYEQFDCYLHTIPGIGIIGAATILAEIGDISRFKNSSALVAFAGIDPTVRQSGEFNSTHNHMSKRGSPYLRHAIFLAATTCSFHNSPLNAYYKKKRDQGKHHLTATGAVARKLTTVICAVLRDSKPYEPKKFC

SEQ ID NO: 198506 - protein, 293 aa, unidentified
MKKRSRSQKSQKPTVKIKGIQERVTIGIDLGDKTSRYCMISHGGEILREGQVTTTKAGMVEAFGCLGRARIAIEVGTHSPWVSRLLGSLGHEIIVANPRQVKLITESSRKDDRLDAQTLARLARIDPQLLRPIQHRSEAAQTALTVIRVRAALIAVRTSLVNTARGLAKAMGERLPKCDADQMGVLRAESVPPKLRQLLEPLLKEVESLTEKIKDSDREIEQIARKDYPETALLQQVGGVGPLIALTFVLTVEDKDRFQKSRDIGCYIGLRPGAAIRARGNRNYESRRKATPI

SEQ ID NO: 198507 - protein, 341 aa, unidentified
MSEVNTIGLDLAKNVFQAHGADASGAVVFRKKLRRNQILTFLATQPTCTVAMEACASSHYWAREITRLGHAVRLIAPAYVKPFVKRQKNDVADAEAICEAAQRPAMRFVGVKSEEKQAAGIVFRTRDLLARQRTQAINAIRGHLAEFGIVAAKGPFHVTKLTTAIEDDPSALPESARQILRVLVEQMRSLDQKVALLDREIARRAKEDTEAKRLMTIPGVRPITATALAALAPPAQIFKRGRDFAAWLGLTPLQRSTGGKQKLGETSRMGERTLRRLLIIGASAAVRWAMRKGTTADPWLSRLLSRKPKMLAIVALANKTARIVWALMAKGGTYRTSAVAG

SEQ ID NO: 198508 - protein, 334 aa, unidentified
MQFNYFIGVDVSKATLDFAVVNLNQVLFHQQVSNDKKGITQFLKELRRVTNTPIKVCLFCLEHTGIYNNPLLKALHQASAAIWVERAAHIQESMGLTRGKTDQVDAKRIALFAYKNRDEARLWAPPRAVIAQLDRLTARRARLVKVIKQLQTPLTDAKGFLDKAEHRVEKLACAASLKALKADLKSADKAIVDLAQADPELKRLFERVTSVVGISQTTAAEIIVTTNEFKAITDPRKFACYAGVVPFERSSGQRKGKPQVSHMANKKVKSLLHLGAMSAIQHCTQLKAYYQRKVGEGKNKMLVLNNVRNKLVHRVFACVRENRNYNENFSFPFG

SEQ ID NO: 198509 - protein, 416 aa, unidentified
MNPPFALFIGIDRSDTHLDFCLRGPDHSPAHSGQVSTDPAALHPWFEALRACAATGPIAVAFEQPAPNLVLFFSQFSDVVVFPLNPAAVRSYCRSFAVSNAHSDASDAARIAEYVHLHHAELRARVAASPAMRRLQALVEHRRSLVDERTGLLNRTLALLKLYYPQAIALLSVDRWRPMDCEFLLRWPSLQALQSARPATLRAFWHQHGSRSLRMEAARLAIIAAARPLTIEPETIEPMVMRLTALVVQMRLLGECIVTAEKEIARVATAFEDYVFFRALPGAGSTFAPRLLAAFGEDRSRWTDAASLLAYSGIAPVTRQSGKARSVVRRIHCPNFLRQTFHEWACESWKHSRWARAFYAYHKQRGKTFHTIMRMLAFKWNRILMRAWHNHTPYDESQYTQALILRGSPICAYLGE

SEQ ID NO: 198510 - protein, 435 aa, unidentified
MEEVTDEPLYRDRVCGIDIGKAGLVATIRVPSDRDPARRMAETRTFGTTKREVLALADWLRCWQVPAVVMEATSDYWKGPFYRLEAGGFECVLADAKQVKNLPGRPKRDPADSRWLAACFERGAVTACFVAAPEFRIIRLHTRYRRDLTEERTREKQRAEKLLESAAIKISSVLTDLHGVTGRDIMDRLIAGQRDPKVLAQLARTAARRKIAQLEQALEGAEFFTGDHAALLATMLVRIDRLTADIADLTAVIEQLLAPYEEQLQQAESMPGWARRAAQDAIAETGVDMTRFRTGPHLVSWGGRAPQDHQSGKRAGRAKAKKGNRYLGAILGETAVAAGRTQTREGARHRRLIRKRGSAKACVATGNTQLKVYHKLLSNPGMRYQDLGPDYYERQRDIRRQIAHHAGKLGSLGFEVTLCRIPEPEPDGTAPTQAA

SEQ ID NO: 198511 - protein, 341 aa, unidentified
MSIVTTHVGLDYHDDTVRTCVLAEDGAVLCNRDLDNDVQAVAAAIARFGRPRGVAIEACGGAANFAAEMIRVTGWKVRLGHPGYVKRLKSGPDKTDHDDAWLLADLDRVNYLPEVWLADETTLELRKLVTYREGVKKERKNVKLRIRSLLRENRIPLPVANAWTKPWMEWVSKLSLGVQSRYVMDRLLTQLARLEDDLRDVERQMEQATADDPLTQRLLAEPGIGLITAVALRAEIGRFDRFRTAKQLSKYCGVTPCNASSGKRQADAGLIKAGSRELRALLIQTAKRLPRCDSHFQEMKNRLGRTKPANVVTCAIANRWLRRLYHRMLAPQGNEAATTAA

SEQ ID NO: 198512 - protein, 351 aa, unidentified
MTVYIGVDFHPYEQSIAYADEVDGEVRYKRFVHSDKQSIRAFYRKCGEDAVVGVEATGCLWWFEKLLMEVGIKLRVGDPRMIRRVALSRHKNDFRDAETILDLLMRGDFPAIVPRSEQSREVLDLLNYRQSLVRKRTSIANQIHAFARSKGMAKFRLPAVKARRKLIDAPGTDTEQLLLSSRLLMYDELTRQITSVEAKLEEEANKDERLTLLRTYPGIGPLTSLALVHTLGDVRRFRRKEEVVAFVGLDPLEKSSGEKKRMGQISKRGSRLVRHLLGQAAQSCRDHRIRKFYLEVSRRRGRPKAKVAAARKLLINCYVMLRDGIAYEEFQRRGEVGLCEGSGEVRSVKAL

SEQ ID NO: 198513 - protein, 417 aa, unidentified
MEDIVEFEQVVEKGCGLDVHKDNVVATIRGNGIKTQTMEFRTYTSSLILLRDWLFKHGITHVAMESTGVYWKPIYNILGDHFQILLVNPRHTKNVPGRKTDMNDSQWLAKLLIAGLLKCSFIPNRNIRELRDLVRYKTKLTNKVSSEKNRMIKILEDANIKLSSVLSDIFGVTGQKILRDIIAGAYQPEKLLYHVHGKVQKSREEIKEAITGNVSAHHRFMMQTILESIAKTEDIIQKLDAQIALHTTNYGLEIELLDKIPGVDKDGAIGIIAEIGDDMSAFPTERHLAKWAGMCPGNNESGGKKKSGRRSYGNTYIRALLTELGWAASRTKHTYLGNKYKSLVGRRGSKKAVIAVGHKILIAAYFIIRDKVAFNELGEDYLSKFKKDKLIAYYKQQLKYLDPDWETKNEKKEQEVA

SEQ ID NO: 198514 - protein, 397 aa, unidentified
MRLTHLWFNRMLPSKEWLRIKEYAGCVSFGSIATLIIKNKPSMNTLNENSIVVGVDVHKYSHTAVAMNAWGEERGLITFTNNTLETYTEWLEQIGLKENIIVGLEDVNSYGIHLVERLRNDNFHIRYVPAILTERERKTSTKRDKSDPVDAKRVGKVLLYKYEQTLPAKESIADKRELDTARQMDLLLMERKDLVRWKTIIKNQLHGLIHQHYTESYRLHCPRSFSKKVTQWFLDDLKENKTILATSITRRFHRLLFIENQIYTISKEMTVIGETSKEVVSLSTIHGCGMITACSIMAEVITVKRFRNKHHFSSYAGIAPTPHSSGRKNTMHTNPFGNRQLNKCLHVIALSQIAIKGDPTGKEYYQKKVKEGKTKLWALRCLKHQMAKVVFQKLRYA

SEQ ID NO: 198515 - protein, 477 aa, unidentified
MGTPVRIIACQRYIPLEHFYHLKKNAMKKKIVMEIINPNAAGIDVGSRSHFVAVGQGSDDVKEFGVYNEDLNSLVQWLLLNEVTTVAMESTGTYWQSLFAVLQNAGFKVILCNGKFTKNIKGRKTDVQDCQWIQKLHTIGLLTGSFLPDEATEQLRTYCRHRANLLDQAADTTRKMQKYLRLLNLRLDVVVKDITGLTGLSIIEAICTGETDAAKLASLRNGNCKKSEEEIAKALQINGRTDYFFALKHEYKMYQYLQSSIKECDIEIEKLLSNQINNSDDKREHFLDKKVHKRINKNTPKNMDLNLMAYQYFEGIDLLAIEGVSYSTVLSIMSEVGLEGIKKFATAKQFASWLRLAPNNKISGGKVLSHKIPKGSSRLKIALRNAANAIGNLKDTPLSNFFCRINYRKGRVSAISATARKLAIIIWNMIVKKRPYNNEHGYEFLDQKRKRKVQEMKKLIHKFDIKTDELGLQLNGL

SEQ ID NO: 198516 - protein, 338 aa, unidentified
MFTIGVDPHKGSHVAAVLDHREELLCEVRVRADRSQRDRLLAFAAPYAPRVWAVEGARGLGALLAQQLVAAGEHVVDVPAKLSARVRVLDNECSDKNDTHDARSAAIVALRNRKLCTVALEDHAAVLRMLAKRHHELTGLRTQAICRLHAVLATMIAGGLPRNLSADRAGLELRRIRPTDAVGQARRQVAVEHLADVRRFDRMLIELRPKIVAAVALSESTVTDVYGIGVIMAAYVLGYTGDIRRFASKDHYARYNATAPVSASSGPSPHHRLNLKGNRQINHAIHIAAVTQLAHDTPGRAYYDRKRAEGKNDKDAMRALKRRISDAIYRRLVADAHR

SEQ ID NO: 198517 - protein, 407 aa, unidentified
MRLFVGDDWAEDHHDVELMDAAGRVLTRKRLPEGMAGMARLHELIGQQLSEDGEDPEVVIGIETDRGPWVAALVAAGYVVYAVNPLQASRYRERHGVSGAKSDRGDAHMLTDMVRTDSHQLRVVAGDSADASAVKVVARAHKTLIWERTRQVQRLRHQLREYFPAAVEAFEDLDAPDALELLAKAPDPARAAKLTRAQVSAALKRARRRDIPGKATAIIAALRGAQLGQPPAITAAYAVTVRSLIALITTLNEQVKSLQGQVEADFGRHPDAEIYRSQPGLGLILGARVLGEFGDDPDRYVSGKARKNYAATSPITRASGKKKTVMARFIRNDRLTDALMAQAFAALTASPGARALYDAERASGAEHNAALRKLANRLVGILHGCLKTRTLYDEAIAWSHCENKLAA

SEQ ID NO: 198518 - protein, 355 aa, unidentified
MNQEKYIGMDVHDATISAAVKNAQGKLLMECVLETKAATTLEFIQGLRGTLALTLEEGTLAAWLHDLLKPHVSRLVVCDPRKNALLRDGNQNDRVDARNLAELLRTNQVKAVYHGKHEIRALRELGRSYLTLTQDSTRVMNRIKSVYRSWAIPCAGTSVYSRRHRAEWLAKLVEPGVRIRAQHLYQELDSLEPLRQAARRELLRESGKHAAVKLLRQIPAIGPIRSALLVALLQTPHRFRTKRQLWAYSGLAVQTYDSGEFRFVRGKLQRNRERITVRGLNHNHNHDLKNLLKGAAISAIQRPGPLQDFYAALVEKGMRPSMARLTLARKIAAITLTMWKKGVSFDPRQLQRPAA

SEQ ID NO: 198519 - protein, 407 aa, unidentified
MGAATRGELSSLLQKEPMELAMKCNDLSRSLVAFDQNSTLVAVVELSLNSWVVAGVVPGLGRDPVKKQSADCNALLKLLHRWRDEAIKAGGEIKRMVVAFEAGRDGFWLARWLRDQGIEVYVIHPTSVAVSREPRRAKSDRLDTQMLKRAVLGWLRGEPKHCSMVEIPTLAQEDAKRPNREHEHLVGERTRIVNRMKATMARHGIRGFKLNLRKARKQFAELRMPEGEPLPPNTLAELERDLARLQQVRDQINTIEKQRLKRLRQAPQEGPHPMILLLAKVLGVGIETADMLVNEALWRNLRDDRAIGRYAGMTGSPDESGSKRREKGLARAGNARVRRGMVQLAWRWLMFQKESALTKWFRARTAGGPRDVRKTMIVALARKLLIALWRYVTTGEVPAGAKLRPAV

SEQ ID NO: 198520 - protein, 315 aa, unidentified
MKKNKEYVGVDVSKETLDMVAYFTGEMHSFSNDKAGITKAVAWLNKVKPAITVMEATGGLEIPLHVALQEAKLPVAVINPRQTRDFAKSMGILAKTDKVDAKVLARYAEAVKPEVRPLPDEEARHLDTLITRRLQLVEMITAEGNRLMSTRNKAIRQRIQVHLIWLKEELADINKSISQTIKQNPVWHEKDRMMQSVPGVGPVLSATLIGALPELGCLNRKQIAALVGVAPLNRDSGKHRGERHVWGGRSCVRTPLYMATLTAVRYNPVLSNFYNHLLAAGKAKKVALTACMRKLLIMLNVILKHNSTWSWNYSA

SEQ ID NO: 198521 - protein, 296 aa, unidentified
MISNPSTSTRLSTIGLDIAKSVFQVHGVDAAGEVVVRRKLTRGRVLAFFESLPRCLVGIEACSSSHYWARELTSRGHDVRLLPAQYVKPYLKRQKNDAADAEAICKAVTRPTMRFVPVKSPELNRQRTQISNALRAHLSEFGVVAPIGRNGIEQLLVVINDENDARIPTDARLCLRMLEAQLRVVKEQILENDRRVRASARETELGRRLMEIPGVGPLLASAFVATVADAHAFKSGRCLSAWIGLVPKQNSSGGKEKLGSISKAGNRYLRQLLVVGAMAVIRYAERNGTRSHGSCS

SEQ ID NO: 198522 - protein, 322 aa, unidentified
MDEAGKAVLIKPRVSRDQLLALIAQLPPCLIGMEACSGAHHWARMFQQYGHTVKLMAPKLVAPYRMSGKRGKNDAADAAAICEAVTRPSMRFVPLKDEHQQATLCLHRTRQGFVEERTAIYNRICGLLSEFGVVLPQSPERLRREITVHLDSLPSWANRCISDLLEHAGNIEARLAEYDRAISQIARDDERSRRLMQLRGIGPTTASALLASLGAGHDFKNGRQVGAWLGLAPGQHSSGGKQRLGSITKAGDAYLRCLLVNGARAVIANLGEKQDRFSRWVRSLVERRGYWRAAVAIAAKNARMAWAVLKYGEDFKHEPAAA

SEQ ID NO: 198523 - protein, 328 aa, unidentified
MKLYCGIDLHSSNNVIAVLDEQDKAVYEKRLDNDLDEILEALDPFKDEIVGCVVESTYNWYWLVDGLMDAGYRVHLAHAGALPQYAGLKFTNDSADARHLAQLFRLGILPTGYIYPKQERALRDLLRRRLLLVRQKTLHHVSLQSLIARHSGQRLNANEIKKLNEKQLNAYLESPILLGGEITHQARCWLDTAIARIERELQKHIQPREDYQLLQSIPGVGPALGTTIALETGTIARFPSSGNYASYARCVKSEKISNGKYKGQGNKKNGNKYLAWAFMEAAHYSAIWNPQIKKYYQRKQAKSHLLVAKKAVANKLARACSSAVSGAM

SEQ ID NO: 198524 - protein, 331 aa, unidentified
MKSKELIGIDVSKNVLDAFILGLSYHFTVENNPAGYARLLETCCLKLACKKDQLFFCFEHTGRYSWLLSIFLSESSIVYAKVPAMDIKQSRGMTRGKSDKKDAQMIAQYASRKRDELIPTELHAPEVGQLRQLLSLRNKLLRHRTAYKNSIKDLQDCFMEGETEFIKVTQERLIKNMNVEIDNVENQIDTIINSMPEWKRNFKLMQTVKGIGPVVSRYIIIYTENFTRFTDPKKFACYAGIAPFEYSSGTSIKGRTRLHPCANKQLKSLLNIAAMGAVRLKGEYKTYFERRTAEGKNKMSTLNIIRNKLLFRIFAVVKRQTPYVDLTMFAA

SEQ ID NO: 198525 - protein, 321 aa, unidentified
MDAVGIDIAKRKFDLAWLSGGKLKTKVFENTDKGHAELLAWLKKNKLTIENCHLAMEATSQYYEPVALALFDAGYTVSVVNPLQIKAFGESLMRRQKTDRADAELIARFCEVNKPLPWQAPPRKVRELQRLLARLEAVQGMHVQEQNRRHEAQGFALDSIERVIETLDLEIAYLEEQIRDHIDRHPDLREQDELLQSIPGVGPSVSSYAIAWLRGERFDDARQAVAFVGLSPRHHQSGDSVHGKTSISKLGHGRLRKILYWPAMSAMRYNAAAAALVQRLTAAGKNKKVAIIAVMRKLVHWMIGVIKSGKPFDVNLALARI

SEQ ID NO: 198526 - protein, 344 aa, unidentified
MLYVGLDLSRKRLDFDARLVDGRLWERGAVPPDADGLGELARRLGDAGVVAVIESMNGARFVHDRLELDGWDVRIADAVKAKGLAPLACKTDRIDAWVLAELARLDLVPEIWLPDPAVRAERERARFRLHLVKHRSALKNRVHSILIAHGIPNPTSDLFGLAGRRLLQRLELSEPWRSTTAATLALIDTLDEQIAACERELRRLGADHRYVPLLVTCPGIAWVLAYTIASEIGDITRFRTPVKLVGYSGLTPRVEQSGETDRRGPLRKNGPDYLRWALVEAAHTASRYPLYRPILERSRARHGRKRGSKVAALTIARKLAHSIWHMLTHNQPFAPAGARRPLAA

SEQ ID NO: 198527 - protein, 375 aa, unidentified
MTKLRFIGLDVHSDTIAVAVAEPDGEVRSLGIIPNRAESVRKVMKKLGSAESLRVCYEAGPTGYVLYWQLTGLGIACEVVAPTLIPMMAGDRVKTDRRDATKLARCYRAGDLTAVWVPDAAHEALRDLVRAREAAKKDQLRARNRLSKFLLRHGRRPTDKMTPWSDRHMRWLRQVHFEQFAQEATRLDYLHEVDHAADRITRLERAIDAAVQTAPTKMRAVIDALQALRGIARMTAVTLVAEVGELSRFARAPQVMGYSGLGAREHSSGAHIRRGGITKTGNAHVRRVVIEAAWAYRHRPAIGAPLRKRQATLSEAVKAIGWKAQLRLHARYHRLLGRGKCPQHVTTAIGRELLGFIWAIGVTAERDHDARAHAA

SEQ ID NO: 198528 - protein, 425 aa, unidentified
MREHDTRAEAGTVNPPGRGTMFEIEDVGVFLGLDVGKSNHHGHGLTPAGKKVFDKPLPNSEPKLRAVFDKLTAKFGTVLVIVDQPASIGALPLTVARDAGCRVAYLPGLAMRRIADRYPGEAKTDAKDAAVIADAARTMPHTLRSLELTDEITAELTVLVGFDQDLAAEATRTSNRIRGLLTQFHPSLERVLGPRLDHQAITWLLERYGSPAALRKAGRRRLVELIRPKAPRMAARLIDDVFDALDEQTVVVPGTGTLDIVVPSLAASLTAVHTQRRAMEAQINTLLEAHPLSPVLTSMPGVGVRTAAVLLVTVGDGTSYPTAAHLASYAGLAPTTKQSGTSIHGEHAPRGGNRQLKRAMFLSAFACMNADPASRAYYDKQRARGKTHTQALLRLARQRVSVLFAMLRDGTFYQSRTPNDVELAA

SEQ ID NO: 198529 - protein, 339 aa, unidentified
MELYAAFDLHANNSLLGILDGDGKRVFKKRLHNERELILEVLRPHKEHIAGIAVESTYNWYWMVDALMEEGYRVHLANPSEIQKYEGLKHADDNHDAFWLAQMLRLGILPEGYIYPKEERPVRDLLRKRGHLVKIRTSLILSLQNIITRNYGVRLNVNDLKRLRENRVSPLLEENDDLALAGMVSKETIDFLTHQIRKIERAVEGKIQLKQEYRYLLTLPGVGTVLALTIMLETGPVSRFAKVGNYVSYCRKVSTQWTSNGKKKAGGNKKNGNRYLAWAFSEAAELSKRYDPYSRAYYNRKSQRTNAMVAHNALAHKLARAAYYVMRDQIPFSPEKLFA

SEQ ID NO: 198530 - protein, 398 aa, unidentified
MTRKNTLKSLPTDTEFRVVGLDLAKSDVSVAAIPVDNNTPSLVDQMTYADLLDWAGKISPTLFAMEPCNGYSLLCLQLENLGHEIKVISGSTVSMWINTHLSGQKTDLNDAIALARLAVSDAELTPIRHKSITEIRIQTVQAVRQQLMSQRSKSIVSFKALAQQWGIPCAAGHRNLKKLRESIEAKVDLITRPVANAMLFLLDAVKSLDRQIGQLNQTLQELVMSDERGRLLQSVLGVGTQISARVITVVGNVERFNSPRSLVAYVGVAPRNFITGHKNLTKKKHGNCPDLSHKGQGKISRRGDKLLRSLFIQGAACLYMQFCKDQLPECQLKRWILKQLARQKPYGKLMVSLAAKLIRIVWAVLTYREKFNIQKAGMTRSMWSEMALETPLNKEVPA

SEQ ID NO: 198531 - protein, 342 aa, unidentified
MNEYDGKQFVGIDLHRQRSVIVRQSESGEQLSAVRIVNDPVALGLQLEDAGADPEVVLEATYGWYWAVDVLQAHGARVHLAHPLGVKGFRYRRVKNDVRDAGDLADLLRMGRLPEAWIAPPATRELRELVRYRAKLVATRSGLKAQVHAVLAKAGVLIAVSDLFGVTGRQRLAKVPLAAAYAERVRSLLELIDILDGHQARFAALIAQQLDADRGYQAIQQIPGIGPVLAAVFVAEIGDVGRFTGPAQLCSWAGLTPRHRESDTIVHRGHITKQGSKLVRWAAIEAVQRHQTTAKIAADKDRIEARRGKNIAKVAAARKLLTLVYYGLRDGHIRALDPDRAA

SEQ ID NO: 198532 - protein, 402 aa, unidentified
MNCVGIDVSKGKSMIAVMRPFGEVVVSPFEVLHTDSELSELARLLKSLDGETRVVMEATGNYHAPVAWLLHDAGLYVSVVNAMLVHDYGNNSLRRAKTDKKDAVKLANYGLDHWLTLPRYVPDEDTRLMLKTCYRQYQQYSKVQTMLKNNLISLLDTTFPDANRLFASPPRADGSEKWVDFVDAFWHCECVCGLSEKTFITRYQKWCRKHGYNFNENKALDIYASACGHFGVMPKTDTTKLLVEQAISQLRATSAALAALKQEMQSLAASLPEYPVVMEMFGVGPTLGPQLMAEIGDVRRFHSKKALVAFAGIDAPPYQSGQMDVRSRSISKRGSASLRRTLFLVMSVILQRAPMDEPVYQFMSKKHSEGKPYRVYMMASANKFLRIYYASVKAYLDSMEYD

SEQ ID NO: 198533 - protein, 369 aa, unidentified
MKQYSTIVGMDVHKKMIMVAVLPSESDRVTERMTIQNEPKVVEKLVDRLTDQGPVEFVYEAGPCGYEMQRQIAEMGHRCVVIAPALTPVRPGDRVKTDRRDAEKLARFYRAGELTEIHVPSREEEAARDLVRGREDILEDRLRARHRLMKFLLRQGRVFGETRAWSIAYQVWLKSQRFEWVPLQQTFATYVRTMEEAQARLDVVDQQLQDLAQQEPYRIPVQYLRCLKGIDTLSALTLFVETQDFRRFPTAREFMSYTGAVPSEHSTGGNHKRGSITKAGNAHIRRILGEAAWSYRRRSVISRPLAERRQGCPQEVVRIAKKAQDRLERKFSRMIVRGKLHQVTVVAVARELAGFVWAIAQHCPVRTTA

SEQ ID NO: 198534 - protein, 311 aa, unidentified
MEEIIIDKGCGLDVHKETVVGCVMGSGIKKEIRTFSTMTGDLFRLKGWLSEKGITHVAMESTGPYWKPVFNVLEDSFEVILVNARHIKNVPGRKTDVKDSEWICKLLRSGLLAASFVPPQGIRELRDLTRYRRKLTQTISSEKNRIQKVLEDANVKISSVLSDTFGVSGMEMIGAIMEGNLSVEQISELAKGRLKSKKAEIKESLVGNFRDHHRFMIQASLGQIGSLEKTIADLDQEIDRKLEGYHQEYELLQTIPGVKEQGAASIIAEIGVDMDTFPSEGHLSSWAGMSPGNNESAGKKKVARRPMAIRI

SEQ ID NO: 198535 - protein, 391 aa, unidentified
MPMYFVGIDISKYKHDCCIISAADQQIISKFTITNDKDGFEQLLTALNSLSNPEDIKIGFESTAHYALNLELFLENAHHSFMEVNPVLIKEYKKSTTLRRTKTDSVDCESIARWLITVEYKPHSKGFYHAYSLKSLTRLRDRLIRQRSFYLVKITNVLDHTFPEFKPFFNERLSKTALYLLENYGSAEKIARMNSASYDKLRCISRGKFSIQQFLRLKELAANTVGVNNSIFDLELNTLLTLYKSLSDEINTLETEIIKLIEEVHPHYMSIPGIGPISAAVIYAEYGDISNFSNPGQMLAFAGIEPGINDSGTESHGGRMVKHGSSQLRYVLLNACLPLIRFDLTFATYYEKKRAEGKKHRVAITHVAKKLIRVIYALERQDVDFNAQKLR

SEQ ID NO: 198536 - protein, 344 aa, unidentified
MGEVSTIGLDIAKSVFQVHGVDAEGAVVIRKRLSRSKMVEFFAALPSCLVGIEACPSAHHWGRELQSLGHTVKLLPPSYVKAYLKRSKNDANDAAAICEAVTRPSMRFVPLKTREQQAALMLHRTRQLLVRQRTMLSNALRGHLAELGVVAAKGRNGTGELLEIIADAEDHRVSPAARAILEVLARQYRAIGVEIGLIDKSILAWHRSCEASRRLAEIPGIGPIVATALVAEVGDWKSFSSGRSLAAWIGLVPKQHTTGGKERLGRITKQGNRYLRWLLVVGATAVIRYAKQHGSKNRPWLARLIERRPAKVAAVAIANKIARIAWAIMVRGERYNEPKLLMAA

SEQ ID NO: 198537 - protein, 337 aa, unidentified
MSYIGVDLHTNSLTACYRTKQGKERIRTFALRRLDEFIKTLRRQDKVAVEATGNTSYFVERIRSRVKKVVVVDPNQFEVIRKSVRKTDKHDARTLALYLSKDMLPEARMKTKKNAQLHSLACTRDKLVKQRTALINKIHNVLNSYGIKFKKESLGTEKGLQSALAFEWDTIVRVELDVLVAQIRSLNQSVKTLDDQMIDQGKKLKGHKNLASIKGIGDRSATVLLSVIGEVKDFADEDKLAAYFGIVPRVSESNEKINHGRITKRGSKLARTTLVQCTLVATRYSPYLPKYYARIQKHRGSGKAIIATSRKMLGIIYHTLKNDWIFEDFTNFVVAES

SEQ ID NO: 198538 - protein, 338 aa, unidentified
MAIVMGLDQHRAQITADWLDTETGEVGRARLTPAHRDGVRQFLGRFAGQRLEVALEATTGWRFVVEELQAVGADVHLAEPAETSSLRGSKKRAKTDRADARHLRELLMVGRLPEAWIPPAHLLDLRARVRLRHTLVDQRGEWQQRIQAVLYHHGVAQRRDLLTVEKRQWLEELDLPAAAREQVTVALTVIDALDAQSEPLTRELRAYGRRQPGCQALMAHYGIGALTAVTILAELGDARRFSSSRHAVRYAGLDITVHQSDQRRAPGHLSRQGPPALRWALYEAAQLSRRAGSPDHAYYQQAAARLGGNRACLAVARKLLKRSYHTLRELGDEALQPA

SEQ ID NO: 198539 - protein, 401 aa, unidentified
MKTVLSVDVAKNKSMIMLMNSDGEIFIDTKEINHNLEDFEKVKEEIKEINPQNLTVFMESTGTYHLPVERYFKENGFNTLVINSLTTKNNYDTIRKTKTDKKDCYRLAKLFFVNEVEYHDLSKKDLYANLKAMTRQYFYLLQNNVSCKNRYKRLINICFPELEKIFKSTRIYDDTALNFIKEFPHAEIVKEKRIDALYNNLYKTNGRNLNFYKKLATTIKIASINSYPGVDKEHEDVKNLSYMAKIVQNNNNIINELREKMIETAKQSPYYKIINSFYGIGDTLTAEILGELGDITRFDSPKEIIAFCGLDPTIKQSGKSINVKGAISKRGNKYARYILFNCSQMVVKLGSSNYPEHPVYIYYQNKKAEGKHYYESLTACSTKILRMLYSMCKNNKQFLEN

SEQ ID NO: 198540 - protein, 336 aa, unidentified
MIKYIGLDAHSSTCTFNVTDERGMEVDNTTIESNGRLLVKYLRGIEGVKKLTFEECELSSWLYEILRPEVDELIVCNPVANKDYKKVKTDKMDARKLSKLLRGGFLISVYHDGSKRERFRSLMSGYQDLIEEGVRLKNRYKSLFRKSGNKVKGESLYSDESFLEGLERSDFKFIGVQIYQLLEKMEGSRQEYVKEIDRYGKGFKEIKYLKSIPGIGSIQAAKIVSQVIDPERFSSKYKYYSYCGLVRHKRISDGRGYGSEKIWGNRILKCVYKMAGHSVLKGKSGLRKHYDSLRVKGISHDNAYNAVCRKIAAISLSVWRKSEKYNDRLITGNLIK

SEQ ID NO: 198541 - protein, 341 aa, unidentified
MKPELSVVGIDLAKSLFHLVGMDERGKIILRKRLARGEVMPFMAKLPRVLVGMEACGGAHYWARQLRAQGHEVKLMAPQYVKPYVKTNKNDLRDAEAIAEAVTRPSMRFVPIKNVEQQDLQALHRVRERLMGARTALVNEIRGLLAEYGIVLPTGVNAFRNALAAKLEAEHAKLTPLSQELFGKLWAEFKQMEAEVAYYDEKLQAMATTHPESQRLLTIPGIGPITATALIAAVGEVGGFTNGRQFAAWLGLVPKQYSTGGQTRLLGISKRGDSYIRKLLIHGARATLRWARTKTDRRSRWIRGLLERRGWNRTAVAVANKNARIVWAVLSRGGVYRESTN

SEQ ID NO: 198542 - protein, 415 aa, unidentified
MHPFEQLTHFAGFDWAKDHHDAVIVDRQGATVDSMTFAHTAEGWVQWRERIKAYPALGVAIETNQGAAVEQLLQSPVTVYPMQPKAAERYRDRHVPSGSKTDQRDAWCFADALRVDGQHWRPLAPEDPLTEELRLLCRDEVELITQRTALVNQLQQALYEYYPAALEAFGDWTAPYAWEFVLAYPTAEQLVKAGKRRWEKFLHTHKLWRPDTAPKRLEIFGRADRFCGSEAVTRAKSRLAVSTAQVLRALQKQLEDYRSAIEQLFTKHPDHDLFGSLPGAGSKLAPRLLGEIGSDREQYPEARGLQCVAGTAPVSFESGKTRRAKIRWHCNRHLRHAVHLWADCSRKFCAWAGTYYKAQREKGKSHACALRCLGQRWLKILWKIWQSRQPYDETIHALNQQKHGSWLLQLKPKTT

SEQ ID NO: 198543 - protein, 301 aa, unidentified
MLDVCVLPTGEFFRISNDSAGIATLRKKLKPLSPQRVVMEATGGYEAEAALALGLAGLKVCVVNPLWVRNFAKADGQFAKTDKIDAGVIAKYGQCMLPKLRELATKEVRDLDALVTRRRQLVQMITSEKNRMGVSARALRPGIQTHIAWMKQEVGRIETDLDQVIKATAGWEEKVELYTSAPGIGLKTAHSLIAEAPELERISAKQITALVGLAPYPRESGVFKGTRRIRGGRISIRCMLYMATLSATRCNPVIKAHYTQLRARGKLFKVAMVACMRKLLVILSAMARSKTPWNPAFASAA

SEQ ID NO: 198544 - protein, 431 aa, unidentified
MSKFFYRPTVGIDVSADFSVVAILAPDGEVHRKPFKIMHNRNGFDYLVDQIKKAEEEFNMKTAIFMESTGVYHLTLFHFLKDTFETCILNPLITNCNKNVDIRKVKNDKKDALTIANIGKFQDVKYTSVFDVEIYTLKSLCRDYYKFTDSKSTFKKKLSTDLRVIFPSYSTIFSNITGKTSIAILKEYSSPESILNADKNELIKLISSNSRKGQVHSEKIYKKLIDAAEEAVYIGLKSPSLFVKIINTISIIESLETQIENLLKEIHVLMRSNRISDAFKKNVQLIYSIPGVGELTAITIMSEIGNINGFVKPKHLVAYFGIDPSVNQSGKFNSDRNTMSKRGTRIGRRALYAVALASIRTCRNGEPINKVLLNYYKENLNNKSKKVGLVAIMHKLINYIFSVLKNQKEYELRDPKIHAKIHLNNKSNKAA

SEQ ID NO: 198545 - protein, 415 aa, unidentified
MLKIVYRICCGMDVHKSFIVACIASTNEQGVTTYKSKRFSTFTGDLRRCAAWLAENNCKDVCMESTGKYWIPIYNILEQTCNIALAHPKYVKTIRGKKTDKRDAKWIADIFKHDLVAGSFIPPADIRQLRDLFRYRWKLTSFTTGEKNRVQYCLTVSNFKLDDVFSDVFGKAASAITTRILENPTKKITDVSAFRTKGMKATNEQVLAAVDGEMCEEQAEKLRIIRSHMDSLQRCKLNLESLILSTAEKYIPQLNLVMTVPGIQSFAAIGIISEIGVDMSVFPTSKHLCSWAGLTPQNNESAGKKKTTRISRAGAYIKPLLVQCALCAIRAKQFPEVRNRYLALKRRRGHKKAIIAIARMLLTAIYNILKKNEPYNSELYRKSDRPPAHREVSLEEEAIFLLQRQGYLVAAPPIA

SEQ ID NO: 198546 - protein, 414 aa, unidentified
MDVLHERCAALDIGKRDLKACVRTPSPSGRRSRRQEIRTYPTVTNSLLELREWLLVEKVTLVVMEATGDYWRPAFYLLEDCLNVILVNAAHAKGLPGRKTDVADAAWLCQLGECGLLRASFVPPEPVRHLRDLARYRSTLTGERTREAQRLEKELEDAGIKLSSVATDILGVSGRAMLDALIVGERDVHVLAGMAKARMRPKIPALVEALTGNFGAHHAFLCRLHLERIDQLTAAIGELSVRIEEEMRPFTRQLELLQTIPGVGRTVAEVIIAETGGDMARFATAGHLASWAGVCPGHHESAGKRRSGRRRHGNRWLGAALGTAAMAASRTRETTYLGARYHRLVPRLGKKKAVVALEHSILTAVWHMLTHDVTYHDLGGDYFTRRDPEQAMRRLARRANALGFTVRFDPIEAA

SEQ ID NO: 198547 - protein, 387 aa, unidentified
MRKSITHVGLDVHKDSIVVCLADAGLRGGRGEVREYGKIANTATAMERLVRKLAGKGNELRFCYEAGPCGYGIQRQLSGMGHACDVVAPSLIPRKPGERIKTNRRDAIKLDRLHRAGELTPVWVPDQTHEAIRDLVRARLAAARELRRARQQLSSFLLRNGQVYHRTPWTVSHRRWLASLRFDQPMHYLVLEDAIAAVEAAQERRQRLEAQIEAALPTWSLASVVRALQSLRGVALVAAATLAAELGDVTRFDNPRQLMAYIGLVPSEHSSGSTRRQGGITKSGNTTARRMLIEAAWSYRFPARISREQLLQQEALAKPIRDIAWKAQDRLCRRYRKLVRSGKLTTVICTAIARELAGFVWAIARAVGGSGSGKSACNLAVHSVAVS

SEQ ID NO: 198548 - protein, 398 aa, unidentified
MLSIGIDVSKGKSTVCGMKPGGEIVYTPFEVQHTREGMSELVSLLRGSGEEVRVVLESTGSYHCPVVAALLENGIFVSVVNSLRMKRFCSQSIRRVKTDQIDAMQIALYGLAYWPELQPTRLPENTYRELQLLARQYYQMTSMLIKAKVDFNAICDQVLPGMQELMNDHAGRHKLSDFVLRYHHTTHILEMGETRFRKDYCKWAEKKGYRNHERMAALIFATAQNGIPVLPDAPSTQIVITEAIRVLHTVEASRDAILTQMQALAKTLPEYSLVREMPCIGDTLAPRLIAEIGDVRRFHSKRALIAYAGIDAPPYQSGKFCANNRHISKRGNRYLRKTGYEVMQSYVMHKPANDPIFTFIEKKRGEGKSGKLAMVAGLNKFLRVYYGKVTELYRSLPQ

SEQ ID NO: 198549 - protein, 326 aa, unidentified
MAILGLDIGKSKFDAHLLLDDKAASIHLTNDQAGFDDLRTWLERQNPGGRAALHACMEATGNYGLDLAVFLHGQGIKVSVINPKQIKAFGQAELRRNKTDKLDAALIARFCRAQNPAPWTPPLPHLRDLRELVRRCAALKMTRTQELNRQKAGLSSPAVQASIARSLAYLEAEIEAIASDIRDLIAGDMQTRHQAELLRSIPGIGEVTMAVLLAEIPNIAEFEPKGLAAFAGLSPAEHSSGTLTRSAGISRIGNANLRSALYLAALSASRHNPILRVVAQRLKNAGKPNKLVLIAIARRLLVLAHAVIRTRRPFDPNHVNANPANA

SEQ ID NO: 198550 - protein, 341 aa, unidentified
MDSLWVGVDAGKQHHHAVAIDADGTRKLSRRVANDEASMVELVDTIGRIAAAGRVTWAVDLNSGGAALLLALLIGRGEQVFYIPGRVVHHAAGGYRGDGKTDAKDAAIIADQARMRRDLQPIQVNDEISSELAILTSRRTDLMRDRTRTINRLRALLSSYFPALERALDISNVKGAVILLTGYQTPDGLRRLGPVRLEAWLRKSKAYNASSLAQLAIDAARSQHVRVPGQDAAGATVAKWAHHIRYLDREMAEVDRDIETRFRRHRKAAVIESMPGFGPLLGAELFGATGGDVSVFGTADRFAAVAGLAPVPRDSGRVSGNLHRPRRYDRRLCGRRISRRN

SEQ ID NO: 198551 - protein, 350 aa, unidentified
MKKITVGIDFAKEKFDMTAINVCNGASIHAQFKNAPSGARDMVRTVKKFAKGTNSSEWLFCGEDTGYYSQTVTRYLAEKGFFMWQQNAYSIKRSEGRIRRGKDDKADSRTIAEYAKRFQDMAVEYKLPPKEQEELKMLLSQRDLYVSAKTKLQNSTSEIPDRKTQGEAVRLIKAANKRLCRQIGQEIKRIEKKMDEIIGSVQEIKQNYDILTSFTGVARINAITFIVYTDNFAKFELNARKIATYWGVAPFHKESGSTLHTAPHVSGFCNKQLKALISNAATVAIKFNPVIKAYYNRLLEKGKCPMIAKNNVKNKIIHILTAMIKNKQKFNPDKIFTQIQSVKTVNLLVS

SEQ ID NO: 198552 - protein, 343 aa, unidentified
MDHFAGLDVSVKETSVCIVDDTGKIVREMKVASEPEALLAVLKNPTYHFKRIGLEAGPLSQWLYSALAEAGLPVICVETRHMRAVLKAQINKTDRNDARGIAQMMRVGLYRPVHVKTLRSQKLRMLLTHRKLLQSKAIALENDLRGTLRNFGLKVGIAGKIKFEARIKELLENLPDLADLVEPLLVVRRVLREQLGILQRRLLAIVRDDEVCRRLMTTPGVGPVVALTYRATVDVPVRFRKSKSVGAVFGLTCAKYQSGEIDQSGRISRCGDEMMRVMLYEAAQSMLLRSTRWSWLKAWAMQIARRRGMKKAIVALARRLAVIMHRIWVDRTEFRWTREVAAV

SEQ ID NO: 198553 - protein, 317 aa, unidentified
MTTTTAQKFIGIDISKDTLDVAIWDSDVFWQFNNNARGIKKLVQRLKKHASALIVVEASGGLEQPVVRELYQEDLPIAIVNPTRVRKFAHSTGQLAKTDKLDAKIIAQFAQAVRPKVRPLRTAQQEHLDALVTRRRQIVDTITAEKNRLSTTHPALRKRLKKHIDWLEEELQALNDEIDKFIQQSAEWKQKAAILKSVPGVGPVTVSTLLAELPELGTRNRQQIAALVGVAPVNKDSGKMRGKRRVFGGRAPVRRVLYMATLVATRVNPVIRFFYERLLAAGKEKKVALTACMRKLLVILNSMIRNNRSWNPYLVQG

SEQ ID NO: 198554 - protein, 315 aa, unidentified
MVEQVVVGIDVSKVKLDVALSPGGEQFTVSNDRHGIGELLRRVSPLAPSRVVLEATGKLEQLAVSELAAAGLPVVVINPAQVRHYAKARGKWAKTDPIDARLIAEFARDLEPELRPLPDAETQALAALCQRRNQLLEMEQMEKSRLQRAPRANQKSIKAMLRFVRRQVEQVEKQIEHSIRHSPLWQAKRELLESMPAIGKVNSSTLLARLPELGQFTRQKICALVGVAPYNDDSGQWHGRRHIAGGRAGVRQVLYMATLSAVRCNPALRDYYQRLLGRGVEPKAALIAVLRKMLTILNAMVRDNTPWRPPCSTPA

SEQ ID NO: 198555 - protein, 311 aa, unidentified
MEHHCFVGIDVSKAHLDVYVRPLGESFRVSHDDAGFATLLARVVPLAPAVVVLEATGGYEVTVAAALAGAGLPVAVVNPRQIRDFARATGQLAKTDALDAQVIALFAEAVRPVARPVPDAQARALGELVARRRQLVDMLTAEQNRRRLLRDLRLQAHLDSHLAWLGDALDRLEADLKTLIRSTAIWRETDELLRSVPGVGAVTACTLIAELPELGHLDRRRIAALVGLAPRARDSGTFRGRRMIVGGRAYIRRILYMATVAAIKFNPVIRAFFQRLVAAGRPGKVAVTAAMRKLLTILNAMLRERRPWQLA

SEQ ID NO: 198556 - protein, 386 aa, unidentified
MIILGVDPHKRVHTASAVEPMANRQLAALEVEASLAGYRRLLRWADGFRERRWAVENARGLGRHLAQWLVARGEVVDDVPSTATARVRELSRGGRRKNDVIDAAAAASVAALQGDSNRVVAEDLSTVLALLDERRDNVVTQRTRLVNQLHALLRDLVPGGAPIDLTSATASRLLTSVRPAGPVETARKQLARDLVAEIRNADQRLKALTAQIANTVAATGSRLTEVDGIGPIIAGRLLGRTRRASRFATASAFASYAGVAPVEVASADRARHRLPRGGDRQLNHALHIVALTQVRMRGSSGRGYYDTKIAAGKTANEAMRCLKRRLADHVWRLMIRDERAQATGPGGHSGATLQSSAAGSTPAASSSDKSLPEPANTDSTTSRSAA

SEQ ID NO: 198557 - protein, 348 aa, unidentified
MTIVVEAYDFVIGIDTHARTHTYAIINTCTGARIGCETFPVTNNGMNRAVSWISRNTHGQTLAAVEGTNSYGSSIRRTLAKANIDVAEVKPPRKRTRYGVGKTDQIDATAAAMSALGTELTSLLHPRDDGARAAISVLLAARRRVEEQCTADRNALNALVRQIDLGLDSRKALTDAQITDISNWRLRESDNVEQRIARAEAVDLAKSIQIFHTRSKEIKSELAILDEQLAPRMQSQLGMGPVTVGIILAAYSHPGRIRSEAAFAALAGVAPLEASSGNTKRHRLNRGGDRQLNMALDIIIKTRMRLDEATKAYVERRTAEGRTYREIKRSLKRYLARSIFRQLERLMS

SEQ ID NO: 198558 - protein, 261 aa, unidentified
MDNFYFIGVDVSKKKLDFCVLFEGKVLREEQVSNHQQAVARLIGELKNDLEMDNEQFLICAEHTGQYTFPLVCACKSVECKLWLENPSQIKYSSGMQRGKNDKVDAKRIAIYASRFGDKVKYYDRPSEEIERLKQLERERALYVTDLAKYKGQMYDQKDFMPAALYRKKTKRMKGLIQELQAAIDAITAEMEKIIGSTEVLARQMELLMSIDGVGKVVALNVIIETEAFSRFDNPRKFCCHAGVAPFSYTSGSSQHSKNKV

SEQ ID NO: 198559 - protein, 350 aa, unidentified
MMIIGCDLHTRYQQIAMLDTETGEEVERRLEHESGEARTFYSSLQGPVRVGIEATGHTHWFEAMLAELGHELWMGDAAKIRASVVRKQKTDARDAEHLLNLLRQDRFPQIWRPSPAERDLRQLVWHRQKLVWMRGAVKNQLHALAMGEGVCRKKKLFTVKGRKELEALALGPWASYRRQELLRMFDELAAATAQLDVAVEQAAKNQPLAVRLMTHPGVGPVTSLAFVLIIGPVERFERSKQVVSYLGLNPQEHSSGGKQRLGAISKQGNPMMRSLLVEAGHTAARFDPALKRMYQRLKFRRGTSVAKVAVARKLAVRMYWMLRSTADYAQLVRMQGSPWATLVENSPSLG

SEQ ID NO: 198560 - protein, 342 aa, unidentified
MSIVYVGLDLGSSAFQQVALKSNGSIEVNRSFTTSEANLRAAFADQQGEIQVHLEAGELAPWAASIIAPLVTRVVCSHPQSNAWIAKDADKCDRLDAYKLAELLRLKHFKEVHYSPDQRRRNFKQLVQHYDELTSQQARLKTKLKARLRMQGVIVSGARVFSSSGRKPVLAEVKSAEVRTAIKQLYAVLDQSVMSQTEARLLMLRAAQAFAEIRIFRTAPGVGPIGACRFSAYIHTPNRFSSKRKLWKYCRLSVSHRSSNGKPLRRPRLDRCGCGCLKDVSRKAFEAAMRERKDNGFKRAYQRALETTQDATHARLTVQRKIVSTLRAMWLTMTPYCDELMP

SEQ ID NO: 198561 - protein, 414 aa, unidentified
MGLPRWVGRAIGLDVHRDFCVVAICEDGVVRSAGRVPSTPEGLLTLAESLLPTDRVALEVTGSCWEVARLLEPHVERVIVVSPDDTGITSARAKTDKLDARTPASLLWKGELEAVWMPDDRCRVLRRRLARREQLVHSRTRAKNEIHAVLQRRLQGKPPCSDLFGVKGRQWLAGLELPPEERESVDAGVRHVEFLDWEIAEVERLIAKQALAWPEIRRLMSVPGVNLVCAASFIAAVGSPNRFLTSRKLVAYLGLDPKVRQSGEAPTRSGRISKRGSASARWALVEAAWTAVQQPGPLHAFYERTRGRRGHGKAIVATARKLAVLFWCMLTRDEDYAHQQPSLTNKKLRRLEITAGAPKYAKTARGTWNTNVAMRQAERQLAEQAEASYKRMVKDWQAGAPTRKTGASATPERA

SEQ ID NO: 198562 - protein, 403 aa, unidentified
MRSVLSIDVANGKSEVLLVTEYGEVLIEPYEVKHCLSEFNLLKEKIDNFNLNDLTIFMESTSTYHLPIQRFFTKNNYNVQVINPILGKNNTRNLRKTKTDIEDCYNLADLFFKNTVKIHTKTMNDIYSSMIELSRQEKHLTESLVRSKNRFKQIIANAFPEYLKCFTASNIYGETSLNFIKEFPHADIIKSKRIDALANNIYKSTKGYLPYSKCLNKAKKIKELANNSYPGIDINSCEVKNLINIIEIISYGDAKLFEVKQDIIKLAKQTPYFNIINSIYGVGETSTAQIIAELGDINRFENIKQLNAFCGLDPTIIQSGKSINYNGPISKRGNRNARKILFITCCSIIRASVLHNVDNDLLLYYRKKQAENKHFKECIIACSTKLLRTIFAMCKNNSLYVQK

SEQ ID NO: 198563 - protein, 341 aa, unidentified
MKQEMTVLGIDLAKHVFHAVGMDNTGKIVFRKRFSRHDLIPFIAKLPIVLIGIEACGGAHYWARRFRTYGHEVKLMAPQFVKPYVKSNKNDSRDAEAIAEAVTRPTMRFVPIKDVDQQDIQALHRVRERLIGERTALVNEVHGLMQEYGIVMPKGVAKFRQAVVEKLESEKDKLTALSQEMFWKLVEEFAALEKQLAYYQEKLDTLATTHPECQRLMTIPGIGPLTATALVAAVSDASAFKNGRQFAAWLGLVPRQHTTGGKERLLGISKRGDTYLRKLLVHGARATIRWVGRKTDRRSQWMRHLLERRGKNRTAVAVANKNARIVWALLTSHQDYQPVPS

SEQ ID NO: 198564 - protein, 349 aa, unidentified
MSEISRIGLDTSKAVFTVHAVDAEGQPVLRVNLRRAQVIPFFKKQPAIVVAMEACGGSHHWARKLSALGHEVRLIPPQYVKPYVKRGKNDRNDAEAICEAAGRPGMRFVLAKTEDQQAQGMVLKVRTSLVEQRTQLINALRGHAAEFGMIAAQGTGKVAALLAAIETEATIPPIGKEMLALLGQQIEHLDGQIKQLEAKLAAMHKANAISQLLATAPGIGPIIALSFAIEVDPAAFESGRHLAAWLGLTPKEHSTGGKQRLGGISRAGHERLRALLVNGAMAVIRAAERPGSKLATDWLLRLLARRPKKVAAVALANKMARMIWAMMTTGEAYRRPATAAAARRPAVIS

SEQ ID NO: 198565 - protein, 355 aa, unidentified
MTSIKYIGMDVHKESISMAVMNAAGKIVMECVIETKASMILQFLDGLGGDLHVTFEEGTWAAWLYDLLKPHVTRLVVCDPRKNRSMREGNQSDKIDARRLAELLRLDHLNPVYHGEHGLRTLKELVRSYLTITKDLGRVMSRVKALYRSWAIPCTGKQVYTSRHRAEWIAKISEPGVRRRAEFYYQQLDALRSLRREVRRELLEESKKQKAWKRLCQIPSIGPIRSAELLGILQTPHRFRTKRQLWTYCGLGIETHSSADHRVVEGQLQRAKKRVEVRGLNVNCNHDLKNLFKGAAVVAATKPGPFGEFYAELLAKGIRPEMARLTLARKIATIVLIVWKRGVCFDAHHLKPQTA

SEQ ID NO: 198566 - protein, 430 aa, unidentified
MEIIYPRACGVDVHKSFIVAVICISESVKPKYIKKRFSTFNNQLIQFRDWLIENNCHNVCMESTGKYYIPVYNALEAHISNVVVANPKWVKAIKGEKDDNRDAKWIADLFKFGIVRSSYIPEKNIRILREFTRYQYKLVNIRSSEKNRFQNALTVGNCKIDLVFTDVFGKSASSIVDTILSDDPYTSEDILSKVHCRCKSSSEDILSAVDGTDLNPFQKERIRIVQKHMEYVDSLLNEIQHHIDLMVSAYENHIRLLCTIPGVNRKSAIIIISELGIDVSQWTNARKLAAWAGLAPGCNESAGKKKSVKISKAGIYLKPCLVQVAHAAVKDKECSYYAEKFGRISKRRGKKRAIIAIARKILVAIYHILKTGEVFNPSDMADVETTKEQRIAYIKNNLRNAFNQLSRTGLSEEEILQTIIKKSNNSPQTE

SEQ ID NO: 198567 - protein, 356 aa, unidentified
MSHEVKYIGMDVHKEAIVIAVLNGSGKLVMETIVETKASSILQFIHGLRGELHVTWEEGTWAAWLFDLLQPQVQEVVVCNPRRNALLKEGSKSDKVDARKLADLLRTGMLRPVYHGENGLRTLRELGRSYQTIGKDLTRVMNRLKALYRGWGIACAGTQVYAPRCREEWLGKIPHAGVRRRAELLYQQLDGLQALRREVRREFLEESRKHKAAKLLRQIPCIGPIRAGLLIALMQTPYRFRSKRQLWTYSGLGIETHDSAQYRYVGGQLQRSKKPQQIRGLNRNHNHAMKEIFKGAATRASCSTGPFRDFYAALLTKGMKPEMARLTLARKIAAITLTLWKKEERFDAEQLKTQAA

SEQ ID NO: 198568 - protein, 408 aa, unidentified
MADDGRHGEVRYLGEIGSDTESVRRLVAKLEKRDARLHFCYEAGPTGYGLHRQLTTLGHLCTVVAPSLIPRKPGDRVKTNRRDALQLARLLRAGELTAVWVPDEAHEAMRDLVRARDGAVDDLRRKRQSISSLMLRQGRCYPGKKTWGARHLRWLQEQNFVHPGQHLVFQELLLAARHAGERLQRIEVAITEFLPNWSLAPVVQALQALRGVNLVTAAVIMGEVGDLRRFESPRQFMGYLGLVPGERSTGDAVRRLGITKAGNGRVRRALVESAWSYRHLPRIGKAKHYVHERLPPTVRDIATKAQARLCDWRNSGRPSQYFETATWGDQPRPRAAALDGQVGGGRLEHLLADPAGIAGPHVADHLQPGRDLLQHLGRVLAEAGELAPVAEIPIVGPKFSSMTHVADD

SEQ ID NO: 198569 - protein, 320 aa, unidentified
MQTPSVALNIGADVGKDEIVMACAERSFAPRKIDNRRAALLAFLKGVPARSRIGLESTGSYHELLAELAHKLGFVVYVLNPKDTRHYAKAMGLRGKTDRVDAELIARMLAHEHEKLHPWIPPTPEQRQINRLLKRRAKVSRIRAALAQSFKGLKGFSGELKALRQRLDKLLARIDAEVKALIETSVERKQDYARLRKITGVGAVVGSSVLNTLERVPLGSADAFIAFTGLDPRPDDSGQHRGRRRLSKRGPSELRRLLYLAAMAAAKTKTWNPLYVHYRAKGLSTTAALVILARRIARTAWSIYTHKTDFDPKRLTKALT

SEQ ID NO: 198570 - protein, 468 aa, unidentified
MPAGQQVQVEDHEQIVERVAAVDVAKASGMVCTRMPHATKAGRRVTTVWQVGSTTNAILELAEQLAGQGIQRVVVESTSDYWRGFVYLLEARGLVVWLVNARDVKHLPGRPKTDKLDAVWLAKLNERGMLRPLFVPPAQIRRLRDYTRLRADLTADRSRHKQRLEKLLEDALIKLGTVATDIFGVSGRAMLEALIAGQRDPKVLAELARGRLRVKHAALVEALTGRFDDHHAELARMLLDQIDALSGQIDQLTSRIEQAIAAIPAAQPPASDPGGGPDAAVQAGSQPARSVPGAVDPETGEILAAPLPALDRLDEVAGIGRHAAQVLIAEVGLDMGQFPTPAHLVSWARLSPRTIQSGAKHRAGATGKGNPYLKSVLGEAAAAAAKTDTFLGERYRRLVRRIGKLKALVAVARSILVIVWHLLSDPTARFHDLGADYYASRIDTGRKTRNHVRQLEALGYKVTLQPAA

SEQ ID NO: 198571 - protein, 319 aa, unidentified
MEILGIDVGKHEMHAVLLQHERSTSRSVANSATGFKQLQTWLRNRKVERVHVCLEATGGWSEDLALVLHKAGHVVSLVNPTRIKAFARSEMLRTKTDCIDAALIARFCRMHAPEPWVPPAPEIRMLQGLVRRYQSLIQMRTEVQNRLQAPMITSVVKASIKATLTHLDREIERVDHEIEQLFKHYPPLRRQRDLLTSIPGIGETTAARILGEMPNIAEFRDVKAVAAYAGLSPRHYESGSIRRPSRIAKTGNANLRTAPYFPAISAMRYNPLLRRFADRLRERRKSNMAIITAVMRKLLTLAYGVLKSGKLFDPTYASH

SEQ ID NO: 198572 - protein, 389 aa, unidentified
MKIFVGIDIAKLNHFAAAISSDGEILIEPFKFTNDADGFQLLVSKLESFDKNSIIIGLESTAHYGDNLVRYLVAEFYQVCVLNPIKTCQMRKNNVRKTKTDKVDTFVIAKTLMMQDDLRFITFFDLDMMDLKALGRFRQKTIKQRTRLKIQLTTYVDQVFPEIQYFFKSGLHQNAVYALLKEAPSPKEIASMHMTHLANLLKVNSHGHFTKEQAKELRVLAQKSVGANDSAISIQITQTIQQIELLDSQLQKIEAEITDIMEFNDSVIMTIPGIGYINGGMILGEIGDIHRFSNPNKLLAFAGLDPSVYQSGNFQAKTTRMSKRGSRVLRYALVNAAWNVVRNNATFKAYYDAKRAEGRSHYNALGHCAGKLVRVIWKMLTDEVEFNLE

SEQ ID NO: 198573 - protein, 354 aa, unidentified
MEKISRIGMDTSKQIFQLHGVGEAERVVLRRKLRRKEMMAFFAALAPTTIGIEACGGSHHWARELTRLGHEVKLIPPQYVKPYVKRGKNDAADAEALCEAMSRPTMRFVPVKSAQSQAALMLAGVRDRLVRSRTQLANAIRGYAAEFGLVAAKGPARIEPLLARIAADETLPALARELFAEQAKEYAQLGARLTAVDAKLMAWHRQDERSRRLTRIPGVGPIIASLLSMKTPDPHAFRSGRQFAAWIGLTPKDHSTAGKVRLGVITRAGDEALRSLLVVGATAVIWQARRGRGKPSPWLVDLLKRKPPKLAAVALANKIARIAWKLMTTGETYDDLSRTRSGTGRALGATAKAA

SEQ ID NO: 198574 - protein, 366 aa, unidentified
MSEITRGPIVRVGVDLAKRVIHVVAVDVAGRVLTSRQLPREKFLSWCAQLPAGCTVAMETCSGAHHWARKLVAMGLQPRLIAGHFVGAYRLGGRSGKNDAADAAAICEAASRPSMRFVPVKTVDQQSMLAVHRLREGYKEERTACINRIRGLLAEFGLVFPQSPEALRGVLSDVIEDASNELPGIARLALNRAFQHWVELDCHVAWCDERIADHVRRDERARTAKEVSGIGPITASAVVASVADFKQFRSADQFGAWLGLVPKQNSTGGKTNLGSITKRGDEYLRTLLIQGAKSAVMTAHQRSDRISQWVVQLKARAGWQKAVVALANKNARILWALMTRDARYDPQHVPIPPGGAVLTPTPPCPA

SEQ ID NO: 198575 - protein, 383 aa, unidentified
MCTDQAYTGTEEQVLAVSLELAAAKWKVALHDGHREQPAVHTVAQPQASARLQAVLDLIEQHKEKWSLPAGVRVVVSYEAGQDGFWIYRALQARGIECYVIDPASIPVERHKRRAKTDRLDVIKLVTNLRAWLRGERDRMHVVHVPSPQDEASRHLMRDRGQLQKEVLQHCDRMRKLLATLGCWDEVEHRHFAGRLARDEVKCHDGAPLPPEMRERLLRECERLALAQQQLAKLEKTRQASLPAPARQRRDHLARLRGIGEVGASRLALELFWREFSNRRQVGACTGLVAQPYDSGQSQVDQGISKQGNRRVRALLVEMAWCWLRHQPDSALTRWFNERTQSTGPNRRARRIAIVAVARRLAIALWRYLKDGEIPEGARLKSA

SEQ ID NO: 198576 - protein, 411 aa, unidentified
MAMRKREDSPEVFPNAAGIDIGGSSHWVAVPRAAADEPVREFGTMTDDLHAMADWLLACGVDTVALESTGVFWIPVYEVLEQRGLTVWLVDARQMKYVPGRKSDVLDCQWLQKLMSLGLLRAAWRPGDEVCVVRAIVRQREVLLAEQSDWVRRMQKALVQMNIQLTEVLSDIMGMTGQAIIRAIVAGERDPKVLASHRHGRFKASAGEIQRALTGNWREEHLFVLRQALAMYDDIARHLGECDAHLQALLDKRIRHQVDLGRPPRSDKQRLEFDVRQRLANWAGVDLTRIDGLGVGTVTTLLSEIGPDLSHFANVKHFCSWLGLCPGTKISGGKVLSARVKRSANRARQALKMAAMTLSRSDSALGAFYRRLCARMDKPRANTAVAHKLARMVYFMLTRGEDFVDQGTATL

SEQ ID NO: 198577 - protein, 428 aa, unidentified
MDEVNRNRLEEFRQLRQEIRHSEEHLVVGIDIAKDRHHAFFGTATGKTLLRRLVFSNDHEGFRKLLDQAETLRVRHGLKKGVYGMEPTANYHKPLGEYLISLGRTVVLVSGVTVKRNRESLDGRWDKHDVKDSANVADLISQGKCLYYEYPSAELRGLRGLLSLKRRLKKQEHGYRVRIRNHLIAQYFPEMDRDYERLGAAGLSVVRWCFPTSQITELDVEPFIERVTSRRIRMETRRRLEGVWEKAGASIGCEGVPGVDHEAKVMVEGLRQIREVIKETEDKIEELCNRFPEYPYLLTIPGYGPDVSAKVLGAIGDPDRFQNGKQVLKLAGLDLSADRSGKDSDKAIPKISKRGKADLRYALYQAALIASTKNPDFMRYYASKLEGRQKEKGIQTKMWVKLSAKMLLIAWTLMKKKEAFDPAYLTAE

SEQ ID NO: 198578 - protein, 444 aa, unidentified
MSRKQRKHIRGKRGEAFLQIVRGVDRARILCVSLDISKYFHMVMMHNAYGEIVLPSFEIDIFRSGFEHLCRVIDETATHMGAEVVLIGMEPTGHYFENIARHLHARYEHVYLVNSLAVKENRRQKMMHYEKTDEEDAAAIGDLLCRGEGTPYRPVEGIYLEMQHIDRVRIAKLKMRSALKNQIIGHLDRIFPGMIISDKEAQQRHPPLFTTPFWSCQMAQHLVRVCPDPRRLSQMTPHALIDAFHEQGYRMGPRWAAKIIAFAQQTLHPDPEVIAVRSPLLQQDLALLEQVEGHINQLEERLRALLSLTPGYIWTRLKGVSSIQVASLVAAMGDPSHYDYAAQVFRRSGLVSGRNDSGTRQRKGKGKHVTKVGDVYLRRALINLVETLSLHQPILGDYRSRLKDVKPHPSVARVATVRKANGILFAIQRDQRINDLRVKKEPPM

SEQ ID NO: 198579 - protein, 423 aa, unidentified
MKRSRKKLVQFNSLIVGIDIAKNKHWAQLMYQGEIVGKPFPVENTTEGFKNLVSILETKQKQIGAGNIIVGMEPTGHYFKPLAYYLKETGMCDLVLVNPFHVNRSKELEDNSPSKTDPKDARLIAKLISQGSYFSSQLNVGIWAELRAANVNRLRLTNKRWQLKCQLITVLDQYFPEFETVFKNILGKGAIWILTHYPFPDDIVEAGEQTLCQGLRSATHNRVGLKRAVQIREAALSSIGIREGMESARIEIAHLVEELSIIQRHLDETETLMSELLNKTGLAEYLTSIPGVGMVSAAAFLAEIGDPNNYKSYKQIQKKAGLNLKENSSGKHKGKTTISKRGRPALRQLLYQIAFIAVAKNQEMKVVYEYLKKRPENPLAGKQALIAVAVKMMKIMLAVAQKQEHYDGNKVGDQNLVARFQTA

SEQ ID NO: 198580 - protein, 418 aa, unidentified
MEIIFERVAAIDVGKKIIAVAVRTPGERAGTRRQLVRKFNTYYRTLVEMVAWLVAEGVTHVSMEATGVYWRPVFHALCEAERPLEVLLANAGHVKNVPGRKSDALDAVWLAKLTECGLLRGSFIPPPEIAVIRELTRYRKKLIEARTSELQRLGKVLEDSGIKIDSVASKLTTLSARDMIEALINGERDPGVLAELARGRMRSKIPDLTMACAGRFGAQHALMCTLHLEHIDHLTDMIARLDTRIDEASLPFVEQTELLATIPGLGERAAEVIISEIGVDMARFPTAAHLASWAGLCPGNNESAGKHRSGRTRKGSKELCAILTECAWAAGRTNTYVGAQFHRFHRRFGKKGGHKAATATAHTLIVIIWHVLAETTAYRDLGSDYFTRHIDSPDARKRRLIRELEALGHKVSIEPTVA

SEQ ID NO: 198581 - protein, 350 aa, unidentified
MIIGVDYHPSFQQIAFMDQATGEYGERRLNHSDGEAEKFYRELKQPGVSVRVGIEATGYSRWFERLLVGLSIEVWIGNAAEIKAKRVRKQKTDREDARLLLRLLLENRFPRIWVPSPENRDLRQLLWHRHRLVQMRTRIMNQLQAIAMNEGQRWKKKLFSEQGRAQLEKFPLAAWASRRRQDLLELLDRMDPTIEELTAAVEQEARKRPEVLRLMTHPGVGPLTALAYVLIIGTPERFPGGKQIGSYLGVIPSEDSSGGRQRLGHISKQGNALLRFLLVEAAQAAARCNPHWRRRYVHLAMRREKSIAKVAMGRRLGVRLYWMWRNGLEYSQSIEFGSYAGKLVIGHGVN

SEQ ID NO: 198582 - protein, 402 aa, unidentified
MNSVGIDISKGRSTIAVMRPFGEVVISPFEVRHTDSELSKLARRLKSLNGETRVVMEATGNYHAPVAKLLHDAGLYVSVVNAKLVHGYGNNDLRRVKTDRKDAVKLANYGLDHWLTLPRYVPEEDTRLMLKTCYRQYQQYSKVQTMLKNNLISLLDTAFPDANRLFTSPPRADGSEKWVDFVATFWHCECVCGLSKKAFTAKYQKWCRKHGYNFSQDKALDIYASACGRFGVMPKTNTAKLLVEQAISQLQTTSAALAALKQEMQSLAASLPEYPVVMGMFGVGPTLGPQLIAEIGDVRRFHSKKALVAFAGIDAPPYQSGQIDVRSRSISKRGSASLRRTLFLVMGVLLQCAPMDEPVYQFMNKKRSEGKPYRVYMMASANKFLRIYYASVKAYLESLEHD

SEQ ID NO: 198583 - protein, 370 aa, unidentified
MQFIGVDLHTNKFTCSYRDEHSAPDAKKGNRTETFELNGHGLAEFYQTLTGDDYVLVEATITTFAFVRLIRPFVKEVVVANTYELKQISQARNNTDKIDANILSRAIKMQVLSGEQAISPVDVPPEGIQELRGLFTTYRLYKKQTSQIKNRIHSLLKEKLYGFTQEEIFDRKSREKIRKLESGTPLAFQVNDLLNLLECMEAHVGPLQEQIMAQAEPYMREIEILTSMKGVSVFIAIAVIADIIKVDRFRNSKAFTSYLRSAPHVSNSNTSVKVKGTNKKGRKLAATLITQSLNHVLDASEKLNRWYTQLTRYKKAGLVRTGLRRRVFAEMYQMLKKGEYHYGREAQKHEAKLSQYRRFLKKRKILVETA

SEQ ID NO: 198584 - protein, 468 aa, unidentified
MPDGQQVEVEDHEEIVGRVAAVDVAKASGMVCTRVPHESKAGKRITRVWQVGSTTNAILELAEQLAGEGIERVVVESTSDYWRPFVYLLEARGLAVWLVNARDVKHLPGRPKTDKLDAVWLCKLNERGMLRPSFVPPAQIRRLRDYTRLRADLTAERSRHKQRLEKLLEDALIKLSTVATDIFGASGRAMLEALVAGQRDPRVLAELAKGRLRVKHAALVEALTGQFSDHHAWLARMLLDQIDALSGQIDQLTGKIEQTISAIPAAQPPAPGPGGGAAAPVQAGIGPAQPVPGHVDPQTGEILAAPLPVVDRLDEVAGIGRHAAHVLIAEVGLDMGQFPTPAHLVSWARLSPRTIQSGATRRAGATGKGNPYLKSALGEAATAAAKTDTFLGERYRRLVKRIGKLKALVAVARSILVIVWHLLADPTARFHDLGADYHTSRIDKGRKTRNLVHQLEALGHKVTLQPAA

SEQ ID NO: 198585 - protein, 416 aa, unidentified
MENDVALVACVGLDWGDARHAVQLQGVDGGAVESLDLEQKPDVLHAWVAQLRQRFHGRPVGIAVEQRKGAVMHALMAYDFLVLFPINPKALARYREAFRTSGAKDDPTDAALLLDLLRKHRAQLRAWRPDTVEARTLQALCEQRRKLVNQRVALTNRLTSLLKQYFPQALDWVGDVASRQSCDFLAKWPALAAVQRARPHTVRTFYQQHNCRKAAVIDERLRQIASACPLTSDPAIVDPLSLAVQTYAAQLRVVIEAVQAFDARIAEVFAHHPDQALFDSFPGAGPVCAPRLAAAFGTDRSRWESASALQSHAGIAPVTERSGKALWIHHRLACPKFVKQTFHEFADQSIRFSTWARAYYDQQRSRGNDHHAALRALAYKWIRILFRCWKDRRPYDDATYTAALRRHGSALVEKNA

SEQ ID NO: 198586 - protein, 320 aa, unidentified
MMEKTMVIGIDVSRDWLDGFGLSGLERFRLANSAEGHKELILMIRQMSGPVHVGFEATGGQEWALWAALVEAGISTRQLPPAQIKAFAMSRGTRAKTDRIDAELIARFMLFRPEAGRTLPSDNLRILRTLTTRRAQIVDMRKRLSMQIAARQKQGISADVEDMDDVLKALLDTQIGDIESRIESVIAQEETTAVKANLLRSIPGIGPVSAAMLIAEMPELGRMTSGEAAAMTGLAPVPHDSGVMRGRRAIAGGRRALRRVLFQAALAAAYHNPMLKPVAQRLKERGKPHKLVIIAIARRLIAIANAILKTGETWRHQPGG

SEQ ID NO: 198587 - protein, 340 aa, unidentified
MNIATFGIDVGKTWFHLIGLDSRGAVVARERFSRSQLLRYMSRIEPALVGMEASCGSHHLARDLIALGHDARLMSAKFVRPFLKGNKNDYLDAEAIAEAVQRPTMRFVPVKTPEQLDLQAIHRIRSGLVSRRTGVINQIRSFLQDRGITVPPGPAVLARRLPEILADIEGRLMPGIKRLLTLLQQQWLTINAQVAELEAELRDVAERDDACKRIASIPGIGAITATAIVAAIGDGRMFRSGRDFAAWLGLVPRQYSTGGRSTLLGISKRGNSYIRTLLIHGSRCMLRFFKNPATAIGMWVTQLKARTHANVAAVALANKQARTAWALLTQGTFYETRPMT

SEQ ID NO: 198588 - protein, 373 aa, unidentified
MSEIIAACRAFVGVDLHKTTVTLVAVDANGELIAKLTIATKCIDKITDWLRSLPEPVAMAVEACSFVEWFIDRFRWCVFRMEIADATELARLRGKRRKTDPNDARDIAERLAAGRCPLGFIADEELMQLRKLGRHWRQLSHLLSRTKHAMRSLLHAANLAGPKVLDAASGHRWLLGEQHLLKPVQQQMFEDFLNTLALVELQRERLRRQITFANRSEPFRATTELLKTVPGVDEIWACIIAAEIGPFDRFPNADTLEFWAGMTADLKESAGRRQSGNITKAGSRTLRWALCKAGVTLCFSDAKQEATRQRLIKGTGGIKPKANVAMGRRLLRILFAMVRDKTPYHNARPVARNLAANKARAAKRARKSRKEAA

SEQ ID NO: 198589 - protein, 417 aa, unidentified
MKAWTELTHFAALDWADDHHDLVVVDAQGQVALELTFTHNAEGWQQAQQALAAWPGLPVAIETSAGPAVDQLLQRGYVVYPVMPKAAARYRDRKRPTGSKDDRHDAWSLADALRTDGHGWSALSPLDPLTGELRALCRDEITLIEQRTALVNQLQAALKEYYPAALEAFQDWTAPYTWAFVLAFPTPKALAAAGKGKWEKFLHTHKLWRPQTSSQRMEIFARATAFSGAEAITAAKSLLAQGLARLLQTLEQQLAHYRARIQALFDRHPDHDLFGSLPGAGAKLAPRLLAELAGADWSQLSQVQARAGTAPVTYESGKIRRVKIRRACTHPLRATLHLWADLSRHYSAWAAAFYRAHRDKGQSHSCALRCLAHRWLEIIGAMSRTHTIYNAEHHLREIQKHGSYVLQLISSPDPKPL

SEQ ID NO: 198590 - protein, 403 aa, unidentified
MNMNAVGIDVSKGKSMVAILRPYGEIISKPFEVKHTVSGIRSLIEQIQSIDGESRIVMEHTGRYYEPLVRELSKADLFVSAINPKLIKDFGDNSLRKVKSDKADAVKIARYTLDSWTELRQYSLMDEIRNQLKTMNRQFDFYMKHKTAMKNNLISILDQTYPGANTYFDSPAREDGSQKWVDFSATYWHVDCVRKLSLNAFIDHYQKWCKRRKYNFSRSKAVEIYEASKEIVSVLPKDDLTKLIIKQAVEQLNMASQTVEQLRTMMNDAASKLPEYPVVMAMKGVGKSLGPQLMAEIGDISRFTHKGAITAFAGVDPGVNESGSYEQKSVPASKRGSGTLRKTLFQVMDALIKTKPQDDPVYLFMDKKRSQGKPYYVYMTAGANKFLRIYYGRVKEYLSSLPK

SEQ ID NO: 198591 - protein, 328 aa, unidentified
MRYLGMDVAKAKLDCCLLLDEDGVKRKTKSVANSRFGVADFLAWIGKHHVSVAELHVIMEGTGVYHEQAALALADAGVTVSIVNPAQVKDFGRGLAVRTKTDGMDSFVLARYGALLKPAAWIPPAPEARMLQALLARRDAIAQDLQRERNRQEKADATDTPMLIRQSLFDSIEFLSKQLAQLQQDIDQHIDRHPGLKDDLALLQSIPAVGPQVGNNMLAVMHCHDFGSAEQLAAYLGLVPIERQSGSSVLGRAKLSKAGPARIRAVLYMAAVVATRCNPHVKAVYDRLLARGKSKMSALGAAMRKLVHLCFGVLKTRQPYQRNYAKID

SEQ ID NO: 198592 - protein, 333 aa, unidentified
MQTITDNPPFALGLDVGKADVHAAVLSTSDPTFLAEKVFTNDAAGHQSLLAWLTAALPPNAAVHACMEATGSYSEPLALLLHSHLTRVSVVNPQCIKAFGQISLRRSKTDPADARLIARFCLKEQPAPWQPPTPTQRKLQALARRLKSLQTQHAAEQHRVGQCLDKDVMADLRAHLLWLKNHQTKIEAQIHKLVAADEQLAAQAALLVSIPGIGKKSAALLLAEIPHPDAYASARQLAAHAGLTPRHHQSGTSGRTATPLCKIGSVRLRSILYFPAMVALRHHPPARAFGQRLRDRGKTEMVILCAFMRKLLHIVFGVLKNQKPYDPSLHSSA

SEQ ID NO: 198593 - protein, 377 aa, unidentified
MQKVRFIGLDVHADTIAVAVAEPSGEVRSLGVIPNRPESVRRLIKKLGPPASLRVCYEAGPTGYVIYWQLTALGVSCEVVAPTLVPTKAGDRVKTDRRDAEKLARSYRAGDLTAVWVPDAAHEALRDLVRAREAAKKDQLRARHRLGKFLLRHGRRPPTAMTAWTQRHLTWIRQVQFEQPAQEATRLDYLHEVDHVVGRIERLERAIDEAVKTAPPTMRAVIDALQALRGIALVSAVTIVAEVGELSRFTRAPQLMGYSGMGAREDSSGTRTRRGGITKTGNAHLRRIAIEAAWAYRHQPAVGGTLRKRQATLSEEVKAIGWKAQLRLHARYRKLLGRGKCQQHVVTAVGRELLGFIWAIGVTVERQQRKTTSSIAA

SEQ ID NO: 198594 - protein, 350 aa, unidentified
MNKITTLGIDLAKSIFQLHGIDLAGKVVLRREVRRAQLMKSIAQLEPCLIGVEACGSAHYWARRFGEHGHQVKVMSPQFVKPYRQSDKNDRNDAEAICEAVTRPSMRFVAIKSVEQQDMLTLHRVREGMMKERVALINRIRGSLSEYGIVIAKNVCNLRRELPGILEDAGNGLTVMARQIFNELYDDLSVREERIAQVERSIRTLGSQHEVVRRLETVPGIGYLSATALFGSVGDAKQYKNGRQLAAWMGLVPRQSSSGGKQRLFGITKRGDKYLRKLLVHGARSITTRAEHKPQPQDHWLNELRVRRGKFRSYVAQANKTARIAWAIMAKGEVYRAPTATPETSVAVAA

SEQ ID NO: 198595 - protein, 350 aa, unidentified
MEYISFDTHKFYTLVEREDAHSRRTRHCRLEHAPGAVRQYLRGVRPGTAVAVEATGNWYWVVEEIEQAGLVPKLVHPRKAKLMMGLINKTDKLDVHGLNVLQRNGTLPTVWIPPGELRDLRELTRTRQVMVQQCTRLKNRIQSTLNKYGLLMGEFSDPYGKKARSRLQELVKQLPEQTVYVTSLLLEQLDFVSTQLVEQDTRLKKLVKMTPEMELLMSIPGIGFILAAVIALEVGDIARFPSAQHLASYSGTTPRVHSSGDKTRYGRLRPDVDRYLKWAFVEAANSICLNHRRSPCRHVSQLYKRVRDRKGHPKAIGAVARHLAEASFHVLSRKEAYRDPVLAKGQSKAV

SEQ ID NO: 198596 - protein, 343 aa, unidentified
MRTITTIGLDIAKSVFQVHGVDAAGQVVIRRQLKRRYVLAFFQKLAPCLVGIEACASSHFWSRELRALGHTVRLMPPAYVKPYVKRQKNDMADAEAICEAVTRTNMRFVPTKTPEQQSCLMLHRTRHLFIRQQTAVINSIRAHLAECGIVAPVGRKGVTELLHVVADPRDKRVPEVARACLAALGTQLLRLKEQILEFDRMIMAWHRSSQASKRLHYIPGVGPMLATALVASVADPGTFRSGRNFSAWIGLVPKQHSSGGRDRLGSISKQGDRYLRSLFVAGALAVIRYAKIHGTKHRPWLTALLARRPTKVAAIALANKIARIAWAMMARGERYKEPIALAR

SEQ ID NO: 198597 - protein, 345 aa, unidentified
MKYIGIDYHKQYFVATMMNEQGEVIRRDKASTDRASIRRYFQNADPCEETKAVMEACYGWEYFYDEASDLVDELIMAHPLKTRLIAEARIKTDTIDSETLAHLLRADLIPQAYAPDSETRGRKNLLRYRSSLTAMKVRIKNIIHSVLTRNHIEDTGFTSLSDKFGKQGLSYLRSVTLKGEDTAIVNNYLDLLEETERKIKAAEKQIRAVCREDKICTLLQSIPGIGPILAVTIRYEIDDIGRFMSAGKLSSYAGLVPSTYSSGNRTYQGKITKQGNKWLRWAMIEAAQKAPSNDLWLRGFYQRISEHGKKIARVAVARKLLEIIYRVWKEENPYYKKGTVALPFV

SEQ ID NO: 198598 - protein, 402 aa, unidentified
MNAVGIDVSKGKSMVAIMRPFGEIVSAPFEIKHTASDIHSLVELINSVEGESRIVMEHTGRYYEVLAHQLSKANLFVSAINPKLIKDFDNDSLRKVKSDKADSVKIARYALDKWQNLKQYNVMDELRNQLKTMNRQFGFYMKHKTAMKNNLIGILDQTYPGANTYFDSPARSDGSQKWVDFASTYWHVDCVRKMSLNAFIDHYQNWCKRKKYNFSQSKAEEIYGKAKELVPVLPKDDITKLIIKQAVNQLNSASTTVESLRTLMNETASKLPEYPIVMAMKGVGASLGPQLMAEIGDVSRFTHKGAITAFAGVDPGVNESGSYEQKSVPTSKRGSSDLRKTLFQVMDVLIKTHPQDDPVYQFIDKKRAQGKPYYVYMTAGANKFLRIYYGRVKEYLSSLPES

SEQ ID NO: 198599 - protein, 343 aa, unidentified
MKLSRVGIDLAKNVYQLHGVDRSGKAVWKRRLKRHQWLKELLDKTEPGCEIGMEACASAHHWGRELQSRGYTVKLIPPQFVKPYVKSNKNDARDAEAICEAMSRPNMRFVTVKTVDQQDIQATHRIREELKVRRTAKGNQIRGLVAEYGLVAPKSLGSLRAAIPCWLEDAENGLTHYFRSLLHGLWDDLLMLDDRMCEMDKTIKRLAKSNEDCVRLQKLRGVGPMTSTAMVATVGDARQYHKSRQMAAGIGITPRQHSSGNKHRLLGISKRGDVYLRTLMIHGARSVVTGAKHKDDPLSRWVTEIATRRHPNVAAVALANKNARMAWAILRNKTDYDPAFAMS

SEQ ID NO: 198600 - protein, 353 aa, unidentified
MKCDKYMGLDVHQAMTVVVVLDADGRVILETMVPTETAAIIRLVQSLSGPLRVTFEESTQAAWLYDVIRAYVTEVIVCDPRRNKLLEDGSKADKVDARKLAELLRAGLLRSVYHGHEATRNLKELVRAYETLSIDTQRTMARIKAIYRARGIRTPGRGVYQPKQRQRWLELLTEAGIRQRVAWLYEQLDQLKPLRREAKQAMLTESRRHRAVSLLRTIPQMGPIRCAFIVATVDTPHRFRTKRQFWSYVGLAVVTHMSSEYEMTAGRVVRRRKPVATRGLNHNCNRRLKEVFISAATGGGLHEPYKPFLERLKQNGMRAEMARLTLARKIAAIALIVWKKGVAFDSTKLNCTT

SEQ ID NO: 198601 - protein, 356 aa, unidentified
MSRDLKYIGMDVHKEAVVFAVLNGTGKQVMESIVETQASSILQFIHGLQGELHVTWEEGTWAAWLYDLLKPHVHQVLVCDPRRNALLKEGNKSDKIDARKLADLLRTGMLRPVYHGENGLRTLRELGRSYQTISKDLNRVMNRIKALYRGWSIPCAGTQVYAARYREEWLHKIEHLGVRRRAELLYQQLDGLQTLRRTLRPELLAESRKHKAAKLLRQIPCIGPIRAARLLALMQTPHRFRSKRQLWTYSGLGIETRDSAQYRFVHGQLQRAKKPQQIRGLNRNHNHEMKEIFKGAATRASCGVGPLRNFYVTLLDKGMKPEMARLTLARKIAAIALTLWKKEERFDAEQLKTQAA

SEQ ID NO: 198602 - protein, 369 aa, unidentified
MNTTTFVGLDVHARSIKAVALDAMTGEVRSATFGYDAAEVAGWVSSVDPSAKCVYESGVTGFDLQKRLASMGIDCVVGAVSKMIKPPADRKRKNDRNDAEFLARMLSVGNVVEVWVPDDGCEAARDLSRALDDAREDLKRCKQRLSKFLLRHGYAFSETTPTGRRKGSWTAAHWAWIKSISFPEKADDDVLAYYVDAVRQAMEDKARLERLVEAEASKPRWKRRVDSVRCLKGIDVTSAADLVFEAGEFSRFKSARSFAAWLGLTPSEHSSGESVRQGGITKAGNKHLRRVLVESAWHYLGCSPHSKDLAKGQVPDPAARRHAAKGVRRLVERRRAMLERGVHKNKANVATARELACWCWAVGRMIENG

SEQ ID NO: 198603 - protein, 369 aa, unidentified
MVAVIEMSQTKWLIAATVPGFERNPLKKLDADPDSVFRLLRRWRSEAIQAGREVRRIVVAYEAGRDGFWLARWLQARAVEAYVIHPSSVAVSREHRRAKTDRLDTELLMRAFLGWLRGEKRHCSMAAIPTINEEEARRPNRERDNLVRERTRIVNRIKAILARFGIRAFKPNLRKAAEKLEALHTAEGMPLPERSRAELRRNLGRLHLLREQIHEIEQERLRQLSVVPDTEKGPLAMVRLLARIIGVGIETADMLVNEILSRGLRDRRAVARYAGLTGAPDESGQRRREKGLARAGNARVRYGMILLAWRFLQFQKDSALAHWFCARTADGRGGTRKTMIVALARKLLIAFWRLVTTGEIPTGVALRPV

SEQ ID NO: 198604 - protein, 341 aa, unidentified
MKATTIGIDLAKEVFQVHGVDEHGKRLFNKQLKRSQIASFFANIPPCLIGMEACASAHFWANKLQGLGHTVKLMAPQFVKPYVKTNKHDAADAEAICEAVTRPNMRFVPIKSPEQQAVLALHRSRQGFIKQRTAQANQIRGLLAEFGIVMPIGIHQLLRRLPEILEDAENQLPSLFRVQLSLLQKHIEYLFDVVSTLDKQIEHCHQQNALCQRIGKIPGIGPITASALIATIGNANNFENGRQLAAWLGLVPRQHSSGGKQVLLGISKRGDTYLRTLLIHGARAVLQSVKRKQDTVSGWASRLLERRNNNIASVALANKNARIVWALLAKDQEYSAPVMNA

SEQ ID NO: 198605 - protein, 412 aa, unidentified
MEVVYPRCSGLDVHKRFVVACLSIVEKGQRHKELRQFTTMTNEILMLKEWLKASGCTHIAMESTGVYWKPIYHLLEDSFEIVLVNVQHMKAVPGRKTDVKDAEWIADLLQHGLLKASFIPSSEQQAVRDLTRTRMRLIQERTRLVNRIHKVLEDANIKLASVVTDSMGVTGHAILTALVAGQEDPECLAHLARGSLVKKEDQLQTALQGKLTAHHQVLLEELLQLIARLDYSIARLDREIAERLRRFDALIERLDAVTGLSRRSIEVLLGELGWDMSHFPDAAHAASWVGICPGNHETGGKSLSGRTRQGNRWAKTVLIQAAHAAGHTQTYLGEQYRRISARRGPKKAAMAVGHSILVIFYHMVKTDESYHEKGADYFTESHKQEIQQRLVRQLERLGNTVILQPKAETTLA

SEQ ID NO: 198606 - protein, 348 aa, unidentified
MNILAMDLGKSNTVFCLYNDKNGKHRFGKVVTRPKQIHDLLVESTPDRIVFEICSPAGWIYDIAKTLNFEVQVANPSTEGWRWKNVKRKNDREDALKLAKLSAMNQLPTVHMPKPEVRQKRSFIQYRQRLVKRVVQIKNSIRSILDKEGYSMSRGKTGWSKRSVEQLEKMALPLEKCDFNNLWRGQLYVELEMLKATEKCLLEVTSKLDIQAKTDKQNQLLQTIPGVGARLAEAVVAFIDEPDRFATGKQVGSYAGLTPKQYQSGSMDRQGRISGQGNKLLRALLVEVSWLGLRYNSWMRETYNRLLRGSPSRKKIAITAVARKLLVRCWAMLRDQQPWNEKKVCAAA

SEQ ID NO: 198607 - protein, 344 aa, unidentified
MKDVRILGVDLGKNSCSIVGLDGAGRVLLRRRTRREGVIALAAKLPGCVVAMEACCGAHHLGRLLVEQGHEVRLMSPEYVRPYVKAQKNDDRDAEAIAEAATRPTMRFVALKSEAQLDVQVLHRVRDRLVGQRTSLTNQIRSILLERGIVVPQGRRSLLEALAVLSSEPDGRRVGTRVQRLLDDMLDQWRALDARIKALDDEFAEMARNDPAARRLATIPGIGVLNATALVAAIGDGRTFSRGRDLSAWLGLVPHQATTGGRPKLLGITKRGSRYLRKLVIQGARAALPSLARTATPLGGWLRGLLARAHGNTVVVALASKLIRIAWALLRNETRFVAGGAAVA

SEQ ID NO: 198608 - protein, 430 aa, unidentified
MKSNTQNAKIEAITEKTLVLGIDVGSETHYARAFDYRGIEYSKKPFKFSNTEAGFVTFKEWILDLKERHEKDKVVPGMEPTGHYWFNLGKFLQDNEMKPVLVNPHHVKKSKELDDNNPTKNDRKDPKVIAGLVREGRYMIPYLPDGVYADLRTASNIRFQLQAELTRIQNRISRWFNIYFPEYKTVYGKPDAKSGILILKTAPLPEDILTLGIDGVNQIWRDAKLRAVGKARAKILIEAAEHSVGSKEGAVSARMEIRMLLEDYESRNIRLQEVMTLIEGLVKQIPMAEKLLEIKGVGIRTVSGFLAEVGDISRFNNPKELQKLAGLALVENSSGKHKGETTISRRGRKRLRYLLFEVAMSLVSKNQEFRELHNYYTTRRLNPLKKMQSLMAIAAKLIRVFYAMLTKGVDYDPKKMASDIKRPAVYLQAA

SEQ ID NO: 198609 - protein, 452 aa, unidentified
MPRRRKNKRKTGTPVLHYLNPNAAGVDVGATEIYIAVPAGRDPHPVRRFSTFTEDLCAAAAWLKSCHIETVAMESTGVYWIPFFQILEARGFSVFLVNAHHVKNVPGRKSDVSDCQWLQYLHAVGLLRGSFRPEQAVCMVRSILRHRNDLVQMASSHVQHMQKALDQMNLQLHHVISDITGMTGVAILEAILAGERDPHTLAALRDRRIKASADTIAKSLVGDYRREHLFTLRQSLVAFRHYQELIAACDTEIAQYLEAFESKVDPPEGPMAKSPEQQEPNSDQAHFDLRSHLHRIFGVDLPRVPGINVLTTQTLLAEIGPDFSPFAQGAAFTSWLGLCPDNRISGGKVLSVRTRKVNNRAATALRMAAQSLHHSQSYLGHFYRRMRAKLGAPKAITATAHKLARIIYHMVTEGQEYHETICAQNEIRHRQYLEARLRKQARELGLQLVAAS

SEQ ID NO: 198610 - protein, 361 aa, unidentified
MNATTVAVDLAKSVFQLAVADASWRVIETHRLTRTQFERWFANRDVSLVIMEACGSAHHWARWLNGLGIEVRLLPAQYVRAYVKRNKTDAADAAALLEACRASDMHPVRVKSVEQQALQGMHRIRSLWMGTRTSRINALRGFCREFGIAIPVGARTGIEAISRVLADPATAVPDLIRGTARLLVEEIRLLEARIAQLERELASLAKLSPACTTLLSIPGVGLLTATALVAATSGDVSHFKDARHFASWFGLTPKEYSSGGSRYLGHISKKGDRYLRMLLTHGARSVLRAALAAQGKGQTVQGVRHWALQVQARSNHNKATCALANKLARICYATLRDKVRFGEPTVRLGKKISRESFVMPA

SEQ ID NO: 198611 - protein, 375 aa, unidentified
MEGAPMLDTTTFIGLDVHARSIKAVSLDVMTGEVRCATFGYDAGAVAEWVRSVDPKARCVYESGVTGFDLQKRLSGLGVDCVVGAVSKMIKPSADRRRKNDRNDAEFLARMLSVGNVVEVWVPDDECEAARDLTRALEDARDDLSRSKQRLSKFLLRHGLVFDERTPTGRRKGNWTRAHWSWIESIRFAEGADNDVLAYYVDAVRRAAEEKARLEGLVEAEARKPRWRRRVDSLRCLKGVDTASAADLVFEAGEFSRFRNARSFAAWVGLTPSEHSSGESDRRGAITKAGNKHLRKTLVEAAWHYLTCSGRPKDLAKGQAPDRVARRHAAKGVRRLVERREALLARGVHGNKANVATARELACWVWAVGLMAEEA

SEQ ID NO: 198612 - protein, 388 aa, unidentified
MNITTDHPEAPTAIRTDLGAIFVSLELSRSSWLITSLSPGSGEKMSKHAVSGGDVSRLLERFLQLREKARARTGKVFPLIVIQEAGLDGFWIDRVLQNEGIESHVVDPASIATSRRRRRAKTDKIDGETLVRSLLAYKRGEPRVCSMVNAPTPEQEDQRRLCRERKVLTAERVLHVNRIKGLLFCQGICRYEPLRRDRRERLEELQTGDGRPLPPHLKAQVERELDRLELLLKQIKTVEGERDALLAAAKNAMPAPAAMLLDLKGIGPEFAAVLWSEGLFRHFDNRRQVAAYAGLAPTPWQSGAVDREQGVSKAGNPRLRTTLIQLAWLWLRNQPQSALTIWFRERVLRNGGRLRKTTIVALARKLLVALWKYVTTGVVIEGATMKAP

SEQ ID NO: 198613 - protein, 400 aa, unidentified
MKSVLSVDVAKGKSMIMLSTEYGEVLIEPKEIKHNFRDFNELKDKIESFNLEDLTIFMESTGIYHLPVERYFKENNFNTLVINSLTTKNNYDTLRKTKTDTKDCMRLAKLFFVNEVEYHDLSKKDLYANLKAMTRQYFYLTQLNVSCKNRYKRLINICFPEFEEIFKGSRIYEETALNFIKTFPHAYIVKEKRIDALYNNLYKTNSRHDYYYKMLANKIKDIAVNSYPGVDKDHSDVKNLSDMAAILQENIKTINELKEKMIKTAKESPYFDIINSFYGIGEVLTTELLGELGDITRFDNHRQLIAFCGLDPTIIQSGKSINVHGTISKRGNKYARWILFNISQIVVKLGHQCPGHPVYDYYLTKKAEGKHYYENLTACSTKILRMLYTMCKNNTTFKIN

SEQ ID NO: 198614 - protein, 409 aa, unidentified
MDVVGLPRCQDKSERAAFCIASGVEFGAEATARSAKRLGFLSPFMDGPPLNGTVVVSRQQVVWEGAMVMDVSVLGIDLGKNSCSLVGLDATGKVVVRRRMRRDTVITYAGGLPACVVAMEACCGAHHIGRALARQGHTVRLMSPEYVRPYVKAQKNDDRDAEAIAEAATRPTMRFVELKTEDQLDMQTLHRIRDQLVGDRTSLMNQIRSLLLERGHIVPQGRAKLAARLGEMLDGDEPVLGTRIHRLVSDMRLRWSALDERIADLDAEFADAARADGRTRRLLTIPGIGALNATALVAAVGDARAFGRGRDLAAWLGLVPRQATTGGKPRLLGITKRGSRYLRKNLIQGARSSLPTMSRSDTRLGAWLRGLLSRSHPNTVVVALAAKMARIVWALLRHERTYQSVAQAA

SEQ ID NO: 198615 - protein, 315 aa, unidentified
MTAQDTFVGIDVAKDHLDIAVRPGDTIWRVANDADGIAALIGRLKGIQPALVVLEATGGYETAAASSMLADGLQVAVVNPRKVRDFAKGAGYLAKTDRIDARVLAHFADAIRPAPCALADEQTQALQALVARRKQVVEMLTAERNRLKQSRLPVQTQITKHIAWLQEELDALDKDLSDRIRNSPAWRDKDDLLQSAPGVGPRVSFVLVANLPELGTLNRKKIAALVGVAPFNRDSGKWQGRRGIWAGRAHVRAALYMATLVATRYNPVIRQFYTRLREAGKAAKVALTACMRKFLTILNAMVKHHTRWNPAAVAA

SEQ ID NO: 198616 - protein, 363 aa, unidentified
MNSVYHTELSSLEETRGQFNGGKADIKLGIDVHQDFYVVVMQEGGSNPKPPQRFQKQAFLLWAAKLKSRSAEVHAVYEACGFGFSLQRQLSQLSIHCYVSCPQKLDEHNKRVKTDSLDAKALCLRLDRLVRGNREALAMVRVPSEEEERSRAIHRQREQLIKVRKMLEAQGRSLMVNHGIEPVKNWWKRNNFAALPLPAWIKELLQNSQPILIALQQKISALTLQLQVAAAFNQPRGLGAMTSVMIDREIGDWHRFNNRRQIASYTGLCPGEYSSGHTRLQSCVTKHGNPRLRAALVELAWRLVRFQPNYSAVRKWKERLAKGTLTTGAARKKAIVALARQLAIDLWRIRTGRLSAEALGLEI

SEQ ID NO: 198617 - protein, 428 aa, unidentified
MESMDINRIKKFRQFKNEIRGSDRFLIAGLDIGKSIHYAFLGTANGKTVKRGMRVENNASGFEHLLTMVQFYMDRDGFKDIVFGLEPTSVYHKPLAEFLITHEHLVVYVTNEAIKKNRTLLDGRWDKNDTKDSANAADLVAQGKCQFYDLPDIQLRDLRALLAFRQRLRKQLHSCRVRIRNNLVAQYFPELDKCWNQAQEENLAIVRWCLSPQIINHLSFEDFFQMVTTRNRGLRQYNRLSKIWEIAPYSIGCQAGDAMQLEAQILVDNIKTIEAHIATVDETIEDICVNFQEYEYLLSIPGFGPYISAVVLAAIGTAQRFENTHQVIKFAGFDLNANRIGKKSQSAVPVISKKGKAALRYALYQAALIASSSNAQFRGYYHHLLQGREREKGIRTKMRVKLAAKLLVIAWTLMKKKQAFDPSYLKAK

SEQ ID NO: 198618 - protein, 350 aa, unidentified
MLIVGVDIAKTTLEATAVREGHAVRLGTFAQTADGWAALRDAVVGLQRALSASAGGGSADADRELVALVLEPTGGYELAFALWARRQPGWQVHRPNPARVRAWARSQGLRAKTDRQDALLLARFGASAQPALAVWQPLASEVSELDQLLRRRDEVADGLRRERQRHEQLGVRPDASPTVRASVERLLTTLEDEVAELERAIAEQVHRHATVQAAEQRLRTVPGVGARVALPLLVACERYRALAGEQGTAKGMVAYGGLDPQPHESGTSIRRRALISRQGDRDLRARLYMGALGALRGANPVHTFYQRLVDRGKPKKLALLAAARKVLAWAWVVFSSGQPFDAAKTVKMTA

SEQ ID NO: 198619 - protein, 408 aa, unidentified
MKVFVGDDWAEAHHDVHLMGETGEKLAAKRLPEGLDGIAGLHALIAEHTTDPTEVIVGIETERGLWVQALIAAEYQVYAINPLSVSRYRDRHNVAGAKSDPGDAKLLADLVRTDRHNHRPVAGDTDQADGLKVLARAHQNLIWDRTRHTNRLRNDLREFFPAALFAFESLADRDTIAVLTKAPHPDQARRLSIAQIRSALRKGGRQRNLDRRASEIQQALRTPQLDAPPAVTTAFAATTKALVEVIAGLNTSIAELETELAAHFDEHPDADIYLSLPGLGVVLGARVLAEFGDDPDRYDNAKSRRNYAGTSPLTIASGKKHAVLARHVRNRRLYDAIDQWAFCAITASPGCREFYDQHRAAGDLHHQALRALGNRLVGYLHGCLRTRTHYDEHTAWAHRQPAQIQIAA

SEQ ID NO: 198620 - protein, 309 aa, unidentified
MEHFVGIDVAKDRLDVHLRPSGESFAVARDGEGLVQLVERLQTLAPRLVVMEATGGYETIVASAVAAAHLPLAVVNPRQIRDFARATGKLAKTDAIDAAAIAHFAEAVRPPARPVADAQAQALGELVARRRQVIQMIVAERNRRRRATQGRVLRAIDRHLDLLRSELRELDGDIDGTIRNSAVWQADAELLVSVPGIGPATSRTLIADLPELGHLDRRKIAALVGVAPINRDSGTMRGRRTIAGGRPAVRTALFMAAMVASRKNPIIAPYYAKLRAAGKTAKQALTACIRKLVVILNAILRDRKPWQPA

SEQ ID NO: 198621 - protein, 345 aa, unidentified
MEHYAGIDVSLESASLCVVDATGRIVREAKVASEPDVLIGWFRGLEFTVTRIGLEAGPLSQWLYAGMREAGLPVELLETRHVRNAFKAMPVKTDRKDARGIAQLMRLGWFRSVHCKSLPAQEVRALLTARKLLQTKNHDVEMSLRGVLRGFGLKVGRTTPRTFVGRIRELVAGHATLSTVAEALVAARGTLFEQWQKLEKRLRSLAREDRRVRLLMTAPGVGTIVALTYASAIDDPGRFRSSKAVGAHFGLTPKKYQSGETDVTGRISKIGDGGVRTALYEAANVILTRPVKGSTLKSWGMRLAARTGMRKAKVALARKLAVVLHRMLADGTSFLANKAAAAVAR

SEQ ID NO: 198622 - protein, 327 aa, unidentified
MSNIIFGVDISKATFDVALLSDNKVKNKKFSNTIKGFAELKQWLKNKGIDHAAHACMEATGGYETKLAQYLYDNNFKVSVINPARIKGFSMSKLSRVKTDKADSELIARFCQAMQPDLWQPTPKHIQELQQWVRRLDSLIANKNQENNRLDGASEVVAINISTHIEFLNKQIKEIEELISNHIKGHKDLNDKSKLLDSIPGIGEKTIGVILAFLSIEDFDSAKQVAAFVGLNPKPRQSGSSVRGVGKISKTGDADLRKAFYMPAVVSLRFNPIVKDFAERLSGAGKVKMVIVIAAMRKLLHIIYGVLKNEIPFNANIKNKLMILDEK

SEQ ID NO: 198623 - protein, 286 aa, unidentified
MQKKVFKGQLTIGLDLGDRSSSYCVLDENGEILLEQKVATTPEAIQQAFGKMPRYRIAMETGTHSPWVSRLLEALGHEVIVAHAQKVRLIVKSRRKDDRLDARTLARLARIDPELLSPVQHRSAQAQLHLTEIRARAGLVSARTALVNAARGLVKSYGQRLRKCGTLQVSREITGGLSPGLREALEPLLREVESLNERIQEYDRRIEKMAKETYPETALLKQVKGVGDLIATAYVLTIEDPHRFRKSRDAGCFVGLQPGRRNSGESEPQMHISRVENLCDHAGWPA

SEQ ID NO: 198624 - protein, 415 aa, unidentified
MKKVYDNCCGIDVHKKLMVACFIHGREQELREFGATTKELLELADWLHKGGCQMIAMESTASYWKPLYNILESTGLNAIVVNAQHMKAVPGRKTDAKDAEWIADLLQHGLLQASYIPDKAQRELRELVGYRKSLVADKSRELNRLQKMLEGANIKLSGSVAEINGMSSRKILEVILSGEKIDAEKLEQMKKDKLIAHNLKTPFSQLAQDLNGFITPVQYRMMRELLSHIDELDIHIQNLNNDINNHMRNEEKQAVEAIKTVTGIADTSAQAIIAVIGTDMGRFPTDGHISSWAGLCPGNNESAGKKHSGKTRKGNQLLRTTLVVCAHSAVKVKDSYFHAQFQRISVHRGKKRAYVAVAHSLLIAIYHVLKDGVEFKDLGAEYYNQFNKERKIKAYLKKLKALGWEDLRAMIEQPA

SEQ ID NO: 198625 - protein, 414 aa, unidentified
MSRSPRFYCGIDWATALNDVAVIDRDGTVLARARIPATPDGLRDLFTILDGLRASHTHGRRHVPIAIETHQGLLVAGLLARKQPVFHIPPSNVARVRRHKSPAAKKSDRSDAELLALMLRDEWAHLRPIPANTPDATAITVLAHAQWRAQRHRQQLHARLRALLVQAHPAGATAWDGRDHGLRRAEARAVLAAGPTATTAARLTPYRLSKILTGVRTRLIDDEAYRLHALFTAPVLRLPTAVEHATAVEVRALLHAFDQACTTTDDLTTALTDAFLTHPHADIYLSFPGCGPLTGARLLAEIGDDPTRFTTARGLRAYAGLAPLTWASGTSHTVTHRRICNRRLKLTTHRWAFSSLTRSPGARTHYDHRRELGDTYPGALRRLAGHLLAGLHHCLRHHTPYDEDRAFPASPSST

SEQ ID NO: 198626 - protein, 356 aa, unidentified
MNNLKYAIGIDVSMKDFSCCLSVINDQQEVKVKASHKFANTVAGFQSLLEWVKKHSKEQLPIVYVMEATGVYHEQLSWFLNTKDQAVSILLPNKAKNYLKANGSKSKNDQIDARGLAQIGAEKKLDLWVPPSKDLYALRAYTRQHQSINEMHTATANQLHSMEHSQFKNKEIIKQLKITLKLLEKHLKEMEGIIAKVIKSDPVLNQHYQNICPIKGLGILSFAVIAAETNGFALFDNAASLVSYSGYDVIENQSGKHTGRTKISKKGNSRIRRILHMPALCAVRDDQPHFKKLFERVYDRTRIKMKGYVAVQKKLLVMMYYLWKKNEKYNPVFNLIAPDYAGATRDEHQINEALIK

SEQ ID NO: 198627 - protein, 361 aa, unidentified
MAKVRSWAGLDVHARSVLAVTLDAESGELRSVRLSGETVKVVEFLAKLPGPTRVAYEAGPTGYGLARALHAAGIGCVVAAPGKIERPAQDRIKTDARDAERVLRLLMIDALHPVRVPTLEEEALRDLVRAREDLRGDLMRARQRLSKLLLRHGIVYEDTSSTWTGRHRAWLRSQDLGGGAQATLLDYLGAVDTLELRRGQLEKRITELVPSSPYAQTVARLRCLRGIDTLSAVGLAAEIGDFGRFDRPGKLMSYVGLVPSETSSGETRRQGKITKTGSKHARRLLIEAAWHYRKTPARGVTLERRQQGQPATIVAISWQAQRRLHHVWRRLAEQRGKRRTIVAVAVARELAGFCWALAHAD

SEQ ID NO: 198628 - protein, 379 aa, unidentified
MPSESIVYIAIELSVSSWVVAARLPGIDKSRLHRLEGGDTAALLKTISDLRMQASAKLGGTAEVACCFEAGRDGFWLHRLLTAHGIAAYVLEPTSILVNRRARRAKTDRLDAEGMLRVLAAWLADDGQVCSMVRVPTPDEEDAKRPHREREHLVQDRLRIENRIEALLFTQGIRGRPSLRSWERDVAALRTGDGRALPPLLRAELDRLRRRLVVVLELIGELETDRAHALEEAKEADTMVDKITALQRIRGIGENFAAVLAREVFYRSFGNRRQLASYVGITPMPYQSGSMDRDRRISRAGNPRARTTMIQLAWLWLRYQPDSALATWFRERVGQLQGRTRRIAIVAMARKLLIALWRYVETGVVPDGIALRAESAATA

SEQ ID NO: 198629 - protein, 366 aa, unidentified
MKKISTMAMRGNEIFRELKLTIGLDLGDRTSHYCILDEAGNVILEHSLPTTPKGIHQVFCRIPRSRIALETGTHSPWVSRQLTQLGHEVIVAHARNVRLIGESSRKDDRLDARTLARLARIDPGLLGPVRHRSAKAQIHLTVIRARAGLVSARTALVNTARGLTKSYGERLRKCGSGQVNRETAKELSQELRDALDPLLGEIESLNERIAEYDRRIEQIAKEVYPEVALLKQVKGVGTLIALTYVLTLDDPHRFRRSRDTGCFLGLRPGRRNSGMSEPQMHISKEGDGYLRTLMVQGAHYILGPFGEDSDLRRWGLKLAERGGKNAKKRAVVAVARKLAVLLHKLWVSGEVYEPLRNNHKVVSAVA

SEQ ID NO: 198630 - protein, 401 aa, unidentified
MVKIRERIWVGIDVGKASHHACAVDETGKVVFSQQTANGQAAIQALIARAGKAGGEVCWALDMTSGTAGLLLALLWQTGQPVRYVPGRLVNRMAGAFAGEGKTDAKDAKTIAETARLRTDLVTVTAADPIVADLQVLTAQREDLMGDWVRGVNRLRALLVSIFPSLERAFDYSTRSPLILLTGFQTPTSLRAAGHDGVQVYLAEHGAWPKSIPSMADKALEAAGEQTVALPTEKVTAPLIARLAADLLDQDRQIKDLDKQLTDRFEEHGHAKVITSIPGFGPILGAQFLADTGGDLQRVFGTPGRLAAYAGLAPVPRDSGRVKNNLHRPKRYHRGLRRVFYLAAFSSIRADGPSKTFYQRKRSEGKVHTQALIALARRLVDVIWALIRDNREFQPTVAVAA

SEQ ID NO: 198631 - protein, 427 aa, unidentified
MKKADLLSTLFVGIDISSRSNVVAFLDFESQKPLQNFAVGNNQPGAVELANRIATYLRSRKDLSQLVVALESTSFYGVHVANFLSSCEVLAPFHTAVYCLNPKAIRNYKKSFIDLGKNDYVDAFVIADFARANRITTKPWRGSQFLALQRLTRHRLHLAKSLTREKAYMLSNIFLKFSEFSLLNVEEQPFSNSFGAAASSVLTDFLSTEEIIEMPTEDLIRYICEKGRNRFPDPGKTASLLQQAARNSYRLDKCLYEPLTVSIASSFTLISTYGTEIKAVNKAIEKTLKGIDPTAYQCLLSIPGIGPVMAAGILSEIGYIEAFRNQEALAKYAGLVWRENQSGKFQADDTPLSKAGNAYLRYYLIEATSHVKNHCGEFAAFYQKKYDEVKTHQHKRALALTARKFVRLIFGLLANNQLYSSRVVKIQ

SEQ ID NO: 198632 - protein, 460 aa, unidentified
MPKKRSVKTKLDPTLHCLQPNAAGVDVGATQIYVSVPPDRDTQSVRCFATFTGDLHAAADWLQNCQIDSVAMESTGVYWIPFFQLLESRGLKVFLVNARHVKNVPGRKTDVEDCQWLQYLHTVGLLRASFRPEQAVCTVRSILRHRDSLVQMASVHIQHMQKSLDQMNLQLHHVISDITGLTGTVIIDAILQGERDPLKLAGLRDGRIKATEQTIAKALVGEYRAEHLFTLGHSLAAYRHYQQLIAACDAEIQRYLAQLESRVDVTAEPLPKQRDLHKPRRNELRFDLRNELYRIFGVDLTQIPGINALTAHTLLAEVGPDLSRFATPSAFASWLGLCPDNRISGGKVLSVKTRVVKNRAAMALRMASQSLHRSQSFLGDYYRRMRAKMGAPKAITATAHKLARIIFHLLGTRQAYDESIFSKHELQHRHRRELRLRNHARRLGFDITPASATSSGESVP

SEQ ID NO: 198633 - protein, 347 aa, unidentified
MNFYKGQHKFYCGIDLHARKMYLCILDEKGEVKLHRNMDTDREVFLKAIEPYREDIVVAVECMFTWYWIADLCQKENIPFVLGHALYMKAIHGGKAKNDKIDSQKIAVLLRGGMIPQSYVYPEKMRATRDLMRRRNHLMRKRAELLAHIQNTNSQYNLDETFGCIAVPSKRGNIIDKFDHPAVQKSMEVNLKVIETYDATLHDLEKTILRLAQYHNPVSYALLDSIYGIGKIGALTTILYEIENIKRFPRVQDFVSYARLVKCSHESNGKKYGNGGSKIGNAHLKWAFSEAAALFLRGNDPAKKWFERLTKKHGKGKALSILAHKLGRAVYFILKNKEAFDMQKFLR

SEQ ID NO: 198634 - protein, 375 aa, unidentified
MEGAPMLDTTTFIGLDVHARSIKAVSLDVMTGEVRAATFGYDAGAVAEWVRSVDPRARCVYESGVTGFDLQKRLSGLGVDCVVGAVSKMIKPSADRRRKNDRNDAEFLARMLSVGNVVEVWVPDDECEAARDLTRALEDARDDLSRSKQRLSKFLLRHGLAFDERTPTGRRKGNWTRAHWSWIESIRFAERADNDVLAYYVDAVRRAAEEKARLEGLVEAEARKPRWRKRVDSLRCLKGVDTASAADLVFEAGEFSRFRNARSFAAWVGLTPSEHSSGESDRRGAITKAGNKHLRKTLVEAAWHYLTCSGRPKDLARGQAPDRGARRHAAKGVRRLVERREALLARGVHGNKANVATARELACWVWAVGLMAEEA

SEQ ID NO: 198635 - protein, 408 aa, unidentified
MTVVGIDVSKGKSMVAAMKPGGELVAAPYEVRHSDIELSHLALDVLCMEPDTRVVMEATGRYHEPVAALLHSEGIFVSILNPLLIKQSGAGSLRKVKSDPKDALKIAKYGLDNWSTLREYTPMEAIRQQLKLCARQCDLYNKNIVMLTNNLISLSDKTFPGVNELFSSPEKADGHLKWVDFYRSFWHCDCINRMSPDAFEERYKKWCKRKGYHFSTDAADALYAASCGPYTTLPRDNNAKLLVTVAADQLIALRENQSKLEAEMLNLCKQLPEYETVMAMYGVGKSTGPHLMAELGDVRRFPHRSSIVAFAGVDPGVVGSGKMQLSSVTTSKRGSPQLRKALFQVVSTYVKCKPENEAVYQFYAKKRDEGKPFFVCTTAAANKFLRIYYARVKECLNAAESATQVEEG

SEQ ID NO: 198636 - protein, 349 aa, unidentified
MSQNLNSAVAVIGIDIGKNSFHVVGLDDRGAIVLRQKWSRGQIEARLANMPPCLIGMEACVGAHHLSRKLKALGHDARLMPAKYVRPYSKGQKNDFRDAEAIAEAVQRPTMKFVATKTADQLDLQALHRVRERLVSQRTGIINQIRAFLLERGVAVRRGLRFLRAELPRILATPPEVLSARMVRVISDLAEDWRRLDERIDQLSTEIAVLARQDAGCERLMSVPGIGPIISSAMVAAIGTGDAFAKGRDFAAWLGLVPKQMSTGDRTILGKISKRGNRYLRVLFVQAAWVVLIKPMSWERHGLKHWIEAARKRLHRNVLAIALANKLARIAWGVLAGSRAFEASKLQAA

SEQ ID NO: 198637 - protein, 354 aa, unidentified
MIIIGADYHPAFQQIAFADSETGELNELRLEHREEAERFYHELAAQGMKVRVGMEASGHARWFERLLAELQFELWIGDAAEIRSKRVRKQKTDRQDAQLLLRLLLEDRFPRIWVPSCENRDLRQLLWHRHRMVQTRTRLMNQLQAVALNEGLRRKKGLWGEGGRKQLESFRLTPWASRRRHDLLELLDRLNPTIAELSQAIEQEVEKCPEAQRLMTHPGVGPLTALAFVLIIGTPERFGSGKPVASYLGLVPSEESSGDRRRLGHITKQGNSLLRFLLVEAAQVTVRSDPEWRGKFFHLAMRRGRKIAKVAMARRLAVRLYWMWRKGWDYEQLKKFGSHAGQPENRGGVQLNTE

SEQ ID NO: 198638 - protein, 350 aa, unidentified
MDTIYIGVDFHARQQTICYLKTETGELVFCELKHQDKQVVRAFYAQFRGRVIVGLEASGYSPWFERVLEELGCEVWLGHATEIRRRARWRQKNDRRDAELILDLMLHDEFPRLHRPAVQSREVLRMLRYRQKLIKIRTMSKNSLQAIALQAGLAKGSRLFTKDGQQQLSTAEMSPVMHWQREHWLQLMKPLNQQLLETMVWFKAQSKGDVCITRLRTHPGIGLLTSLCLVHTLQPVSRFRNSRKVAAYAGFDPVERSSGERKCFLGISKAGSRLLRYLLVEAAHTAVRKDEDLKRFYQRLAERRGRPKAKVAAARKLLIRTYIMLRDEIDYAEFRHRSRRSSACPPKSQA

SEQ ID NO: 198639 - protein, 324 aa, unidentified
MIDGILGIDVCKNTLDVSISSYTKVRTKSFTNSPDGWRHLLDWLIAQKIQRVHACLESTGRYSLGIAYALYEADHVVSIINPAQIRDFVRTKLGRNKTDGVDASHIREYCELFKPSPWAPPSEAHRRLGELQTIRSGIIAGLTEWKNRKNSGIVDAEAQALADATISHFTSQLGAVDKAIALTIDNDCDLQSKRDLLLSISGVGETLAGVVLAELPGPDVLRSSAEVVAYAGLNPRQHQSGTSIDRATRISKIGNAVLRAALYMPALSAMRYNSAIVALVARLKSRGRLKPKQIVVAAMRKLLVLCFGVLKTGRPFDAAIAMGG

SEQ ID NO: 198640 - protein, 339 aa, unidentified
MARYVGVDLHRNRFTVCVLAENGREYLSEYRLEQLPQFLARLRPTDELAVEVTGNTRLFHDAVAPRVARVVVVNPTQFRLIRQSVKKTDPHDARTLAFYLSKGMLPEVRMKEKLPAQLASLAQTRDTLVKQRTALKNKVNNILSAHGINLAKESLSGDAALEWVLTMKFDAIVATELRVIVGQIRALNQSISELEKAIKAEAPKLPGYKNLRSIKGIGDLGATILLTAIGDIKDFAHAGKLAAYFGIVPRVRNSNETERSGRITKRGTKLGRTTLVQCALISMRYSPYLAQFYHKVASRRGTGKAIIALAHKFLKLIYNTLTCNWVFADFANFELAEAS

SEQ ID NO: 198641 - protein, 374 aa, unidentified
MDTIYIGVDFHARQQTICYLKTETGELVTCELKHQDKDKVRAFYAEFRGHVVVGLEASGYSPWFERLLDELGCEVWLGHATEIRRRARWRQKNDRRDAELILELMLHHEFPRLHRPAVQSREVMRMLRYRQKLIKIRTMSKNSLQALALQAGVARRSHLFTREGKQELTAVFMSPAMQWQREHWLQLLEPLNQQVLEAMVWLKAQSKGDVCVARLRTHPGIGLLTSLCLAHTLQPIDRFRNTRKVVAYAGFDPIERSSAERKRFLGISKAGPRLLRHLLVEAAHIAIRKDEDLKRFYQRLADRRGRPKAKVAAARKLLIRAYIMLRDEIDYAEFRRRAVAARLARLGHGPKVPEVVIGQPASTERQEQLSRTTK

SEQ ID NO: 198642 - protein, 340 aa, unidentified
MKIYAIDWATKKDLTVFDGKKVKSMSNTIDEFDKFLDKIGGSANRPVTISSKNRLPSPILLFEEGGADMQKLKAFRAGYEVLTVPGKKIRDYRESLGEEKSDEKDAELIYRFYEKEGGGAIKTVTKSSNPGLPSPFRLFKELDADIAEVKILFREHEDLKQTMVREKNKLFAFSNKYKLANVASNQGEKIMLSKKASIKEKEKQLEIIKLILKDKVKKFPIWKKFLKDIKGVGPVIAAGLIGEIGNKTFDSKESIKHYSGIMPRAEGHNFNRKLKVILYQFLEGVIKHKTPKWREMYDSIKAFYADKHEDWSKGKCNNFAKKFVESKFIIEYWKKQKELI

SEQ ID NO: 198643 - protein, 349 aa, unidentified
MTTQRLSYVGQSVYVGVDVHKDTYAVTCVCNKQIVKTATAKADPAGLTASLSQWFPGARLYTAYEAGFSAFVLHRALTKAGIMNIVVNPASIAVAANDKVKTDRRDSKKLALDLSDGRLQGIYVPTEDEELARLLPRTRAQIVEHRATIARQIKAKLHQFGLIAPASRRLISNRYLREIDAWPLPPDLRVSLTFLAEPWRFATRQLIEMRRLLREQAKAHPAIEQVYRSVPGIGEVVARTFATELGDMTRFANERALFSYTGLTPSEYSSGPSVRRGHISRQGSSRVRHVLIETAWRALPRDAVLKEIFDRIAATRGKKRAIVAIARRLTGRIRACFRQGTTYAVGTYA

SEQ ID NO: 198644 - protein, 479 aa, unidentified
MIRSVGIDLSRTGNHQVCCLDEQARPCDSFSFDSTLEGLEKFEKRIFLEGATPTIVFEPTGLAWIPMAAYLRARHPDCQLVKARLQKVAALRRYLRSRAKSDRVDGVTLAKMPFIDAEQLDEAYLPPAEYHALQRLTRQRERLMKSITIRKNRIGAIINGYLPGLRKAFTNEWSDRARLFYRQRLNPFTVVRGGKDALETLFVSAKAKGAVTESHRVYQLCQKLVEFYEKSRAAGMINEDFFDNLQDEISCELRLMETEEAEVERVSGRIEELYRHLHPSDHLRTIPGIGVRTAQVFLAVIGDPNRFRNQSAFANWTGVVPGARQSADSEGKGLRMTKAGPAMMKRALYQAGDIARRYDPQLAALYYREMVQHGKTHLQAMGAVMSHLGARILTVLREDRLYELRDNQDRPISRMEAIGLIQQFKVPEETRQARRRRKPNEGRLTGRRTREAAKAPQSGPLIPPPKIVYCAEELQSTAN

SEQ ID NO: 198645 - protein, 343 aa, unidentified
MTYYAGLDVGLRRTSICVVDEQGKQARACEVATDAEVIVKALAKLKRKQVTVGLETGQLSIFLTKALRAKGWKVVCMDARQVAAALSTQVNKTDRNDARGIAHLLRCGLYREVHVKSDAACDRRIVLASRRQLMTQVAGLESTLRGLLKIHGVVLGPANRLAFLPRVRKVMKGLGDGARTGLEALLSSLEHMRSVLASLDRQVRNGAKEDARSALLMTMPCVGPLTSTSLVTVLDDATRFKASRSVGAYLGLTPRQYASGETQRQGRISRCGPAECRSMLYEAAHCLLHFYKGPSHLKRWGERLAKKKGMKRAIVALARRMAVIMHRMLITGEPFDDARLKPA

SEQ ID NO: 198646 - protein, 415 aa, unidentified
MQTLVERGCGLDVHQATVVACLLIVLKNGQTEKQMRTFGTTTRELLALRAWLLSQGCTHVAMESTGVYWKPVYVVLETEGTLEIVVANAQHVKKVPGRKTDVKDAEWIADLLCHGLLRSSFVPPKPIRELRDLTRYRRKLVESQAAERNRLLKLLETANIKLASVATDVFGVSGRLMLRALMEGKATIQEMAELAKGLLRKKIPQLEMALEGKLEEHHRFLLKLQLERLEAAEKDLAVLEQCIQEKLQPYAAQLALLQEIPGVDWTLAAVIIAELGVDMKVFGNVSQLASWAGICPGSNESAGKRKSSRIPKGNVYLKTALVEAANAATRAKGTYLRDKFFRLKARRGYKRATVAVAHKILVAIYHMFSHNVCYNELGDLYLDNLNKHHLTRNLVHRLERLGYTVTLEPKAASAA

SEQ ID NO: 198647 - protein, 345 aa, unidentified
MDHFAGLDVSVKETSVCIVDDTGKIVREVKVASEPQALLAVLKNPAYRFKRIGLEAGPLSQWLFSALAEAGLPVICVETRHMKAVLKAQINKTDRNDARGIAQMIRAGLYRPVHVKTLRSQKLRMLLTHRELLQSKAIAIENDLRGTLRNFGLKVGMVGKVKFEARIKELVENLPDLAVLVEPMLIVRRVLREQIVILHRRLLAIVRDDEVCRRLMTTPGVGPVVALTYRATVDVPSRFRKSKSVGAVFGLTCAKYQSGEIDWSGRISRCGDEMMRAMLYEAAQSMLFHSKKWSWLKAWAMQIARRRGIKKAIVALARRLAVIMHRIWVDGTEFRWTREQAAAAT

SEQ ID NO: 198648 - protein, 467 aa, unidentified
MSPRSGKRFRTSNEGEDLAITRRHAAGVDIHAAEHFVSVEPADVPGGFVNPDAKLPLGVRKFGTTTGELEALAAWLKECGVNTVAMESTGVYWIPLYDILASQGFEVLLVDPRQTKHAPGRPKSDVLDCQWIRRLHSYGLLTGSFRPSDEIVRWRGFQRQRETLIRYAAQHIQHMQKVLEEMNVKLPEVVSDIVGQTGLKIIRSIVAGERDPLKLAKHRHASCKASEAEIASALYGNWREELLFMLKQALKLYDMYQKQLHECEAQIEACLRSMADKSQGTPLPPEPRKRKPEKNEVKFGARELLFKMSGVDLTQIEGIGPTTALVILSEIGIDLSAFPHEKNFVSWLGLCPQHRGSGGKIFKRRTRRGANRVARALRMAAQGCHSAKNALGAFYRRIQGRSGGSKAIVATARKLAERVYRMLKYGQEYVRQSEEAYNQAYHLRQLKAMAKKAASLGYKLVPETMSP

SEQ ID NO: 198649 - protein, 375 aa, unidentified
MKEKVRFLGLDVHAETISVAVAEPDGSVRSLGTMTNRGESIRKLVKRLGPVEQLKACYEAGPTGYVLYWQLAELGVQCEVVAPTLAPMKPGDRVKTDRRDAERLARSYRSGDRTAVWVPDAGSEALRDLVRAREAAKQDQLRARHRLSKFLLRSGQRPAQGMKAWTQAYMAWVRQVRFAYLAQEATRLDYLHEVEHMGERVKRLEQAITEAVKLASPEVQEVVKSLQSLRGIAQISAVTIAAELGNISRFEGARQLMGYSGAVPSEDSSGPRTRRGGITKTGNAHLRRIVIEAAWSYRLRPGVGPDLRKRQLGVPEEIKEIAWKAQHRLHKRYQRLAAAGKDGRKIATAIGRELMGFIWAIGTRAETAVSQRMAA

SEQ ID NO: 198650 - protein, 466 aa, unidentified
MKNKRKTKKSKQDVDKFELINPNAAGIDIGADFHYIAIPKGRDPEGKDVRNFGTFTADLYTLAHWLKECQIETVAMESTSVYWIPLFEILDSEGIAVNLVNPQFIKNVPGRKTDVLDCQWIQQLHTYGLLRGSFRPEDQICVLRGYLRQRSMLVSYASHHIQHMQKAMEQMNIKLNQVVRDITGVTGMGIIRAIISGERNPKKLAQLRNPRCKNDAKTIAKALHGNYRVEHLFSLKQAVELYDTYHEKIVDCDRKIEQYLSSFEDRSNGQSLGKAHKSNRGKNKPSFDARSHLYRITGIDLTAVDGLDTLTVLKIISETGLDMSLWPTEKHFGSWLGLSPGSKISGGKVISSKTKKCANRVANALRLAAYSLQRSKSAIGAFFRRMKAKKGPAKAITATAYKLARIIYNMLKNGTEYKDIGQDYYEQRYQNRVIENMKRRAKQFGYELKYIKEQQPVMETANSLVI

SEQ ID NO: 198651 - protein, 343 aa, unidentified
MTKILKQVAGIDVAQNELVVSLGRVDQSLCKDIYAYKTFANKQSGFAALLVWIKKHTNHEVAVRYVMEATGVYHEKAAYYLSDLGLEVSIVLPNKISSYMKTLEIKTITDKTASQAICQFGLERGLDLWQRPKNIFRDLKQLTRERDQIVADRVIAKNQLHAEQAEAFPNDRSIYRANQRIKLLNEQEREIKQEIAQFVKTDNELHKKINLITSIPGVGSLTAVIVIAETNGFELIRNKKQLVSFGGLDIIRKDSGTSVKGKPRISKKGNRHLRKAMHMPALTAIRNDERFKVIFVRLVSKHGIKMKAAVAVQRKILEMIYTIWKTEKPYDKEYLQKANTAAA

SEQ ID NO: 198652 - protein, 452 aa, unidentified
MEEKEISMEIVNPHAAGVDIGSRSHWVAVGQREQDIREFGVFNQDLFEMAEWLNENEIKTIAMESTGTYWQNLYAILISKGFHVILCNGKFTKNIKGKKTDIKDCQWIQKLHSLGLLTSSFLPDGKTEQLRTYCRQRANLLHSAASTSKKMQKYLRLLNLRLDVVVKDTCGLTGLSIIRAICGGETRPEKLASLRHGNCKRSEAEIAKALQTNGRKDYLFALKQELDTYDHLQKKVSECDQMIAETLNEIIEQDDNKKQHFIEPKTYKRVNKNTPKDIDLNLKSYQMFEGIDLLAIEGMSYSTALTIMSEVGVEGIRKFPTAKQFTSWLRLAPNNKVSGGKVLSSRVPKGSNRLKIALRNAANAIGNLKESTPLRDFFQRINFRKGRVSAISATARKLAVIIWNMVVKGTPYVNPEGYLFLDQKRKLGIVKRIQKQIAKFDLTADDLKIIPT

SEQ ID NO: 198653 - protein, 390 aa, unidentified
MPQISAGIDIAKEVHWITAIDEAGTVLIDHALDNDPAAIAALVDELTALDGAVRVGFDVIGGIAGLAEAMLAASGCTLLHVPGLAVNRARQGTVGGENKSDPRDARTIADQVRTRHDLRVIEPAGEIDIELRLLVGRRRDLVQAQTQRIARMRDLLTGIFPALERALDLTTKGPLHLLTRYVTPAELRRAGAKRIGRHLQASRGGAAICAQALACARAQTIAVPGEAMTATLIRELAQEALATRTRLGEIDRDLKERLARHPDAALIQSLPGMGAILTAELIAEAGNLSRFRSPDALAAAAGIAPVLRQSGKTRFLRRPTGGNKGLKRVFYQAAFCSLASPDSRAFYDRKRREGKRHHQAVIALARRRVNVLWAMLQTHQPFQTGFKNAA

SEQ ID NO: 198654 - protein, 354 aa, unidentified
MTSDPGQSAQTFASIGIDIGKDVFHIVGFDPQGQVVLRKKFKRLALEAELAKLPPSIVGLEACLSAHFVSRTLRRLGHTPRIIPAIYVKPFTKGQKNDYNDAEAIAEAALRPNLRVVQEKSQDQLDLQALHRVRARLVSRRTATINQIRAFLIEHGIAVRTGANALRRSLFAILENRADELSPRMSDLIVGLYEDWLWLDERIETLTGEIEQISHREANCRRLMSIPGVGPIISTAMVAAIGTGEAFERGRDFGAWLGLVPRQYSTGGKSILGRISKRGSRYLRTLFIQAANVILMRPQSWERFSFGAWLKAAQPRLHRNKLATALANKLARIAWSVLRHNTAFDAHRVEVVAI

SEQ ID NO: 198655 - protein, 433 aa, unidentified
MLKLNYMSTLFVGIDVSSKTNAVYAMDFEENKYISSSFGNNQPGADKLVNMIAECMHKHKNLNTILIVLESTSVYSVHISNFLSTSEVLMPYKPYVFCVNPKAASNYRKSYIGMEKTDPTDAYLIADFGRVGRTKKLEPWRGGQFISLKRLTRHRMHLSECITREKTYMVSNLYLKFSELQLLEGDDKPFGSLYGATSSAVLTEFLSPQEIIDMPEEELLTFLAGKSRNRISDLSKTSELLRKAARDSYRLDKCMYEPLSISLASSFNCIHAYQKEIKLIEQAIEKCINGMNPNALLILQSIPGIGPIWASGILSEIGDITVFHSSDALAKYAGLYWPKGDSGDFTSEDNKMSKAGNPYLRCYLGEAANSVRKHIPEYADFYARKYAEVTKHQHKRALALTSRKLVRLVFGLLVKNQLYTGEKLDTEYNIESN

SEQ ID NO: 198656 - protein, 334 aa, unidentified
MNCVGIDVSHKELVVVVSVKGKARKAKSYKNTAAGFITIIQLLAKLKGHVKVCLEATGVYHFDLAVSLSRAEDIEVMVINPKVSSNFAKVLMKRSKTDALDAEILAIYCERMPFEAWIRPASEKIALRAHSRRMAALSKLKAQNKNQLHALISTEETPELIIEQINELIAVLDQQIDVQREAALELIKGHAELKASFDLVTSIKGIADTSGIQILAELMILPSDMSAKQWVAHAGLDPRAFESGSSVSKKPRISKAGNKYIRQAIYMPALVATRFEPHIKGYYLHMINDNGLKKMQAICAVMRKLLHAIHGMLKANKSFEGERFYKFPSEATCS

SEQ ID NO: 198657 - protein, 417 aa, unidentified
MADETNASPCRYVALDIHKHYCVIAAVNRDGQIVLEPVRMEHEDLEAQLNQKLLPSDQVVIESTTNAWHIYDLLEPLAAKVLVANPIRVKQIACAKVKTDIRDTLILARLLAANLVPTVWVPPVEVRDLRYLLSQRRRLVGMHTQTVNRMGSVAHRHHLNHPKGKRYIEKNTEWQQDDELSDSEKFQLELDMATGEHLDGQAKKIAEKIARMSQEEPWAANMMYLMQLPGFGVITGMTVLSAIGDIARFESSGKLSSYSGLTAGVEQSGTKNRGKGITKEGRKELRWAMVEVAQRAVKSDPYWKSRFQALEHRMHRNQAIVAIAHQMLELVWHVLTHKQAYRHFSEERIAYKYLTWGWQLDEEARDGLTRQQFARYYLMRLGIGHDLKRIALNPKYPRKLASEAEVLALKPELNQTR

SEQ ID NO: 198658 - protein, 330 aa, unidentified
MSVYVGIDVHRKRSQVAVVGEDGSVAVNRNVVNGSAAMLRLVASFPAGTPVAFEAAYGWGWLAALLEEQGLVPHMVHPLRCKAIASARLKNDKVDAAILAQLLRADLLPEAWIAPPEVRDLRALVRHRVSLVRARTRMCNRIHAVAADHGHDRPGSYWTGPGRTWLEALDLPPVPRAVIGSCLAVIDGLGPQIAAADRELRARARRDPRVAVLTALPGVGPFTALVIIAEAGDVTRFGSARKLASWAGLTPTVRGSDLKVRHGHISKQGSPVLRWALNQAAQTARKSPELAPAWTAIAARRGPKIATTAISRKLLCRAWHLLDEHARQAA

SEQ ID NO: 198659 - protein, 370 aa, unidentified
MKSIVYIGADVHKKSYSLCAIDGDTGEILGETKISPDVKLIEKFINNAMKKAQKDADVLVGYEAGCLGYSLYWQLKEKGIACDILAPSTMHRSAKNKVVKNDKRDAQMIATNLANKSYKSVYVPNDHDVEVKEYIRMMNDFKGESKKVKQHINAFVLRLGYRYEGKSRWIPSHIKWLKELKLDPMYREILDEYLSQLELLETKIGRFQHKLEELSQEEPYKEKIGELRCLKSIDTTAAMTLHAEISDFNRFPTANAFSSYCGLTPGEDSSGDKNKRLSITKQGNAVVRETLVECAQVLVRGTVGKKGKKVISKQKGQDVKVIDYADKAVIRLQKKYHRMILKGINRNIAITAIARELSCFVWGIETGHIN

SEQ ID NO: 198660 - protein, 340 aa, unidentified
MKHYAGIDVSLEASSVCVMDGTGKIVREGKVASEPEALIAWLSALGLSLTRIGLEAGPLSQWLYAAMRDAGLAVELLETRHVHNAFKTMPVKTDRKDARGIAELMRLGWFRPVHCKSMEAQETRAMLTARKLVQKGLQEVESSLRGILRGFGLKVGKTTPVRFEARIKELVAGHPSLEAVATSMLAVRAALRRELNGFERRLRAMARSDARAQLLMSTPGVGTIVSLTYACAIDDPARFKSSKIVGAHFGMTPTRYQSGETDRSGRISKIGDASVRAALYEAAHVILTRPVKGCTVLKSWAMRIAKRAGMKKAKVALARKLAVIMHRMLANGTPFTTQKA

SEQ ID NO: 198661 - protein, 402 aa, unidentified
MNCVGIDVSKGKSMIAVMRPFGEVVISPFEVQHTASELSELAKLLKSLDGETRVVMESTGNYHTPVAWLLHDAGLYVSVVNAMLVHDYGNNSLRRAKTDKKDAVKLANYGLDHWLTLPRYVPEEDTRLLLKNCYRQYQQYSKVQTMLKNNLISLLDAVFPEVNRLFNSSPRADGSEKWVDFVSTFWHCQCVSTLSLKSFSARYLKWCRKHGYYFSQQKAFEIHSKAQSCISVMPRNETTKLLVQQAIAQLKATAAALAALKQEMQSLAAALPEYPVVMEMFGVGSTLGPQLMAEIGDVRRFHSKKALVAFAGIDAPPCQSGQMDIHSRSISKRGSAALRRTLFLVMGIYLQSAPLDEPVYQFMDKKRSEGKPYKVYMMASANKFLRIYYASVTAYLNTLARI

SEQ ID NO: 198662 - protein, 355 aa, unidentified
MIIIGVDFHPEFQQIAFVDTNTGEFQEKRLVHREGAEQFYRGLAAAGQQVRVGMEASGHARWFERLLSELQFELGIGDAAEIQSKRVRKQKTDRQDAQLILKLMLKDDFPQIWVPSWENRDLRQLLWHRHRLVQARTRIMNQLQAIALNEGLRCKKRLWRERGRQQLESYQLAPWASRRRRDLLELLDRLNPTIAELSQAIEQEAEKSPAAQRLMTHPGVGALTALAFVLIIGQAERFQCGKQIASYLGLVPLEKSSGNRRRLGHITKQGSSMVRFLLVEAAQVTVRSLPEWRRKYVHLMMRRGRKIAKVAMARRLAVALYWMWRKGGNYEQSKSSVRTRASAEQAMVCSRTPSN

SEQ ID NO: 198663 - protein, 377 aa, unidentified
MTRLKFVGLDVHAETIAVAVAEQGGEVRALGIIPNREESIRKLVRKLGPVEQLRFCYEAGPTGYALYWQLTRMGAKCEVVAPTLVPVKAGDRVKTDRRDALKLARNYRAGELTPVWVPDAAHEALRDLVRAREAAKKDELRARHRLNKFLLRHGRRPPMGVKSWTMKYLEWIKREVHFEQMAQEATLLDYLHEVEHADARIMRLDGAIEEAVKCVPPKMRAVIEALQALRGIARVASVTIVAELGELSRFARAKQFMGYGGIVSSEHSSGECTRRGGITKTGNAHLRRVVVEAAWTYRHRPAVGTSLRKRPEKVSEEVKEIAWKAQQRLHQRYRKLLAKGKNKGIVVTAVGRELLGFIWAIGIKVEGAQKESLQQAA

SEQ ID NO: 198664 - protein, 346 aa, unidentified
MLHAGLDLSRKRLDFCLLDESGDRVEVGVAPPDADGLRSLARRLARHGQPLRAAIESMNGARFVHDQLELAGWQVEIADALKVKGLAPLACKTDRIDAWVLAELSRRDLVPAIWLPDPEVRAERERARFRLHLVRHRTSLKQRVHAVLLAHGKPCPVSDLFGVAGRALLQRLALPEPWAGTVTASLQLIDELDEQISGCESELRQLGADHRYIPLLLTVPGIGWVLAYTIAAEIGDIDRFATPRRLTGYTGLCPRVYQSGNSDRRGPLAKNGPRYLRWALIEATAHACKHPLYRDHYQRTKARLGKQRGAKVAQVDLARRLAEAIWHMLTRNQPFAPASATNPLAA

SEQ ID NO: 198665 - protein, 411 aa, unidentified
MERIVERPGALDVHKASVTACVRVWQERELEEHLAEFQTTVHGLLALADWLAALGVKQVVMEATGVYWKPVWAVLEDQFELMLVNAKHVKQVPGRKTDIKDAQWLCQLLEAGLLKASFVPPQPIRTLRNLTRYRKTQIQDRQREAARLHKILEDTGIKLGCVASDILGKSGRDMLDALVAGTTDPTVLANLARGQLRNKIPALQEALVGRFDAEHALVVGQILAHIDFLEEAIDRLSAAIEEQMRPFAAQRELLMTIPGVKQRTAEVLIAEIGVDMTVFPTPKHLASWAGVCPGNDQSAGKRRSGKTRQGSKWLRATLTEAANAAARSKNTYLAAQYHRLRGRRGHAKAITAVSHSILTAAWHMLQTGELYRDLGPDYFTKQNPERATKRLVRQLEKLGHNVTLQPREAAA

SEQ ID NO: 198666 - protein, 318 aa, unidentified
MANPTILTAGIDTSKSKLDIAIHGRSDGFTVANDAAGWKRLTGQLAKAGVHRVGIEATGGYERGVSRQLQAAGILVVTLQPLQVKAFARLHLKRAKSDRIDAVLIAACTHVLDAAGKMAPDPRFDALSDHLTFIEQVEEDITRIKTRLEHIHDKRLRGIASNDLKKQEKRRDAEIQRLIVALRVHDDLSTRFDLVLSIPGIGERTALALVVRMPELGQVSREQAAALAGLAPFVRESGQQQGQNHIGGGRERLRRSLYLAALPAASHWNTELMALYARLKQRGKCHRSALVACARKLLVFANTVVQRGTPWEKRSINA

SEQ ID NO: 198667 - protein, 414 aa, unidentified
MVDLLVERCAGLDVAKREVVACVRTPDPGAGGRRRQAIRTFATFSAELEALADWLEAEGVTQVVMEATGQYWKPIWYVLEERGLALLLVNARHVKILPGRKTDVADAAWLAELLEHGLLRGSFVPPAAIRQLRDLTRYRKKLIQAHTAETQRVHKTLEDAGIKLDSVAAGVLGVSGRAMLAALVAGQRDPVVLAALAKGKLRKKLPQLRQALTGRFSDHHGLLVGLSLEHLEHLERAIARLDARVDEVIAPFAVARDRLDTITGVGKRAAETIIAEIGADMGVFPTAGHLASWAGRCPGNNLTGGKRRSGRPTKGNRWLGEVLTECAWAAAHTRETYLAAQFWRLARRIGKKQAAMAVGHSILVIAWHLLANDCDYQDLGGDFFVRRDTDRARQRAVAQLQALGYRVTLEPLAA

SEQ ID NO: 198668 - protein, 415 aa, unidentified
MDTTFCKVAGLDVHHKTIQCAVRCQESGKLISQSRGFGTMTREIRALADYLQALGVTHVALESTGVLWKPNWNILESRFTLLLVNPRHLKKVPGRKTDVSDAQWIAHLLQCGLLKGSFVPPRPVRDLRDLTRHRAQLAAEHTRVANRIHKLLEDANIKLGAVASDILGKSGRAMLGALQTGETDVSKMAELACSSLRKKIPQLRLALEGKLTDHHRCVLQRLMVHLQFLEHENEMLSETILSTEEQLLSRADFDRLDSIPGLNRIAIQNLLAEIGPDMSAFPDACHLCSWAGICPGNEESAGKRLRSRTRHGNRWLRRTLSEAAWAASLAKDSYFAAQFRRIAARRGKCRALMAVAHSLLTVIYDILTRKVEYQDLGTDYFDRQDPEHLQRRLITRLESLGLEVKIRQRPTDQDD

SEQ ID NO: 198669 - protein, 466 aa, unidentified
MPPNRRRSLGKPRVSPTVFDRLNPHVAGIDCGSGEHYVAVPPDRDPHPVQSFPTFTSDLLRLADWLAACRVTSVAMEATGVYWIPIDEILDARGFEVLLVNARHFKNVPGRKRDVSDCAWIRGQHSLGLRRESVRPTDAIVALRASMRHRQTLVDSTGTSTQRMQKALVQMNLQLPLVVTDITGVTGLRILRDIVAGHRDPQHLAAHRDCRVRASTADIVAALTGHSRPEHLVVLQQNLELFDACQAQLAACDRAIDAHVQTLTAQRPSPVTPLPDPRVTRKPHDNQPRFEIRAPLFQLTGGVDLTPIDGVAPYTALELIAEIGLDMTRWPTEKHFTSWLSLAPKNKISGGRLLSSRTPPSANRAAVVLRMAAMSLGRTQTALGAFYRRLAARIGKPQAITATARKLAVLVYRVLKGELVYRDPGADAYDIQQRARVLRRLRQRAATLGFSLVNRDTGEILAPAIP

SEQ ID NO: 198670 - protein, 330 aa, unidentified
MTMTPTQQTYNHVVAFEVSKEALVVHALPADEQCTIANKPQAIRRLLKSQLKHNRKQNLGPILIVCEATGGYERHVLDVAIDLGLPVHRAHGARVRFFARYCGLIAKTDPIDARVIAHYGVKTDKLRLYEPPPPETVELRALHARRTEIQQMMIAETCRLDQTHHKSIVKSLKDHIAQLKSALEAIEEEIKQLLHENAPLKKKVELMRTVIGIGPVSAMVLLAYLPDIGSLTKGEVARLCGLAPINNDSGKKRGPRHVEAGRTAIRRALYMAAVVAMDANPVIKKFADRLRGKGYPFKYVAVAVMRKLVVILNAVLRDGQPWKGAEAASA

SEQ ID NO: 198671 - protein, 482 aa, unidentified
MKKKSIFQNRSQQLLRLFEKAGNRLKMMCVPIDYAKKDHMVMFCNGYGDIVRKPFSVKNTLEGVKYLIDQVMRSCRQRHIKKEFVFFGGEDVNSYAENFANALRTKGFLVANVNAHDAKKQRENLQASTDRIDLMGIAMMLLNLRAKCSPAQDGIYRNLRTLVRHRKKLVVMKTEVKNRVHTLVDRLFPGFLNEKNTGINPFSKSSLVLMEDRFSAQQIRRRQKSTLIKILKRCATPNAEKIASKLHSYSAQVITTPNEYAATLQLSLQHHIKHFRCLQENIDQLLSEIALVLAQTQGAFLTSIKGVGIVLAAGVSSEIGNPFEQKPLNNLTSYSGIIPRVKQSGGLEGHTHTGRVSKRSNHILKDYVVQSALQMGLRGPQPLLQDYKRREAAGQHADFGIGRRFLRMAMCLMRSSQVYLPPTLRSPKTQMQERAGYYLTTWPLFRDKWKKAQAHQAAFAKDQPLGQWRQMVQELYDIKLKL

SEQ ID NO: 198672 - protein, 412 aa, unidentified
MKVVHEICCGIDVHAKMLVACLLSAEGEKEIRTFSTMTDDLLRLRDWLVAGGCTHVAIESTGVYWKPVFNILEDALTVILINPEHAHALRGRKTDVKDAEWLADLLRHGLLKASFIPPPEIRELRELTRYRESLVRERSAVANRVQKVIESGNIKLGQVASDALGVSGRAMLRALAHGETDPDKLASMAQRRLKEKVPQLRRALQGRLTVNQRFVLGELLQRWEELERADQRVTGEIDKYLQARPKLARAREIVDSLPGIGPRVAEVVVAEIGVQMEAVFESDAHLASWAGICPGNKATGGKRLSGRTRKGNTYLRSALVQAAWGATMKKNCYLSSQYFRLVKRLGRKKALVAVAHSLLVIIYHVLQSDQTYTELGGDYFDRHHVEQQRDYYLRRLQMLGLKVTVEELSRAA

SEQ ID NO: 198673 - protein, 357 aa, unidentified
MRFYTKQHPFYCGIDLHARTLYVCILDQAGETLLHRNRQATPEALLKAIAPYRDQIVMAAECMFTWSWLADLCAEHGLPFVLGHALYMKAIHGGKAKNDKSDAHKIAVLLRGGMLPQAYVYPAKMRATRDLLRRRMHLVRKRGELLAHVQNTNSQYNLPAIGKKIAYKANRDGVAERCADPAVQKSMAIDLALIGYYDALLCDLELAIVKAAKHHDANTWYLLRTVPGIGKILSLVLLYEIPDIERFPRVQDFASECRLVKCAKASAGKRSGTSGTKIGNAHLQWAFSEAAVLFLRDNPAAQKLLARLEKKHSKGKALTILAHKLARAVYYMLKRQTAFDMNTFLHGEGRGVGERGA

SEQ ID NO: 198674 - protein, 405 aa, unidentified
MDITPIHRRVIGLDVHQNKITACALIEQADGSVAVAQGEFGGFKRDRRALAAWVHGLAPDIVVMESTGIYWKSPYAALEKVGIAAWVVNARHVKNVPGRKTDISDAQWLATLARAGLVRASFIPPAEIRHLRLIARQRQKLGGMLAAEKNRLHKVLADAGIRLNVLLSDLHGQSARAMVKALLADEPIHAILARAGRLRASREDLFEALQPEELSAKHRFVLNEIMAHIEYLEATMARFEQQLLVGLAPWEPQMSLLETVPGIDRLGAAMLLVEIGTDMDSFGSAERLASWVGICPGNNESAGKRKSGRTRKGNAWVRRLLCEFAQAASRTRCALKDKFSALAIRKGHKRSIVALAHKMLRIVYAMLANTTPYQDRTVDYEALMVGRNAPRWLKMLAKHGYIATA

SEQ ID NO: 198675 - protein, 411 aa, unidentified
MEALYPKCAGLDVHKANVVACVRVMARTEVTYQTRTFQTTTKELLALCAWLTEHGCTHVAMEATGVYWKPVWHLLEGSFTLVLANATQIKGIARPKTDVSDARWIADLLAHGLIRSSFVPEQPIQELRTLTRTRKQLVQEQTRHILRIQKTLEDANIKLDNVLSDIVGQSGRAMLRALIQGTTDPLTLVALAHPKVKASREALAEALRGQVTAHHRFLLKLHLDQIEHIEEALAALDKEVDDALLPFRAEVQLLKTIPGVSGITAAILLAELGADMAHFPTAQHLVSWARLCPRNDESAGKRQSTRVRKGSRWLKPALMQVVLAAIRKKPPTYLRAQYYRIQARRGPKKARVAVAASILTAIYFVLRDKVSYRDLGPDYFDKSAPTKAIERLVRRLNNLGKDVELRDRTAA

SEQ ID NO: 198676 - protein, 427 aa, unidentified
MVRSVGLDVHLDFCEVALVEDGELRSAGRIATTPKQLELFAASLGPHDRVALEVTGNAWEIARIIEPHVARVVVVSPSDTGIRQARAKTDRLDARTLARLLAAGSLDAVWMPDRATWVMRRRLARRGQLVRARSRAKNQIHAVLMRQLVGRPPVSDLFGVKGRRWLAGLQLAVEERETVDAAMRQIEFLDTEIAAVERLIAQDALGSGQIRRLMSVPGVNVIVAASFLAAIGDIRRFESPRKLVGYLGLDPRVRQSGPGPATHGHISKQGSVRARHALVEACWTAVRQPGPLHAFYERVRARRGHSVAVVAAARKLACLFWCLLTREADYAYAQPSLTRKKLRRLEITAGKPRYTPQAAGIWHANDAIRQAERELAHQAETAYQRTVRDYHAAQANKAGASATSGRASSGRQSGKQRGRASVPDPAL

SEQ ID NO: 198677 - protein, 322 aa, unidentified
MAKLSFGGIDVSKDRLDVMILPEERCSSVPNDAAGWADLVERLSGSSIAAIGIEASGGYERGVMRALLAAGMPVRQVNPFKLRQFARASGVLAKNDPLDARMIASFVTIMPTRPAQRQTPAAERLAEMLAIRRQLSAEKVAAENGSRLLEDAMLQRLSRRRIVRLAADIHLLDKRMVEIVATDDALGHRYRLLTSMPGVGAVLACTLIALLPELGRMSRKQVAALVGVAPYAFESGTLKGRRCIWGGRAHVRQVLYMAAMSASNWNPVLKAFHDRLTASGKLPKVVIVAVMRKMITMLNAMVRDDVVWADRLSGRHVLPTAR

SEQ ID NO: 198678 - protein, 386 aa, unidentified
MSQGSGRNDIVHSSSKNNFMQVIRYGIGLDMAMEKFDACISTIDVKQAVLVKSTRSFDNNSKGYQQLYKWVSSQCVLPVPMIFLMEATGIYHEGLASYLHSQECFISIVLPNKAKKYKQALGLRSKTDSIDAKSLSRMICEQALPAWNPMSKAIYLLRGVTRQIQSIAKDITRIKCQLHAQEFAMYKNNDVIKCLKQQLRLLQKQKDQLEEEVLKILETDPALKEKCEKICRIKGLGKLSLAVIIAETNAFSFFENIAQLVSYVGYDVVEDQSGKHKGRTKISKQGNGRIRRILHLPAFNVVRLKQQPFVGLYQRVYERSKIKMKAYTAVQKKLLILIYTLWKKDAAYQPYYQQSSGEKELALSFVKVDAFIKEKNSSAVEQSYTR

SEQ ID NO: 198679 - protein, 449 aa, unidentified
MSKKTETKNNLQLAVIHEHTAAVDVGSMLMMVSYTDKEGGQQLLQTDGFTESLTNLAATLKSEGVTQVAMEATGVYWMALYEVIERAGLKVTLVNPKHFKNVDAQKTDVKDAQWLQQLHAHGLLRPSHVAPELYRELRSYIHERNVLQQQKSDTLNRIHKVLTKMNIKFQHLISDIEGVNGMKLLRAIAEGISDPEELLSFINIKILKASKEDLLKSLQGVYKREHIVILQHALKAIDFFKQQMKEFEMLVEDVLQRLLPNDKQGQKPEVTKKGKRARKNQYSINLKEYLLHITGVDLTAIDGLDEISVLEIIAVTGTDLSKWKTAEHFTSWLNLSPRHKITGGKLIGYSKRFSNNNATQAFRIAARTLWNHKGTLGRLYRRLAAQKGSAKAIKAIARKLAVIFYHMIKNKSAFDASKLQLDPDKEKRKRIIRLEREAAKYGYIIQKAA

SEQ ID NO: 198680 - protein, 349 aa, unidentified
MSQNLNSAVAVIGIDIGKNSFHIVGLDYRGAIVLRQKWSRGQIEARLANMPPCLIGMEACVGAHHLSRKLQAFGHDARLMPAKYVRPYSKGQKNDFRDAEAIAEAVQRPTMKFVATKTPEQLDLQALHRVRERLVSQRTGIINQIRAFLLERGVAVRQGLRFLRAELPRILATPPDVLSARMVRVIKDLAEDWRRLDERIDHLSSEIAALARQDTGCERLMSVPGIGPIISSAMVAAIGTGDAFAKGRDFAAWLGLVPKQISTGDRTILGKISKRGNRYLRVLFVQAAWVVLIKPMSWERHGLRSWIEAAKKRLHRNVLAIALANKLARIAWGVLAGSRSFESSKLQAA

SEQ ID NO: 198681 - protein, 434 aa, unidentified
MSPDSTTLYVVLDIGKNVHWLGAYAGFDLHPVIAPLEIRSDRPGFERVTTLIDGLLAGGAYSRVVLGHEPTGVYHEAWARALMERYAPHRQGSATPRLDYRFLNPLLTKRQREQLAKGRQRKTDASDLQAMAYCLRDDLGQPAFLATDQELRLQLWGNAYRQNQHERRRLILFILSQLDRLWPGMVVNVKRFRKMHPDLEVPVPLALSKPLERQRVRAILTHCPNPHDFLALGQTGIQAFYRAHIGRCGATTARLAYQLVRNALLPPPQVAALLADQLQADFTRYLALEADFLALTQQAEALVPDSPAAALTTMPGVSPLLAARYLAHLGHPRRFTQAAEVWSLAGFDTVTEESGDFRRVGHISRKGHPGLRDTLYLIGLHTAHHIPAITRAKQRALARGMGDVGATLHAAHKANRILHHLLYYQEPFDPNRVR

SEQ ID NO: 198682 - protein, 333 aa, unidentified
MKIVKQCIGIDVSKNLLECCLGNMIENQEHSFSKTKTFSNDLEGFKELLNWSNKLIQTSNVHYVMEATGVYYENLAYWLHENGMSLSVLLPNKINHFAKSHNIKTKTDWVDAQILSQIGLERKLNKWSVPSVLMREIKFLTREYRELKFKLVAAKNQLHAKMHSYKCPKTTQQRLKRQIKMLETQVVEVEAELRVLVMSDRTLYDKIECLETIPGVSFMTVICILGETNAFALVRNAKQLASYCGLDIRHNQSGAKEGKTHISKKGNSFIRHALYMPALCASKHNPTLKEFYNRLVDKKPAKKIAVTAVARKMLILMYTLWKNETEFNLNYNK

SEQ ID NO: 198683 - protein, 424 aa, unidentified
MQNTAARKRKQLPEGYLVVGVDPHKKRHAAVAITQDFTNQAKFKLDNTREGLEAMLDRAKVEMVKSGCRGVMFAIETGGHYWRNVAYFLDEQGVPFRFINQFTLKRRREGKDLNRRKNDYRDGEVAAQLLCTGEFTESKLPQGAYAELRTAHNAYRRLVKERTRITNLVKGLLDALFPEFTQIFKDPCALTALSALSTCPIPRVIAKMTEDEFVAIIEARHKGRRLMRKKLRALHYSARTSIGIDAGARSVSSEIAFLVDKLELIRQQICIMEGKLIRLVDETEEGKYLLSIRGLNYIAVAGLLAELGCFKAYRSARQMIKMAGTNPTESESAGKKRARTPMSKQGRPVLRYCAWTSVIPMLRFNPDFRAWAKQRRERPVHANPLGGREVVGAALNRLLRLAFALVKNQTYYQVSKPELTVVAV

SEQ ID NO: 198684 - protein, 393 aa, unidentified
MAVMLAVVLGLLILEVAMSQRKPHPTSPDPASLALLHTLHPHAAGIDVGAAELWVCVPPGAVAVPHPPAVLPAHVRRFGAFTADLHAIAAWLRQCGVTTVAMESTGVYWIPLYDFLERAGFEVLLVDPRQVQRAPNRPKTDVHDCQWIQRLHSLGLLSAAFRPEEKIRVWRSYQRHRTNLIEDASQHLQRIEKALEQMNVKLTEVVSDITGVTGMSIVRAMVQGERDPKALAKLRDHRCKESMATIAQALQGTWQPEHLFALRQSLELYDYYHQQIRDCDRVIEAHLQGMALPEVTPLEPTRRVRRRKDNEATFDARQRLHHVAGVDLTAIEGIEESTALVVLSEIGTDMSRWPSEKHFGSWLGLAPNPRKSGGKVQSSATRPGVNRAAQALR

SEQ ID NO: 198685 - protein, 344 aa, unidentified
MDNHTQYSGFAGVDLAKKVMQIHFVTGDGEITDKQVKRAEFLDFFRNRTKCLIGMEACGASQDWARKLEAMGHEVHLLPPKAVKPFVSGQKNDHNDAIGIYKAMFNGVRRVPVKSTEIRDLQTLRRIRSQVTKDKVKEINHVRGLLAEYGIVMGKSLNAFNKDISSALGILTERGDVSPLVAEELRTTVEAIKAKIERQKKLDQEIEQLARGCKNYENFLKTPGVGPFTAAMLCVLLCDPSIFANGRQFAAYIGLAPRSRGSGGKNYVTGIPSKFNCDSESRAVLVECAQAIARCKNKSLWVEEILRRKPKKVALIAIANKLARQVWAMANKGESFKQMTILTA

SEQ ID NO: 198686 - protein, 394 aa, unidentified
MKRPCVAVDVSKSKSHYQGWINIDKKCGNAKCIEHSKIGFQEISDKLKELEGITNEKPVVVFESTGVYHRSLQQYLEDNEIDYIIISPLASAKVRKSNIRATKNDKRDCKTIARAYFEKEFPLHQESDEIYDNLREMNRYYHYLTEQLKKCKVQFKLLLDIVFPKFDLYVEDYSEIPMALFSKYHHPDEIKNKHPESLAKYLESKTCHHYNYCLKEAISIIKYCNECQSGCSKESIDCRLFGEVIEQIKSKVEEQELYLQKIIDLAKELPNYELLLTIPGISNNLSARILAEIGDISRFPRAKSLVAYAGIDPNVYQSGENDGLHLRITKKGNKELRCLLYLAIHNTIQGNNVISNYYHKKIATGLASKVAKVACMNKLLRIIYSMCKTGVIFQ

SEQ ID NO: 198687 - protein, 477 aa, unidentified
MIHSVGIDLHKGRHRVYCLDEKAQPCDAFSFQTTPEGLATLEQRIFRDGSNPIVVFEPAGLWWLIVATYLRSRHPDCQLVKAKTQKVAALRRYLRGSAKSDRIDAITLAKMPFIDPERFDELYLAPAQTHALLRLIRQRKRLEEEIGARKKRIGAIIDGYLPGVRQAFSHAWSAQYRAFLHSCINPFAVVQDGEEALHTSLNKARPKSKGGRAESYSVYGACQNVVALGELCQKAGALNEDFFVDFQNEIDRELRLMEAEEAKSEAVDQRIEELYRKLHTSDNLRTIPGVGEHTAPVFAASIGDPTRFPGQSEFANWTGVVPGAKQSSDVESKGLRMTKAGPAVMKWALYQAGQIGRRWDPQLASVYYRQMVHHGKNHKQAMGAVMSHMGARVFKVFREDRPYELRDTEGKPISKIAARALILAKYQVPEDIRQERRKRKGKKATPGSQKKEGMAAGRVHEAVVTPQPAATLPSPST

SEQ ID NO: 198688 - protein, 352 aa, unidentified
MPTSTTPAITLVLGADTHKDVHVAVLLDQLGRRLAVASFSATDAGNQQLWQWTTRFGVVSAAGVEGTGSYGHRLAQLLVGKSVQTWEINRPDRARRRRRGKSDPVDAENAARAVLAGEVSAIPKDRRGVVGELRALLVTRRSAVKARTQAHNQLQGLLVEADDALRAQLGKLRKAHFARACAQVDPSDGIGRALGSLGRRWLVLNDEAKDLERQIASLVQKHAPKLLARRGVGALSAAQLLVTAGANPHRLVSQAAFAALCGANPVEASSGKTTRHRLNRGGDRAANTALWMIAHVRMVHDPRTRAYAAKRTATGNSRKEIIRILKRYIARELFPLIVEALTSAAATSPTST

SEQ ID NO: 198689 - protein, 443 aa, unidentified
MSKKHVSHLRGERGQAFAELIRGVSAERILCVSIDISKYFHVAMIHNGLGEIVLRPFDVDIYQSGFDQLCQAIERAKAQTQAQVVLVGMEPTSHYFENLARHLLADGQPVKLINSFSVKQNREQQLMRREKSDPIDVAAIGDLLRRGEGTLYQPATGLYLQLQQLDRVRLSKVKIANILKNQIIGHLDRIFPGLVLLDEGAKERYTPLFNVDFWKCQTLQDLIRVCSNPHELVKLSAQALVQAFHAQGCRLGLITAAKIIAQAHKTLLPDPELAIIRCELLQHDLALLHHVQTLIDQLEQRLSQLVAQTPFQVWTHLQGLSKVQVASLAAAMGPPTHYTNAAQVFRRSGLVSGRNDSGNRQRRGKGNHVLKTGDVYLRRALMNAVATLLLHQPALMRYNKHLQITKHPGVARVATARKTIGILWAVLRDQSSNTLINCKGADM

SEQ ID NO: 198690 - protein, 352 aa, unidentified
MKELKIILAFDVSKSELDYVYYDKNTGLYTKEGKINNDVKSIQQFLSKQDKTKVYIVFEPTGTYSDKLLCICEELGFVFSLINPTSSHYYSQMKGISTKTDAQAARTLAEMGATQNLRIYKPSSKGNRRRKSLMKHLCSLEKDQQKLLNRIHAEEQKKNPDKELLSSNNRLLISIREEIDIISKAIKSIKEKEYESKKKKGMTVVGIGDKTAGWLLTMSDGMDNFESGRSLKKYFGLAPCTHTSGSSVRKNTGINKSGKGKVRGLLYMAAISAKRYNNTCRDLYERLRAKGKCHYKAMVAVMGKLVMQFYAVVTSDVDFDNEYHLKRAERKAAADVERRSERADQTKVELAA

SEQ ID NO: 198691 - protein, 351 aa, unidentified
MMIIGVDYHPSFQTMAFLIEETGECGEQELNHSDGQAEKFYRDLKQRGIRVRIGMEATGYSRWFERLLAELGFELWIGDPAEIKSKRVKKQKTDRHDARLLRRLMRENNFPQVWVPSPENRDLRQLLWHRHRLVQMRTRIMNQLQALAMNEGYRWKKKLFSEQGRAQLEKLSLAPWASRRRQELLELLDRMNPTIEELTAAVEREARKRPVVQRLMTHPGVGPLTALAFVLIIGTWERFPRGKQIGNYVGMIPSEHSSAGKQRLGHISKQGNSLLRFLLVEAAQAAARVHPDWRRRYVHLAMRRHRSIAKVAMGRRLAVRLYWMWRNGCEYSPSLEFGSYAGQLGIGHGAK

SEQ ID NO: 198692 - protein, 417 aa, unidentified
MKCFVGLDVSSTKLDVCIMLSDTSTPVTASLSNDLSGATEIKNHILDLNHTYHFERIVIGMEATSLYSFHPAMFFHEDRQSKELHVEIMVEQPNKIKKYRDAFEENKNDTIDAFYIADYFRIERFSPSFLKEEKYMALQHLTRTRLQIIEQLTRTKQHFIENIYYKCNTLAYQFKKEELSTNLWSSTMMTLMTDEMTLDELANMPLQELDDWLQKLGKGHFKDSEKLAQTIQAAIRGSYRLSKLQQDSVNVILGLLAREIRNLEKMIKEIDKAIEDMVETIPEYQCLTSIPGVGKVYAAGIIAEIGQIERFKDHPQVAKFAGLNWREKQSGNSNSQHTSLVNRGNRYLRYYLVEAANSVRRYDDEYKDFYKKKYHEVPKHQHKRAILLTARKFVRLVDVLLRNHQLYTPPRRIMEDN

SEQ ID NO: 198693 - protein, 335 aa, unidentified
MSKLEAGKRCYVGVDVSARELVVAIGAGGEPRMERVGNDAAGHERLQAQLRALSAPVMICLEASGTYSLDVALALARPAAGWQLSLVNPRRARRFAESLGERSKTDPVDARVLAQYAARMQPEPWQPPSAAALRLRTITRTIAALVRQCVQHKNRQHALSASAALPALLVRELEVQVAFVEKRIRHLRRQALRLIQQQPELRRGWQHLQTIPGVGEASGLAILGELAVLPATLDERQWVAHSGLDPKQHRSGSSVEQKTRISKAGNRYLRAALYMPALVAVQHDPWLGGFYQRLVGRGKAKLQALVAVMRKLLHAAWGMLHHDQPYDGAKLCPQT

SEQ ID NO: 198694 - protein, 376 aa, unidentified
MSKIRFVGLDVHADTIAVAVAEMGGEVRSIGVIANRLESVRKLIHRLGPVQHLRACYEAGPTGYVLYWQLTQLGVFCEVIAPSLIPTKPGDRVKTDRRDAEKLARCYRAGELTAVWVPDAAHEALRDLVRAREAAKKDQLKARHRLGKFLLRHGRRPEGLKAWTRQYMEWIKSHVRFDQAALEVTLADYLEEVDHVAARIIKLEKAIDEAVRQATPEIRTVIEALQALRGVAQTTAATIVSELGSLSRFQSPRQLMGYSGLVAREHSSGNRVQRGGITKTGNSHLRRVLVEAAWAYQHRPNVTGFLLRRQKNLALSEEAKKVAWKAQQRLHKRYKALAACGKNKNQIVTAVGRELLGFIWAIAVETEKQQRHAQAA

SEQ ID NO: 198695 - protein, 339 aa, unidentified
MQDTKFNIYRHYIALDWSKAIVAMATMRDSGGKVEIQMFQPDTRIIKEEIKKYKGSKILTIEETTTSHWLYVELKESVDKILICDPYRNSLLKDGPQTDKIDAKKLCILLRSGMLKEVYHTIEKEYEIRKLVSAYIDVIKASVRLKNQRSAIFRSEGKNHRKEKVLSDSSIKRFITQKQNELLEHYRETIERYELEFKKIEKLNKAIQNLKTISGIGTKTAIMIYSTVIDASRFESKYKYWSYCGLTKQYKESGGKVYRSKPKRYSKLLKRCYKSSALAAINGKSDIREYYEYLLQEGLSIEKARHQISRYISKVSYAVMKNKIEYRAYQWRESKEKDS

SEQ ID NO: 198696 - protein, 312 aa, unidentified
MSLQESPVFIGVDVAKLSLAIQFPDRLWSTVNTPAGHTALVAELRHFGAVHVVCEATGGYERALVLALHAAGVRVSVINPRQIRDFARACGRLAKTDALDATIIRDYGCRLQPDPDPAPAPGEVEFAELIRSRQDLVGLITEEINRREHTTLPVLLKLSRARQRQLERQLAALDALIDAQVARQAALAAKTQRLQQVSGVGRVTALTVVALMPEIGTLRDAEAAALAGVAPMNRDSGQHRGQRRIHGGRPALRRVLYMAALTATVHNPILKAFYQRLRQNGKPAKLALTAVMRKLIILLNRLLKNPQFNLVS

SEQ ID NO: 198697 - protein, 460 aa, unidentified
MTPPPPVLAGLSTGNRGTRRRAPVSDRPVTSPLAGSSLPPLLSQGDRVSLSELSVSFFVGIDWGATEHAVCVLNENGHEKTAFTLAHTAAGFADLIRRLSKLGDPIQIPIGIERPDGRLVDALLEAGFPVVPVKPNAIKAWREAEVLSGAKSDTADAAVIAEYLRLRQHKLRPATPYTPQTKALRTVVRTRDDLVGARVAAANQLTALLDAHWPGAKAVFADVESPIALEFLTRYPTAASAASLGEKRMTAFCVKHGYSGRRSATVLLTRLRDAPAGNTDATLTEAIRDAVLAMVTVLRALGAALKDLGRSTAAHLDEHPDSEIFTSLPRSGQINAAQMLAEWGDARTAYDHADAVAALAGLCPVTKASGKHHAVSFRWACNTRFRQAMVTFADNSRHASPWAADTYKRARGRGCDHPHAIRILARAWVRVIYRCWLDHTPYDPTLHGTTHQTTAHTTAA

SEQ ID NO: 198698 - protein, 383 aa, unidentified
MNDHSEAFVAFDTAKLRNAVAIADGGRGDEVRFLGEFDNTPAATAKLVRKLAAKYKRLTFCYEAGPTGYGLYRQIKSLGHECIVGAPSLIPKKAGDRVKTNRRDAISLAKLLRSGDLSAVWVPDRQHEAMRELTRARETAMNDLRAKRQQISAFLLRRGVHYPPDKKTWGKMHINWLMSQKLEFTEERIVFEELMEAMRQAQGRLDRLEAAIRAAMPDWSLCKLVIALMAMRGLDIVSAATIVAEVGDLSRFRTPRELMAYVGIVPSEDSTGDKVKRGPITKTGNRRVRRMLVECAWSYQFPPRLSKDKQVKVEAVPQAVREIAWKAQSRLNQRYRALLRRGKLKNIAITAVAREFVGFIWAVAQAVGAAPAAANTKAPAVAS

SEQ ID NO: 198699 - protein, 318 aa, unidentified
MDVHKESITACIMDKEGNVVRQHTFPYNKESIKAFLFGISNAEIEIAIEACGIWRGVYNVLKELGYRVKLANPNKTHDIACRKKTDKVDSRILADLLRANYLPEVYIPDEEMLRLRDITRHKSNLTRLRVEIQVKIKGYLLRKGVKYGKIWNEKALSKLAEDDPDIKNLINVYWSLREEEKEVMRRIRKIAMNMRKANLLMSMPGIGEFSSLMILAEIGDIRRFKSPKQLISYAGLCPGIYQSGSTERNVRNNAVNKWLKWIVYECSGRATMLDSRFQEYYYKIKQRKGFKTARRAVARKMLTIIWYMLTNEEPYRNN

SEQ ID NO: 198700 - protein, 357 aa, unidentified
MSIVGGLDIHRKQLTFDWVDDEQNDKWERGRIAPADREHLADWLTRFDQATVPVAFAMEGCTGWRYIAEEMAKVGVDAHLAEPADTSALRGPKRRAKTDKADAKLLRELLAAGRLPECYIPPAQVLEWRALLELYQDLRSQHTGWAQRIQAVCFHQGTTAPGQAGIVRGDRARLKAIVDEQLSISGRLQVNTALAIMDVLAEHLDRLRRRLLSTARGVNGARALMHDIYGVGPMTSLALCAWLGGADRFSSSRKAVRFVGLDITVHSSDGKRSHGRLSRQGPEVLRWLLFEAAKTSARPCAPGYDYYTQVKDRYDANRACLSQARRIVRHATHILTGLGDEAFTVVAQPAAPTTIAR

SEQ ID NO: 198701 - protein, 461 aa, unidentified
MRIKRSLPARLAAPVPTSERTKACEAPGIRLTHDGATMQNLKGTRMKTWQEITHYAGFDWAKDHHVVVVVDRQGQIVADFEFEHSLEGWQRFAEQTSAWPHLAVAIETSQGAAVDQLLQRQYTLYPVNPVAAQSYRERKAPSGTKTDHIDGWALADALRTDGQDWKALEPLDGLTQQLRLLCRDEVSLIEQRTALVNQLQQALLEYYPTVLAAFEDWTDRFTWDFILQFPTPAALVKAGPRRWEKFLHTHKLWRPQTAPKRLALFAQADQFKASDPIVRAKSQLAVSLCKLLRTLAQQLELYRQQITALFQDHPDHDLFGSLPGAKEVLAPRLLAAIGGDPARYGSPEVLQCVAGTAPISYQSGKINKVRVRWSCDKFMRHTVHLWANCFRKRSAWGQAYYQKKKDQGMSHACALRCLGQRLLKILFRIISDKKPYDAEFHACNQQKHGSWVLKLIDQPAT

SEQ ID NO: 198702 - protein, 455 aa, unidentified
MGQRTVGIDLAIRGDHVARVLDDGQPYGKPIRFRLTSESLGNLIARLRAGVAPDRTITAVMEPTGMSWFPVALWLKQAGIKVIRVKGQRVRALRRYLSEHTKTDAADADVLGAIPMFGGIPADPVYVPNAEQHALQRLTRQRERLEDEVTAIKRRLLDLIRWACPAIEAVLPDLRTNLSLAILHDLFDPAVVAKTRRTTLLRFVAKNASGNHPHTGPFAEALVDGLNLAAAETKRLHGMAVDFGLVQLEVTLEVDRLRLLEAQLSRLGREIEKLYVKLHPSDALRTIPGIGLALGPLVLGVLHEAQRFAGLHQLRGFCGMFPRVNSSGGTDKPGQAITQSGNNRIKRALFLAADAARRIDPGLAEVYWRLMVRKGHHHKQALCAVANRLVNRIGKVLRTGEAYELREIDGTTITVAEGRAIVAERFSIPAEIRNARRRHRPDAAPGWAGAAASVG

SEQ ID NO: 198703 - protein, 339 aa, unidentified
MLIIGCDYHPSMQQIAWVDKETGECGERRLLHRAEAESFYRDLKGKQVRVGIEATGHSRWFERMLAELNFELWIGDPAEIRAKRVRKQRNDGFDAQHILKLMVEGTFPRIWVPTAENRDLGQLVWHRHRLVGMRTRVMNQLQAVAMNEGIRRKKRLWSEKGRQELESLSLMPWTTRRRQKLLDLLDRLDPNVDQLSQAIEQEAERMPEVKLLMTHPGVGPITALAFVLVLGTAERFGCGKQVASYLGLIPCEESSSERWRLGHITKQGNKLLRFLLGQSAQSAARCEEQWPRQYAHLSMRRNKLIAQVALARKLAVRLYWMWRNGWDYQQLKKFGSYVG

SEQ ID NO: 198704 - protein, 355 aa, unidentified
MSVYVGIDVHRKRSQVAVINEGGEVLANRNVPNGTQPVLGVIGGLPPGTPVAFEAAFGWGWLVALLEDYGFAPHLVHPLQCKAIASARLKNDKVDAAILAQLLRADLLPEAWIAPPPVRQLRAMLRHRAQLVRLRTLLRNRIHAVLADHGHDRPAGCWSGPGRAWLAALELPAVSREVIDDDVALIDALQVPIDRLDWEIHQRARSEPAVKVLTQLPGVGPFTALVLLAEIGDISRFGSARKLASWAGLTPTVRGSDHTVRHGHISKQGSAWLRWILCEAAQTAKRHPDFAASYQAMARRRGKKIATTAIARKLLTRAYHLLTAASGGEPASREGRQAPGELAFSHEPASPRSMT

SEQ ID NO: 198705 - protein, 401 aa, unidentified
MQDTQQRDAVDVFVGVDVGKGHHHAVALDRNGKRLYNKALPNDEAKLRALIAELKTHGRLLFVVDQPSTIGALPVAVARAEGVLVAYLPGLAMRRIADLHAGEAKTDARDAAIIAEAARSMPHTLRSLRLADEQLAELTMLCGFDDDLAAQVTQTSNRIRGLLTQIHPALERVLGPRLDHPAVLDLLERYPSPAALAGTSEKTLANRLTKLAPRMGKGLAAEIVQALSEQAVIVPGTQAATIVMPRLAQQLAALRKQRDEIAAEVERLVLAHPLWPVLTSMPGVGVRTAARLLTEVAHKSFASAAHLAAYAGLAPVTRRSGSSIRGEHPSRRGNKVLKRALFLSAFAALRDPVSRAYYSRKIQQGKRHNQALIALARRRCDVLFAMLRDGTIYQPKSAPNA

SEQ ID NO: 198706 - protein, 387 aa, unidentified
MAQVNDLSRSLTAFDLISTLVVVVEMSKASWLVSGAVPGVERQPLKKLEPDATALLRLIERWRNEALRAGRPISRIALAYEAGRDGFWLARWLIARGIEAHVIHSASVAVSRERKRAKTDRLDAAMLMRVFLGWLRGERGHCGMVAIPTMEEEDARRPSRERESLINERSRITNRMKSALARLGVRGFKPHLRKAPERLAGLRTAEGTGLPANIIEEFRRDMARLALVREQINSIEKTRAERLKRAPDTGPHAMVRLLARVIGIGIETADMLVREILSRKLRDRRAVARYAGLTGSPDESGLKRREKGLPKAGNARVRRGLIQLAWRFLTFQKDSALARWYRTRTEGPSGARKTTMIVALARKLLIALWRLVTTGEVPDGVELRPAG

SEQ ID NO: 198707 - protein, 318 aa, unidentified
MANSTTVSAGIDTSKNKLDAAIHGRKGTTCVSNDQAGWKTLADHFAAAGVTRIGIEATGGYERGVTRYLQKAGFTVRVIQPLQIKAFAQMRLRRAKSDQLDAHLIAAFVHLIGEQDQMPPDPRFDALADHLTFIEQCEEDSVRFSTRLEHTPAGHLRKTLEADVKRMATRRGKEIKRLIAALCAHADLARRFELVLSIPSIGERTALSIVIRLPEIELVNREQAAALAGLAPFVHQSGKFAGEPHIGGGRARLRRSLYMAALPGAHRWNPQLIALYRRMTAAGKSPKSALIACARKLLIFAITVVQRGTPWQDRPVAG

SEQ ID NO: 198708 - protein, 377 aa, unidentified
MSNCTRYLGLDVHAETITAAIAEGRGRIRNLGKCPNRPEAVRKLLEKLGGGKNLKVCYEAGPTGYALYWQFTQLGVDCEVIAPSLIPRKAGDKVKTDRRDAEKLARSYQSGDLTPVWVPTPEHEALRDLVRQRAAAKHDESRAKHRLITLLLRHASREPNGSRAWTHPWWRWVQALKFEHEARQVTLADCIAEVLHMGERLARLEQAIDRLVESAPPHMRAVIAALQALRGVAKLTAVTIVTEVGTFQRFHRPTQMMGYTGLVPSEHSSGARQAQGGITHTGNAHLRSVLVEAAWHARHRPWLNQRLKKLLPTLPAGVAEIAWKAQERLHRKFGKMIYSRKHAGVVAAAVARELVGFIWAIGTMVEAKHNETMARAA

SEQ ID NO: 198709 - protein, 360 aa, unidentified
MVMLAEDYDYVIGGDPDRDTIDLAVVDTATGGVRGHLADTADDPGYRRLVDWAVAHAPGRRVWALEGTGSFAAGLADVLARAGEDVVEITGSRRSRGAKNDRIDAAAAARTALAREQQATPRTRGLREALRQILTTRQAVLVSRTKAINELKSLIVVAPEELRARLRGMTVTKQLDRIADLVSPAGAAVEYRVTVLTLRSIATRIRFLFTQTAELDPELLALVKIHPAGPALLAEPGVGPVAAAQLLISWSHRGRVRSEAAFAALGGVAPLEASSGQRTRHRLNRGGDRDLNRALHTVAITRLRCHPETRAYETRRTAQGKTHRDVRRSIKRALARRLYRCIQTATQPTPQTPAPLTPTA

SEQ ID NO: 198710 - protein, 370 aa, unidentified
MGEYSGAFVGFDTSKTKHAVAIAEGGRGGEVRFLGEIASSPVRVERLVGKLASRYDKLHFCYEAGPTGYGLYRQIRELGHDCAVVAPSLIPKRPGERIKTNRRDAVTLARLLRAGELTAVWVPDAVHEAVRDLVRARAAAAQDLRGKRQQLLSFLLRHGRIFSGRQHWTLAHRRWLAEQSFAHPAQQVVFQDAVEAIAEALARLQRLEQQLVAIVPSWSMAPVVEAYQAMRGASFLVAVTFAAEIGDVRRFDNPRQLMAFLGLVPRERSTGETIRRAGLTLAGNRHARRVLVEAAWSYRHPGRVSPTLRARLEGLPKPVRDTAWKAQVRLCARYRRLSAAGKKLPVVIAAIAREMAAFLWAIARHVAPAV

SEQ ID NO: 198711 - protein, 419 aa, unidentified
MARKRKMTEEVEEIVYERCCGMDVHKEDVKACLNINGKKEVRTYSTMTADLLEMAKWVKENDVEMVAMESTGSYWKPVFNILECEEIPAMLVNPQHVKNLSDPKTDVRDAKWISNLLRHGLLKASFVPEREMRELRELVKYRGSLSDESTRTLNRIDKVLQGANIKLSNVISNTNTKTEIMIITALANGETDVNKLASMAQGTLKGKIPQLKEALTGYMSDHQRFMLKSMHSHLKQTQEEMAVIEAEIDKRMEKDAELIERLDEIPGVGKIVAQAIIAEMGTDMGQFPDEKHLASWAGVSPNKNESAGKRKNAKSKKGNSQLKKTLVQAANSAAKAKNTYLGAQHRRIASRRGYKKANVAVAHTILIICYFMIRDGLHYNELGPDYFDKRNKDGILKRSIKRLESLGFEVTVKPKDDAA

SEQ ID NO: 198712 - protein, 350 aa, unidentified
MKKNSKAVERHPAETIGVDLGDKMSKYAILNEEGVAVEEGSFRNNVESIAKHFGERSKARVALEVGTQSAWISREFAKLGHEVIVGNARELKWITSSDTKNDRNDAMKLARLARADRNLLAPVEHRTAEQQAELAVIRARDALVKSRSLLVNTARSLAKGFGLRLPASITHTFGARALAGLTENLRTAMSGLLEEIDAVGVKIRDYDQRIKEVAAKHPEVERLASVPGVGTLTAAAFVLTLGRRERFVHSRDVGSFLGLRPRQKQSGERDPQLSISKSGDKYLRKLLVQCAHHVLGHWGKDSALRQWGLSKGTDGSSKKRAVIAVARKMAVLLHRMWTTGEVFKPFPKMV

SEQ ID NO: 198713 - protein, 360 aa, unidentified
MQTQKTELDFKGQNIFVGIDVHLKSWTVTILTEDLTHKTFTQPASADTLSNYLVRNFPGGNYNSVYEAGFSGFWSHYKLKEMGINNIVINPADVPTSQKEQLQKDDPTDSRKLARSLRSGDLKAIYIPDPSMLEDRSLVRMRSTLVKDMVRFKQRIKSFLYFYGIQFPPQFEKAGSHWSKRFMKWLSEEVTLQHDSGTQTLKILVQEAEGQRMLLLEVLQKIRLLSRSEKYAENIALLRTIPGIALITAITFLTEIENIERFENTDHFAGFVGLVPNYHSSGEKKNNGEMTFRGHSILRRSLIESSWIAARFDPALLMSYHNYIKRMESNKAVIRIARKVLNRMYYVLKNKMEYVSGVVK

SEQ ID NO: 198714 - protein, 361 aa, unidentified
MRIIGCDLHARQQTLAMLETTTGEIVKRTLLHEGNHVREFYSTLPRTVLVGIEATGSTPWFLRLLDELGIEYQVGHPATIRAAEPRMQKYDGRDAGLILRLLTENRFPAIWLPSKELLDLRALILHRHQWVRMRTRIQNALQAIALANGLRRGPSLWSHDGQQKIASLPLMPHTADRRNALQAMYQKMESEIENLTQQVADQAFHRSAAQLLMTHPGVGPVTALATDVFLGDPKRFVDGKALASYVGIIPREYSSGARQRLGGVTKQGSPLLRFLWGEAGAHAARRDPELKRFYRRKVVQKGLGKARVAVARKLGIRLWIMLRDKIDYPEFCRRGQKQQSGAACAGMPETGFGANRHRPVE

SEQ ID NO: 198715 - protein, 329 aa, unidentified
MQNKVIIGTDVSKLSLDNAIKTAQANCRVANTSKGFKQWLAWALNFGTKEELHVVMEHTGYYSYQFELFLQSHKIVYTKVHALEIKRSAGLVRGKNDKTDAMMISVYGWLRREHLKAEKIAAAVITELKDFISLRDKLVRDRSGYKSRIKEQSATRKYAKSHLQIRIQIRQIKELTEDIKQVEKAMKQLIKQYAELQKNYDLLISIKGIGFVIAAYMLAYTENFTKFTDSSKFNCYAGLVPFEHSSGTSIRGKSRVSHFANKKAKRLLNLAASVAIQHNAELKQYYQRRVAEGKSKIGTLNIIRKKLVDRMFAIIKRQTPYQENLNIAA

SEQ ID NO: 198716 - protein, 384 aa, unidentified
MQKPNDLNQSRIVLKQDSTLIAVIEMSLSSWLVAGIVPGVERQPLKKLAVDESALLKLLNRWREEAEKAGRRIERITVAFEAGRDGFWLARWLRARGIEAHVIHASSVAVSREHRRAKTDRLDTELLKRAFLGWLRGERDHCKMVAIPTTKDEDAKRPNRERQSLVGEQTRIVNRMKAALIRLGIRGFNPKLKKAAGRFEDLRTPEGEPIPPNTLAELHRDMERRRLVSDQIRQIEEARLERMEQAPGDGPHAMVRLIARVIGVGIETADMLVHEVLSRKLRDRRAVARYAGLTGAPDESGSKRREKGLAKAGNARVRGGMIQLAWRFLLFQKDSALAQWYRTRTEGGRNRKTIIVALARKLLIALWRLVTTGEVPAGVVLQAA

SEQ ID NO: 198717 - protein, 367 aa, unidentified
MKKVSTAVVRQSRNICPPKLTIGLDLGDRNSWYCVLNGAGQIQLEQGVRTNAKALREVFGKMPRSRIALETGTHSPWISRLLSELGHEVIVAHARKVRLIGESRKKDDRLDAQTLARLARIDPELLSPVKHRSAQAQADLTVIRARAGLVRARTALVNTARSLAKSYGGRLRGCNVRNMNPEKAEGLSPELQSALEPLLAEIESLSERISEYNDRIDALAQHSYPQVALLKQIKGVGTLIALTFLLTLEDPHRFRKSRDVGCYLGLQPGRRNSGQSEPQMHISKEGDPYLRTLLVQGAQHILGPFGVDCDLRRWGLKLAERGGKSGKKRAIIATARKLAVLLHHLWVSGEVYEPLHNSSRTTFAAAA

SEQ ID NO: 198718 - protein, 342 aa, unidentified
MKKSLFIGIDFSKKTFDVSVIHLNNLQSSNYHQFENCKEGYVELLKWIRTLSKESNQAWLFCGENTGLYSWGLAEFLVSKDMFIWLENPLQVKQSSGIKREKNDKVDSLEIALYAYRFQDRARSFQLPSKALKSLSLLLSFRDRLLSNKQTLLVSASELRQVMKRDTTARYIYEQSQKDIERINKKIKEVENKMLKQIESDESLQENCELVSSVKGIALINTVAILIATQNFTRFENSRQFACYAGMAPFGKQSGTSINTRPQVSNLANKKIKALLTQAAKCAMRHDPNIRRYYQRKLEEGKDKWLITNNIRNKMIHTIFAVVRNKQLYQVEYSNHLEKKVA

SEQ ID NO: 198719 - protein, 416 aa, unidentified
MEQVTWYVGIDWGSESHAVCLIDASGRRREERHIVHTAEAVQACFEWIITSAGVAPAQIAVAIETPRGALIDACLARGVLVFAVNPKQLDRFRDRHTVAGAKDDRRDAWVLADSLRTDPAAFQRVHQEDPVGVQLRELSRAEDDLDGEFRRLANQLRSQVHRLVPALLTLCPGADEPWFWALLEAAPTPAAQRRLTRARVDHLLRGHRIRRWRGADVIERLQAPSFPHAPGVVEAVDAQIRLILPRLEVVQAQRVACGRQLEQLLQQLRDRPRDTDERGEHRDIAILESLPGVGRKVAVTMLAEAAGPLAQRDYDRLRAHVGTAPVTTASGKRRLVSMRRACNRRLRWAAYHWGRASVQHDAPSAAYYRELRARGHGHGRALRSVVDRWLRILIAMLRQNTLYDVSRFAVAVESGA

SEQ ID NO: 198720 - protein, 423 aa, unidentified
MKQEGHEQQVFGAYIGLDWADRAHVISLRSADSGKVEHYELAQKPEAWAEWLSGLQRRFPGQRVAVALEQARGAVVHALMGYDFLVLYPVNPKTLAKYREAFSPGGAKDDPTDADLLLELVTLHRDRLRAWLPDDELTRTITLLVEYRRQLVATQTRLTNRLTSLLKLYYPQALAWAGELATVQACDFLQHWPTLAKVQQVAALKLRQFYVAHGCRKAELIEERLQEIKLAQPLTKDGAVITASAAMVQATTNQLRPVLEAIAQMEKQITELFNQHADRDLFSSFPGAGPVLAPRLLAALGTDRGRFAAAAEVQQLSGIAPVTERSGKSCWVHRRWACPKFVRQSFHEYAAQSIRWSAWARAYYKQQRERGNGHHAAVRSLAYRWIRIIYRCWQMRVSYCEETYQQALRRRGSPLAKLLVTQN

SEQ ID NO: 198721 - protein, 393 aa, unidentified
MFFVGIDIAKRSHEACVIDGNGSFLVKPFKFTNDFKGFNKLLDALKTVGYDVSQFAFGMEATGHYWLNLYCKLIDHNAVVRVINPVQSDALRGLYIRPHKNDSKDAFIIAELLRFGRYSETVLAEPDLLALRELTRQRTYLVDCASDAKRKVIALIDKVFPEYEQLFTDMFGSTSLKLLEAYSTPDAIASLDTNALADFLTKASHGRFGLTKAEQIQSYAKNTFGSFLFADSAGFAIKQFLEQIQLLERQVEELETYIADYLAKFNTALTTIKGIGPTLAAVFVAEIGDASRFTAPDKLAAFAGIEPRMNQSGEFTGTQNHMSKRGSPYLRRAFYQAAVSCNMHNPALHAIYEKKRAQGKHHNVALSAVARKLVNIVFAVMKSNKPYEMIMPS

SEQ ID NO: 198722 - protein, 434 aa, unidentified
MVKRRAYRSTAVKKVVVEEVLESAPAGDVHVGMDIGKDEIFAVARWANKTFERPWKAVNPTEIFPLVAILRKLAKDRGVTIAMESTGTYGDALRQALGDAGLRVHRVSGKAASDYAEIFDGVPSKHDGKDAAVVAELAALDKSWPWPIEPETDKDAKMAYWVDWLDIQQSIQMLWIGRLEGLLARHWPELTSLLDLTSATLLKMLAHYGGPTKVKADGKAAGQLACWGGPRLRQQKILAVLESAETTVGVRQNTQDIHRMRQYATMALAAFRETQKAKRQLKSLAEDNAVIQRQAKAVGVTTACVLWVTLGDPRNYHCGEAYRKAMGLNLKVRGSGKQKGKLKITKRGPSIARRWLYFAAMRLSQKPDIRRWYEAKKARDQDRGIGALIGITRKVALALYSVGVYDEPFDPWRLFPGRSLPQKARASRNPPATV

SEQ ID NO: 198723 - protein, 351 aa, unidentified
MEPSCFPPHRGQPDVAPTVALFVGLDYSQAAGQACTLDPAGQVLCNSRRPDDAGRIDQLARRFGAAQGAALEACAGAAGLARELADRSGRPMHLGHPGFVSRMKQPPDKTDFSDARALAGRERVGHLPRVWVAPKPLRGLRTLARDRRQLVAQRRNLKPQIGALLREHRPRCGHRRWTAAWRLRVEHQAPLPGQARWVLAQRLRRLGWVAAQVKAVGRRPEEVAQGDGTVRWLRTIKGLGPVTARAARAEVGRFGRFRSGKQLARPCGLSPCSRSPGDKEADAGLIRAADPELRRAFIEAAWVLIRCQPRRRQRAARLRARGKPSAAATAAVADRFARRLYHAGLRRQAAA

SEQ ID NO: 198724 - protein, 347 aa, unidentified
MNFYNNTHPHYCGIDLHARVLYVCIIDQEGNTCVHQEIPADPDKLRQLLEPYIGNIVVGVECMHCWYWVSDFCEDIGVDFILGHALYMKAIHGGKAKNDRIDSYKIANLMRGGNFPLAYVYPKAMRATRDLLRRRMKIVRHGGDLKGHVANTTSQYNLPPNKVNLKNKDAREQLKTTFPDEVVQRNIDLDMAILDCYAKELSKIEWYIQQQAKQHKPVHYHLLKSVWGIGPILALTIIYEIGDINRFESVQKFASYARLVKCKAESAGKSYGTQGNKIGNAHLKWAFSEAAVLYLRGNKKAQNYLLKLQKRMSKAKALSTLAHKLGRCVYFMLKNETVFDESKFIKG

SEQ ID NO: 198725 - protein, 414 aa, unidentified
MKLFVGIDVSSQELEACLMNPDGEKLDTLKVNNDLQGASHLRDRIVAAADKLSASEIHIGLESTSVYSWHPAMYLHQDPALKARNAKVFTINPKLISKFKEAYPDLDKTDRLDAWVIADRLRFGRLTTTIVMQEQYIALQRLTRMRYHLIHSLTREKQYFLQNLFYKCNAFTSEVDSSVFGHAILEMLSEKYSLDDIATMDVADLADYLKEKGKNRFPDPEHVARCIQKAARDSYRLSKVVEDSIDLVLGVSIQTIRSIQAQLKELDKAIERILDGIAGARCLRSIPGIGNVYAAGILAEIGDIERFDNQAAVAKYAGLTWRRHQSGSFEAEDTKRIRSGNRFLRYYLVEAANSVKNREPEFGEYYRKKYQEVPKHQHKRALVLTARKLVRLVDALLRNDQLYTPRRKVNSEKG

SEQ ID NO: 198726 - protein, 367 aa, unidentified
MPLRSERSWVSEGRRVDFQKQPEQMRGPRARILRKAGHTKIRSPSRKEPVTPTADTFVGIDVSKATLDVHVLPAQRAWSTPNQDSAVHALCKELAALNVTLIVLEATGGLERRLLAALLAANLPAVVVNPRRVRDFAKANGCLAKSDALDAAMIALFAERIRPPVRPPVDAETQELAALLARRRQVVDMITAEKNRLSADPPSERVQRAIRKTISYLEKQLDEVDNDIDTAIANSSVWKAKDDIIQSVPGAGPVLSRTILSHAPETGTLNRKQIAALIGVAPLNQDSGTLRGRRIIWGGRTEVRNVLYMATLAAIRFNPAIARFHARLIAAGKLKKVAIVACMRKFLTILNAMLRSNLQWQTTEVLP

SEQ ID NO: 198727 - protein, 411 aa, unidentified
MRRVIGMDIHRTFAEVVFWEEGRLRPAGRVSMTRSGLEGFGRGLGKEDEVVIEATGNAMAVVRTLSPYVARVIVANPLQVKAIAHAHVKTDKIDAGVLASLRAADFLPEVWLPDPDTERLRRLVARRNQVVRHRTRIKNEVHAILHAHLIPPCPHADLFGRLGRVWLAQQVMPDDECAAIERHLRELDRLGADLGVLDTQVAQAGSDDPAVKRLLTITGVNLIVAAGLVAAIGDVRRFTSPQKLVSYVGLNPRVRQSGLGLAQHGRISKRGRSHARAMLVEAAWAAAKAPGPLRAFFLRIRARRGHQIAAVAVARKLAVLCWHLLTKSADYQWARPALVASKLRAMELQAGQPVRKGNKRGTAYAYNVKTLRDAEIELARHAEEAYKRFVRQWQRRGTAKQRTGGVIEERR

SEQ ID NO: 198728 - protein, 374 aa, unidentified
MRDHSEAFVAFDTSKSRNAVAIAEAGRAGEVRFFGEIENSAAATAKLVRKLAGKYARLTFCYEAGPTGYGLYRQIKSLGYECLVVAPSLIPRKPGDRVKTNRRDALSAVKLLRASELTAVWVPDPRHEAMRDLTRARGAAVEDLRRKRQQVSAFLLRQGRHYSDGKPWTKAHMRWLASQKLEHPEQRIAFEEMLLAVRQAQERIERLEQAIRAAVPDWSLAAMVTALMAMRGIDLVSATALLAEIGDLSRFQTAPELMAYLGLVPSEASTGDTVKHGPITKAGNRRARRMLVECAWSYQHPPRVGKEKQEKVAAAPRAVREIAWKAQCRLSARYRALIRRGKLKTVAVTAVARELAGFIWAIGREVTTADAAAR

SEQ ID NO: 198729 - protein, 418 aa, unidentified
MTHVKSTIEESVLVAIDIAKARNHVLIDPPGGSPRKRFKMANAARDFRDFAVYLKGFALPVRVGFEATGNYHRPLAHFLLTQGFEVRLISSVALARTREAMHNSWDKNDPKDAQVILHLLKVGLTQIYHDPLFRGINDAQELSKTYHQVSLEKTRVQHRLLTHYLPFYFPEAQTYHHSARSEWLFRLLLAFPIPTSIPRLGEEAFIAQAGDVVGRKVNKARILADFYRTALESIGLPVAEDSQAVAMFRLVLGEYLTLCQLRGQIEQTACDFFKEDADYFRLTQVPGIALTILAEAGDLRRFSHHRQFLKFCGLDLSTRQSGRFRGATKLSKYGNARLRSAFWMAASAAVRLRENSFRAKFDRYIRHNPQDPDLKRKAYCAVAAKVARVVHGLIKNGTDYRPYHEEAIPSGGVRSGGP

SEQ ID NO: 198730 - protein, 347 aa, unidentified
MMRYVGIDVGKHRCRAALMDQKGDIVDEFFFENNCRGIEQLTSVLTKEDRVVMESTGNLWLNLYNTLDEKNIRVVLANPMKTRAIASAKIKSDKVDARILAHLLRSDLVAESYVPPKEIRFLVRHRLSLVRMRTMVKNHAHSVTDKYGYSCPYTDMFGRSGMEWLRSLEVGELDRLILDNHLEHIDSISAQIKKTDDAIRERASQDEDVRLLLSLTGIDVYTALLIRSEIGPITRFPDYKRLVSWAGLAPSTHQSGAVEYHGRITKQGSRMLRFAMVEAARVAVNHDDRLRTFYLRIRERRGDQKAIVATANKMLKIIWTMLTRRETYSNANGRRYGEKLKTIDAQL

SEQ ID NO: 198731 - protein, 369 aa, unidentified
MPHVTSIGLDVHARSVAAAAFNPFTGEVVHRDFGTDAAEIAEWALGFEGPRACYESGPTGFHMARELRALGLDCAVAAVSKMQRPAADARRKNDRRDAEFIARMLATHNIVEVPLPDAAVEAARDLDRALDDATAEYRRARQRLNMFLIRLGHVWDERNSDGTRKGSWTRAHWRWISGIRLEGPQRDVLEYYVTAARCAESDRRQLEKKVLALARTDRWRPAVEALSCIKGIDTLTAFRLAAEAGSFTRFRTAPAFASWCGLVPSERSSGETERRGGITKTGNRLARTALVESAWHYLTCTPRPKPPAPGADVPAAIRARADACTARLCRRREALAAAGKSSCKANAAVARELACWVWEIGRRAEGTLG

SEQ ID NO: 198732 - protein, 355 aa, unidentified
MNSVMYVGLDVHTETISAAVLDAEGKLVMQAVLATRASAILDFLHGLRGTIHLTFEEGTHSAWLYDLLARQVARVVVCNPRKNALLKSGNKSDRIDACKLAELLRAGLLSPVYHGENSLRALQQLGRSYTALTEDTTRVKGRLKAIYRGQAIASVGKKLYGKRHRGEWLAQLAEPGLRRRAERLYQELDALRELRREARQELLVESHKQEAVKRLQTVPFLGPIRAALLIGKVQTPHRFRTKRQFWAYCGLALETRSSADYRLRDGQVVRKQGPVFIRGLNRNHNHELKNLFKSAAISASAREGPFGTFYEGLLGKGMVPAMARLTLARKIAAITLCIWKKGETFDAEHLKSQAA

SEQ ID NO: 198733 - protein, 347 aa, unidentified
MNKRDDCGVEVSSERLLAGLQREGAPRLRREFPNTPQGDEALVRWLAVPVSRRVRVVMEATGLYGLDLALRLDAEASVELMVANPRAVRHFAQALMKRSKNDPIDTDVLVEFARRMPFHRWVRPSAAALVLHALARRLESLTEMHAAEKNRRHAAQLSPALPAVVVRDLQRSLRSLERALQRLTRQAVDLIGQDPDLNLRYQLLLSACGIGPTSAVQILAELAVLAADLNVRQWVAQAGLDPRQYSSGSSVHKKTRISKTGNRHLRRALYMPALVAIRHQPHLRAFYLHLLARGKAKMQALVAVMRKLLHAIYGMFKHHQPFDGTKLYRLPADSPLPQPTFSTAEAA

SEQ ID NO: 198734 - protein, 347 aa, unidentified
MRFYNRQHRHYCGIDLHVKTMYVCILDSAGQVLVHRNVPSTPAALLETVASYRDDLVVAAECMFTWYWLADLCAAEGIAFVLGHALAMKAIHGGKAKNDKLDSHKIAVLLRGGLLPQAYVYPATMRSTRDLLRRRLHLVRKRGQLLAHIQNTRHQYQLPAFERRIAYPANRDGLSERFPDPSVRKSIEVDVALLDQYDALISDLELTLVRDAKRHNADAFHRLRSVPGIGKILALTILYEIHDITRFDRVQEFASYARLVKGQKQSGGKMLGTSGAKMGNVHLKWAFSEAAVLFLCRNAEGKRLLAQIQKKHGKGKALSILAHKIGRAVYYMLARGTVFSMEKFLHA

SEQ ID NO: 198735 - protein, 352 aa, unidentified
MDRYVGLDAHATSCTFGVMGPSGKRLKSMVVETNGAALVEAVKSIPGRVHLCLEEGTQSAWLHELLSPHVAELVVAVAPESKGAKDDRRDAWARANELRTGSIRTRVYKAPLHLAALRNAVRGYGFAVRDAVRAMCRLRSVFVSRGVVVNNGIYNAKGRVKWLAKLTPPHRRLAEWLGGQLDQLVPLREAAEEWLLEEAKTHPIIRKLATAPGMGPIRTAQVVAITANPHRFRTRRQYWSYCGFGIVTRSSSDWVQTKDGRWERSPVHQTRGLTRKRHPLLKAVFKGAATTVITQLPEHPLHKDYERMLAAGIKPNLAKLTLARKIAATVLSMWKHQEVYDPQRHRAVSDKA

SEQ ID NO: 198736 - protein, 353 aa, unidentified
MSHLPEEREVILGVDTHLDMHVAVLIDVVGRIVATTSVSTTALGYEQLIEWARGFGRLTRAGIEGTGTYGAALARRVHAHGVQVLEINRPDRSRRRLRGKSDPTDAENAARAVLAGEANAIPKAQSGVVEAMRAVSMARRSAVKAKTQAINQLRALLVTAPESIRATLWKVKPEQCVARCARLQSLGDTPLLKALTSTLRLLARRWMSLAKELHQLDAALEELTKRAGRRLLTRFGVGPQTAATLLVTAGDNPNRLRSEAALAALCGASPLEASSGKTTRHRLNRGGDRAAHNALWTISMVRMRSDPRTRAYVTRRTAEGLSTKEIQRCLKRYIVRELYPLILADLAESIRKT

SEQ ID NO: 198737 - protein, 367 aa, unidentified
MEKSSTVFAGMDVHQESIDITLAEPGGEVRRLGQIGGDRGSLRKMLRRQQSKGRKLVFVYEAGPCGFWIYREITALGHACMVVSPSLIPRRAGDHVKTDRRDSERLASLARAGELEAIHVPDIRDEAIRDLVRARDDAVIAQRRVRQQLKALLLRNDIRYVGRTSWTGAHRRWLSELKLPEPAQRIVFEEYVDAIVVATARIERLTRAIETEVAGWRFALVVGALQAMRGIQFVHAVTLIAELGDLTRFASARQLMGYLGLVPREDSSGEHRHQGSITKAGNSYARRALIEAAWAYRHPARVTRIIATRQTGIPKAVCDIAWRAQLRLSAKYRRMNARHVNHNKIVVALARELSGFVWAIGQSVKPQ

SEQ ID NO: 198738 - protein, 371 aa, unidentified
MTEAVKYVGLDVHKETIAVAVADGERGGEVRFVGTVANEDDAVRKLVKRLTAPGVRLSVCYEAGPCGYGLHRLLTKLGQACIVIAPSMMPRRPGDHVKTDRRDAMTLARLLRAGGLTAIWVPDEAHEAVRDLIRARRSAQEDATGAKQTVRSFLLRHDRRFGGKAAWTKMYWRWLSEQRFDFPHQQLAFEEMQKRVLEAQARVGRLEAALGDAVDAWRFAPLVRNLQVLRGIRLVSAATLVAEVGDLTRFDNPKQLMAYVGLVPSEHSSGARTKRGRITRAGNAQARTMLIEAGWSYRLPAREERRYRERVIDLPEEIQAIGWKAQVRLCQRYRRLAAAGKPQPKVTTAIARELVGYAWDIARRVPPAVAT

SEQ ID NO: 198739 - protein, 476 aa, unidentified
MAVPNEDSKKPAKSKKPTNPNRARERSLAVPVPASAAPLTVVNPDAAGIDVHSDMHMVCVPADRDANPVRQFGAYTADLHEIVTWLHKCGVKTVALESTGVYWIPLFELLESEGFEVNLAEPGQLSRCGARPKTDVLDAQWIQRLHSYGLLRGSFRPPESVLALRAYFRQRQMLVRYAASHVQHMQKALEQMNVKLPEVVTDITGLTGMSIIRAILDGERNPVKLAKLRDARCHHSEEQIALALQGTWRPEHLFELRQAYELYQFHHRQISQCDQQLETELGRFPNRAGEKTRTVKPRGRGRKSNDVRFEAKGPLFQALGVDLTMIEGIDVGTVLAIAAEIGPDVSRFPSEKHFASWLRLSPPQNQSNKTNKRRGHRKSTSRVTIALRLAARSVGKTKTPLGMFYRRIRSRIGGLGAVKATAHKLACLVYRMLKYGQEYVTQSMEEYKAKMETSVLNALKRKAAAMGYQLNPLPAK

SEQ ID NO: 198740 - protein, 458 aa, unidentified
MPRRQRRTTRAVTTPVLHPHAAGVDVGATELYVCVPLDRDPQPIRRFGTFTEDLRAVATWLTQCGVTTVAMESTGVYWIPLYQILETRGVAVCLVNARHVKNVPGRKTDVQDCQWLQYLHAVGLLRASFRPPETVCAVRSLLRHRDSLVQLAATHTQHLQKALTQMNLQIHHVLSDITGVTGLAILDAILAGERDPQVLAGHRDRRIKASSETIAKALVGDYRSEHLFTLRQSLVSYRHYQQLIGACDAEVRTHLGTFASQIDPAVSPLPPSTGSRRTPRSTPSTPRFDLRTELYRILGTDLTQVPGLQTPTVHAIFSELGADLSAFPSGAHFASWLGLCPDNRISGGKVLSVKTRHVKHRVAYALRLAAQSLSRSQSVLGGFFRRMRAKLGAPKAITATAHKLARIVYHLLTTRQPYEESRLAAAEADHRRRTESRLRAQARVLGFQLVPVIGQSVS

SEQ ID NO: 198741 - protein, 358 aa, unidentified
MRIIGVDLHARQQTIAMLDTDTGELEEKTLGHEGETVREFYSALSGPILVGIEATGSMQWFLELMEELGIECRVGHPAKIRKAETRKQKHDRRDARLLLTLLAENRFPTIWMPSTEQRDLRTLLRHRHQWVRLRSRVQHTLQSMALNRGLRLGHSLWSRVGQQALRALPLAPHASKRRAALLVLYPHLQGSIDELDKEVCEEVSQHPQARRLLTHPGVGPITALATEVFLGDPQRFIDGKALASYIGMIPSEHTSGRRQRLGAMSKQGNALLRYLWCEAAMHAVERDPELKRFYRRKLVQKGLGKARVAAARKLGIRLWIMMRDQIDYQEFCRRGKARQENGSVHAGMPDLDSGPAAQ

SEQ ID NO: 198742 - protein, 313 aa, unidentified
MSELYVGIDVSKECLDVAFSDGRECQFGNDPQGHGQLRELLLQSPPQLIVMEATGGLERSAAATFAAAGLALRIVNARQVRDFAKASGRRAKTDRLDAQVLVSFAQAMKLEPRELPSEQQQGLQALIARRQQLIEMLVMEKNRLRTAHRDVKRGLKKNIDWLEQQIKHADQDLGSALRECGVWREKVELLESVPGIARVTALRLLASLPELGTLNRREISALAGVAPFNCDSGAWSGKRCIYGGRAFARSALYMSALVGVRYNAVLKVFYQRLRAAGKPPKVALVACMRKLLTIINSMIRHRQPWSPKLMDLA

SEQ ID NO: 198743 - protein, 352 aa, unidentified
MTCTRIHIGVDVSKATLDFFAPGAKRAKTVANRPSGVRRIVALALRNGWSVCCEATAIYSSALIDGAHAAGIPVAVANPLRVRRYAQGKGILEKTDAIDARVIAQYADDNQPRPVPKPTDEERLLRELTDGREFYLRQVQEVSGRLEQCPRGSAIRKDLERTLRQHRNTLAQIEKRRSRLVASSPALSYRRDRFTLVQGVGETVALNVMAAIPELGTLSGKTAAKLAGLAPIPDDSGKEKKKRKIAQGRLDVRNSLYMAAVVAAQHNPVLSVFYEKLLAKGKLKKVALAAVMRKLIVLLNRIAQDEAFIPLSGGGKAKTTRRKTGKQRKPAKAKPLSEVPSGKKQTKSSEIP

SEQ ID NO: 198744 - protein, 412 aa, unidentified
MKRIRDRVGGLDVHRDTVVACARVVNPDGSVHVTKQSFSTTSKGLGELATFLSDAAVDTVAMEATGVYWKAPYYALEGLFEELWLCNASHVKNVPGRKSDLSDAEWLADVAAHGMVRPSFVPPPEIRELRELTRYRKTQVDARAREIQRLEKVLQDAGIKLTSVASSVWSLSSREMIEAMIAGERDPKVLAEMAKSRLRAKIPQLEEAFSGHFGSHHAIVARQIIDHIDFLDRSIGALTDEITTRLVPFEGAVALVTSMPGISVTTAQVIVAETGADMRRFPTPGQLCAWAGVAPASHESAGKRRPAGTRHGAPWLRRALIEAARAAARTKGTYYHAQYARIAKRRGPNKAAVAVANSMLFTIWHLLTTGAYYEDLGADYFERRHDPAVEAKRLARRIEALGFHVDLTQTAA

SEQ ID NO: 198745 - protein, 399 aa, unidentified
MMRFVGIDIGGERHALAVVDEDGTVLTKSTFFGEEAAGYKRVRELLGNADDCLVAMEATGHYWRNLFAFLASLGFEVALLNPLRTRRFAEEELERTKTDSVDALGIARFAAQKRPAPTPVSDEVTAELRELVRLRTRYVDELSDRMRQLHRAVDLGFPEFTRHVRIRTLLATAILARYPTARSFARVSVRKLARLTYDGRHRVGETLARALIEGAKVSVGNHHSEPYQLHVKYTCADIELLRGRVKQLEQDIERKLQTHEVGKLLTTIDGVGTQTAACLIAELGDPSRFRDAAALASYVGVVPRLRQSGKRAFSGARGLPLGNTRLRHRLWMPTLVAVRKNPWLRAHYEHLLAAGKRPKVAIVACMRKLLGAIYSVARNRRPFVPHLATAGHEQPVTAG

SEQ ID NO: 198746 - protein, 408 aa, unidentified
MTVVGIDVSKGKSMVAAMKPGGELVAAPYEVRHSDIELSHLALDVLCMEPDTRVVMEATGRYHEPVAALLHSEGIFVSILNPLLIKQSGAGSLRKVKSDPKDALKIAKYGLDNWSTLLEYTPMEAIRQQLKLCARQCDLYNKNIVMLTNNLISLSDKTFPGVNELFSSPEKADGHLKWVDFYRSFWHCDCINRMSPDAFGERYKKWCKRKGYHFSTDAADALYAASCGPYTTLPRDNNAKLLVTVAADQLIALRENQSKLEAEMLNLCKQLPEYETVMAMYGVGKSTGPHLMAELGDVRRFPHRSSIVAFAGVDPGVVGSGKMQLSSVTTSKRGSPQLRKALFQVVSTYVKCKPENEAVYQFYAKKRDEGKPFFVCTTAAANKFLRIYYARVKECLNAVESATQVEEG

SEQ ID NO: 198747 - protein, 342 aa, unidentified
MQITTIGLDIAKNVFAVHGIDAAEKVVVRKQLRRGPVLAFFKALPPCLIGMEACATSHYWAREFTKLGHEVRLMPAKDVKAYVKRNKNDAADAEAICEAVRRPTMRFVRIKSAEQQGQLMQHRTRDLLMRQRTQVINALRAHLAELGIVAAQGDKGVKELLALVTDKEDTRLPIDARASVIVLAAQLEATQTVIGAIEKRIKMQHRSNEASQRVETIPGIGVIGATAIAATVADPTVFRSGRDFAAWIGLVPRQDSTGGKQKLGPISKQGDRYLRRILVIGAHSVLRRAMQNPEKYPWLTRLLARRPFKVVAVALANKMARMAWALLAHGGTYRAPALVAAA

SEQ ID NO: 198748 - protein, 400 aa, unidentified
MISIGIDISKEKSTVCMLRPYGEVVEPPYNVAHNESELNALIEHIQSFDEDVKVVLEATGGYHHIVVSKMLSAGIFTVVVNPYIMKKYCAATLRKAKTDKIDSVKIANYGIDHWFSMTAYCPPDEVYAELKLLGRQYEQYVRLKVGCKIHLAELLDGVLPGIKKILTGNVPAFSTKDKLCDFVEKYWHYDHIKKLSEEQFLVSYEKWSKKKGYRYNESQAIAIYQLSKNNIPTLKSSTSSTKMLVLQAVKSVRDAELTLSLIISQMQEIASTLPEYSVVNEMKGVGAVLSVRLIAEIGDVRRFHNGSALVAFAGIDAPPYESGSFVGTNRHISKRGSASLRKIGYEIMHALKVTKPTDDSAVYDFMIKKENEGKPKRVAKIAGFNKFLRIYYARVMEVYC

SEQ ID NO: 198749 - protein, 403 aa, unidentified
MNRNAVGIDVSKGKSVVAILRPYGEIVSSPFEIKHTSGNIRSLIDRIKSIEGESRIVMEHTGRYYEPLARELSLAGLFVTAVNPKLIKDFGDNSLRKVKSDKADAVKIARYTLDKWTELRQYSLMDELRNQLKTMNRQFAFYMKHKTAMKNNLIGILDQTYPGVNTYFDSPARKDGSQKWVGFAATYWHVDCVRKMSLSAFVCHYQKWCKRKKYNFSKAKAEEIYGAAKELVPVLPKDDLTKLIVKQAIEQLNTASKTVEELRARMNETAAKLPEYPIVMAMKGVGPSLGPQLMAEIGDVTRFTHKGAITAFAGVDPGVNESGSYEQKSVPTSKRGSSSLRKTLFQVMDCLVKTQPQDDPVYAFIDKKRAQGKPYYVYMTAGANKFLRIYYGRVKEYLASLPE

SEQ ID NO: 198750 - protein, 345 aa, unidentified
MKIIGCDFHPSFQQIAICDLETGEVQERKLSHADGQAERFYRELCEPALIGIEATGNSQWFLDLVQRLGHEIWVGDAAKIRASYVRRQSTDKRDAGHILTLLLEKRFPRLWRPSAAVRDQRQLLRHRDKLVEIRTKVKNSLQHLAMNRGMQKKSRLWTRQGMEQFQQLGMPGWAGVRREDLLHLLKQLNRQIEQLDQAVKQAAEQHPQAQLLMSQPGVGPVTALAFVLTIGDVGRFAGSKQLTSYLGLVPSEHSSGSKRRLGAITKQGNCFLRKLLVEAAQTAVRKDEGFRKEYQHRCHHRPKAVAKVAAARKLAVRLYWMLRSNVGYPEIAHIESNPRVPLGDV

SEQ ID NO: 198751 - protein, 359 aa, unidentified
MSTITIGVDLAKSLFSACEVDGAGHVLRRQDLRREPFGLWLAQQPAGTVVAMEACSGAHHWARRCLEVGLQPRIMAAQFVKPFRKGGTTKNDRADAEAIATAARQGNMRFVPVKDIDQQVRLSWHRVREGYKAESLAIGNRIRGLLAEFGVIVAQSDLALRRLLADLDAQIGLPSEFKELLRDLADHWKQLRIHFDACDARIEAHAREDERCVRLRAIIGVGAITADAVVATVGNAREFKHGRQMAAWLGLVPTQHSSGGHARLGEISCRGDAYLRTLLIQGARSSLQRAKAVAIEKATPEQRWIRTLDGRMPFGKVIVAIANKHARQIWAMLAHDVDYDPHACMNHPMHRRTQAVQAA

SEQ ID NO: 198752 - protein, 335 aa, unidentified
MLEEGSVGNNRAALSELGGRYPEALVVMEAGCHSPWVSRHLEQAGCEVVVSNPRKTRAIYQHERKSDRRDALMLARIARMEPALLYPVRHGSEEAQQELLRIKLRDSVVRARVALINSLRFTLKSLGYSIANPSTERFHKVIQSALPQSVAQVIAPSVQALEELTLRIKLLEREISDQARSKYPDTAWLEQIPGVGPITALYFVLKIEDPARFKRARDVGAFLGLCPRRDQSGENDPQLRISKRGDAYLRRLLVSSAQYILGPFAPPSALRQYGLALASGATARAKKRAVVAVARKLAVLLLTLWKNKSSYEAFPQRSSREKMRTNDLERLRCIA

SEQ ID NO: 198753 - protein, 423 aa, unidentified
MMKLKYPICCGLDVHKNVIVATIVTTNKDGISEYLQKSFSTINSDIQRFHNWLIENNCYHVCMESTGKYWIPIFNYLENDIDVCLTHPKYVKAIKGKKTDKKDSKWIADLYKFDLVRCSFIPPKDFRQLRELSRYRFKLVCMKSSEKNRIQNCMTISNVGIASVLSDPFGKTATEIISYLLEHTADSMDEKAVRKLIKKGAKSKSDEIIEAIKGYTIETDQAKKLELARGHLEYLDDMITQTEVELYVRIKPYYEFVEFVSTMPGMTELSSTIVLAETGVDMDIFDDAKHLCSWCGLSPANNESAGKKKSVRIAKAGDYLKPMMVQCALAAIKSKKQPYFAIKYGRIKKRRGHKKAIIAIARMMMVCIYHMVSEKKPFTPADYEELMKPQNHVERVVLNENNVFAYLESLGYDSSKLVKRNDN

SEQ ID NO: 198754 - protein, 1034 aa, unidentified
MLLNMMCGRRLSAISLCLAVTFAPLFNAQADEPEVIPGDSPVAVSEQGEALPQAQATAIMAGIQPLPEGAAEKARTQIESQLPAGYKPVYLNQLQLLYAARDMQPMWENRDAVKAFQQQLAEVAIAGFQPQFNKWVELLTDPGVNGMARDVVLSDAMMGYLHFIANIPVKGTRWLYSSKPYALSTPPLSVINQWQLALDQGQLPTFVAGLAPQHPQYAAMHESLLALLSDTKPWPQLTGKATLRPGQWSNDVPALREILQRTGMLDGGPKITLPGDDTPTDAVVSPSAVTVETAETKPMDKQTTSRSKPAPAVRAAYDNELVEAVKRFQAWQGLGADGAIGPATRDWLNVTPAQRAGVLALNIQRLRLLPTELSTGIMVNIPAYSLVYYQNGNQVLDSRVIVGRPDRKTPMMSSALNNVVVNPPWNVPPTLARKDILPKVRNDPGYLESHGYTVMRGWNSREAIDPWQVDWSTITASNLPFRFQQAPGPLNSLGRYKFNMPSSEAIYLHDTPNHNLFKRDTRALSSGCVRVNKASDLANMLLQDAGWNDPPGGQGRACLRQAPRIIELYQIFSFIVNYGTIRMELWIGCEPLPLDGFRRVRPQTSFNLLMSWIPLDGSYLARIHYDEVSVALMHSCQFKKRRLIFMLCIGIDVAKRKHDCCIIDSDALKTVESFTFPNSREGFDMLLSKISELGIPKDKIRVGLEATGHYSSNLAHFISEHDLPLLTFNPLLTNRYKQGFSLRKTKTDKVDACAIAQMIVSGKGSQTYSSSLYHNEEMKSLSRYRSQTMQKCSKLKISVSRLVTILFPELEGLTSSIHLASIYALLKAYPGHEQIAHCSMKRLTHLLSDASQGRFDKSKALEIHQAACRSIGKVSLSASMELVHTITDIEVLKQHIVEIDEKLKEMVDQEESSIIDIPGIGYTLCASILGEVGDFKRFPDVDKLLAYAGMSPSKHDSGDYHSKHNKMEKRGSPYLRKTLYLAARLVAQNVPKFKEYLEKKLSEHKPYKVALSHVAKKLIRLIYRLGISGCPYLA

SEQ ID NO: 198755 - protein, 457 aa, unidentified
MRKKSKRTKGIEEAHPFSGMSRIHPHAAGVDIGAIEIVACVAGDENTQIVKAFGNYTVDLQALACWMKDHQVKTIAMESTGVYWIPLFEELERQGFECLLISSRFLRRVAGRKSDISDAQWIQTLHTYGLLEGSFRPQGDLVALRTLLRHRSQLVEHRSPHIQHMQKALLQMNVQLSQAVTDVTGMTGQKIIRAILTGERDPQTLAAMREPGCKKSAEEIGKALTGSWREEHLFVLNQSVMLYDFYTEQIQACDLEIERLYGLTRPDWDRGEVQPLIKRKKNSHSKNLPHNAEEVRKHLKRISGVDLSAVDGFGVSLAQTVIMEVGTDMSKFPDEKHFCSWLGLAPKHEISGGKVLKNNTLKTKNRAGQAFRMAAQSVKQAECVFGAFYRRLRARLGPSQATVATAHAIARVVYRMLKYKVEYEPLRVNEYQKHYEEQQIKYLKNRAAKFGFQLLPT

SEQ ID NO: 198756 - protein, 430 aa, unidentified
MMEEVDDAELVVERIAALDLGKAGLEACVRVPSPHRPGRRMQELRGYGTTTAQLLEMVAWLRHWGVQRAVMESTSTYWKGVYYLLEAEGFECWLVNAREVKNVPGRAKTDRADAIWLAKVAERGMCRPSLVHPAEIRRLRDLTRYRRALVQDRTREQQRIEKLLEDAQIKISSVLSELHGVTARAMMDALIAGQRDPRALAQLAKGRARKKTAQLEEALRGFFTDHHAAILRMMLDNTDRISAQIAALDARIEKEIGPFSGQVARLAEIPGVDAVAAAELIAEIGVDMTRFPSDAHLVSWAKFCPQTHESAGKSKSKGRGRGNPWLAGTLGRIAFANSRADTFLGARYRRLARRRGKQKAIVATGNSVLTVVYYLLSDPMATFCDLGPGYYESRINVHRRARDLVTQLQALTGQHIVIRDGKAVITDAAA

SEQ ID NO: 198757 - protein, 425 aa, unidentified
MLAVGIDWSEEFHLVALGRPGEGVFDVRRVEHSPKAVDALVERIAALEPDPAEVRVVLESRHGLLVERLLDAGYVVVPVNPDLVARRRGPAKKKDDAEDARIACLLALDRFERLRPLIPHGELAGELRAIARDDERAARDERRLLNRLRQDLLATFPAALQIAGADPGAPTFLRLLERWPTAQALAQAPRAELISFARNCRHGWPERFADKVEAALAGDHFQPRAYLVRAKADTIRLSAQQLLAIGQQRRAWERRMGQLLLGAPRHGRSRQPREDERGQSFPGGEVYLSFPGLGDRLAARVAGEIGDHPEQFESPNALQCYAGKAPVTRRSGKSEFVISCRLAYNRHLGDAVQQWAFCSLRSSPWAREFYDSKRAAGKGHHAALRALGNRWLEILWHCLQRGLLYDEAVHAANRNRALQPLAQAA

SEQ ID NO: 198758 - protein, 366 aa, unidentified
MSEVSLNLVCRVGVDLAKRVYQVHGVDGLGKVLVARAMTPSRFFEWCRSLPPGCVVAMESCSGAHHVSRRLALLGLDARILPAQHVGAYRVAGKRSKNDATDAAAICEAASRPHLHPVPIKTAAQQGMLAIHRLREGYKEERTALINRIRGLMAEFGLVFPQSPDALHAMLPEALEDASNELPGDLRLALDRNLKHWGQLDAEMAWCEQRIAQHARTDARAKKAAELMGIGPITASAVVATVDDFTQFKSAKQFGGWTGLAPSQNSSGGKTRLGGITKRGDVYLRTLLIQGAKSAVMTAHKRHDPISQWLVQLKERVGWQKTVVALANKNARILWCVMTRGDRFDPHHVPRRFAPSQDTVPHLAPA

SEQ ID NO: 198759 - protein, 440 aa, unidentified
MAKVINFDQIHAHGAGIDVGAKEIFVSIDGEQVVSFKPFTDDYHQCCRYLKEHGITAAAMESTGVYWMSLYSVLEDAGIKVCPVHPRETQQVKGRKTDVKDSQWIQKLFSAGLLRESIVAEGVLKELRMPVRERLDLLEMGSTYINKMQKFLELMNIKLKNVISQIHGASGIRVIKAILDGERDEEKLLSLCDVRIQKNKAEDVKKALRGNYSPHYLMLLKENMRLWDEHQNSIRTIEKEIERLLDRMCADKLHLPVESAPKPARHHNPDIKDLHGKVVRLFGGVNLSTISGINDVTMLRLLGETGSDMSRFPTVKHFVSWLGLSPKNRQSGRMKKRVKSSSNNAGEIFRQSAQSLLNSKYNATGAFIRRLKGRKGSPIAIKAGARKLAQAYYLALTKGLDYVEQGAIKYAQLLKQREIRSLRKLAHKHNCFILELRSVT

SEQ ID NO: 198760 - protein, 346 aa, unidentified
MKNNITVGVDLAKEVIQVCVVVRGKMISNTEMTPQEFRCFLTKTKSCIIVFEACATSNYWKQVSISQGHDARLISAKLVSQIRQNQKTDKNDALAIVQASQLTDIRFIQGKQFSQQELQSISRMRELAVKQKTATSNQLGALLLEFNIRVSNRNGGLNGVVQSTLEDAENDFSSEFREALYETWQGYLALVTRIAKYDDHLNTSVENTPACKKLMALEGVSTINAVNLYTTLACSGDSVFSSSKDASASIGLTPIQYSSGGRVKLGGIGRRVKNALVRSNLISGAMAVIRQVSQREPRTAKEKWLKALIERRGNKCAAVALANKTVRTAFAMLRDGTEYHAQALTD

SEQ ID NO: 198761 - protein, 341 aa, unidentified
MDNCGIDLHLKSSEVCVVDEAGETSERATIPTTEKALVRWFGSREPMRICIEASGLSPWVARVLAGLGHEVIVANAQRVRLIAESTLKNDRVDAETLARLVRMDRGLLRPILHRNEQTQRLRGMLRVRRILVNDRTACVNTARGLLRSFGYRVAGGKTERVARALIAGKVPEELCALVAPLIATALELDEKIKALDQEVVEAGHGFPEVERLQQVPGIGPLVALAYVLCIEDPTRFRTSRDVASFLGLRPKMRESAERSRFGSITRAGDAEMRRLLVQAAHGCLRSRQESDLKRWAEQLAGRVGKKKAVVALARKLAVLLHRLWVSEQAYQPRRTDLAAAA

SEQ ID NO: 198762 - protein, 400 aa, unidentified
MLSIGIDVSKGKSTVCGMKPGGEIVYTPFEVQHTREGMSELVSLLRGSGEEVRVVLESTGSYHCPVVAALLENGIFVSVVNSLRMKRFCSQSIRKVKTDRIDAMQIALYGLAYWQELQPTKLPEDTYRELQLLARQYYQMTSLLIKAKVDFNAICDQVLPGMQELMSDHAGRHKLSDFVLRYHHTAHILKMGETRFRKDYCKWAEKKGYRNHERMAALIFATAQNGIPVLPDAPSTQIVITEAIRVLHTVEASRDAILTQMQALAKTLPEYSLVREMPCIGDTLAPRLIAEIGDVRRFHSKRALIAYAGIDAPPYQSGKFCANNRHISKRGNRYLRKTGYEVMQSYVMHKPANDPIFTFIEKKRGEGKSGKLAMVAGLNKFLRVYYGKVTELYRSLPAIE

SEQ ID NO: 198763 - protein, 336 aa, unidentified
MRRQRKPNDLSRSLIPLDLDTTLIAVVELSLSSWLVAGIVPGVERQPLKKLKTDENALLTLLNRWRDEAVRSGHKISRIAVAFEAGRDGFWLARWLRARGIEAHVIHASSVAVSREHRRAKTDRLDTELLKRAFVGWLRGERDHCKTAAIPTLREEDAKRPSRERESLVGEQSRLVNRMKATLIRLGIRGFNPKLRQAEQRLEILRTPEGEPIPANTLAELKRDMQRRRFICDQIRSIEQERLERLKRTPDTEPHAMVRLLARVTGIGIETADLLVHEVLLRNMRDRRAVARYGGLTGSPDRSGGTNREKGMARSGNARVRRGMIQLAWRFLLFQT

SEQ ID NO: 198764 - protein, 355 aa, unidentified
MDSAKYIGMDVHKESISMAVRNAAGKVVMECVIETKANMILEFVDGLRGEVYITFEEGTWAAWLYDLLKPHVTRLIVCDPRRNFYLQEGNQNDRVDARKLAELLQNNQLRSVYHGDHGLRTLKELVRSYLTITQDLSRVMTRVKAIYRSWAIPCTGKQVYASRHRCEWLGKIVEAGPRQRAEFYYRQLDALRLLRREVRRELLAESKKHTAWKRLCQIPSIGPIRAAVLLGILQTPHRFRTKRQLWTYSGLGIEVHSSADHQVVKGQLQRKKKHVEVRGLNRNCNHDLKNLFKGAAVVAATKPGQFEKLYSALLAKGMRPEMARLTLARKIATIVLIVWKRGVCFDANHLKPQTV

SEQ ID NO: 198765 - protein, 468 aa, unidentified
MEDNPVRRQRSKTEKAKQPTLLERIKINAAGIDCGSRQHYVAVPVDRDVEPVRRFNTMTPDLYRLADWLKACGIESVAMEATGVYWIPIYEILEARGFEVVLVNARHVKNVPGRKTDVVDCQWIQELHSLGLLRGSFRPSAEIASLRAYLRHREKLVLDAANHIRRMQKSLGLMNVQLHNVIADITGKTGMQIVRDIARGATDPKALASHRDYRCRASEEEIAASLTGNYRHEHVFVLRQNLELYDSYQRQIQTCDGEIESLLQDLAAKQGTPVAALPPARRRHRLQKNDPRFEIRSPLHRLSGADITQIDALGPYTALRLISEIGTDMTCWPTEKHFTSWLTLAPRNKITGGRLISSKTQPSANRAAAMLRMCAMSVGKTSTALGAFYRRLGYRIGKAKAITATARKLAILVYRVLRGDIDYQDPGADAYEAQHRTRTLRNLRNRAQRLGLGLINLETGEVLERGVS

SEQ ID NO: 198766 - protein, 347 aa, unidentified
MSAYAGRQVVGIDLHRRRSVIVRTTASGEVLESVQILNDVERLNSVMERAGEDPEVVLEATYGWYWAVDALQAAGAEVHLAHPLGVKAFEYRRVKNDVRDATDLADLLRMGRLPEAWIAPPATRELRELVRHRAKLVGLRSHCKAEVHAVLAKCGIQVLMSDLFSVAGNQLLDRVPLPGPYAARVQSLRRLIEDLEEEIDLFARLVRGRLVADPGYVALQQLPGVGPVLAAVFTAEVGEVTRFHTAAQLGCWAGLTPKHHESDTHVHRGRITKQGSRLVRWAAVESVKRLGPTTVVGAYKARVAERRGKNIGTVAAARKQIEFVFYALRDHHVRALHPPRRPAAPAA

SEQ ID NO: 198767 - protein, 374 aa, unidentified
MQSIVYVGMDVHVDNFTFACYEFGKRPFAQNQVKNADWRTVIKYLENVQKNRPGEEIHFVCGYEAGCLGYSLYHELMKAETSVSLDCIIMAPTTMAVQGNKPKTDHRDAVMIAQNLANNTYSSVYVVDEEDNGVKDFIRMKDDTKARCKALKQQILALCLRHGEQYTDAGKWTLKHRDWLKKLDLGERNSNRALQEYLHQLSQVEEDLERYDREIEEIAAGERYAEKVGQLRCFRGVETCMALAFLSEIGDFRRFASAERFAAFLGLVPGEHSSGGNINRTSITKQGNSHLRKLLVEAAQSYTRANLYEKSKKLKEKQCKQNRQIIDYCDRGNFYLGRKYHRLVNRGKNSNVAKTAVARGLACFIWGLMTENIS

SEQ ID NO: 198768 - protein, 367 aa, unidentified
MKKISTVAVKQSRNCSEQKLTIGFDLGDRSSWYCVLDEAGSVRLEQRVSTTPKAMKEVFGGMPRSRIALETGMHSPWVSRLLSELGHEVIVAHARNVRLIGESRKKDDRLDARTLARLARIDPQLLCPVRHRSAKAQADLTVIRARAGLVRARTALVNTARGLAKSYGERLRGCNVRNMNPEKAEGLSPELQTALEPLLAGIESLSERIRECNERIEELAQKSYPQVALLKQIKGVGTLIALTFLLTLEDAHRFRKSRDVGCYLGLQPGRRNSGQSEPQMHISKEGDPYLRTLLVQGAHHILGPFGVDSDLRRWGLKLAERGGKNGKKRAVIATARKLAVLLHRLWVSGEVYEPLRNSHRIAMPAAA

SEQ ID NO: 198769 - protein, 334 aa, unidentified
MQNVTLIGIDLGKHSFHVHCQDRQGNALLRKKFSRTQLINFLGSCKAATVVMESCGGAHFMARRIADLGHEAKLISPQFVRPFVKSNKNDFVDAEAICEAASRPSMRFVPPRTEDQQAMAALHRVRDSLIRQRVKTTNQMHAFLLEFGVSLPRGIAVIRRLAAVLEENDFPPYLARVLSRLHSHYVYLSGEIEEVDKELKTHLVEDETAQRLLTIPGVGPVTASLLAMRLGDGKNYASSRDFAASTGLVPRQYSTGGKTTLMGISKRGDKNLRRLLVQCARVFMQRLEHNPGRLAEWVNRQLARHHSNVVACALANKLARIAWAVTAHQTVFIK

SEQ ID NO: 198770 - protein, 357 aa, unidentified
MGKSIKNLSSVTIVGLDIAKNVFQVHGVDAKGAAIVARSVRRGGLLKFFASLPPCLVGMEACSSAHHWARSLIELGHEVKLIPPAYVKPYVRRNKNDAVDAAAICEAVGRPNMRFVPVRSVENQAELMRHRARELLAGNRTRMLNALRGHLAEVGIVAAQGAQHAYGLKRLLTDGCDENGEIVVADCVRKALAPLVQQIDAIDEEIEAIDDHIKAQVKADDTARRLARVPSIGPITASAIVATIRDPSAFASGREFSAFIGLTPRQSSSGGKERLGRITKMGDRYLRKLLVVGACSVLNHRKGHNDALRVWADQLLARKAVKYKFKLTAVALANKVARIVFALMTRGGEYDDRPLAA

SEQ ID NO: 198771 - protein, 442 aa, unidentified
MKQKKVLKKVVKGLPKNLQHINVHAAGIDIGSRSHFVAVPEGIDEMPVREFSSFTGDLEQMAAWLISCGVTTVAMESTGIYWIPAFEILERRGIEVKLVNARHVKNVPGRKSDVLDCQWLQQLHTYGLLRGAFRPDAQVCTLRAYVRHRAMMVRSAASYIQRMQKALSQMNLQLHNVVTDITGMTGMRIIKAILSGERKPEVLAAMRDWRCKNSVATIARSLQGNYRPEHLFSLQQAVEFYEFHQEKVSACDQQILEHLKSFDSQNDKPPKNVGEALQLMSGVDLTSIDGIDTNTALKILAEIGTDMSRWKSAKHFASWLGLSPGTKVSGGKVLSSATKPVANKAAAALRIAAFTLLNSKSALGAYLRRQKARLGAPKAITATAHKLARLVYMMLKQGTAYVDAGQEYYEKRYRGRVVQNLKRRAQELGFELVAIQEARTPA

SEQ ID NO: 198772 - protein, 400 aa, unidentified
MTTRHERIWVGIDAGKGHHWAVAVGADGETLFSTKVLNDEAQILALIDTAREKADEVRWAVDISGRSSALLLALLIAYGQQVVYVPGRTVNRMTGAYRGEGKTDAKDALVIADQARMRRDFTPIETPPELVSTLQLLTGYRRDLIADRVRLINRLRDLLVGICPALERAFDYSAAKGPVVMLTEYQTPAALRRIGVKRLTTWLERRKVRGAGDIAAKAVEAAQSQLTALPGEKRAAKLVCDLAHQLLTLDERIKDNDREIRETFRADERAEIIESMPGMGPVLGAEFVAIVGDLSGYRDAGRLASHAGLAPVPRDSGRRTGNYHRPKRYNRRLRWLFYMSAQSAMMRPGPSRDYYLKKRAEGLIHTQALLALARRRVDVLWAMLRDKRLFTPTPPVTQAA

SEQ ID NO: 198773 - protein, 317 aa, unidentified
MIYLGIDIAKHKFDAALLTQGKFKTKVFANDKAGIGACLKWLAMRAASPVHACLEATGAYGEALACALFDAGHTVSVINPARVKAYAHSLGLRQKTDAVDAKVLAQFAHAQQPAAWTPAPPEVRALQALLRRLDALIEMHTQEHNRQGVAEPTVAASIAEHLDYLKLQIDALKAQIESHIDQHPGLKQQQALLESIPGIGAATSAWLLGELNLRRFDSARQAAAFAGLTPRMRESGSSVRGKPRLSKQGNSLLRKLLYFPAISAMTHNPLVRALCVRLKAKGKHTMAIIAAAMRKLIHIAFGVLKSGKPFDPSFANS

SEQ ID NO: 198774 - protein, 366 aa, unidentified
MSDSIQFVGLDVHSKSIALAFATGRDPAMFVCELTNDVGRLLKALDRLGPRDGLRCAYEAGPTGYGLCRALTRAGIRCEVIAPSKMPRAAGDKVKTDRRDAMRLAHLLRCGDLTTVRVPDEASEAMRDMLRSREDAKRAQLRARHQLSKFLLRHDRRWPKSNWTKQHIEWVEQQVFEHPAQARVLQECLHAVNESSARIQRYDALLQELAPTTEQADLIEALQAFRGIRLLTASSIAFELGDLRRFSSAKKLMSYIGLTPSEDSSGDRVRRGGITKAGNGGLRRLLVESSWAYRHAPREAYLLKKRAERVSPNIRKIAWAAQVRLNARYKKMMGRGKGAQKTLVAMARELAGFIWAVGQERTLIVN

SEQ ID NO: 198775 - protein, 339 aa, unidentified
MELYAGMDLHSRNTLVGVIDSSFKRVFEKRVPNDLSLIVDRLEPFGDRLAGIVVESTYNWYWLVDGLMDRGYRVHLANPSAIKQYEGLKHTDDRHDAFWLAHLLALGILPEGYIYPKEDRPVRDLLRKRSFLVKHRTAHILSLQSMLEREKAYKLRGNEIKSLSPEDIGRIFSEEHLVLSAQANRASIEFFGHHINRIEKAVRKRVKLRKSFEYLLTVPGIGDILALTIMLEVGDIARFPRVGNFSSYARCVSSQRLSDGKKKGQGNRKNGNRYLAWAFVEASHHARRYNERLRSYYQRKCAKRNQAVATKAVCNKLARACYYIIRDQVAFREEALFCS

SEQ ID NO: 198776 - protein, 326 aa, unidentified
MFEHTFIGLDVHAVNVVGHALNPATGEISRHTMPADPAMVLEWIRRFAPPVKVVYESGPTGFVLARHLRAAGINCVVAASSKLLRAPGDRVKTDRRDALALAEMLAVGSVTEVRIPDLEEEALRDLSRLRSGAAKDLAHARQHVNAILLRHGIRYPRESRWTQEHRLWLHRQHFDEPALQFTYQADVEQAELLAGHLKRIDEQVTVTAAACRYGPVINALMCLRGIQVTTGFGLAVEIGDWTRFTGSSVGSYLGLVPSEESSGQSRHQGPITKAGNTYARKLLIEAAWQHRRPYARPGTRLLRQLDLVDPATRIRALEGNHRLHHK

SEQ ID NO: 198777 - protein, 358 aa, unidentified
MGQNKKLDFSNQDIYIGLDVHKKNWTTSIFTKEFEHKTFSQDPDPDILVNHLHRNFPGANYHAVYEAGYCGFWIHDELKARGIDCIVTNPADVPTKDKERKRKNNQVDAIKLARSLRSNELDAIYIPSREALEDRSLLRSRRNAVKEQTRYKNRIKAMLSIYGIRIPEQFKEGGWSGYFIKWLESICFNKHTGKKTFQFYIDELKHCRKKVAYLNKEIRLLALEDRYRDKVKYLKTIPGIGRLTAMILLTELVDFNRFKTLDHLASYIGLVPGEHSSGEDDDENFTSITARSNRYLRSILVECAWVAVRKDPALALCYKKLIKRMKGQKAIIRIARKLLNRIRHVLNNNQEYVTAVVE

SEQ ID NO: 198778 - protein, 312 aa, unidentified
MTPSIIGIDISKDRLDVHRLPDGAAKRFTNDMAGHTALLDWLAQTRVARIVYEPTGAYHRALEQALAAKGLPLAKVNPRQARRFAEATGKLAKTDRADAAMLARMGLALAPDTRPLPSQILRDLKELHLARQALMKDWTAAKNREKSLRLPLLKRQNQKRQRQIETQIAAVEAEIASRIAANAELAERLAILESIPGIAKITACALLIEMPELGTLDGKQAASLAGLAPITRQSGRWTGRAFIRGGRASLRQALYMPALVATRFNPQLKAKYHQLITAGKPTKVALTAIMRKLIVLANALLRQRRNWAENPA

SEQ ID NO: 198779 - protein, 321 aa, unidentified
MTYIGIDVSKDTFVVAYSPNKNSKTKLFKNTTRGIHEFIRTISKEDHHCVMEATGNYSALLVYLLSEAGITTSLENPLKVKNFARAMLSTVKTDEIDARLIALYGEKMQPAPYKLRSDAILTLKQKRTVIRQLKKQLIATRNLKGSMEALPFFDAKCRKSVEKTIAFLEKQVKDLEEDLASLAKSEYKKQMDLLTSVKGIGITLAAALIMATGGFTYFDNAKQLTRHLGLSPTYQQSGTSVNFKGHINRNGDSSLRSQLYVAAFSSIRCNTECRACYDRLRSKGKPGKVAVIAVANKLIRQAFAVVTQEKPYVDGYVSSKK

SEQ ID NO: 198780 - protein, 341 aa, unidentified
MQITTIGLDIAKNVFQVHGIDAEEKVVVRKQLRRGQVIRFFEELSPCLVGLEACATSHYWARELTKLGHEVRLMPARDVKAYIKRNKNDAADAEAICEAVRRPTMRFVEVKSAEQQARLMQHRARDLLMHQRTQLINAMRSHLAELGIIAPQGREGVKELLAIIANEATTHLPNDARASLIVLAAQLQALQTTIAAIEKRITVQHRANEESKRLQTIPGVGVIGASAITATVTNPKIFRSGRDFAAWIGLVPRQMSTGGKPKLGPISKQGDRYLRRILVVGAVSTLRRAKLNPERYPWITRLLARRPFKVVAVALANKMARIAWALLISGKTCRAAWFATA

SEQ ID NO: 198781 - protein, 390 aa, unidentified
MIYVGIDVAKDKHDCCILGSDGEVLFSPFTIQNTLQGFDELYEKIWSLTYDLTEIKVGLEATGHYHLNLLRSLLDNGLPSFVINPLHTNLYRKGQSLRKTKTDKVDAASIAMMLITDKTLKSYSDSSYHNEELKSLTRYRFDKVQERARLKTSVSRLVNILFPELEKLVPSLHMASVYTLLSEFPGASFISAAHLTRLKHLLHDASKGRYGRDMAVSIRDAASSSIGSVLPAKSLELKHTLHLIEVLTEEIDEIEDAINSIMDAIASPITTIPGLKNRMGAMILAEIGDFSRFDSPDQILAYAGLSPTTYQSGQLTSSYAHMEKRGSRYLRYALFNATRYACIWDPTFKAYLAKKRAEGKHYYVAISHACKKLVRVIYRMQLTGESYRTA

SEQ ID NO: 198782 - protein, 434 aa, unidentified
MKEITEDYFEKDIIHPVCCGIDVHKTWNFAAIVINDVEHHLAHYKTERFSNFAKGQKALTEWLKMNHCTIACMESTGQYWYPVFDAIEDAGLHPVVAHPKYTKPQHGKKSDPSDAIWIGKSYASGRVIPSFIPPRKFRNLRGLVRCYVKLSYTANSNKNRVLNCLTDAGIKLDDTFSDVFGKSSRAIVNHIIQHPRELFDVTPFIDKSCKTPIPKIQEAIAKVPEMSDAILKKMEIALEIVDKHEEYRKEIQETVEKELGEYQHILDLIRTVPGFNTNSFTAVRVLVEIGPDIHVFPTAKHFCSWAGVGANHDSSAKKVKSRKISKGGQYLKPLLVNIAKAVVRSKNHPEITRRFNRIKNRRGYMRAIIAICKMFLTAIWNILSKDEPYRADGYMTKNNKAKKIMTTSQALALLRSRGYTIIDHNSEPLTTTGS

SEQ ID NO: 198783 - protein, 345 aa, unidentified
MELSTVGIDLAKTVFHLVGLNLLGEVVVRKKVSRAQLLRFTANLSVKLIGMEACGGAHFLGRALREQGHEVRLMPAQYVKPYVKTNKNDYIDAEAIAEAVSRPRMRFVPIKTDDQLDMQSLHRVRERWVMRRTAIVNQVRGLLLERGITLQKGRSHVDALLPRILEDADLKLSGALRNLLAQLKLELDQMAMRINEADTMLNRTARENASCRRLVAIPGIGPVTATALIAAIGNGAAFRKGREFAAWMGVVPGEYSTGGKQKLLGISKRGNSYLRRLFIQGARAVLQQSTKQTSGLSAWLANLKARTHTNVAAVALANKLARMAWAVLAKDEPYRPPMLANLVKA

SEQ ID NO: 198784 - protein, 368 aa, unidentified
MGTIVCVGLDVHKETIAVALAHREPPAEVVSLGEIPNRPESIRRLVQKLMARHELEFCYEAGPCGYAIYRQLRAIGLHCRVVAPSLVPSRPGDRVKTDRRDAVKLARLLRSGELTSVWVPDPAHEALRNLTRLRAAAHHDLTRARHRLSKFLLRAGCVAPADAKTWTKRYLAWAHAACLPEPLDARVRDDYFDQVAHFTERIAVLDRLIEETAASCPMAPRIGALCTMRGVSTVTATTLIAEWGEIGRFARPRQLMGYAGLVPTENSSGASVRRGQITKTGSSYLRRVLIQAAFAYRHRPLLRGNLHRRQQGQPEAVRRIAWKAQQRLNRLYIRLLARDKRHQKIVVAVAREMVGFLWAIDREMCQVA

SEQ ID NO: 198785 - protein, 367 aa, unidentified
MNDGVDAPDGIVVPDVVLQATEEASMEEISTVGLDLAKHVFQAHGADSSGAVLVRKRLRRDQVLTFFAALPPCTVAMEACAGGHYWGREIAKLGHTVKLIAPAYVKPFVKRQKNDASDAEAICEAAQRPTMRFVAVKSEEAQASAMVFRTRDLLVRQRTQAINALRGHLAEFGAVVAQGPVHVPKLIAIVEDPASELPETARVILALLVDQLRALDERVAQLDRDIARRAKEDTIARRLMTIPGVGPVTATALAALAPPVETIRRGRDFAAWLGLTPLQRSTGGKQKLGATSKMGERTLRRLLVIGASAVVRHAARRGSPSGSWLARMLQRKPRMLVTVALANKMARIIWALLSKGGVYKAPVVLAA

SEQ ID NO: 198786 - protein, 415 aa, unidentified
MEQMFPHCAGLDVHKKTVVACVLVTGAEGKLQAIKRQFATTLAGLEQLAAWLLSYGVTHAVLESTGVYWKPVYNVLAPQCEVWVVNAQHVKQVPGRKTDWNDAEWLARLMCYGLLERSFIPDEEQRELRDLTRYRTRLTGERAAAANRLEKTLEDANIKITSVLTDIQGVSARAMLEALIGGESAPEVMAELARGRLRAKLPQLEEALAGRMRPHHRFMLRELLTHLDHIGVSIATVNERIAELTAPYEAIIQRLSAVTGIKRHTAEVILAEVGPDITPFPTAKHLASWACLCPGNNLSAGKRRSGKTRRGQPWLRAALVEAAWAASHSLDTYLAAQFQRLRARRGDKRAAVAVAHSILTIVWHLLANPEAVFTELGGDYFLKKNPEREQRRAVRKLEALGFTVTLTPVVTAAVT

SEQ ID NO: 198787 - protein, 406 aa, unidentified
MTGKAKLMARVFIGVDPHKLSATIEVVDDKETVLATGRFSTDKAGYTAMRKHVAGFTERTWAVEGSNGAGRPLAQRLLADGEHVVDVPAKLSARARALDTGHNRKTDPHDAHAVAVVAVRTPALRVLAYDVQLEALRMLVDRRAELSQARIQTVNRVHRLLSELVPGQSKRDMTTGQAKKILATVRPRDVAGKTRRRLAAEQIAELVAIEKKIKALTKELKAMVLASGSTLMDLPGVGPVVAARTIADTGDVDRFADRNRYASWTGTAPIEASSGEVVRHRLSRAGNRRMNHMIHIAAATQIRLDTPGRAYYLRKIAAGKSRREAMRCLKRRISDALYRRLRDDAATGVDAGPGGHSGATLQSSAAGLHPHTGTSDQRLPGPAPTTLPEPMTTRKTTVRKALQPAP

SEQ ID NO: 198788 - protein, 355 aa, unidentified
MRHDGSCNASIKQEEETEMQITTIGLDLAKHVFHVILCNRAGKVVKKKQLRRRQVLAFFAQLEPCLIGMEGCASAHYWGRELEKLGHRVRLIPAQHVKAYVQGNKNDYNDALAIAEAVVRPRMRFIPLKSAAEQDMQALHRLREGQMKMRTALCNRLRGLLAEYGLVFAKGVNTLRKQLPQLMENAENGLSELFRQMLAQGQRQLQALDEQIAAYDQLIQTQSRDHEACQRLQAIPGFGPMVASAFASHVGDGQGYRRARDVSASLGIVPRQHSSGGKEQLLGISKRGDRYIRCLLIHGARAAVHAAAKKDDPLSQWINRVRARRGMHKATVALANKMARIGWALLYHKTSYQPA

SEQ ID NO: 198789 - protein, 347 aa, unidentified
MTKNTATHCQETIGCDLGDKKSEICVLGADGKVKDRTSVRTTRKAISEWFSRPAAHVVIEVGTHSRWVSAVIRMLGHRVTVANPRRVKLISANDNKTDRHDAELLARLGRVDEALLSPVVHRGTQVQADLAVTKARDMLVSTRTKLVNHVRGTVKAFGERLPTCSSASFCAKTRELVPVVLKAALDPIYEVLDGINKKIGEQDKMVEGVAKKYPDVNVVSQVAGVGILTALVFILTLEDKDRFTKSRMVGAFLGLRSRKSASGNQDPQLRITKAGDPFMRRLLVNAANHIVGPFGRDSDLRRWGLGLANRGGKNAKKRAKVAVARKLAVLMGRMWKDGAHFETAASA

SEQ ID NO: 198790 - protein, 367 aa, unidentified
MKKVSTVSAKQSRNFSQPKLTIGLDLGDRWSWYCVLDEAGAIVLEQKLGTTPKAMRDVFGAIPHRRIALETGTHSPWVSRLLNGLGHEVIVAHARNVRLIGESRKKDDRIDAQTLARLARIDPQLLCPVKHRSAKAQADLTVIRARAGLVRARTALVNTARGLAKSYGERLRGCNVRNMNPEKAEGLSPELRTALEPLLAGIESLSERIGECNERIERLAKDSYPQVALLKQVKGVGTLIALTFLLTLEDAHRFRKSRDVGCYLGLQPGRRNSGQSEPQMHISKEGDPYLRTLLVQGAHHILGPFGADSDLRRWGLKLAERGGKSGKKRAIIAVARKLAVLLHRLWVSGEVYEPLRHRQQRAMPTAA

SEQ ID NO: 198791 - protein, 391 aa, unidentified
MEARVVNNLSPAAAHDGAVRCLLAIELSKKSWVAAVNTPLSDKISLHKLKPCDWKELLQLIERIRKRITQELKKPVEVISCYEAGYDGFWLHRLLEAQGVRNHVIDPASLQVDRRARRAKTDGIDVGKLLRSLMAYLRGEPRVWSVVRVPTIIEEDDRRLHRERSRLINERIQHVNRIKGLLAIHGIYDYEPMHPERIQRLERLRTADRHSLPLRLKAEILRELQRLELVLGMIQTIETERDAIVSVKSKSQQTTSTKKIKHLVKLKSIGPEFATVLVGEVFYRTFNNRKQIGSYVGLTPSPFQSGSTSRDQGISKAGNTKARTTMIELAWLWLRNQPDSLLSVSFRERVGSRKGRIKRIAIVAMARQLLIALWRYLETGVVPEGAVLKCK

SEQ ID NO: 198792 - protein, 359 aa, unidentified
METQRKALSFKGQNIYIGIDVHLKSWSVTLMSEATQLKRFSQSPDPDALYAHLVRNYPEAEYHSVYEAGFCGFWIHYRLVGLGIHNIVVNPADVPTTTSEKLRKTDAVDSAKLARSLRAGELKGIYVPGSESLETRSLIRLRDSITKDQTRLKNRIKSHLRYLGIEIPEEFSGPGRCWNRRFVVWLKGAETGTAYGRQTLDFLVRQYEALRGQRLEMLRAVRALSRTERFEKPLENLMTVPGIGQLTGMSLLSEIDDIRRFKSADQLAAFIGMIPMCHSSGEREGVGDITVRRSARLRSVLVEASWVAVRQDPALSMAYGSYCKRMAPGKAIIKIARKLVNRIYFVMKRNQPYVKCVVA

SEQ ID NO: 198793 - protein, 316 aa, unidentified
MQQTKFVGVDCHKNTLACYVDGKFKEFKTDFKGFKKALQWAGNDCSWALEGAYSYGLTFSTFLLKSGCKVYEFNALATAKARKALSICGQKNDWGDAKVISIFAPQSELQEVSTKTVKLKQIITKRKLLVTQRTQITNNLKSSFNQLGITTPFRNFKTIKAYKWFQNQEDVCIQQFGKMLQSLNESIKTLEEEIKKLIPEQAKKLTTITGINTLTAATIYTELKGKEMAKVQLASYCGVAPIDCSSGMSDKHRNNHRGNRILNSILFAVANIQIKYDEIGSAYYTKKLQEGKSKKVARKHLQRQLSNLLWKTLFKD

SEQ ID NO: 198794 - protein, 353 aa, unidentified
MTKVVAGPQAGQAVFIGLDVSRSKWAFNVRWDGQERRRFTTAAELRHLRALVEEYRGCEVHLAYEACGFGYEIAWWLIPRGVRVVVVAPSTVERAHGLHVKTDRLDAGKLAQRLEQGALKSVFIPSRADHERRQLSRTYAQAVQDRKRAQARLRALLQEQGRIGPPPTVGWKAYATWLGEQPLPPAVRMCVEELLGLRQQAQQSAGRLRAAVLRVAAEAAYAPVVRGVTKQPGMGTFSAIRLRLELGDLRRFRTGGSFVNYLGLVPSEYSSGDLVQRGHLVKCGPGYVRAWLVQCAWVSIRGAHPDAALRDVFSRLRPRLGEKRAIIAVTRRLALRLRARWLEALNPPPVQAA

SEQ ID NO: 198795 - protein, 319 aa, unidentified
MGKSKVEYEQVIDRGCGLDVHRDTVVATVMGKGIKTETRTFGTTTSSLNELGEWLQSLKVTDGAMESTGIYWKPVLHVLRAYPLNLIVVNARHIKNVPGRKTDKADSQWICKLLISGLLKGSFIPPENIQELRDLHRYKKKLIGIVASEKNRIIRVLEDANIKLSSVVSDTSGVTASYLIKGLIEGRKDLEKLISECYHRKLQANPQQIKEAINGRLTAHHGFILKSMQKHIASVEEQITEIDAEIEKYIKDFEKEIELLQTIPGVGKEGAIGIVSEIGVDMDVFPDEHHLASHSGMCPGNNESAGKKKVQKHDMEIKI

SEQ ID NO: 198796 - protein, 357 aa, unidentified
MMIIGVDHHPSFQTIAFFVEETGECGEQELNHSDGQAEKFYRDLKQRGICVQVGMEATGYARWFERLLAELGFELWIGHPAEIKAKRVKKLKYDREDARLILRLMRENNFPRIWVPGPENRDLRQLLWHRHRLVQMRTRILNQLQALAMNEGYHWRKKLFSEQGRALLEKLSLAPWASRRRQELLELLDRLNPTIEELTAAVEREARKRPEALRLMTHPGVGPITALAYVLIIGTPARFECGKQIGTYVGMIPCEESSGGKQRLGHISKQGNSLLRYLLVEAAQAAAHLHPDWRRRYMHLAMRRHKSIAKVAMGRRLGIRLYWMWRNGCEYSPSLESVRTRDSSVVPLRIPTRTQSA

SEQ ID NO: 198797 - protein, 372 aa, unidentified
MGIKTDYNSKILAMTTKTNKLDFSGQNIYIGLDTHKNSWKVTILTDTISHKTFSQNPDPEVLCNYLVRNFPGATYYSAYEASYCGFWIHNRLTELGIKSIIVNAGDIPTTNKEKVQKEDKRDSRKIAKCLRNGELLPIYIPSQRNLEDRNLMRIRLMIAKDTRRIKNRIRSLLFFYGISVPERFKDLTNPWTNKYIQWIESIDIIENNAKESLNILLTECKMLRSFDLETLQKIRGLSQTDKYREQVRLLLTIPGIGLKTAMLILTELFCIDRFKTLDQLCSYVGIIPSTRSTGDNEIVGDITPRGHNILRSAIIESAWIAVRADPALNLAYNTLCKKMKANKAITRIGKKLLNRIRYVLLNQHEYVGALVK

SEQ ID NO: 198798 - protein, 331 aa, unidentified
MTCITGIDVSKKFLDCAFRRDPGPAKAKRRRFMNNSGSYDSLLAWTETLVGRGCQDIIFVVEPTNIYHELVVAFLFEAGAKVYLVNPARVRKFAEGIGILSKNDVIDADLLTHYGLMSKKLIPYTPLPRDIATLKSLLGRLDTLERGLRREQNRQEKVGKTSVFHKLEEQSIQRFVKHHEVETKRFKKFIRETVEQSDLLQRDYELLTTMPGVGEKTAWTMLVILKSRPFNSAQEVASFIGLNPIEKRSGTTEYRRPRLSKAGNSYFRQSLFYPAMVATSKNPDIKVQYERLLGNGKSKMCAIGAAMRKLVHICYGVVKNQEAYTVQSAIE

SEQ ID NO: 198799 - protein, 317 aa, unidentified
MSDPIYVGIDVAKESFNLATCPDTLKTILPNNPEGHRQLCKLLKDYKVALIVLEATGGYERPIAAELLAAGLPVVVVNPRQVRDFARGMGQWAKTDPIDAQVLAKFAQIVKPAPKTHSRPENSELAELVKRRRQLNDLRAQESNRSLMIHHPKVKKSIQKMIKTLDFQIKEIDKLIKDYIDSDDDFKDRDGILRSAPGVGPQTSAMLIANLPELGNLNRQEIAALVGLAPWDRSSGKYDGKAHIFGGRKEIRSVLYMAALTAYRCNSTVRTFAMRLKENGKTFKVIITACMRKLLIILNTMMRNHTLWNPKFSLKNP

SEQ ID NO: 198800 - protein, 339 aa, unidentified
MAENILAAGVDVAKAELAVAVYAPTGAAGSPRVLVNRKAGFASLVKWLRRLATERGCDGIHVGLEATGVYGDQLAYYLHRADGIAVSVINPAQIKAFAQARLTRTKTDGVDASVIAAFVATQHPRPWVPEDPAVLHMRALVERVAQLQAMHTQESNRLKALEATEVPPTELIASLRESLDWLDARIRALKKRLHQHIQAHPDLKQQTELLRTIPGIAEWSAACVIAHGGSALTDRNCKQLVAHAGLAPAHRQSGQSVRGKSHIAKSGRAALRRALYMPAMGAATQNRNAVLAELYQRLLANGKPKKVAIVACMRKLLHLIHGVLKNQTAFNPALHGLNA

SEQ ID NO: 198801 - protein, 351 aa, unidentified
MIIIGVDYHPSDQYIALVDTETGEYEERQLNHSEGEAEKFYRELATRGVSVRVGIEATGYTRWFKRLLAELGIALWIGDAAKIKTKRIRKQKTDREDARLLLRLLRENNFPRIWVPSPENRDLRQLLWHRHRLVQMRTRIMNQLQALAMNEGQRRKKKLWSEAGRSQLDKLPLAPWASRRRRDLLELLDRMNPSIEELTTAIEREARKWPEALRLMTHPGVGPLTALAFVLIIETVERFQCGKQIGSYVGLIPCEDSSAGHQRLGHITKQGSSLLRFLLGEAAQAAARCDADWRRRYMHLALRRQRNIAKVAMARRLGVRLYWMWRKGWEYSDWVKFGSHAGQLGTGDGVQ

SEQ ID NO: 198802 - protein, 298 aa, unidentified
MPQPVVGCDLSRAFIDICQLPSGKTGRIANTPDDIGVWLDTLDHDVRVVFEATSGCDGELIGALATRGHPFSRVNPRQAREFARATGTLAKTDRVDARVLAQMGAALDLPATIPLSPARSRLADFLRRRRQLVDMRKAEKLHRHSAGQPEIAQAIETMIALLGQQIAALDRRIAGFIAEDQALAEQARLLTAVPGIGPTVLATLLGELPELGTLCRRKIASLAGLAPHARESGTWRGARRIWGGRRKVREVLYIAALNASRRIPVLTAMRDRMRAKGKAPKTILIAVARQLLHAGKAR

SEQ ID NO: 198803 - protein, 341 aa, unidentified
MRKFIRIGIDLGKNYFQVHALESEDRKATTRKLSRLAMRKFFSEIDPCLVGMEACASSHYWARELLAMGHDVRLIPPIYVKPYVKRGKNDAADAAAVCEAMSRPGMRFVPVKSEENQATLMLHRARQLLIKQQTMSVNALRGHLAEFGIVASKGIGRVDELVEKAENAATLPSAATAALKLFVQHLAAIGASIADLDRRISSAHAQNGTSQLLAGIPGIGKMTASAIVASVPDPNVFKSGRDFSAWLGSTPRQNSSGGKEKLGSITKQGNAYIRRLLVLGATSLLNQVGKRKGALHDWVVALLARRPARLVTVALANKLARITWAIMTTGESFRIEAFAKA

SEQ ID NO: 198804 - protein, 343 aa, unidentified
MSNIIRIGMDTSKSEFQLHGVDSQEKPVLKKKLRRAKVLGFFAKLEPTKVGIEACGASHYWARELVAIGHEVVLLPPQYVKPYVKRGKNDAADAEAICEAMSRPTMRFVPVKSQEQQAAQMLIGLRDGLVRRRTQLSNVIRGYGAEFGLTAAKGLVRVEPLLARIAQDEGLPALAKELFDTLGQEYARLQAQLRKIEAKLMAWHRHNEMSRRLAQVPSIGPVIATAMAIKVPDPKAFRSGRDLAAWIGLTPKDHSTAGRTRQGVITRAGDEKLRSMLVVGAMALIQQVKRGRGHPSPWLVELLARKKPKLAAVALANKTARIAWKLMVSGEHYMPQPGTRELA

SEQ ID NO: 198805 - protein, 370 aa, unidentified
MAKRSMFVGMDVHKESIDISLAEDGRDGEVRHYGVIPGDLEAVAKMVRAVRAPGRRLRFVYEAGPCGFGIHRYLTAQGEDCVVVNPSSMPKRSGDRIKTDRRDGDALARLHRAGELTAIYIPTADDEALRDLVRAREDAVGLSTQAKHRLKAFLLRQGRRYPGRAGWTRPYRRWLADLSFPLAPQHIALQEYRDTIDETEHRVERLTDQLRQLTPTWRWAPVVEALQALRGVSFVTAVGLVAEVGDIRRFQHPRELMAFLGLVPSEYSSGPSVRRGGITKAGNPHARRLLAEAAWAYQGIPRLGRQMLYRQEALPKPICEIAWKAQLRLTARFRKLVARGKAKPKVATAVARELTGFIWAIAREVPAPPA

SEQ ID NO: 198806 - protein, 441 aa, unidentified
MPDTTVTTPEPAWAAFVALDWGSQKHAWILQPAGGGQRDEGYVDNTPEAIAVWAADLHRRFGGRPVAVALEQKRGSVVNLLLPYDHLVLFPVPASMSASYRKTFVPSGAKDDPGDAGWILDLLLRHRDRLRRLAPDDANTRLLLMLVEDRRQLVDDKTRLTLRLQDCLKQYFPQLLQWFDVDTPLLADLLERWPDLQHLQRCHDGTLRTFFRQHHGSADLTGERIAAIRAAVSATHDPAVLEACSTKARHLTESIATLRHQITRLERRRDELVASHPDTHIFASFPGAGRATVPRLIAAFGTRRERYQSAFQVECDSGIAPVHIRSGKLHRVSIRHACQDFTRQTFHEFAGQTIPQCAWAKAFYQAHCHKPQQHHAAVRALAFKWIRILYRCWKDRKPYDEQLYLTSLRRRRGLLGPGLASATSVGWTTVAGFSKPSEKNS

SEQ ID NO: 198807 - protein, 479 aa, unidentified
MIRSVGIDLSRTGNHQVCCLDEQARPCDSFSFDSTLEGLEKFEKRVFLEGATPTIVFEPTGLAWIPMAAYLRARHPDCQLVKARLQKVAALRRYLRSRAKSDRVDGVTLAKMPFIDAEQLDEAYLPPAEYHALQRLTRQRERLMKSITIRKNRIGAIINGYLPGLRKAFTNEWSDRARLFYRQRLNPFTVVHGGKDALETLFVSAKAKGAVTESHRVYQLCQKLVEFYEKSRAAGMINEDFFDNLQDEISCELRLMETEEAEVERVSGRIEELYRHLHPSDHLRTIPGIGVRTAQVFLAVIGDPNRFRNQSAFANWTGVVPGARQSADSEGKGLRMTKAGPAMMKRALYQAGDIARRYDPQLADLYYREMVQHGKTHLQAMGAVMSHLGARILTVLRENRLYELRDNQDRPISKMEAIGLIQQFKVPEETRQARRRRKPNEGRLTGRRTREAAKAPQSGPLIPPPKIVYCAEELQSTAN

SEQ ID NO: 198808 - protein, 332 aa, unidentified
MENTQLITTQPTILGLDIAKDKVDCALLRLGKVKSKVIQNSPQGFVELAAWLERHDVHLIHACCEATGVYWEAVALFLFEAGHHVSVVNPAQIHAFGQSRLQRNKTDGIDAALIAAFCDTSYPPLWQPPPFEERTLQAMIRDLQTLQDMQRAESNRLLVAHASVKPRIQRHLDWLAAEIARLEQDIDQHIDQYPELKSRRALLTSVPGIGKRLSSWFLVMLGNGQRFNTSKQAVAFTGLSPRLWQSGSSVRGKTRISKVGSGSLRRLLYMPAVSAYAKLDIYQPFIQRLKLAGKPPKVIIVAIMRKLVAIAQAVLKANKPFDKNIYQKACLL

SEQ ID NO: 198809 - protein, 424 aa, unidentified
MKNTAARKRKQVPEGYLIIGVDPHKKRHAAVAITQDFTTRDKFRFDNTREGLEMMLDRAKVEMVRYGCRGVMFAIETGGHYWRNVAYFLDEQGVPFRFINQFTLKRRREGKDLNRRKNDYRDSEVAAQLLCTGEFTESKLPQGVYAELRTAHNAYRRLVKERTRHTNLLKGLLGGLFPEFTQMFKNPCGLTALSVLSTCPIPRVIVGMTEDEFEATIEAQHKGRRLMRRKLRALHYLAKTSIGIDAGARSLSSEIAFLVDKFELIRRHIRIIEGTLVRLVDETEEGKYLLSIRGLNYIAVAGLLAELGCFKAYRSAKQMIKMAGSNPTESESAGKKRARTPMSKQGRPVLRYCAWTSVIPMLRFNEDFRAWAKQRRERPVHANPLGGREVVGAALNRLLRLAFALVKNQTYYQVLKSDLTLVAV

SEQ ID NO: 198810 - protein, 389 aa, unidentified
MVAMMIIGVDPHKSTHTATAVDPQTNRAVASVRIEASLVDYRRLLRWARQFDHRRWAIENAEGLGRHLSSWLLARGEDVVDVPSTATARVRQLSRGGGRKNDQIDAAAAACAAALQGDGRPLQAEDLTDALALLDESRTNLAQSRVRLVNQLHALLRDLLAGGAPTDLSATTAAALLRRVRPSGDAERVRKQIATDLISQIRSVDSLLKSNARQISELVAASGSTLTSTVGIGAITAGRLIGRTGRAARFPSSASFANYAGAAPVEVASADKARHRLSRSGDRQLNAALHTVAITQIRTPGSRGHTYYNAKLGEGKTPREARRCLKRRLANHIWRTMITDEQRQTASPGGHLGTTLKSSAAGSTPTTSSSDKSLPGLANHDSTTTRPAA

SEQ ID NO: 198811 - protein, 342 aa, unidentified
MQITTIGLDIAKNVFAVHGIDAAEKVVVRKQLRRGPVLAFFKALPPCLVGMEACATAHYWAREFTKLGHEVRLMPAKDVKAYVKRNKSDAADAEAICEAVRRPTMRFVRIKSAEQQGQLMQHRTRDLLMRQRTQVINALRAHLAELGIVAAQGDRGVKELLALVTDKEDTRLPIDARASVIVLVAQLEATQTVIGAIEKRIKMQHRSNEASQRVETIPGIGVIGATAIAATVADPTVFRSGRDFAAWIGLVPRQDSTGGKQKLGPISKQGDRYLRRILVIGAHSVLRRAMQNPEKYPWLTRLLARRPFKVVAVALANKMARMAWALLAHGGTYRAPALVPAA

SEQ ID NO: 198812 - protein, 337 aa, unidentified
MNRNVVGLDIAKQVFHLFTMQDGKAVKKKLKRSELSEFVAQLPASLIAMEACGGAHHWARTFQALGHEVVLLNARFVKAFVVGNKNDFNDAEAIFTAACQPNKRTAAIKGIEQQDLAMLHGFRRSKVEERTALVNQLRGHLAERGIVLPRSVNQLRKQLPAILEDGENSLSTLSRKLFAEQYQALKDLDEAITALNREITAVCQQNALSRRLIDIPGIGPLTAILAAADVGDGKGYQSSRDYAASLGVVPRQHSSGDKQVLLGISKRGNRQLRTLLIHGARAVLKYCSDKSDPLSLWLKGLIDRRGFNKAAVALANKNARIIWALATGGNNYVPQTA

SEQ ID NO: 198813 - protein, 324 aa, unidentified
MTTSAIVVGVDVAKDRLDVAVRPSGERWSVANDEAGVTTLVAWLHPLGPALIVCEATGGFERAAIAALAAAGFPVVVANPRQVRDFARATGQLAKTDQLDAGILALFAERVRPTPRPLPDAAAQLLDAVLTRRRQLLEMLVAEKNRLGFAPKPLHRGIQAHIRWLERQLDDVTKELAGLIEASPVWRAKDDLLQSVPGVGPIVSYTLLGELPELGTLSHKQIAALVGVAPLARDSGTLRGKRMVWGGRASVRTALFMAALCGRRWNPQLKVFYERLKGGGETHEGGTDRVRPETADHPQRDGPRPRTLGRPGTQPSIQLLTDRA

SEQ ID NO: 198814 - protein, 403 aa, unidentified
MERVFGMDVHKNVLVTTIITEEGEETRWSGVDAADLKNLMEWLKEKNCMKGVMESSGIYWVPIYVTLVDNGFQVTVANAHQVKAIPGRKTDELDSQWLARIFSAGLVKPSYIPEKKIMELRNLTRLRVLLLEAQTAFKNRAHKTLQICNIRLASKLSDIFGKDGQMLLNALMKRENIDEVIEKYGSKRLKAKKEEVKKSILGTLREADIIELKICLDNINRLEEQIRQLNAKIATLVNKKDVERISKVPGIGEVSASTVIAEIADPKRFQNEKKLFSWSGLAPSTYQTGGKKPKSGHITKRGNKWLRRTLAQCAASAIKARNSQIRLFYLRIRGRRGHKIAIVATARKLLGIIWHLLITGEEYIDKHYVKKTMTKSRKKTLKLALDEAIPLLKQAGYTIIAPG

SEQ ID NO: 198815 - protein, 310 aa, unidentified
MGVSVGIDVSKRHLDWALGSEARPARLLNTGVGIQKLLERLHEQDVDYIIVESTGGYERALVDALAAAALPVILVNPWRVRRFGEGLGINAKTDAVDAQLLALFGERVKPTQRPVPGPGEREMADLVQRRRQLIAMIVAEKNRLEHARAAVRRDILALVKVLERRVAKLDRWIDTAIAKDEAKVERRLQLEGVPCIGPGIARTLIVDLPELGTLSRRQIASLVGIAPFANDSGKKTGYRRIRAGRSGPRTALYLAAMNASRFNPVLKPMFDRLIAAGKPPKVAFIAIARKLLTILNAMVRDHTLWRDATR

SEQ ID NO: 198816 - protein, 461 aa, unidentified
MRIIGIDLAVKSAHKAVIADETGRFVSKVIEFATDVRDLEQLLAQARGQDVQEGVKVVMEPTGMAWFPVAAYFAQQPNVVSYLVNTQQVADLRRFYKRHAKSDRIDCRLLARLPLVNGENLHALVLPSATSLACQRGCRQLDRLEDEMTALKNRIRAIDRFAWPGIDALVFSDPFAPAARWFRRNWYPPGQGLAAGAEALRQAWQAVGIDPADPAAWAAGLVSLAQRVLALYGPDGRFIDYQQLQGEVLREQAQLAYLEEVSHALRLKTVRKLYRQLHPSRHLETLRGVGQDSAAVYASGIDNPHRFANARLFRGWHGLVPDSRQSGGSQAKGLPITKAGPDLIKKYAYLDAEVARQWDPQMAAVYYDQMVHKGKHHIQAVCACATHLLDRVLVVLREDKPYELRDVEGHPVSVEQARALITERYQVPKEIRERNNKLHRQQSAQRAAEKSTQKKESRRAG

SEQ ID NO: 198817 - protein, 338 aa, unidentified
MNYYAGIDVSLEALSVCVIDASGKIFRETKVASEPEALIAWLGSLGVSLARIGLEAGPLSQWLYAAMRQTGLAVELLETRHVRNAFKIMPVKTDRKDARGIAELMRLGWFRPVHCKSMEAQETRAVLTSRKLVQKMLHETEMSLRGMLRNFGLKVGKVAAAQFEFRIRELVEGHPTLAAIAASLLATRATLRREFNALEKQLRAIARSDTRARLLMSTPGVGMIVALTYACAIDDPSRFKSSKIVGAHFGLTPTRYQSGETDRTGRISKIGDSSVRAVLYEAAHVILTKAVRGCTALKSWAMRIAKRAGMNKAKVALARKLAVIMHRMLADGTTFQPA

SEQ ID NO: 198818 - protein, 388 aa, unidentified
MSSIEHISEERASVRNDLSAIFVSLELSLSTWLITSLSPGGGEKMSKHQVRGGDVAGVLARFSQLQAKCTARTGRAYRLIVIHEAGLDGFWIDRMLKNAGIESHVVDPASITTSRRRRRAKTDRIDGEALVRALLAYKRGEPRVCAMVIAPTPEEEDRRQISRERRALIAERVEHVNRIKGLLFAQGVADYQPVRRDRRQRLEALRTGDGRPLPICLKQRLSRELDRLELILEQIRKVEAQRDALLASQAEAPRSPSAILQTLRGIGPEFAMVLWSEGFFRHFANRRQLASYAGLAPTPWQSGTVAREQGVSKAGNARLRTTMIQLSWLWLRHQPKSALTLWFHERAKAIGGRNRRVMIVALARKLLVGLWRFVTTGVVPEGAIMSAA

SEQ ID NO: 198819 - protein, 399 aa, unidentified
MLNPVSLQLRVGVDVGSRCHSVAIGLSDGRLLEEFEIPHTKEGFREFFARVEASARRHGAAVAVAMEGYNGHVRPLDSLVRARGWQLFNVNNLKLARFKEIFPAAAKSDRIDSAKTLELFQLRDHLPMARDVLQEVMATPEENDILKRLSRRRRRLVKERGRVVNALQADLQAVAPGLLEMTQDVGNMWFLNFLTCRKDFCKLVGVRHASLLKVPCIGPSTAGRIQAWQKRACFSHDARLVGNMIQQDATRILELKQQIKALEEQMAEIAERSSMACRLASIPGCGAVCSAELAGEIGTLERFRGEASLALYLGMATLDNSSGKSRRSKPPRHVNTRAKAAMMIVVDHHRKLVPQSQRYYERKRAEGKKHNQAIRALGRHLCRVIFKMLSQNRPYRIDP

SEQ ID NO: 198820 - protein, 339 aa, unidentified
MEHIAIDLGSRESQICVRSASGEILEEKRWATKALGGYLKLRPPSRVILETCAEAFRVADCGVELGHDVRVVPATLAPALGVGERQTKTDTRDARKLSEVSTRVELPSVHIPSQTSREWKSACGARESLVESRTQLINVVRGWTRGQGINVAPGKTETFVTRARKVICEPPLHIEVVLKAIDGLNEHVATLDKMVEKHAKEDDVCRRLMTVPGVGPVVATRFVATLDDVTRFESAHKVEAYLGLTPGERSSSDKKQRTGITKAGSPKMRWALVQASWAARRSRGTHPMLAWVNEVEKRRGKRVAALALARKIAGILYAIWRDGTIYNPKEAASASLKIA

SEQ ID NO: 198821 - protein, 396 aa, unidentified
MIYVGIDVASNKHDVCIMSNNGEIFGRKFQIHNSSDEYKKLLSKINEAKKFFKDSTVRIGIESTGVYSSTILNYFSKFNNFEVIFINPVLTNMFQLSQTVHYAKTDSIDAEGICIYLQDKRKKLFTYTPPSYHSLQLKSLYREMIKMNKLITQSKNRLTGLVHTVFPEFLTVFPKINGNAVYFLLNKYPTPNSYKCKHAETISKLVLKEGHGRTRIDNIEKIISLSKESIGTYNHSNALLIKQLSSLISMLEEQKKELIEEMTNIIKEHFPKILSIPGIGGNTAAGIIGEIGNISNFHNSDSLLAFAGLNPLVYESGKFKAQHTRISKKGSSYLKNALTLVARSIIKHDETFSKYYLKKRDEGKSYNTAICHVRKKLVRVIYSILKNNNEYKSLNN

SEQ ID NO: 198822 - protein, 338 aa, unidentified
MNIVFLGIDLAKNVFQICGLNQAGKPVYTKRTGRKELLQMLANIPACLIGIEASTGAFYWQREFEKLGHNVKVISPQYVKPFVRGQKNDGNDAQAIAVALMQPTMHFVPPKSPEQQDIQALHRARQRIVNHRTATVCQIRGLLLDRGITIGAAVSRVRRAVPLILEDAENGLSVRMRSTIAELYDLFNDLERRIHFFDKEIETVFRQSEACQRIAKVKGIGPKTATAVVATIGKGTEFKNGRHFAAWLGLVPRQHSSGDRQVLMNMTKKGDKHLRTLFIHGARAVVRVAANNNDSHMNQWVNQLKERRGFNKTTVAVANKNARIIWSMLRNETEYQVV

SEQ ID NO: 198823 - protein, 428 aa, unidentified
MKKADLLLSTLYVGIDVSSRNNVVALMEFESQKPIMTFSVTNNRPGAIELAKKLSGFLEGRKNLQRLIIALESTSFYGIHVANYLSSCQILAMFQTAVYCLNPKLVANYKKSFVDLGKNDYIDAFVIADFARAGRIKIKPWRGSQFLALQRLTRHRLHLAKSLTREKAYMLSNVFLKFSEFSLLDKDEQPFSNSFGATAEAVLTDFLSVEEIVDMPLDELISYICQKSQNRFSEPEKTAKLLQQAARNSYRLDKCLYEPLTVSIASSFNLVSTYENEIKAVNKAIEKTLRGIEPTAYQSLLSIPGIGPVMASGILAEMGSADAFKSESALAKYAGLVWREGQSGDFSADDTPLSKAGNAYLRYYLIEAASHVKNNCNEFAAYYQKKYDEVKTHQHKRALALTARKLVRLIFGLLAKHQLYSPSGVGQV

SEQ ID NO: 198824 - protein, 319 aa, unidentified
MAQNDLHVVGIDVAKDKVDACVRSPAQRQTFPTGAEGRRKLMAWLRRHKVGKAVMEASGGYERDWAKALRTAGIEVRIVDPKRVRNFARSAGRLAKNDAIDAEMIAWFAETFGDAPNQVYDAERERLAQIVNARQGLLDVQTELQNRNEHSVPELVQNVHARLLKKIAAEVAKLEAAIAAMIKATRHFAELAAIIESVPGLGEGTSAGLIATMPELGHVSNKVAAALLGVGPYDDDSGKRRGERQIKGGRRKVRNLFYMACLGAATRHNPALNAFYRRLIAKGKEKKVALVACMRKLIVILNTMIARGQKWDANLHLAS

SEQ ID NO: 198825 - protein, 413 aa, unidentified
MEWVACVGIDWGDKQHACMIQTREGTKQAMTLASSPEDVHRWVRELRERFPKGTIVVGVEQGQWSLIYELMAYEFLALVPINPRASKAYRTSLRLSGASDDPADAALICDFVLKHFGELRVWRPDDVRTRKMRLLCEQRRSLVDQRTALTHTLSATLKEYFPQVLHWFGETSQHLRAFLTHWPTLEQARQAVVDDLTGVLKASRRRKASAVAEELIEKIRLAVPLTHDTAIIEAHSLYALSLVALIDPLDQQIANYDQAIAAAWAVHPDRKTFGSLPGAGAVMAPRLAVAFGLDRSRYDDAREVQQYSGIAPVIERSGRQFWIHARWGFPTFLHQTFHEFAEASIPQCQWARAFYHQQRERGAGHHQAIRALAFRWIRILFRLWKTGEEYDENRYIEALKKKQSPVVSRLAAA

SEQ ID NO: 198826 - protein, 343 aa, unidentified
MNQYVGLDVSLEETKIHVLDEAGGRVWRGKCASHPDELETTICKHAPGAVRIGLETGPLTTWLWTELSKRRLPMVCLDARQAQRALDMRANKTDANDADGLAHLVRAGWYKEVRVKSRDAMLSKAVSAARRQLLDISTNLSNQVRGLMKTFGLVVPKGKGRIFEANVRRLLDEEHALAAVVLPLLEAWCAIRNRAAELDRLLLRKVRDDANCRRLMTAPGIGAVVAASYVAAIESPANFKHARDVGAWVGLTPRRFQSGEMDYDGHISRRGDERLRALLYEAATVILTRVRSASALRSWALALKKRLGFKRAAVALARKLAVVLHVMWKTGKNFDPNHRLAAA

SEQ ID NO: 198827 - protein, 290 aa, unidentified
MDVAVMIAVDPHKASNTAAVLDPVTKTPVESARFANTQDGYVQLTAFAARWDQRRWAVEGCHGAGRSLAQRLVADGETVLDVPAKLAARVRVYSRGHGRKTDKDDAVSIGLAALDGTGVLPVASDDALVSLRLLCDRREELTVQRTQAVCRLHRLLAELTPGGMRRELSANKAQALLRQIRPADDVADIRLLIARDHLADIRGLDARIKSIGKQIAALVAGSGTTLTTLYGIGPVIAGRILAETGDVARFASKDHFASYNGTAQSTSAPATRSGTGSPARGTGGSTTPCT

SEQ ID NO: 198828 - protein, 359 aa, unidentified
MQRQCTKVQFSGQHVYVGIDVAKRSWKACVYLGQAYHKNFSQPPDPRALVEYLHRHFPGAVYHTVYEAGYFGFWIHRSLMRLGVDSMVIHAADVPTTDKQRRTKTDRIDAGKLAWALATGGLTAIYVPDRLAEEDRSLVRMRTIFVRKQTRTKNQIKSMLQYYGFQVPEDVDDRYWSRAYIRWLESLAFEHESGTHAFQTLVKELLSLRATILNLTRQIRTLSRTERYRRPVELLRTVPGVSLVSSMVFLTEIVTLERYKKLDHLLCYIGLVPGEHSTGENEQDTGIIPRKNAMLRHMLIECAWIAQREDPVLLQAFVMYSQRMPKAKAIIHIAHKLVARMRYVLKHEEPYVTGVLSAA

SEQ ID NO: 198829 - protein, 392 aa, unidentified
MIIVGIDIASEKHDYFMLHKETGTVFSTSSVTIGNDEEGYKKLHTDIQSFCGATGDSKVRIGLESTGIYHTNIIAFLLAQDYEVMMINPILTNMTRKASRVHSAKTDNLDAQTICKYMIDHYDEFSPYTPSLYHKTALKSLSRKRFFIVEDLRKAKLAVNNLVQLIFPEFKSLFSNIYGESAVAILKEYGSAKKIARAHEDKLASLLHGHCKCSARQIIDAAKHSVGLKDDYYSFELLDALEEMEHIQKRIDSYDEQIKKHVDEICPNLLSIPGVGYISAGLIAGEIGDIGRFHSADSLVSFSGIDVTVYESGKYKANHCIPSKKGSKYLRYALFQVSRIIWQHDPVFAEYYAKKQAEGKHYYVILGHIQKKVARVIYSVLKNNSTYKVCQS

SEQ ID NO: 198830 - protein, 352 aa, unidentified
MIGIVDEKGRRLKYQKLPCDLEQITTFLEPWKERLRSLAVESTYNWYWLVDGLRSRGYPTHLANPAGMEQYRGIKHTDDKNDAFFLAELQRLNILPKGYIYDPALRPTRDLLRRRLNLVRQRTALILSFKSLYTRTTGQTMSLQELKTMEVQETKRMYEHPANCLIARIQKQHIDALSQSITTIEKEVLGCARQLARYDNLTSLPGVGNILGMTIRMEVGEISRFKSPGEFASYGRMVDAKRFSNKKKKGENNRKCGNRYLAWAFVEAANFARRYDSDCRRWFDRKAAKTNTILATKALGCKLAKAAWYLMAQGGRYDAKRMFAPVRMSNEKQICESPRQPEREAGLRTLSN

SEQ ID NO: 198831 - protein, 402 aa, unidentified
MNAVGIDVSKGKSMVAIMRPFGEIVSAPFEIKHTASDINSLVKLINSVEGESRIVMEHTGRYYEVLAHQLSEANLFVSAINPKLIKDFDNDSLRKVKSDKADAVKIARYALDKWQNLKQYSVMDELRNQLKTMNRQFGFYMKHKTAMKNNLIGILDQTYPGVNTYFDSPARSDGSQKWVDFASTYWHVDCIRKMSLNAFIDHYQNWCKCKKYNFSQSKAEEIYGKAKELVPVLPKDAITKLIIKQAVDQLNSASATVESLRTLMNETASQLPEYPVVMAMKGVGSSLGPQLMAEIGDVSRFTHKGAITAFAGVDPGVNESGSYEQKSVPTSKRGSSDLRKTLFQVMDVLIKTHPQDDPVYQFIDRKRAQGKPYYVYMTAGANKFLRIYYGRVKEYLSSLPES

SEQ ID NO: 198832 - protein, 312 aa, unidentified
MESFVGIDVSKGQLDVAVRPTQKRWSVANDASGLAQLVTELQRLDSPLVVLEPTGGYERELVSSLVRAKVCFVVVNARQVRDFAKAVGKLAKTDRIDADVLAHFGEAVRPEPRRLPDEDTAELDALVTRRRQLVEFRAAEMARKHLAPEVVRPSIDKVIEFISKQIDDVDGRFRKLLRNTPAWREKDDLLQSIPGIGPIVSCTLLAQLPELGSLNRQKIAALAGVAPFNNDSGKRGGKRQTWGGRASIRSVLYMAAVAGARHNPALKRFYQRLIGLGKAPKVALVACIRKMLTWANAMLRDGKKWNPAQLAA

SEQ ID NO: 198833 - protein, 338 aa, unidentified
MRLYCGIDLHSNNSYLVVLDERDGVVYQGRLTNELGLVLLALAPYSGNLVGIAVESTFNWYWLVDGLMDAGYRVHLANPNAMKQYNGLKFADDRSDARWLAHMLRLGVLPEGYIYPREQRALRDLLRKRNRLVQQRTANLLSLQGLVQRNTGRRLNGQALRTVELAELEPQHRDVNRTLALESTRRIVECFDGEIERLEQEILGQLKPDPLLRVLKTVAGVGKVLGPTILLETGQIGRFPSAGKYVSYCRGVGSEHLSNSKAKGRGNRKNGNPYLAWAFVEAAHFAIRSHPPVRRFYERKQARTHRVVALKAVAHKLARASYYVMRDQVPFEVERAFG

SEQ ID NO: 198834 - protein, 408 aa, unidentified
MDVIVERPAALDVHKAQVTACVRVPDGGGGREPHLAEFATTVRGLLALRDWLAAHRVSQVVMEATGVYWKPVWHILEDDFELMLVNARHVKQVPGRKTDMSDAAWLCQLAEAGLLKANFVPPKPIRDLRQLTRYRKTQIAERQREAQRLHKALEDTNIKLDCVASDLLGVSGRAMLDALVSGTTDPEILAELAKGRLRQKLPALREALEGRFDDLHALLIGAILAHLDFLDEQIDRLSDAIEERIAPFAGAVELLCTIPGVQRRTAEVIIAEIGPDMTVFPTARHLASWAGQCPGNDRSAGKQRSGRTRKGSRWLNAALKDAAMAAIRTKNTYLRALYDRHRSRIGHGKAIGAVKHSILVAVWHMLSTGQLYDDLGGDYFRRRDPTRTTKRLVAQLERLGHTVTLEAA

SEQ ID NO: 198835 - protein, 322 aa, unidentified
MSVSNQRCAGIDVSKNTLDIAISNIAQSFTVPNEDGGFNQILKELKRNETQLILMEATGGLESGVAGYLQSEGFDVVVINPRQARDFARAMGYLAKTDQIDARVLLQMAKVINQHPEREKYIRPLPDAHRQLLAAMVVRRRQLTIMLTAERNRLHPSHPQNHESIRFIISVLKSEMARIEAEMSAYISKNFSELSALLSAVKGVGAATVAVLLAEVPELGTLSRREISALIGVAPVNRDSGTMRGRRTVFGGRASVRTALYMSALVGTRHNPVIKEFYTRLVAAGKPKKVALTACIRKLLTILNAMLKNNEAWDPLYHQHAS

SEQ ID NO: 198836 - protein, 336 aa, unidentified
MSSIPVFVGLDYHKESVHVCVVDAQGKQLANRKCANDWTKIERLVRRHGMPRRVAIEACTGAAHLADELISRAGWPVRLAHPGYVSRLKQSPDKSDYSDSRLLADLERVGYLPPVWLAPDDVRELRRVVRYRQQLVAERRNIKLRVSALLREQRVLLSGSAWSKGWRHCITSLPEFSEQASWIVNRQVARLERLEEDIRQVEERLRQITQNDGLVAKLLEQKGIGLITAVTIRAEIGRFDRFRNGKQLARFCGLSPRNASSGQRQADAGLIKAGNPQLRVALIETAHRLLRYEARWSDLGGQLLARGKPKCVVIAAIANRWIRGLHHQMTSLATAA

SEQ ID NO: 198837 - protein, 408 aa, unidentified
MTVVGIDVSKGKSMVAAMKPGGELVTTPYEVKHSGIELSRFALDVLCMEPDTRVVMEATGRYHEPVAALLHSEGIFVSVLNPLLIKQSGAGSLRKVKSDPKDALKIAKYGLDNWSTLREYTPMEAIRQQLKLCARQCDLYSKNIVMLTNNLISLSDKTFPGVNELFSSPEKENGHLKWVDFYRTFWHCDCINRMSPDAFEERYKKWCKRKGYHFSADAADALYAASCGLYTTLPRDNNAKLLVTVATDKLIALRENQSKLETEMLNLCKQLPEYETVMAMYGVGKSTGPHLMAELGDIRRFPHRSSIVAFAGVDPGVVGSGKMQLSSVATSKRGSPQLRKALFQVVSAYVKRKPENEAVYQFYAKKRDEGKPYYVCTTAAANKFLRIYYARVKECLNAAESATQAEEG

SEQ ID NO: 198838 - protein, 401 aa, unidentified
MKTVLSVDVAKNKSMIMLMNNDGEILIDTKEIKHNLGEFEKVKEEIEEINPENLTVFMESTGTYHLPVERYFKENGFNTLVINSLTTKNNFDTIRKTKTDKKDCYRLAKLFFVNEVEYHEISKKDLYANLKAMTRQYFYLLQNNVSCKNRYKRLLNICFPELEKIFKSTRIYDDTALNFIKEFPHAEIVKEKRIDALYNNLYKTNGRNLNFYKRLSETIKIASANSYPGVDKEHKDVKNLSDMAKIVQNNNNVINELRDKMIETAKKSPYYEIINSFYGIGEILTAEILGELGDITRFDSPKQLIAFCGLDPTIKQSGKSINVKGAISKRGNKYARYILFNCSQMVVKLGASNYPEHPVYIYYQNKKAEGKHYYESLTACSTKILRMLYSMCKNNKQFLEN

SEQ ID NO: 198839 - protein, 421 aa, unidentified
MTRKIAGIDIHKNVLMVVVATVLEKEIDGGMEQQIEYEGRRFGSGTQERGHLVAWLREHQAEEVVMESTAQYWKPVWMDLELHFPKLHLAQAHSNKAPKGRKNDFADARRLTRRMAAGELILSFVPDAEQRTWRTMTRGKQQLVRDRVRLQNQTEALLEEMRIKLSGVVSDLFGVSGRRILEALAGGETHPEKLADLGDDRLKCGREALVDALTGHSEPMHLQILKLSMERLKLLDRQIEALEQMAAGALKKHAAAVTRLAGVPGFGVDSAQQVIAEVGSDAKSFPGAGELASWVGTIPGSDVSAEQNHSSRSPKGNKFLRRIFTQAAQAAVKTKGCHFQNVFRRLVPKLGYKGAIWAIAHRLCRLAWKILHDGVSYIEQAAETTPQAKKRRAQRLTQALRRLGFQVALTPIAPKAEVAQG

SEQ ID NO: 198840 - protein, 426 aa, unidentified
MWDAQRRVLKIKSLKHGIIQDKRGNVMRAVFGIDVSKTSSEVAILVNGEKVHGYTILNDAFGFNRLLGDLKTVHNPEIIFEATGVYSRRLQAFLEEYGYAYTRLNPLEAKKQLDSLRVRKTDKIDAEKLAKSQLVHNRKPTYVQEEVYQHLRDLSRFYQNLTEDLVRAKNRLHKVLQITFPELENLLSTPTGEQYWNLVMAFPCKEFVLRLSQSDLCEIIRQSTSKRISEKRIAYLTDKLIKLAKQSFCAVKKNSPMLEEVRYYAQELLRLSERRQVVLNDMVTLAQPLPEYDILRSIPGIAETTATSIIGELGDIRRFQSSNQINAFIGIDLRHYESGNFLAKEHITKRGNPYARKILFKCIHNIASASHTNPCHIADFYEKRKRLSTIASTKPHAIASIHRLIRTMYYLITHNKLYDYSLTQNR

SEQ ID NO: 198841 - protein, 406 aa, unidentified
MKLVGIDVGKNSHHFCVMDKETGEFNVTPSSFSNNKEGFDFLINSLKPYSKKSILLGMEDTGHYHVALLKFLLSNGYTVALINPKTTDLTRKMEGGITKNDKLDTITICDVLDTPERKKQYRITKVDRFDLYEQRQLTRHHHNLKEELNIYCNRLQKSIDLVFPEFNTLFGSKYGVVYMNLLKTFGSAEAIASTDIRTIRKCFEIKGRGGRISLTAEKLKECAKNSIGISSEVETIQIKHLVSQIMLIKEQIAEIDKKIEEFSIKNNSPILSIPGISHFSGTSILAELGDIGNYSKPSRIIKFAGVAPYHYESSQYNAQHTAITKKGSKYLRKTLYQVILPVINNNPVFKKYYRLKISQGKGHRCAQGHCIRKLLRVIYHLLETGQSFDPALLLSLIHISEPTRPY

SEQ ID NO: 198842 - protein, 369 aa, unidentified
MPLVRGERAARFSFGTPSPRGSIWRAFATVLWKPEQLIDFNSHLQGWETENMPELIHVGIDVSKDALEVACGPESPTQCFTNDDAGHEALVNVLHVHRVDLIVVEATGGYEAPCACALQAAGLAVAVVNARQARDFAKAMGYLAKTDRIDAQVLAALAAVLANRADRQKLIKALPSDEQQRLHALVLRRRQLVQMLVAERNRLPMSHQAARVSIEALIKAIRKQIVDIEADLSSHIAHHHADLAGLLRSAKGIGPHTSMALIADLPELGKLSNREISALVGLAPFNRDSGKMRGKRMIFGGRTQVRCALYMATIVAMRHNRVIQRFYQRLLAAGKPKKVAIVACMRKLLTILNAMVRTGKQWDETFHFA

SEQ ID NO: 198843 - protein, 400 aa, unidentified
MFAGIDWGGSFHQVCLINAHGDVIVQQRVQHDLAGLTELDRLLLVHRNAAGRLRVAIERADGLLVEHLHTIEVEVFCVSPKISARARERYRLAATKSDAFDAFVLADTLRHEHRHWRALSPASPALAELRAISRDRDRVVIAQQATENRLRAVLEAYHPAPLHLFSSLDRDITLDFVTDYPTPEQAARVGEARMQQFCRRHGYSGRTDPTVLVERLRPHLLSAAEGTEAGKAFSATMFTEELRLLNAHLRAYDKRLVELLDQHPDAPIFTSFPGIGPVVAAALISEMGEDRGRFPAPEALLAEAGLSPVTRASGRTRQVRFRYAANRRMRHMIDWWAFVAAREDAWSRRIYDDARARRQGKYRALRGLGSRWTRILWRCWTDHTTYDPAIHHKQQEPAQA

SEQ ID NO: 198844 - protein, 348 aa, unidentified
MSEFKYHLGIDLHKRTSYWTLIDGNRRLLYQKNLPTSREGVLLALRETQIEPALAQAAIEPVSQWAWYGDMLKEHGMTVRLANPYKTKLVAAAKLKNDKVDSRILADLLRSDFLPESYYAPKEVRELRELARWRLFLSRLRTRLKNRIHQIMAKRGISSPWSDPFGKQGRQFMMVQKIPPELRNEVDYLVNFIDQLDLSIAERDKEFKECLSLRPESKILMSIPGVGPVTAVTMLAEIGDFERFSRPEKLTGFAGLNPSSFSSGENTRLGRITRHGSEHLRTILVEAAHRVRPSWGPLYEFFSRIRDKKGPKIASVALARKILVLSWHLMRKKEMFRLSADAQGNAKR

SEQ ID NO: 198845 - protein, 346 aa, unidentified
MKLIKKVIGVDISKDSFTVRFGTVDIEMTQAVSKPFAFKNNRAGFKELLKTISKVHYFNAEDLSSKDIPIWFVMEATGVYYENLAYFLTENKFPVSVVLANKIKNFAKTLENKSKTDDIDAANQTLWGLEKPLKAWVPPSKVFKELKELAREHQSINKSITQIKNKLHAKSYSYEANKETVKRLNQHKKFLLQQLKQVKNQMLALVKSDNELYEKIKTVATINGVGVMTVIKVIAETDAFALIKNKNQLTSYAGYDIVQDQSGTHKGKTKISKKGNSEIRSALYMPALSAIKHNKNLKQLYIRLCKTKASKKIAIIAVARKLLLLIYTLWKKNEKFIQNYPNVKAA

SEQ ID NO: 198846 - protein, 323 aa, unidentified
MKKYIAGIDISKEKPDLCFIQEEKTLGEEETVNTTAAVKQALKTFLKEAGAETSDVSACAEYTGQYIWPLCCACKELGMDLWLENPAQIKYSSGIQRGRNDRSDARKTAACGFRFQDKARLYNLQQENIMSLQQLTSERDMYVSDKNKYQGQLTDQERFIRKKDYRQKSGRLRKLIRGLEESLSQAAAEEEEEIKILIESDETLSEQHGQLCMVEGIGNKTAVKMIVVTKGFTDFTDARKFCCHAGTAPFSYSSGSSILSRNRVSQRADKSIKALLHMAAPVVAARCRGGNFTTVMKGKQLKEKIRCLSQTPSGRSLCTGCLP

SEQ ID NO: 198847 - protein, 346 aa, unidentified
MEHYAGIDVSLELSSVCVVDGRGKIVKEAKVASEPEALVYFLKELGFPVNRIGFEAGPLSQWLHAGLTQAGFETVLLETRHVKAALSAMTVKTDRKDACGLAQLLRMGWFQQVHAKSIGSQEIRALLVARKQLLGRLLDVELSIRGILRGFGLKVGQVTRKTFEARIRELVTGHTTLERIAEAMLPARATLKAQYEKLHKAVLAIVREDAVCRRLITVPGVGPVVAVTFKSAVDDPSRIAKSKAVGALFGLTPKKYQSGEKDVTGGITRTGDEMVRTALYEAANVLLSRITRFSKLKRWGMDVAKRRGSKRAKVALARKIGVILHRMWIDGTTYRWAETKPIAAQG

SEQ ID NO: 198848 - protein, 344 aa, unidentified
MVHVGVDLDKRSSQIAVLTEDGEVAQQRLPNDAARLEKFFAELPPHTPVAIEASGTWWWLVDLLEHLGHDPILSHPKQTKAIAAARLKNDRVDAERLALLLRGDLLPTVWIPSAALREARELVRHRVQLVWLRGIVRNRLHAMLARRNLQPVSTKTWLTQRGQRELQRLPLADTPSRIREDCSALLPLLDAQIRRLDSELGARWGGDPRVQRLTTIPGIGPFIAIVLVLELGDIARFPSAKQVASYVGLTPRIRASAGRIRAGHISKEGNRLLRWVLVLAATQAVRRPGPLRTWFHAVKKRRGKKVARVALARRLAEIVFHVWKHECDYFTVVRHGVVRGELGR

SEQ ID NO: 198849 - protein, 343 aa, unidentified
MQAITTIGFDIAKSVFQVHGVDAAGQVIVRRQLKRRQVIAFFQKLPPCLVGIEACASSHYWSRELHALGHRVRLMPPAYVKPYVKRQKNDMADAEAICEAVTRASMRFVPTKTPEQQSGLVLHRTRHLFIRQQTSVINAIRAHLAEFGVVAPVGRKGVEELLCVVADPNDKRVPEVVRACVAALGSQLLSLKQQILDFDRMIMAWHRSNQTSKRLNCIPGVGPLLATALVASVADPKTFRSGRNFSAWIGLVPKQHSSGGRDRLGSISKQGDRYLRSLFVAGALAVIRYAKIHGSKHRPWLTALLARRPTKLAAIALANKLARMAWAMMATGARYNYPASLRV

SEQ ID NO: 198850 - protein, 442 aa, unidentified
MWTGRKFFTRPADLEKLWKVIGLSEQDTVRVVMEPTRNAWVPLASWFRHHGARISMVPTTQSADLRAYYSKHTKNDHLDSKLLARLPLLHPEGLRDHSGDGPGEPLRRLVKIRSSIVKRRTAVFQRLDAQLELLGPAWYDALGSNYGKAALALLARYADPHSLIRLGHARLTRFLIRHSRGAWREPHATLLLTAAQESLQLWGSGANARIDFAELAADIATEAEQAQMLTEQIDDLDERAANLYAEADPRGIIASAPGVGPVTCAVIAGRIGDPHRFHSLAAIRAYSGLVPKVNQSGQAEQRHGLTKAGDPLLREALFAAADQARKSDPQLAAKYKRLMSTERHHDSAICHIATILLTRIATCWRAGAHYVLRDTDGRPITFEEGRRIVRAHHTVDKKTRINAASKRYSQRQKGRTGREQQESLRAPIHRPVHPSIKPTEVA

SEQ ID NO: 198851 - protein, 482 aa, unidentified
MAKRKMSTFERLRSGKMNRKERREWQQRLHAEDTGLEVVHPDAAGIDIGNASHFVAVPPDRDERPVREFGSWTADLRGMVEWLKRCGIRTVAMQSTGVYWVAAQEIQEGEGFEVYLVNARGTKNLPGRKSDVQECQWLRKLHTYGLLRNSFHPPEQIRAVRTIWRQRDRLVKETGREVQQMQKALATMNVQLANAISDVSGLTGQAILRAILQGERDPQQLAKLRHYRIAASEAEIAHSLEGNWREDVLFELQQVVDAYDFHQKQIAACDVELQKYLSALPLRRGPGAGEGSTADVPAEKSKKRRPHKWQQNQPRFDLAAEMQRTMGVDLTAIDGVDVRTTQVILSELGPDFSASFRTEDHFASWLELTPRRDVSGGKVIRQKARNNNNRVANALRMAAQSLWRSNSYLGARFRHLKARLGGQKAVKAMARYLACLIYRLLTKGRAYVDRGAAHFENKRTERELVALRRKAAELGMQLVEVS

SEQ ID NO: 198852 - protein, 341 aa, unidentified
MSEVSIIGLDIAKSVFQVHGADASGRAVLRKKVSRAKLLPFFASQPSCQVVLEACGGAHHWARELIKLGHEVRLIAPAYVKPFVKRQKNDAADAEAICEAAQRPSMRFVPVKTEAQQAAALVFRARDLLVKQRTQISNAIRGHMTEHGWIAPQGLAHMKKLAALLEDPSAVPESARPVLEIMLDQMAVLSERIAELDREIARRAREDETARRLMTIPGIGPITATAITALAPPPGTFAKGRDFAAWVGLTPRQHSTGGKQRLGAISKMGERTLRRLLIIGSSAVVLQASRRGAPAGSWLEQMMARKPRMLVTVALANKTARIVWAVLTKNEDYRAPVSVAA

SEQ ID NO: 198853 - protein, 384 aa, unidentified
MEHYAGIDVSLESASVCVVDASGRIVREAKVASEPEVLIGWFGMLGLAVTRIGLEAGPLSQWLYAGMREAGLPVELLETRHVPDAFKVMPVKTDRKDARGIAQLMRLGWFRAVHCKSLPAQEVRALLTARKLLQTKNHDVEMSLRGVLRGFGLKVGPTTPRTFAARIRELVAGHPTLSTVAEALLAARSTLFEQWQKLEKRLRSLARQDRRVRLLMTAPGVGPIVGLTYASAIDDPSRFRSSKAVGAHFGLTPKRYQSGETDVSGRISKIGDGGVRTALYEAANVILTRPVKGSTLKNWGMRLAARAGVRKAKVALARKLAVVLHRMLANGTTFLAEKAAPAAAHYLQVRAVRNAGRPEQGPVAGTMDQVRPMSSQQGFATARF

SEQ ID NO: 198854 - protein, 346 aa, unidentified
MRNNTLAAVDIAKEIFEVGVSDQPGRVVARKRLPRDGFLGFFAQLPRATVVMEACGTAHHWARRIEELGHVVVLLPPQYVRPYVMRNKTDRTDVDALLEAFRNEQIRPVPIKTVTQQIVATLHRLRSGWLADRVRSINALRGLLRELGFFIPEGRKHVLPDAWEIIQDHRRSLPEALKPSLAALCEEIASLSTRIEEVEAQLEALARQIPAVAHLRSVPGIGLLSATALYAFIGDPSRFPSGRHMASFVGLTPREYSSGLRRHLGRISKRGDAYLRMLLIHGARSVLWHSKRMKHRDRLRSWALRLEGKVGHNKAAAALANKLARITWAVWKDDRNFEPVPEPQAA

SEQ ID NO: 198855 - protein, 380 aa, unidentified
MKKDTRFVGLDVHAESIAVAVAESSGEVRSLGTVPNRPESVRKLIKRLGPAGALRACYEAGPTGYVLYWQLTGLGVHCDVVAPTLVPVKAGDRVKTDRRDALKLARSYRSGDLTPVWVPDAAHEALRDLVRAREAAKKDQLRARHRLQKFLLRHGRRPSEGVTPWTETHLAWVRREVRFEAAAQEAVLLDYLAEVDHARDRIQRLDRSLDEAVEAAPERMRAVIHALQALRGIAQVSAVTIVAEVGELSRFARPRQLMGYSGAVSSEDSSGGRTRRGAITKTGNAHLRRIIVEAAWAYRHRPAVAKALRMRQERLSEEVKAIAWKAQHRLHHRYRRLIAKGKAKQRVVTAVARELLGFVWAIGVEVERQLPTVDRTRRAA

SEQ ID NO: 198856 - protein, 416 aa, unidentified
MGMKVCGSLRRVVLSDIPFPIGAADMASVTLFVGLDYHQAFIQVCVLDAAGKQIMNRRCDNSAAAVLEAVQRQGEPAAFAIESCCGAADFAEELVAEGQQVSLAHAGYVHKLKQSPDKTDWSDARLLADLLRVGYLPRVWLAPSNLRQLRHLVQYRQQLAKARRAAKLRVTALLRSERVVLVHTRWTKDWIEAVRQCVLLGEEGQRVVRRQLDEIESPQKRIAQAEKRLEELTAEDPFVTRLREMAGIGLVTAVAFRAELGTMDRFRSGKRLSRFCGLSPQNVSSGQKQADAGLIKSANSELRSVVVEAAHRLIRLDPKWRKLGGALKSRGKSGSLVAAAVANRWVRWLYHQLKAIPSREPEAIFRRVLKRDVAEAVREFPDMVMSSSPPWAAGKPARSDRRLGLANPAWNLVHSP

SEQ ID NO: 198857 - protein, 350 aa, unidentified
MIIIGVDFHPEFQQIATVDTDSGEFQEQRLQHREETERFYRALAARGVPVRVGMEASGHARWFERLLGELQFELWIGDAAEIRTKRVRKQKTDRQDAQLILQLLLEDRFPQIWVPSWENRDLRQLLWHRHRMVQARTRIMNQLQAVALNEGLRCKKRLWRERGRQQLESFRLAPWASRRRRDLLELMDRLNPTIAELTQAIEQEVEKCPEARRLMTHPGVGALTALAFVLIIGKAERFSCGKQVASYLGLVPLEESSGNRRRLGHITKQGSSMLRFLLVEAAQVTVRSIPEWRSKYFHLAMRRGRKTAKVAMARRLAIRLYWMWRQGGDYEQFVKFGSHAGQPGNRDGVQ

SEQ ID NO: 198858 - protein, 366 aa, unidentified
MSENITTFVGLDVHKESIAIAVAGIGREKPQFVGTVGATLKELLKTLSHLGQREQMLLVYEAGPSGYVLVRELRTKGYRCEVVAPTKIPRRSGERIKTDRRDAVALAHFARAGDLSIVTVPDEADEAIRDLSRAREDALRARMTARHQLKAMLLRHGRHYAGKVGWTQAHERHLCKVTFAHPAQSIAFTEYRSAVSAANERLERITEALRQALTEWRLRPVVEALMSLRGIDFVGAITLVAELGDLRRFAHPKQLMSFLGLVPSESSSGQNRTQGGITRTGNTHARRILIEAAWSYRHPARIGREMQVRQERLPRELREISWRAQLRLCQRYRRFAARGVHQNRACVAIARELTGFMWDLAQHVPT

SEQ ID NO: 198859 - protein, 355 aa, unidentified
MERYIGMDVHAASCTMAIISEKGRKLKDFPVETNGQALVEAIRMIPGHKHLVFEEGLQSAWLYETLNPHVDDIVVAGITTSRGQKSDKSDAYGLAEDLRTGSLDKHVFKAPRQFTRLRELSRSHSTLVSDTVRVQARIKALYRSRGILVSGMNVYGVRHREEWRKQLPSSIQTRATRLYDYLDFLLEQKKQAETDLLREAKKHPIAKLLETAPGFGPIRVARLVPIVVTPHRFRTKRQFWSYCGLGIVTRSSSDWIQTPDRQWIKARVLQTRGLSRQHNHFLKSIFKGAATTVITQNKKDPIYARYGRLLDGGTKPTLAKLSLARMIAAIVLRMWKDEEEYDPGRASPIAKEREG

SEQ ID NO: 198860 - protein, 400 aa, unidentified
MISVGIDVSKGKSTVCILKPYGEIVSKPFNITHTQKDLSELSSMFFRLNDEVKIVMEATGIYHLPVLTYLQEKGFFVSVINPYLMKSYRNESLRKAKTDKIDSRIIANYGIDHWFKMKEFQTSGEIYEELKLLGQQYRHYMKLHLLSLAELTYLLDLTMPGIKNLLASWNETNRKDKRSDFVERFWHYDVITSMSEQEFTEEYILWAKEKKYVPSQEKAKVIYTLAQESIPTLPSETSSVKMLVTEAVRVLKEVDATLGLILSRMQEIAKTLPEYSVVREMGGVGNTLAPKLIAEIGDVRRFRNGKALVAFAGIDPPPYESGQFVGCNRKISKRGSASLRKVGYETMRSLKMRSRPEDPVYRYVVKKESEGKSKKSAKIAGLNKFLRIYYARVNELYKNI

SEQ ID NO: 198861 - protein, 461 aa, unidentified
MAKQSGKRKKGGAKADATEGLPPLNLHAAGIDVGSAEHYVAVPLDRDVEPVRRFGSFTADLHRMAHWLKDCRITTVVMQSTGVYWMALHDVLESHGFEVNVANARHTKTLPGRKTDVQECQWLQKLHTFGLLNNSFRPPEEIRVLRGYLRQRENLVAAAATCIQHMQKALTEMNIQLANVISDISGTTGLAILYDIVRGERDPYKLAKHKHSRIRASRQEIARSLEGTWRQELLFVLEQSLDLYQTYQQKIQTCDERIDGQLRSMEPKIDPVSEPIPEPRRGKDWRGHQSGFDLRGQLYRITGVDLTRIDGIEVQNAQTIISEVGVDMSRWKTEKHFASWLGLCPDNRISGGKVLKRGTRHVVNRASTALRLAASALLRSQSALGAKFRRLRSKLGAPKAITAMAHTLARLVYRMLKFGHDYVDRGIEFYEARYQQQHLQRITKQAAALHMQLIPFTRVVS

SEQ ID NO: 198862 - protein, 340 aa, unidentified
MKFVGVDLHKHVIKLCVIQVVRGKRKIVTRRHFQCCDTEGIRTFFEGLACFQAVVEATAAYEWFFLLIEDQADRLVLAHPKKLRVIAESTRKTDKIDAEVLALFLCLDMIPEAHRPSPRIRQYRVLVRYRRCLSRRITSIKTKLRNKLAHYNADIAALFTRRGMKYLAELAVSASDRFEMDSLQAQLKLLEQQLRETADELEKFAETAPLHEREARDILASIPLVGPVTIDVVLSELSDWTRFRNARKVVDFAGLAPGVRQSAGRRHELSITKEGSRVLRWALIQAAWRLACKSPRWKRLHRRLIKNTGSSKKAIVAVARHLLCMMFSMLKSGQTYRLTA

SEQ ID NO: 198863 - protein, 349 aa, unidentified
MLATTGQTIRVVGIDIGKNSFHVVGLDGRGAIVLRQKWSRGQVQARLANLPPCLIGMEACVGAHHLARRLQALGHDARLMPAKYVRPYSKGQKNDFRDAEAIAEAVQRPTMKFVIVKTSDQLDLQALHRVRARLVSQRTGIINQIRAFLLERGIAVRQGQRFLRAALPRILTAACEVLSPRMARVIEALADDWRRLDGRIDELSAEIQALADADSACERLMSVPGIGPIISSAVVAAIGTGEAFTKGRDFAAWLGLVPRQMSTGDRTILGRISKRGNRYLRVLFVQAAWVVLIKPTSWHRHGLKAWIEAAKKRLHHNVLAVALANKLARIAWSVLAHGRAFEVSRPQTA

SEQ ID NO: 198864 - protein, 356 aa, unidentified
MPILAERVDAVVGIDTHRDTHEVEIAHPTGAPIATCRIDNDTDGYAQLLAWILHHAPGPRLVVSIEGTRSYGIGLARAVSAAGLTVIECEQPARKDRRGRGKSDPIDAHLAVLAALRLDAERLPTPRADGDREALRILLGTRDELTTTATAQTNRLRALLLTGDDADRDLARGKLSDSTLTTLARRRLPRSHQPADRAQAVRHAEIRRLALAVLEARRTLATNRADLQAILDQLAPGLTDRRGVGPVTAAQAVVSFSHPGRCRNEAAFAALAGTNPLPASSGNTTRHRLNRGGDRALNRALHTIVMTRARCCPDTRAYITRRRAEGKTDREIRRCLKRYVTRQLYRTLTHTMTTQP

SEQ ID NO: 198865 - protein, 334 aa, unidentified
MNINPQGGAAERSQRPNAGIDVSKQHLDACSGARELRVVNDASGWNELIAGLKADDIDLVVVEATGGYERGLVLALQEAGIAVARVNPRQARDFAKSLGVLAKTDTLDARTLRDFADVLARHKERARFVTPLVDKQRELLVGLMTRRRQLVDMRVAETQRLEHASVPAVKSIRSVVRLLDRQIAEIDGDIDAHLERHFKAQRKLLDSVKGVGAVTTLTLLAALPELGRLGRKPIAKLVGVAPLADDSGKRKGTRRIWGGRAPVRAALYMATLSALRYNPAIAAYYQRLLATGKPKKVAMVACMRKLLIILNAMLRDRAVWDALRHVQAPQALDR

SEQ ID NO: 198866 - protein, 350 aa, unidentified
MDRYIGMDVHAPTCTLAVMGPTGRRLHERVVETNGRLLVEAIQGIAGARHLCMEEGTQSQWLYELLEWHVEQLVVVQPMKRAGNKNDSIDAWALAEQLRIGAAQKKSIFKGRRFPALRAAVRGQRAAMRDMVRAKNRLRAVYRARGLTPDADVYSPERREAWEKKLPSADRKLAEQLAQHLDVMMETYATANAWLEAEASKVPEVKRLCSVPGLGPITASQIVATVIAPERFRTKRQFWSYCGLGIVTRSSSDYVRDRSGRKWERRDVQQTRGLNRNCRPMLKSVFKSAAIAVLRLKKHPLREAYDKTVEAGTKPNLATLTLARRIAAATLAVWKKKEVYDPTKHRNQTA

SEQ ID NO: 198867 - protein, 351 aa, unidentified
MGNDITVGVDMGDKSHAICILDAEGEGKVRDSVVNTAKAIRKYFKDFEPCVIALEAGTHSGWISRTLEEMGHEVLVGNPRKLRVIWDSNEKDDDRDAEMLARIARFDRHLLYPIRHRGKEAQADLAVIKARDMLVKTRSMLITHSRGVVKSMGQRISKCSAETFHRRAQEEMPEELVPALEPVIKTIEELTDRIRSYDKRLEKLCREKYLETEGLRAIRGVGPVTALAFVLTIEESSRFEKSRSVGPFLGLTPKRDKSGSTDKQLPITKAGDAYLRRLLVGCSQYILGPFGMDCDLKRFGIKLAARGGKNAKRRAVIAVARKLAVIMHHLWKSGDAYDPIYQQNRKLKKSA

SEQ ID NO: 198868 - protein, 428 aa, unidentified
MASLTDAIAPCTWVAIDVAKSVNVALVEHADGRQQRFRFTHERGDYDRVVEFLHGCAQPCRVALEPTADYHRTIAYRLISEGFDLVLVSSVAGARLREAVFNSWDKNDPKDAQVILRLLKQGMTQRYCDPLLMRTHDLQELAKTYQHISRTRTRLQHVLLTHYVTLYFPEIERFWAPQRNGWFIRLLIEFPTPASIAALSVEEFRDRIWKSMGRRVHKEAKIQQIHALATRSIALPIEADSPAVSTFRLQLERYLQLCQTRDTLERTADTLLAGNPDYQRLRTIPGIGAIIALVILAEAGDLRRFSHHRQFLKFCGLDLAKSQSGASRSRDQLSKRGNARLRCALWMAAMTAARMRETAFRDKYRRYVARAPEDLDLNRKARTAVAAKMARVVYALIKHGQSYRHCFDAGLPSGSIPLTRAVEAFGTS

SEQ ID NO: 198869 - protein, 370 aa, unidentified
MLDTTTFIGLDVHARSIKAVSLDVMTGEVRAATFGYDAGAVAEWVRSVDPRARCVYESGVTGFDLQKRLSGLGVDCVVGAVSKMIKPSADRRRKNDRNDAEFLARMLSVGNVVEVWVPDDECEAARDLTRALEDARDDLSRSKQRLSKFLLRHGLAFDERTPTGRRKGNWTRAHWSWIESIRFAERADNDVLAYYVDAVRRAAEEKARLEGLVEAEARKPRWRRRVDSLRCLKGVDTATAADLVFEAGEFSRFRNARSFAAWVGLTPSEHSSGESDRRGAITKAGNKHLRKTLVEAAWHYLTCSGRPKGLAKGQAPDRGARRHAAKGVRRLVERREALLARGVHGNKANVATARELACWVWAVGLMAEEA

SEQ ID NO: 198870 - protein, 311 aa, unidentified
MTQPLYAGIDVSKDWCDVALEAGDASARFDQTLEGRKDLARWLKAQGITHAVLEASGGYERSVLRALDDAGVQACLVPPHRVRALAKASGRSAKTDALDARVLAAFGRLLSPRVRPRRDDDAQALAALVRRRRQLVDLMTLEDNRRQQEHDAGILADIVALLDMMRSQLDALDRRIAAQIRTSTALREKHDVLVTFPGVGPVTSAVLLAEMPELGSLEAKQAASLAGLAPFNNDSGTSEKLRSIQGGRAGVRCALFMAALTAIRHNPDIKAFYKRLREQGKPQKVAHVAAARKIVVILNAKLRDAIPKHHP

SEQ ID NO: 198871 - protein, 354 aa, unidentified
MMIIGCDYHPAFQQIAFVDTETGELQERRLQHREEAEKFYRDLATQGIKVRVGMEASGQARWFERLLAELNFELWMGDAAEIRTKRVRKQKTDRQDAQLILRLLLEDRFPRIWVPSWENRDLRQLLWHRHRMVQARTRIMNQLQAVALNEGLRCKKRLWREAGREQLEGFRLAPWASRRRRDLLELLDRLNPTITDLTQTIEQEVEKCPAAQCLMTHPGVGPLTALAFVLIIGTAERFQCGKQIASYLGLVPLEESSGNRRRLGHITKQGNALLRFLLVEAAQVSARSIPEWRNKYFHLAMRRGRKIAKVAMARRLAVQMFWMWRKGWDYEQVRKFGSHAGQPGHRDGVQSNTE

SEQ ID NO: 198872 - protein, 359 aa, unidentified
MDKYIGFDIDSKKTVACVVQKGKKEVYATMGSDVRSMRDFLKAQKADGSRVHLTFEVSGQAGFLYDSLIDCADTITVSNPSKMTWIYRTARKNDRIDARKQAVLLSIGEIPRVHMPSVEVRQWRGVILHRRNLVNKVTEVKNRIRAVLKSQGFSRPFQKGSWWKRSNRLWMRELSGQRIISMELWRMNLGNFIEQLDLLEGQVKRVSEYLDEYLGRQAGGRLLTSIPGVGPRTSEAVLAYTDDVDRFGNTRGYCSYFGLTPRLDESGTSKRLGHISKTGPSVVRWLLCESSWKVIRKSGALRGFYERVKCGQENRKKIAIIAVCRKLLAIMRAMLTTGELYNEKLVGRECWNNEIVKAS

SEQ ID NO: 198873 - protein, 359 aa, unidentified
MQTQSNKLNFAGQNIYAGIDVHKASWTVCIFSEKLEHKKFNQPPTVEALKSYLHRTFPGATYHSAYEAGFCGFYIHYKLLEAGIHNIVVNAADVPTTHKEKDNKTDKRDSRKLGRSLRAGELTGIHIPARKVQEDRSLLRLRYTVRKDLTCIKLRIKSLLSFYGIEHPEQFSSPNKHWSRRYMEWLKTIYMEEESGRAVFQILISEVEEMRQVQLDVTRKVRILSQTKSYAKDYELLLGIPGIGLITGMTFLTEIGDINRFPSADHFASFVGLIPSCRSSGEKENNGDITSRAKTILRDLIIESAWSAARKDPALHMAFCDLCKRMEPNNALIRIARKLLNRMYHVLKTKTEYVCGTVK

SEQ ID NO: 198874 - protein, 402 aa, unidentified
MNAVGIDVSKGKSMVAIMRPFGEIVSAPFEIKHTASDIHSLVELINSVEGESRIVMEHTGRYYEVLAHQLSKANLFVSAINPKLIKDFDNDSLRKVKSDKADAVKIARYALDKWQNLKQYSVMDELRNQLKTMNRQFSFYMKHKTAMKNNLIGILDQTYPGVNTYFDSPARSDGSQKWVDFASTYWHVDCVRKISLNAFIDHYQNWCKRKKYNFSQSKAEEIYGKAKELVPVLPKDAITKLIIKQAIDQLISVSTTVESLRTLMNETASKLPEYPVVMAMKGVGTSLGPQLMAEIGDVSRFTHKGAITAFAGVDPGVNESGSYEQKSVPTSKRGSSDLRKTLFQVMDVLIKTHPQDDPVYQFIDKKRAQGKPYYVYMTAGANKFLRIYYGRVKEYLSSLPES

SEQ ID NO: 198875 - protein, 347 aa, unidentified
MRFYTKQHPFYCGIDLHARTMYVCILDQAGETLLHRNMPATPEALLKAIAPYREQIVLAAECMFTWYWLADCCAEHGISFVLGHALYMKAIHGGKAKNDRIDAHKIAVLLRGGMLPQAYVYPAEMRATRDLLRRRMHLARKRGELLAHVQNTNSQYNLPSIGKKIAYKANRDGVAERFADPAVQKSIEVDLALITYYDELLRDVELTIVKTAKHHDANTLYLLQTVPGIGKILSLVLLYEMHDIARFPRVQDFASYCRLVKCAKESAGKRSGTSGSKIGNAHLKWAFSEAAVLFLRDNPAGQKLLTRLEKKHSKGKALTILAHKLARAVYYMLKRQTAFDLDTFLRG

SEQ ID NO: 198876 - protein, 375 aa, unidentified
MNQFIKYVGLDTHKDTIAVAIADIAGGKPRYYGEIANTPTALTKLIKDVSPNGEVVSYCYEAGPCGYGIYRQISGSGHDCSVVAPSLIPTKPGDRIKTDRRDSENLARLHRAGELTPVWVPDQEQEAIRDLTRAREDMKHLERQARQRLSAFLLRHGQGYDSKKSKWTQAYWRWLERIKFAHPVQQVVFQEYIDSVKQQQQRVADLEQEMTKALSNWSLAPVVEGLMALRGCRLITAMTIMAELGDISRFDSPRQLMSYLGLVPSESSSGQKTRRGGITKTGNGHVRRLLIESAWCYRFPARKTAAIQRRAEQTTDEVQAIAWKAQKRLCGRYQALNKRGLMPQKTCVAIARELTGFIWAIACEVMDKQPSTALV

SEQ ID NO: 198877 - protein, 428 aa, unidentified
MSATLNDDNSQENYAAFIAIDWADQKHVFSLQMPGQTKKETGTLEQKPEVIGPWVAKLRERFGGQPIAVGLEQSRGALIHALMPYDFLVLYPIHPTTVAKFREAFKSSGAKSDPLDTNQILQILTKHLDLLTPLRPDTEETRLLGRLVEDRRKAVDLRTGHVQALLASLKEYFPQAIELLNDNVSTRLASDFLKHWPTLEAFQQAKPSTLKKFYYGHNIRSPEVMEKVLRLATTAKALTTDPAIVESGSRLSQVHAQVIQSLNPLIDAYEKRIEKLFNAHAEAKLFTGLPGAGPALAPRLLAFFGTDRSRYETAENVHNFTGIAPVTKSSGKSRVVYFRQACPQFDRQTFHEFARLSVLKSQWARNYVEYYSAKGKKYHTVIRALAYKWIRVLCKCWQERTPYDEAKYMETLRKRGSIFATLHLDKQS

SEQ ID NO: 198878 - protein, 343 aa, unidentified
MESYVGLDVSLEKTSICIVDGSGAVIKEGEVRSDPDEIARFVRAHASSVQRIGLESGPTSTWLWRELDQLGLPAICIDARHAKAALSMQINKSDRNDAIGIARIMQTGWFRKVQVKSERSHAIRGLLNSRALLVRMLRDIENQIRGLLKNLGGVIGRAKQGVFTRRVRELLDERPDMTLIIEPLMNARDDLARHLGEVDRTTKKLARLDHQTRAFMTVPGVGPITALAFMAAIDDPTRFRRSRNVGAYLGLTPRRHASGEVDWSGRISKCGDKIARSYLFAAAGVLLTRIGKWCKLKAWGMRIAKRSGGKKARVAVARKLAVLLHRMWRDGTTFQWNEEKHAI

SEQ ID NO: 198879 - protein, 438 aa, unidentified
MSNKVIFNLDDLFISVGIDVGADFSWMSIALPNQQFVGKPYKILHSSIDSLTTAVSKIKEAEELYSLESRIFLESTGIYHYPLFCYLRDKGFNCSVINPIITKNSTNINIRKVHNDRFDSKKAALVGLKPDLKVSLMPSDLALNCRNLCREYYDLMDNRSAYVNKLQGELRMAFPQYLGIFSKITANTSLTLLETYTSPSAFIEADPQEIIDTIKSTARFGVAYAASKYNAIIQAAHDANEFGYILDSNIKRIRLYISFIRKYDEEIKNILDAMHELIDANEETDFVKQIHLVETFKGAGFLSAVTLMGEIGNFSAFSKPKQLFAYFGLDPAVKQSGKFEGTKIQISKRGSAIARRAIHTLTLQSISTSRTGEAKNPVLRDYYLKKCESKPKLVAMGAVSHKVCNMIFAILRDNKPFEIITPQEHIQQYNAAKCDIAA

SEQ ID NO: 198880 - protein, 383 aa, unidentified
MRDDKRKKKTVPTRQTMNSNSLIAGIDLGDSTSLATILTTTGDVADRFCFQMDDEGYTLFTSRVPRDTRLAFEATSTAYPFFRMLKGRGYDDVTVAHPTELAWIVRSKKKNDRADSLKIAKLHLAGLLPESHLLPQTEQIERDLLIQRVKLGSEIGRMKSRIISYLKREGVYSHLPKSKDNFSARRRVAIASLRFNDDRDLVLKTMIDRLEFMETQCEPLEQRIKLNARDNKYVRILMSIPGVDYYLASLYASYIGDPHRFPSFDHVASFLGIIPESKDSANVRRRGRMSKDGPPIARWGLGIMTDTVMLYNPNIKAYYTRVKARTGRGSYAHVLTMKKLARMIHHMMLTEQNYRWENEALTEEKISRLDNDAHAAGGEIQSV

SEQ ID NO: 198881 - protein, 402 aa, unidentified
MRFIGMDVHRDFCDVAIYEDGKVRLAGRVESSPEQLGLFAQSLCDEDHVALETTGNALSIARILEGHVGGVLVADTRNVRAMTHAKVKNDRVDACMLAKLLAAGMLPGTWLCDEPTRVLRRRISRRNQLVRGRTRARNQIHAVVIRNLGGRSPKRDAFSKKGREWLAGLELPTDERETLEGCLREADFLSGEVALVDREIACYAMGSAEIRRLMTIPGVDVTTAATLMATIGDIRRFPSPRHLVGYVGLDPRSRQSGASPIYTGHISKQGSSSARHVLCEAAHATMRAPGPLRAFGQRVRSRRGSKIATVAVARKLLCLTWQLLTKEQDYLYERPALTFRKLRKLELAAGAPKRSNPRGRNGKGTPDNPAQWATDRAQALQTEDHYRTAVANWQPQPQASPS

SEQ ID NO: 198882 - protein, 349 aa, unidentified
MKNNTAIGIDLAKRVFQVCLVDIQHRRVRTNKELKRSELLDFMRRQPACQVFMEACGGAHYWARQLGAMGHQVQMISPQFVKPFRKGHKTDANDALAIVEAGLRPDMRFVPLKGLDQQDIQSLHRIRDLYVKQRTQLINQTHGLLQEYGIVSGRGQKALRSTLWRALEDGDNELSALMRELLVEQVKELDRLNDAIDTLDKRVQQLSRSLAPCRELMAIEGIGPVVATQLYSALGNGNAFSKGRQVSAWLGLTPRQNSSGGTVTLTGIGRTGQIPLKAALIRGAHAVLQTLGDKQDAKSRWLRALISRSGKNKAAVALANKTVRTAWAVLHRGQSYCRDFNGDLTLPQG

SEQ ID NO: 198883 - protein, 402 aa, unidentified
MYFVGIDWSDLHHDVAVFNEKGQELKYFTIPHNRKGMELLKERLLSIDPEPENFACLLETKNGLLVQFLLEAGFPVYPLNPKVVDYRRKPSGAKSDPIDARLLANIGRSDLAQLKRLKPDTELIAELKMLTRDQDSLIQESTRLTNKLIACLKEYYPVALEFFSKPTLPVALEFFKLYPTPDLVREATVPEMAAFLKKHKHPRPNQTAISIWQKAHEPQLQASAPTVRAKCRLMLALVRQLELVQDQIAAYDEEINRLFQQHSDSRIFASLPRAAERLAPRLLAEWGDDRERYENAAVVQALAGTSPVLFQSGKYRFARQRRSCVKPFRRAMHLFAFQSIRQVSWAREYYDTKRSQGKTHHEALRALANIWVRIIFAMWKNRTCYDEATFLTARARHLSRAA

SEQ ID NO: 198884 - protein, 403 aa, unidentified
MFYLGIDVSKKSCRYLLLNEEGQKVKSFSLDNTQEAFQNLLERLKTLSIPKENLLIGLEASGGFWENLYSHLKENGFSVVLLNPYHTNKFREALAKKAKTDDIDALVIAQLLRTGEYVQSQVAEELIQSLREITKLRYELMTERKNFQRQVFSLLSIVFPEHEKTALKNPFSVASLAILQRFPTAKDLAQAKPKQIEKIVRSIQGNNFNIEEISKLIQTAQTSIYSGRAKEARATSLRILLRHIENLSSSIEELEAEIQELLSPQEPQDSFPGENLLSIPGVGEKTVAAVLSYLGINGSNFSTSTEAIGYVGYFPKIYQSGQTYRDNTICKKGPKLLRWALYMAAVASLKHNKEMRTLYHKKLSQGKTEKQALICVAKKLLQIMLAMLKSGEPYNPMRVFVSA

SEQ ID NO: 198885 - protein, 440 aa, unidentified
MPDGIRWVGLDVHARESTIAIFDQGTGELMTRRVVGRPHELLPWLRAVARPARMVYEAGPTGYGLARRARAEGIELVVCAPSKTERPPADRIKTDKRDAIRLARLLAAGELTLVTVPSVEREQLRDLVRCREDIRVDLMRARHRIGGFLLRREIYWEGPGEAWSRKHRSWLTSVQFADQASQATLADYLHAHDVLIARRDQVEADLAKLALSAPCAPAVARLRCLRGIDTLSALGPCAEIGEWDRFDHPDQLASYLGIVPSEHTTGNQRRLGSITKAGSTHARRLLVEASYHYRRGPAVGEAIERRRRGQSPQVINIAWRAQRRLNARWRQLKDARRKPNGSSPSRSPANSPATAGRSPPGLLIPIWFRRHPCRRATPSCPQPRSRRSRRQAPAGGSPTHADPRTTTRCGWRGSPSIPARAQQLRDLSPEQPPTGGRARL

SEQ ID NO: 198886 - protein, 459 aa, unidentified
MAQDGDTVEVEEPEEIVARVAAIDVAKASGMVCTRVPHSAKPGQRATKVWQVPATTNAIIELAEQLAGQGIQRVVVESTSDYWRAWWYLLEARGLVVWLVNARDVKHLPGRPKTDKLDAVWLAKLNERGMLRPSFVPPAEIRRLRDYTRLRSDLTGERGRHVQRLEKLLEDALIKLGTVATDIMGVSGRAMLEALVAGQRDPKVLAELARGRMRGKRGALVQALTGRFDAHHAELARMLLDHYDALTAQIDRLTARIQELIGAIPAAQPPGDGNGAAGGSDDGTTGASANQRAAQPPLGALERLDEVPGIGAKAAQVIIAELGLDMGQFPTPGHLVSWARLAPRTIQSGAKHRAGATGKGNPYLKGVLGEVAAAAAKTDTFLGERYRRLVKRIGKLKALVAVARSILVIVWHLLADPTARFHDLGAGYHTSRIDKDRKTRNHVRQLQALGYSVTLTPAA

SEQ ID NO: 198887 - protein, 340 aa, unidentified
MVHVGVDLDKRSSQIAVLSEDGEIVQHRLANDAARLEKFFADLPPHTPIAIEASGTWWWLVDLLEELGHQPVLSNPKQTKAIAAARLKNDRVDAERLALLLRGDLLPRVWIPPTALREARELIRHRIQLVWLRGVIRNRLQAMLARRNLQPTSGKSWLTQRGQRELQRLPLGETPSRIREDCGALLPTLDAQIRRLDADLVTRWGADARVRRLTTIPGIGPFIAIVLVLELGDIERFASAKRVASYVGLTPRIRGSAGRVRAGHITKEGNRLLRWVLVLAATQAVRRPGPLRAWFHAVKKRRGKKVARVALARRLAEIVFHVWKQECDYFTVVRHGVVRG

SEQ ID NO: 198888 - protein, 329 aa, unidentified
MKKDWYVGIDVSKKWLDVAIFVENSELKGYSHTQVNNCKAGYKDLLGWLREHDVDASTCTYGMEHTGFYSDGLQHFLDKKGYKYTMLEPAVIKHYPIQPREKNDRLDAAKIADYLFRFKETIKLSRVPDKTMEELRNLHRERKFYVEDRVVYLNRKQVVGKEEAKRLDKIISLLDKQVESIEEKIRDIIRNDESLMESYLYLTSITGIAFVNAVNAIVITQNFTVFKTARDYASYIGVSPHTKKSGTTVRWKPKPYKHCDLTAKADISLAAKIAIVHDVELKRFFERKCNGKEDADTIRKAMNAVKFKLVLRMFAVVKQKHEYRQFTTI

SEQ ID NO: 198889 - protein, 403 aa, unidentified
MNNVAGIDVSKGKSMVSVLRPFGEVVAKPFSIGHTGSELKELADYLKSLDGETRVVMEHTGRYYEPVARFLHDEGVFVSAVNPKLIKDYGNNTLRKVKTHKADARKIARYGLDNWAELRQHTPMDTIRMQLKTLNRQQSLYTKTKTMMKNNLIALLDQTYPGVNALFDSPVREDGSQKWVDFATTFWHVDCVRNMSLTAFAERYRKWCKRHGYNFSQSKAVEVHAGAQDLIAMLPRDALTKTMVRQAIDALNAISASMERLKAEMQALAAQLPEYPVVMAMHGVGDSLGPQLMAELGDVTRFTHRNAITAFAGVDPGADQSGTHEAKSTRVSKSGAPELRRALFLVMDCLLKTQPQDDPVYRFMDKKRAEGKPYLVYMTAGANKFLRIYYGRVKEYLASLEGN

SEQ ID NO: 198890 - protein, 452 aa, unidentified
MCLEDRPILEPNAAGIDIGAREIFVAVPPDRDADPVRVFSTFTEDLEEMAKWLVSCGVTTAAMESTGVYWIPAYDVLEQHGVKPCLVDAHGMKNVPGRRTDWHECQWIQFLHSVGLLRAAFRPDGEVCTVRSLMRHRSDLVQMTNQHIQHIHKALTQMNVQIHHVIDDITGVTGLAIVDAIVDGQRNPLELAKLRDPRIKASEETIVKSLQGTWRPEHLFTLKQSRQMYRHYQDQIAACDEEIEKLLVAFQPRVDPAEKPLPPDRKKRKRGRQKKNAKTKQGFDLRTESYKIFGVDLTQIPGLMAMVLTLFSEVGRDMSRWKTAGQFVSWLALCPDNDITGGRVAWRGMRRVHNRAGELFRMAAYSLHHDKSPLGDYLRRMKSKLGPTGATTATAHKIAIIFYTMVKKQVEYDATLWAERDTQREKRFEAKLKRQAQQLGYKLVPIEEKPAA

SEQ ID NO: 198891 - protein, 338 aa, unidentified
MYVIGIDPHRGSHAAAVLDGDERVQAVLHLPADQQQRQRLLSWANRFMPRLWAVEGATGTGALLAQQLVAAGEIVVDVPPKLAARVRLLGNDHSDKTDSHDARSTAIVALRNARLRQVGIEDHTAVLRLLAKRHHDLIAARTRAMCRLHTTVCFLIEGHLPRRLRAERAAGILAGIRPATAIDVERKALARDLLAEVRRHDRELAEHLVRIREAVAASGTTLTGLHGVGPVVATYVLGYSGDIGRFPSAGHYARYNATAPIEASSGPVIRHRLNPRGNRQLNHAIHMIAVTQVRNDTPGRAYYRRKQAEGHSRKEAMRALKRRISDAVYRQLVIDSRR

SEQ ID NO: 198892 - protein, 313 aa, unidentified
MSLKLSYGGIDVSKDRLDVVVLPEGWFFSVSNDTAGWTELVARLRPLAVCAIGLEPSGGYERGIIRALLAAGLSVRRINPNKLRQFARARGVLAKNDRLDARLIAEYVAIMPTRVVQRDGAVERLAEVVTMRRQLCDEHVAVENQAAHLQDAMLRRLSKRRLVRLEADIRLLDKRLAEMVATKAAFAQLYELLTSMPGVGPVLAFTLIALLPELGKMSRKQIAALVGLAPYDFDSGKLRGHRSIYGGRMPIRNVLYMAALSASRYNPALKTFSNRLAHANKKSKVIIVAVMRKMITTLNAMLRDNAAWQPQSN

SEQ ID NO: 198893 - protein, 367 aa, unidentified
MESAQMLQPVFVPREFEVFAGLDVDKTRIAVTFTDHNRLLKSLQMPYSSQHLLNYTRKQFADRRVAFVYEAGPTGFGLHDDLLAAGHRCLVVAPSMVPRAPGQRVKTNRIDSRKLSEGLRGGQLNSIHVPSLAYRHLRHLVQLRDSHVRQMMAAKYRIKALLLYEGIPFPEAPASNQWSARVLHKLGTLPCAAAVGFKLNSLVASLYFHKLEAAATQKQIRRFCQQDPELSRSIQYLTTIPGIGWIVASHLVARLGDWRQIRNVRQIASFLGLVSWEHSTGDQVQRGSITRTGDVRLRNKLVETAWTAVRKDPELEQFYRRIYQRHPRPIAARKAIVAVARKLTTRIYSVLKQQRPFRLKTGSPKLL

SEQ ID NO: 198894 - protein, 341 aa, unidentified
MNEKNLYAAIDLHSDNNFLAVIDDKDHRLCEKRLKNEISVVMAALSPFKDRIHAIAVESTFNWYWLVDGLQDAGYVVQLVNTSAVRQYEGLKHSDDRHDAYWLAHLMRLGILPTGHIHPREHRALRDLLRKRMRLVQQRTANILSVQNLQQRNEGARMTTNQIKAQTAKTIAKSVSDPNRAMALRSTQSIILALNEQIAQIERAVLKQVRPDPTWKLLKTVWGIGPILATTIWLEAGHLDRFDDVGNFVSYCRCVKAERTSNGKKKGEGNTRNGNQYLSWAFIEAANFAIRGYDVARRYYQRKASKTNVILARKALAHKLARASFFVMREKKPFVPERLFG

SEQ ID NO: 198895 - protein, 370 aa, unidentified
MRNRSMFIGLDVHKETIDVSIAEGDRHGEVRHYGVIASDLEPLDKVVRALRAPNRRLHFVYEAGPCGFGIHRHLTSRGEDCVVVSPSMIPKRSGDRVKTDRRDSQMLARLHRAGELRAIYIPEATDEAMRDLVRAREDAVVVGTQAKYRLKAFLLRQGRRYPGREGWTLPYRRWLTDLSFPNAAQHIALQEYRDTIDETETRIDRLTEQLRQLAPTWRWAPVVAALQALRGVSFVTAVALVAELGDLTRFGQPRELMAYLGLVPSEYSSGPSVRRGGITKAGNPHVRRLLAEAAWAYQGIPRIGRQHAYRQEALPKIVCDIAWKAQLRLTTRFRRLVARGKAKPKVATAIARELTGFIWAIAREVSPTPR

SEQ ID NO: 198896 - protein, 407 aa, unidentified
MKDNQRKLYVGIDVHSREHKAAVLPMALLEQSGAAWKKAKLLGIKNNIADFERLDTTIRSHISSTEEVAIAVDHTGGHYSEPIVYFLQAKGYTVYHLETKAIKAARERFLDEESKSDAIDSTSAAYMLYLRDAHGISFRISAMTPELGSKAAALKSLVLQRWQFNKLATQATNRLHQFLLAVFPEGEAQHFNQLLKVTPYYATPKDILDSNGLEKIEKLSQKDKENMLELAANSVGIPGDIYQWLIKDLSIQRVESLAKRDALTAILRTQVAAHPYGDILLSFPFLGEIAAATIIGIIKDIERWPDKKKFKKAIGVYNSLTQSGTSLGRTKQGKEGSRHGRRVLFQVCFGCIRTNVHDNDFKDYYLRQVARGKLRMKALVSTMGKLAEIIYHCLKAGEPYQYQGIYR

SEQ ID NO: 198897 - protein, 340 aa, unidentified
MQVSKKNFLGIDVSKPWFDVSLLPVINHVKQTVVSQRFDNSTTGIKLFKEWLDAHSVSFDDNSLLVIENTGVYHRLIWSFCSKHNLQLHIGNAARIKWSLGITRGKSDVIDALRLCQYCYKQADELKATPALNPVFMKLKDLMSSRSRLVTQLHSTKNYIKEIQCTNDKALIALLDKAHKAAVDGIKKSIVQLETLIESIIKADPVIYNNYQLIKSVPGIGHLTAVYIICCTNNFTNNASGKQLANYAGVVPFGHSSGISIKGKNRVHKMANKDLKKMLHLCALTAIRYYPEFKQYFDRKKAEGKNGMLVLNAIRNKLVLRVVAVVNKQQPYVDNTKLAA

SEQ ID NO: 198898 - protein, 417 aa, unidentified
MTTQAFRYHAGIDWASDHHDVCVVDDNGTVLGEKQVEHSGDGIQECIDWLLQLAGGDASSIAVAIEVPHGAVVESLIENNLAVFAINPKQMDRFRDRHTVAGAKDDGLDAFVMADSLRTDQRCFHRVELDEPAILRLREWSRMEQDLQTDGNRLANQLWEQLRRYYPQMLKLSPAANEAWLWDLLESAPLPGDAAKLKLAKVKALLRSHRIRRVTAEQVLEQLRQPALRLAPGAAEAAGEHVLMLLPRLRLLEAQQAAAAKRIRGILEELCTAPPECEGREHRDAEILLSLPGIGPVIAATMLAEASQPLRDRDYQALRHYGGAAPVTRRSGKRKVIVMRYACNERLRNALYHWSRCSMQKDARAKQHYAELRRSGHSHGRALRGLADRNLAMLVSMLKSGTLYDPARRGAAVAEAS

SEQ ID NO: 198899 - protein, 381 aa, unidentified
MRTTYDKQHRADDQVLAVALELSKASWKVAMSDAQHNPRIKNADAQQPLERLEQVLTLIKDARARWTLPEDVRVVVLYESGQDGFWIQRALAARGIETLIIDPASLPVERKARRAKTDRLDARRLVEALLGWLRGEQQRFRVLRQPSVAQEDSRHWGREREQLQREMQQHRDRMVKLLVTQGCWEKLDRAFAQRLANGELRDWEGKPLGATLQARLQRELTRWQQARDQFRQLEQEQAERFSAQQQAQLTQLVQLRGVGPVSAQRLVLELFWRHFANARQLGACVGLVPQPYDSGTMRKDQGISKQGNRRVRALLVELAWMWLRYQPNSALSCWFASKVQGDSKRSRRVAIVALARRLLIALWRYLERGVPPEGSQLKAAA

SEQ ID NO: 198900 - protein, 427 aa, unidentified
MAEVESVRQEPQFAAFVGIDWADQKHVWCLQAVGSEKRESGELEHTPEAVEAWVGELCQRFGNRPIAVAVEQLRGALVYMLAKYEPLHLFPVPPTMSASMRKALYPSGSKDDPRDADLLLDLLLQHRDKLHRWSPDTEATRRVQNLVEERRKLVDEKTAQTNRLTNHLKIYFPQILDWFEHLDAELVGALLERWPTLEELQKVPPAKLRSFFRKYHCRDEALIERRILAIGQAIPAIRDRAVIEAKSTVVKVMVQLVRSLVEGIADLDEKIEEAAAAHPDFFIFESLPGAGAVMAPRLLAAFGSQRERYGSANEVQAYTGIAPVTEKSGKKKWVHFRWACPKFLRQSFHEWAGHSIPHSMWARAYYQQQRNKGQDHHAAVRALAFKWIRVAFRCWKDGVAYDERKHLASLARRGSPLATVAATAKPL

SEQ ID NO: 198901 - protein, 369 aa, unidentified
MGEYSEAFVAFDVAKTKHAVAIADGGRGSEVRFLGEVTNSPTAVGRLIRKLSGRYGKLHFCYEAGPTGYGLYRQITALGHACLVVAPALIPKRPGERVKTNRRDAVTLARLHRAGELTGVWVPDAVHEAVRDLVRAREAAADDLRRKRQQLLSFLLRHGRVFSGAGHWTLSHRRWLAQQRFEHAAQQIVFQEAIDAIEDAIQRLRRLEQQLTLIVPNWSMAPVVDAYQAMRGASFLVAVTFAAEIGDVRRFETPRQLMSFLGLVPSESSTGATVRRSGLTLAGNRRARRALVEAAWTYRYPARVSESLRARLDGLPKAVRDIAWKAQVRLCARYRRLSQAGKKLPVVVAAIAREMAAFLWAIGREIAPA

SEQ ID NO: 198902 - protein, 448 aa, unidentified
MFTMHYKRLLALIDSVSSYLSVGLDVGADFTWMSIALPNGSFIGKPFKIVHSDPGARDLAVAKIKEAQETYSLKSRCFLESTGIYHIPLLCFLRDKGFDCSVIHPIITKNSTNISIRKLHNDKFDSKKAALVGLNVSLKTSIIPDDSVVDLRNLIRDYYYFKDLQSAVALKLTAELKVSFPAYAKIFSKVTTQSSLKLLSSYPLAEDMLTAPKDDIVKIIRSTARFGEAYALRKYDAIIAAAQDAAVFGRALPSNAVRIRLYIDTYQEYQKHLDALLKALHETVDQLQDTLIYDQICLLQSLRGIGFLTAAVLIAEMGDFKLFSSPKKLYAYFGLDPAVKQSGKLNGDKVHMSKRGSSLARRVLHMVALNNIKIDKGSGTPVNPVVYNYYTRKCSGKKKPVAMGAVMHKICNIIFAMLRDNKPFEVITPEEHCRRFAAEHPDKIQKAA

SEQ ID NO: 198903 - protein, 345 aa, unidentified
MEQISRIGMDTSKHFFQLHGVNAAEKVVLRKKLRRKDVVAFFEALAPTVIAIEACGASHHWARILWSFGHEVKLIAPQLVKPYVKRGKNDTADAEALCEAMSRPTMRFVPVKTAEQQAALMMAGLRDRLIRNRTQLSNAIRGYAAEFGFTSARGMAHIDPLLDRIQADESVPVLARELFAAQAEEYAQLQAQIVEADAKLMAWHKADECSRRLANIPGIGPIGATLLLMKTPAPEMFRSGRQFAAWIGLTPKDHSTAGKVRLGVITRAGDEALRSVLVVGATAVIQHVRRGGRGSPWIVGLLKRKPPKLAAVALANKMARIAWKLMVTGNSYAAKSAPAALMGAA

SEQ ID NO: 198904 - protein, 401 aa, unidentified
MFSQRKCLILFYLFEFEQNVRNTAGQYIQNIQPGDKTKGDFHFFIKKLIGMKKILRQVAATDVAQKELVVTLGRMYEDLIPELYSHRKFPNTEKGFMALLLWVKKLSSEDTAVRFVMEATGVYHESLAYFLEAKGYEVSIVLPNKISNYCRTLEVKTITDKTASEAIARFGLERKLDKWERPKPIFKRLRQLTRERDQLIQSRTIAKNQLHAEQTEAEPNNSSITRIKKQIAFLSKQEKEIKVEILALSKQDKKVEESIATICSLPGVGLLTAVNAIGETNGFSLIRNKRQLASYAGFDVKEKQSGTSVKGKARISKHGNKYLRKAMHLPALAAIRHDERFKAIFARLVSKHGIKMKAVVAVQRKLLELIYILYKTNMPYDKAYLHRNEHVEQVNKIRVVI

SEQ ID NO: 198905 - protein, 316 aa, unidentified
MDVVIERAYGMDVHKDNITACILTPEGKEIQTFSTKTVFLLQLVDWIKQHNCTHVAMESTSVYWKPIVNLQEAEDIEFLVVNAQHMKAVPGRKTDVKDAEWIAKLLRHGLLKASYIPDRNQRELRELVRYRRSIIEERARQHNRIQKVLEGANIKLGSVVSDVLGVSARDTLDAIADGEEDPEKLANFARRSMKKKKEELELALKGYINSHQRLMLKTILGHIDFLTEQIEMLDKEVADRVSSHQEDVSRLDSIPGIATRMAEQILSEIGTDVKKQFPTAAHMCSWAGLVPGQNESAGKRKIGLIFDDLSIRMLHN

SEQ ID NO: 198906 - protein, 309 aa, unidentified
MTAVGIDVGKAALDLAIFDESKVHRFTNTPAGIRRLIRLLQDRQDVRIVVEATGGYEEAVLAACAEAGLWIARVNPRQARHFARAIGQLAKTDNLDARMLAEMVQAFHARLRAYVPLEPWQTELRGWLRRRHQITEAIQRTRQQLAMTLPAIRPLIKKTLIALQREQTLVDAAMKQLLQAHASPAMRSSKGLGPMFQASVLALLPELGQLRRQQIAKLVGVAPLNRDSGQSQGKRRIYGGRAEVRVALYMATLSAVRWEPAMKAHYQQLRARGKVAKVALVACMRKLLTIVNARRRDELQGAELAIQNT

SEQ ID NO: 198907 - protein, 364 aa, unidentified
MRNYTDKKVYLGIDVHKRTYSVTAVCEGQVAKKDTLIAEPMRLINYCQKYFPGAQIESAYETGFCGFYLHRRLEEQGIKNKIVHAAGIEVAVGDKVKTDKRDSLKLATQLSVGRLKGIHVPSKEREDYRALTRIRETFVNHRRRFACQLKAILFQQGLIPHDHTKVVSDKWIKSLATLPMSDEIRYVTEQYANMWLQLTVKIKEIEQQMASQAKNDEFLEIVYRSVPGIGATSARVLANELGDTLQFNNERQLFNYVGLTPSEHSSGDHTRQGHITRQGKAIVRKILVQAAWKAIGMDPALQAIYDRISQKAGGKRAIVGIARRLIGRIRSCFRTGTLYSIGTGNGSPSLSETCEAEVAPSVTS

SEQ ID NO: 198908 - protein, 384 aa, unidentified
MQKDNILFIGLDTHKEFTQVAYCLDHRTSDINDLGRIQSTKTGFVKLARQLQSKFPQATLHFVYEAGPCGYWIYRLLTSLGHCCFLVAPSLIPKKPGERVKTDKRDAQKLARLLKNNDLDPIYVPEPEDESLRDLSRAREAAMQDLNDAKRQLKSFLLRNNIQYKGTANWSLKHLRWLTEMVLPHPCQQIVLQEMIHSISERTNRLKRLDNELTHQVKKWRYYPVVKAIQAMRGIRLLVATGVISELGDLSRFDTPRKLMSYVGLTPSEHSSGGKRRLGAITKCGNGRVRRLLIEGAHSYRHTARISKELEVRQEGLPKEIVDQAWKAQLRLCRRYQRLIKRGKNYNLVVTAIAREMIAFIWSISREVVLPKVDPKTRLSRVPA

SEQ ID NO: 198909 - protein, 310 aa, unidentified
MEIIAVGIDVSKDRLDVAVRPGAEAFAVERNGAGLDRLAARLKELSPQIVALEATGGFETVATAALAAAGLPVVVVNPAQVRAFARALGQRAKTDPIDAAVIAHFAEATKPEPRPLPDQATQLLADLVARRRQIVEMMGAERQREKRMTIPHLKRSIVRLLKTLEKELSSLDADIDDAVRGSPAWREKEDLLASVPGVGPIIARTMIAELPELGRLDRKKIAALAGLAPFTRQSGQWRGRSFIGGGRKAVRTALFMGAMVAKKHNPVLKAFFERLVAAGKPKMVALIAVARKLLTILNAMIRDNRPWQNA

SEQ ID NO: 198910 - protein, 313 aa, unidentified
MSPNNPNILYVGLDVAKLSLELHLAGHSHALANDAKGHAQLHKHLRAHPQAHIVCEATGGYEQAVVRVLHAAGLPVSILEAGRVRHFAKAQGLRAKTDPIDAAVLTAYGMTFQPTARPPASPQQQQLADLATRRRQLIHTVVTERNRAEHYTDPLCVRQARQLHKALKKQIEQCDQAITQLIAADAVLAHKAKRLNAIPGVGPVVAATVLAEMPELGQLTKRTAAALAGVAPYNRDSGGQKGVRHISGGRRPVRCALYMATLSAVRYDRILKEFYLRLLAAGKKPLVAMTACMRKLIILMNRLLKNNDFQLAS

SEQ ID NO: 198911 - protein, 314 aa, unidentified
MAEVYVGIDVAKTHLDVAVRPTGERWRIPNDDDGIEGLVSRLEASHPALVVLEATGGYGRTLIAALAAASLPVAVVNPRQVRDFARSTGKLAKTDSLDAQALARFGEAVRPEPRPLPDEQARALTAVLERRRQLIAMLVAEKNRLHVVTAQVKGRIEAHIRWLEQELEGIDRDLDHTIRDSPVWRERDELLQSVPGVGKVLSTTLLAELPELGTLTRHEVAALVGVAPLNRDSGALRGKRTVWGGRARVRAALYMGTLVATRYNPVIRDFYERLLAKGKAKKVALTACMRKLLTILNAMLRHHTHWQHQPVRAA

SEQ ID NO: 198912 - protein, 359 aa, unidentified
MDGSPQPRGAIEPVKKHGAPSTGSSGNPNSRLGRKPSPHSQGRVMEQPATSPSFVGIDVSKDRLDVHVRPSGQTSAVARDGKGLEQLTNDLRNLTPALIVLEATGGFEITVAAALASAGLPLAVVNPRQIRDFARATGRLAKTDSLDAQIIALFAERIRPQPRPIADADSQALAELMARRRQVVEMIGMETNRFRQACNPRVQRTIKATLKTLEAQLAELDRDINDSVRGSPVWRAADELLTSVPGVGDVTSRTLIADLPELGQLDRRRIAALVGVAPVNRDSGQMRGRRTIAGGRTNVRNALYMATLSATRWNPVISQHDKSLVERGRPKKVAVVACMRRLLGILNAIIRTRTPWQNA

SEQ ID NO: 198913 - protein, 347 aa, unidentified
MRDDMYYIGLDVHKRTISYCVKDAAGHVHQEGKIGSTRRELDAWIKTLPQPRTIAMEATIFTGWIYDHLLPHAEKVKVAHPLMLRAIAAAKKKNDRIDAGKIADCLRCDFLPECYMTSTEIRDRRRTLRYRNLVLKQMVQMKNRISGLLMETGVSYNKQRLHKLGYFTELMSGNEEVDESIRPLLKLSRETIVRSQRLDYALVSSLERDPLLAERLKRLRTIPGVGPITALTWALEIGDVSRFQSVKQAISYCGLCSAERSSADKLVRMPISKQRNKHIQQTLVEAAKLAPRYSHELALVYERERQRGNRNRATLAVARKMVAYMLAVERRKQDFVLTGEFSGTAAA

SEQ ID NO: 198914 - protein, 443 aa, unidentified
MPIIRRNVAGIDLGSERHWVCAPRQDRNGREVASFGATTAELLRMAEWLKARQVESVAMESTGVYWIAPHEVLEAQGLQLLLVDTRQLARVPGRDKKTDPTDCEWIQRLHSCGLLRGSFRPEEAVCMLRTLVRDKANLVGESGDWLRRMQKSLDQMNVRVHRAVSDIDGATGMAILRAIAGGERDAQKLAKFRDARCRKTEQEIAEQLSGHWREDHLFSLQQALKMYDAVQERIAAYEKEILRKLDEMEREEPPEPTAPLLQNANKARTIKKRGQEAKRQALYRMSGVDITQIDAIGVETVEVVLSEYGSDLNCFPTEKQFVSHVTLAPRVPKSGGKPVRKKKRNSASTRVAAALRMAALSLRHSQTALGAYYRRMAQRRSADIAVFATARKLATLIYRLLRWGQPYLDEGAAAYENRYRQHRIGRLAATAKQLGYQLTPVSA

SEQ ID NO: 198915 - protein, 398 aa, unidentified
MNYFLGIDIAKTNHVASLINNNGDVVIRAIKFTNSNEGFNKLLNTIQSKLGDLSNIEVAMEATGHYWLSLYSALTDNNFNVSVYNPYQIKSYRGAYNNRKQKNDIIDSIIIADYLRVFGSKESKFPEEKLLSLKQLTRFRANIVANVSSLKVQVIGLLDKVFPEYKKLFCDTFGNTSKQLLLNCPTPDDIINISTTKLANLLSKNSKGRFNKDTALHIKEVAKSSFGIKFTTDACSFEIKQLINQIVFLESQIDAVSKEIKELYNKLHLLSVPGIGDNLAPIILAEIGDINNFDKPSKLIAFAGTDPSENQSGNKLSSNDKTSKRGSPYLRHAIYTASLVAISNEPELRAYYDKKISEGKHHFVALAGISRKLLTIIYYILKEDRDYIRYDNIKDKLN

SEQ ID NO: 198916 - protein, 385 aa, unidentified
MSSASSESTAARSIIYLGMDVHKDSITIAVLPHDAKTPTRLERLPNDLAKVKRLLDRLAREGEALHELRACYEASGAGYVLHRALREWGYACDVIAPSLIPKRPGVQRKHDKRDACELARLYRAGELTAVRIPSEAEERVRDVVRCRETFQREILKSRHYILKFLARRGFVFREGANWCTAHLRWLVHLASEQSPLASADRLVFREYHALLAYKLQRRDELDRQIEHLALEPTLAMAVGRLQCFRGISLHAAMVLATEIVDWRRFERPGQLAAYLGLVAREDSSGPRQRKGSITKAGNSHCRHVLVQAAWTYHYRPHLSVEIKRRQQGQPAAVVAHAWKAQQRLHARYQHLAYRKQPQIAVVAVARELVGFLWAVMQDLPDAAAA

SEQ ID NO: 198917 - protein, 409 aa, unidentified
MSLFCGIDWATDHHDIAVVDHTGRLVAGGRVENTASGFEALLAMLADAGEDPHEPVPVAIETDHGLWVAALTASGRQVYPINPLAASRYRSRHVVSGAKSDAVDARTLANILRTDLPEHRPRSNDSELAQSVRVLARAQQDTIWNRQQVTNRVIALLKEFYPAALEAFAGLEGGITRADARMILTAAPTPAQAATLTPARLRKLMAKAGRQRYLDRDAGRLREVFTAEHLRQPAMIEEAMGRQLSALLGQLNAICTAVADLTEAVTETFHRHPDAKILTSFPGVGPVVGARVLAEIGDDRSKFDDARGLKAFAGSAPITRASGKKTVITHRHIKNRRLAAAGSIWAMAALKSSPGARRHYDARRAKGDWLQEAKRHLFNKFLGQLHHCLQTGQTYDETHAFPPPLVLAA

SEQ ID NO: 198918 - protein, 427 aa, unidentified
MLKHNTEPDPAPEFAAFLALDWADEEHAFHLQVVGQSKIETGTLEQKPHVLGPWVAKLRERFGGRPIAVGLEQSRGALIHALMAYDFLVLYPIHPTTVAKYREAFKSSGAKNDPLDAGQILEILTKHQDRLHRFNPDTVQTRLLGRLVEDRRKAVGLRTTHVQALGANLKEYYPQALELTNGNLSSRLAGDLLLKWPTFADFQQAKPSTLKSFYYGHNVRSPEVLERVLALAEKSQALTTDSALVESGSRLTQMYVGLIQALNPVIVKYDERIQEVFDAHPEVKIFTGLPGAGPALAPRLLAFFGTDRSRYAAAFNVQSFTGIAPVTKSSGKSKVVYARAACPKFDRQTFHEFSRLSVTHCQWARNYVQYYTDKGKKYHTIIRALAYKWIRILHKCWQERTPYNDDLYMETLKKRGSIFATLHLKTK

SEQ ID NO: 198919 - protein, 411 aa, unidentified
MRLFVGDDWAEDHHDVEVMDAAGKVLGRRRLPEGVAGMAQLHELIGRFLPGDGDDCEVVVGIETDRGPWVTALIAAGYQVFPVNPLQASRYRERHGVSRAKSDAGDAHALADMVRTDSHQLRPAAGDSPEAEAIKVLARTHKTLIWERTRAVQRLRHQLREYFPAALEAFEDLDAPDALELLARAPDPARAARLTRAQVSAALKRARRRGIAGKADAILAALRGEQLGQPAALTAAYAAAARSLIAVITTLNEQVKSLQGQVEEHFGRHPDAEVYLSQPGMGAILGARVLAEFGDDPHRYHDGKARRNYAATSPITRASGKKKIVAARFIHNDRLVDALMSQAFSALGASPGARAYYDELRARGLEHNDALRRLANRLVGILHGCLKTRTRYHEATAWHHRENLPQSSAAA

SEQ ID NO: 198920 - protein, 398 aa, unidentified
MTESSDYESVQVFIGVDVGKDTHHAVAINRSGKRLFDKALPNDENKLRSLISDLKQHGQILLVVDQPATIGALPVAVARSEGVLVGYLPGLAMRRIADLHAGEAKTDARDAAIIAEAARTLPHALRTLKLAAEHIAALSMLCGFDDDLAAQPTQASNRIRGLLTQIHPALERVLGPRLDHPAVLDLLQRYPSPEKLASLGEKKLAAQLCKLAPRLGKRLAADIAQALAEQTVVVPGTNAAAVVLPRLALQLITLRKQRDEVALAVEQRVLAHPLYPVLTSMPGVGVRTAARLLTEVACRAFASVAHLAAYAGLAPVTRRSGSSIRGEHPSRRGNKALKRALFLSAFAALRDPLSRAYYTRKMSQGKRHNQALIALARRRCDVLFAMMRDGTFYTPQAS

SEQ ID NO: 198921 - protein, 385 aa, unidentified
MYQLSGSTQAALDYNSTIIGALELSKKKWVLAVQLPGVSRHSRHVLEACGDGLASFVERLKARCAAAGRKIARVILTHEAGRDGFWLARFLARRGIEVHVIQPSSLPVDRRARRAKTDIIDVEMLLRTLMAWLRGEPRVCSMVPIPSEADEEARRAYREREDLTGERRSIVNKIDGILATLGVKGYKALRRDRREQLTAVRQPDGDPIPQKARARIERLLDRLDLVLKLIEQVESARDAVLKKDAPADEAERMIRSLTDLRSIGPDFATLLVREAFVRQFRNRRALGGYVGLGGTPFSSGGSEREQGIGKDGNRRVRAAMVELAWTWLRWQSDSALSVWFRARVGAMGGRIKKIMIVALARKLLVALWRYVMDGVIPDGAKMKAA

SEQ ID NO: 198922 - protein, 354 aa, unidentified
MSNQSNSTVATMGIDIGKNSFHVVGLDQRGAIVLRQKWSRGQVEARLANMPPCLIGMEACVGAHHLSRKLQSQGHDARLMPAKYVRAYLKGHKNDFRDGEAIAEAVQRPTMKFVATKTAEQLDLQALHRVRSRLVGQRTGIINQIRAFLLERGIAVREGLRFLRTELPKILATRCDVLSPRMVHMISDLAGDWHRLDERIEGVSTEIEALADQDPACERLMTVPGIGPIISSATVAAIGNGAAFSKGRDFGAWLGLVPRQMSTGDRTILGRISKQGNRYLRVLFVQAARVVLMKPQTWERHGLKSWIESAQKRMHRNVLAIALANKLARIAWAVLNKEHNFECTRTNAMTSRPA

SEQ ID NO: 198923 - protein, 375 aa, unidentified
MPKYSTAFGMDVHLRSTTVCALDADTGEAVTRRFPGNPWGEIAGWMDGFPGPSLAAYESGYLGFAPQRELAGLGVECVVAAVSKIPRSAADSASKNDRNDAARMAKAILAHDISPVWIPSPEVEGIRDLAGAYGGATARLATAKQRLLAFLARARRGFVYGGTTPAGNPRKYWTYDFLRWLDKVRPEDDGGVRTLAALRNEVEAAAEARADLLSEYRAAVDASPIAAEVAALQSIKGCAFALAAAFSAEVGDFTRFRSGRQVTAYFGLAPSQRSSGDSVRLGGISGAGNALVRKLAVEGSWCYAAARHQPKLMPRDTGVPLEIRMHGRKGSERLLRRREEMLARGVPAAKANAATAAELVRWLWALGMMCREGAE

SEQ ID NO: 198924 - protein, 423 aa, unidentified
MPGTVNTMETEREVVCGADIHKQFLLATILTKDGRKFQDRFDSNFEGLLNFRQWLLDHDCQRLAVESTANYWQPIYFVVGKDVEFVLANAYQIKHIPGRKTDVLDSEWIAELCLKDLISPSRIFSEDDRDLRSMTRTRENYVKMRSQIKNRIHQELESACIKLSSVLSDIFGKSGIHIIRGILNGLSIDDILDRIPSKKLKAKRGEIQDAIQASISPVQIDLISLLLDSVDFLNREIESIDKQIQSLISTRQEDLKIAMSIPGMGFTSASTILAEIGNLKDFNNGEKLAAYCGLVPSVYQSAGKLITGHITKHGSPHVRRMLIEVAHAISRTKADSKLKRFYFRIKSRHGAKVAVVALARKVLCILHHLIVNREMFEDGISSKSKREKTGRSSSSTEMIIEDAIQILVRAGYLVQKRSEKEGG

SEQ ID NO: 198925 - protein, 344 aa, unidentified
MELHTIGIDLGKTVFHLVGLNPCGEVVVRKKFSRKQLLHFTANLQVKLIGMEACGGAHFLGRALREQGHEVRLMPAQYVKPYVKTNKSDYIDAEAIAEAVGRPKMRFVPIKSDDQLDLQSLHRVRERWVTRRTAVINQIRGLLLERGITLRKGRCHVDEALPGILEDASAKLSGALRMLLAQLKLELDHLQMRIDEADAVIKKTAGENEACRRLVAIPGIGPITATAIIAAIGNGAAFKKGREFAAWLGIVPGEYTTGGKQKLLGISKRGNSYLRRLFVHGARAVLQQSTKQSSGLSSWLAQLTARTHRNVATVALANKLARMAWAAAKNEPYRPPMLVGAATT

SEQ ID NO: 198926 - protein, 418 aa, unidentified
MDRTKYIYIGMDIHKETHTAVLLNYLEEKLGEIKIKNTLQGFHKLEDYILKQKGELIPIFGLEDITHYGRNLSIFLLDRDYPVKEVNPSLSYMERMSYASTRKNDTWDAQCISAVLMRRSHLLPDANPQDYYWTMRHLVNRRNALVKASTKLMQQFHEQIQTAYPNYKGFFRELDCQTSLTFFEHYPSSKHLENISEEELGALLRIPSNNSCSTNRARKILDLVAEETTKERDYQFARDTVIQSITRQLRAYQREIKELERTERQMYQELGYQLETMPGIDIVTACALVGHIGDIQRFSNGDKLANYAGVAPLRFNSAGKGKDLQNKSQGNRKLYSTLYFLAIQQIYLTNKGEPRNPVFRAYFERKVSEGKTKIQALICIMRKLIKIIYSMMKHKTAYDLPKIEEKMASDEKCAKMLV

SEQ ID NO: 198927 - protein, 438 aa, unidentified
MYNPLSQKLAMITPETLIVGVDIAKHTHYAQMINFRGEGLYKPFPFQNTISGIGDLVQQIKAVQSKHGLSTVLVAMEPTGHYWIPLARALEKQGFTVVLVNPHHVKKAKELDDNSPTKRDDKDAGVIARLARDGRFVIPNIPRGVIAEIRRLVNFREQLNKEKQQTEAQINIIVDLYFPEFREVFGSVKGKAAMAALKSFPFPADIVAKSVEEIAAVLRQATHNRIGQRHAELLKEKASTSIGIREGTEAARMELQYHLRRMEEILAQSELVEARLAELLNEVSYARHLLTMPGMSVVQVATVVSEVGDLSSYRSARQPIKLAGLNLVENSSGTHRGRTRISKRGRAKLRCALFRIALVLVARTQEFSLLHRYYTTRPKNPLKGKQSLIAICCKLLRIIFALARKGVPYNPAMVLPENHPAYALAHGQSGKPAVRAAA

SEQ ID NO: 198928 - protein, 468 aa, unidentified
MPRARAHPHHRGRGATLPPELRRINLNAAGIDIGAASHYVAVPEGRDPEGCDVRAFGAFTADLYVLADWLTRCGIETVAMESTGVYWIPLFELLSARGFAVRLVDPRQLKRVPGRKTDVLDCQWIQQLHTFGLLAAAFRPDDQICVLRSYLRQRAMLVTYTAQHIQHMQKALELMNLKLAHVVSDIAGLTGRAIIRAILDGQREPRALARLRDPHCKADAETIARALEGTWRPEHLFELRQAVELFEFYQKQIAACDQQIEAQLTQFADKRGGQPLTDAARRRKARRTALSFDARQHLHRLTGVDLTQIDGIDAPTALTVVAEIGLDMTRWPTEKHFASWLSLAPGSKVSGGKQSSGRTKPSASRAAAALRLAASSLYHSRSALGAFHRRLKARLGAPKAITATAHKLARLIYRMLRFGTDYVDRGQDYYERRYQGRVISNLMRRAQALGYTLTKNESSPPTSSPAPA

SEQ ID NO: 198929 - protein, 370 aa, unidentified
MSPSRTLFIGMDVHKDTIAVAYVAQDHGAEVTSIGPIGTRQCDIAQRIRKMQSKATHLICVYEAGPCGSWRYRYLRKKAYDCWVGAPSLMPKKAGDRVKTDRRDALQLARLARSGDLTVVYVPQGQDEAMRDLTRAREDAISDCKDAKFRLKAFVLRHDIRSTGRANWGPAHLRWLSEVVCPTPTPQIVFQEYVRAVQEHTERLQRLEHELHEHVQAWRLYPVVEALQAWRGVPCTVAVTLIAALGDLTRCDTPRALMQFLGLPPSEYSSGAQRRQGSMTKAGNPHARRVLVEGAWASRSPAKVSRHLQLRLETQPTIIQDIRGKAQGRLCNRYRCLVARGKHATIVTVAMARELAGCMWAIAREVPIIP

SEQ ID NO: 198930 - protein, 342 aa, unidentified
MYNTMIAVDLAKRVFQLHVASMTGQLKEREKLTPLQFRRYMADAPKCVVVFEACGGAHYWAREMMALGHEARIIPAQYVKPFVKRHKNDRNDAEAILVAAQRPEMRFAAVKSEDQQARAVVFRARERLVYQRTELVNALRSTLYEYGHTFPVGIGHVKRIAELIEAPNCDLPALVVTECQDLLAQIAEKTERIETKDKLIKQLAKESAVARRLQTMPGVGPITALAVEAFAPDMAQFSCGRDFAAWLGLVPLQSSTGGKSRLGKMSKMGQVDIRRLLIIGAMSRIIGRARHTIPEDSWLGRKVAAKPKMLVGITLANKMARQIWAMLTKNEDYRDPALVRAA

SEQ ID NO: 198931 - protein, 354 aa, unidentified
MSQTPSTAIAVIGIDIGKNSFHVVGHDTRGTVVLRQKWSRGQVEARLANMPPCLIGMEACVGAHHLSRKLASLGHDARLMPAKYVRPYSKGPKNDFNDAEAIAEAVQRPTMKFVATKTAEQLDLQALHRVRERLVSQRTGIINQIRAFMLERGIAVRQGIGFLRTELPTILATRTDALSPRMLRVIEELAGDWRRLDQRIDSLSGEIEALARQDQACSRLMTVPGIGPIISSAMVAAIGTGDVFSKGRDFGAWLGLVPKQISTGDRTILGKISRRGNRYLRVLFVQAAWVVLVRIKNWERYGLRSWIEAAKKRLHHNVLAIALANKLARIAWAVLAKGRAFELTRTNDAGVRPA

SEQ ID NO: 198932 - protein, 319 aa, unidentified
MRRTPVGVDIAKHKFDVAVLLDNQKYKTKKFANTPSGCREFAAWLSRFGDCHVCMEATGSYSTELATYLADNNYHVSLMNPACIHSFGNTELARNKTDKSDAAMIARYCALHQPAPWFPAPLSERQLTALVRHLKNLEEMRQMEENRLEVAEAVIVPSLNEHIATLDELIRETKKKISQHIDDNPDLKRDSELLKSIPGVGEMLSSSLLAFAGNLRRFTSSKALVAYAGLNPQRCESGMFKGKSRLSKVGHGELRSALYMPAVVAGQYNVVVKDLTERLKLRGKSGKERVCAAMRKLLQLAYGVVKSGKTFNAEIPLAG

SEQ ID NO: 198933 - protein, 344 aa, unidentified
MYFIGVDHHKQASHMTVLDEEGRELKTGRVPNLRKKVELFLKKYHPFTAVLEAGRASYVMADLLKALGGEVKMANPLQVKAIAHARIKTDERDSRTLAHLLRTDLIPEVFQREGSNREAQRIVRARAHWVSKQTEIKNKIRSLLAQQKEEIRIAVGERGDGLFSGRGLEFLKQLPLTGLDKMILDDLLQGYQEAHAHIKKSDGWVEELYQDMEEAARIDTIPGFGKTLSVLVAVEIADVERFSSPSHLHAYAGVVPSTYASGEKSYHGRITKQGSRWLRWAVVEAVYPAIVKDLGWRALHSRLVRRKGANTAKVAVARRLLTIIYRILTEKREYVPDMMKPSAA

SEQ ID NO: 198934 - protein, 408 aa, unidentified
MSVYVGIDWSVKKHDVAFINEAGSIIAQLAIPQQASGFEKLNKTREQVGVEAGECLVGLETAHNLLIDYLWGQGYEQVYVIPPSMVKSSRGRYGSSEVRTDARDARLLADLLRTDLARLHPWRPDSLLTRQIRAKVSLVQHMTKRVRRVTERLRAVLLRYYPGVLELFNGLQSQITVDFISQYNTPQAAEALNYEEFIDFARPHRYPRRWLPKQYAKLQKEHPAANSETVVVYEEEGRMLAKDLLGLMQTNRRLKRELTGLFEEHPDQHIFASLPGAGELLAPSLLAKFGDDRARFPTAGSVQALAGTCPVTDQSGKKRIVKFRRKCDKEFRQIVQQWARCSLRRSVWANAYWEEIRSRSHGDNDAYRRLGNRWLGICWKLWQTGEVYDEAYHLRQRWLRRKPRSKNG

SEQ ID NO: 198935 - protein, 395 aa, unidentified
MFIVGIDVAKRSHEVCMITSDGQTVQRPFSIRNNCTGYNLMLEKIRKHTNIKSQIVFAMESTAHYWLALFTRLRKDGYHVILLNPIQTSAMRDMFIRKIKTDAKDSFIIAELIRFGRYAESNVAQDRLLALKELCRNRFYLVDMAGDLKRKLIALIDRVFPEYEAQFDTIFCKSSVALLKKYPTPQKLSNAHLDKLTELLWNSSNGHFGEWKARELKELARNSFGVEDCDGAYSTLILLMLDQIQSLSGKADALEKEISRLFQSFDTTVTTIPGVGPIIGAVILSEVGDISRFSSADKLAAYIGIDPSVNQSGEFQAAHAHMSKRGSPYLRRCIWMASQVAVQRDPMFRAYYEKKAAEGLKYMTIIGHVTRKMTTVIFAILRDHKVYEPVLPTAA

SEQ ID NO: 198936 - protein, 350 aa, unidentified
MSIRNQPRDAAVFGIDIGKTVFHVVGLDAGHAPIQKATFRREALLQFFERASPVLVGMEACPGSQWLARKLQAMGHTVRIVPAQFVKPFVKSNKNDIIDAEAIAEAVTRPTMRFVEIRTPEQIDLQALHRVRDRMIAHRTRLISQMRAFCLEYGIAIHQGAGKFKAEIPRVLADETNEITPSMRRILTEVHGEMMELEQRIAAMNNEIEAIAARSDTARRLMTVPGIGPLASTALLAAAGSGRQFRKARDLAAWLGLVPREHSTGGKTKLLGISKRGNKYLRRMIVHGARSCVTHLDRSRDRLGPWLDGLERRMHKNKVTVALAAKIARIVWVILTKQGATYERRVTALG

SEQ ID NO: 198937 - protein, 361 aa, unidentified
MQIIGCDFHPSWQQIAWLDSDTGELLERKLVNGTGEAERFYVGLPSAALVGVEACGNSQWFLDLLERLGHEVWVGDAAQIRASYVRRQKTDRRDASHILKLLIEGRFPRLWTPDAEQRDQRQLLLHRHKLVEIRSRVKNGLQHLALNRGVQMRHRLWSKAGQAAFGALALTGWAGVRRCDLQRLLAQLDEQIGRLDTAVEQAARTHPEARVLLAQAGVGPVTALAFAVTIGDVGRFRHSKQVASYLGLIPTEHSSGGRQRLGAISKQGNSFVRMLLVEAAQTAVRLDPEFRKEYAHRCHHKPKAVAKVAAARKLAVRLYWMLRTHKSSQTAALIESSPRVPLVGNCRTDELIGRSRIPQKA

SEQ ID NO: 198938 - protein, 359 aa, unidentified
MQSNKKNFKGQKIFVGIDVHKKTWEVAILTESGVLKRHPQEASAKVLFDFLRKHYPDGEYHAVYESGFSGFSTYYALKEYGINCIVIHAADVPVTQYESIMKTDRVDAERLVRALKKGEILRPVYIRERDNIDDRGVIRIRRTIQKQLSGYKARVKHMLHCNGVELPKRFSTPTNYWSRAFITWLMQDVKLLSSTRTSLNLLIRQVETIRGTLLEATREIRKLSQTERYKHRLELLMTIPGIGQNVAMCILTEVWDVKRFSNEKKFAHYLGLIPTCHDTGEHKSDGVKTFRGNKHLGPMIIEACWVAIYKDMGLGACYADYKKVMKPQKAIVKVARKMSNIIYSVLKHDKPYEPYQWDK

SEQ ID NO: 198939 - protein, 319 aa, unidentified
MFNLGIDVAKAKLDCALRLPNGKHRNKVVDNNDKGYAELHAWLLKHDADSPRVCMEATGIYWERVAEYLAGLGMLVSVINPAQIKAFAASRLVRTKTDKVDAQLIADFVHERQPEPWLAPSSAEQALRAMVLRLEALQAMRQQESNRLDVARAAVRQGIVDHITWLDGQIKELIRAIKRHIDDDPDLRGKRELLDTIPGLGERTIPVLLSYYANPERFDSVKQAVAFAGLDPRQHESGSSVRGKPRMSKVGHSFLRKAMYMPAMVTVYRTDWGKRFGQRLRAAGKAKKLIIGAMMRKLVHVAFGVLRSGKIFDPTLHAA

SEQ ID NO: 198940 - protein, 409 aa, unidentified
MDRQLERCCGLDVHKETIAACVRIGGRSGHATQHVQTFRTTAADLVVLRDWLAAHGVTHVAMESTGVYWKPVFYALESDFTCLLVNAAHIKQVPGRKTDVLDCVWIAQLLEHGLLRGSFVPPVPIREVRDLTRYRKALIQDRTRVANRLHKALEDAGVKLASVASDILGVSGRAMLQALAQGTTDPAILADLARGRLRGKLPALRAALAGRFRSHHAFLVGQLLGHLDYIDEAIGTLSTELESRLAPFADQLTRLDSIPGINRRTAEVIIAEVGVDMSAFPSAAHLASWAALCPGNNESAGKHKSGKTRKGNRWLRTALIEAAAGASRAKESALQARFRRVLRHRGPKKAVVALAHTLLRIVYHVLADGTVYHDLGGDYHDRQHRQRVTRRAIHLLERQGYRVTLEPAA

SEQ ID NO: 198941 - protein, 457 aa, unidentified
MYRELHSLRQALREELKGTLPPLTGVDPDKMLATYLNQLTLYVGLDVADKTVTLLAMNANQEELGHLLDASNTLQGYVQIGDWLESLRVQHHLRIIAVACETTGVFYWGVWDSLAQRPNVARVLYNPRTTEHMGEVLSKRVRTELVDALLLAEQLRLGSTPEVVLTDNAELLSARLCSRAARDAAQMINRKKNQLRSLLRGYNPVIAQVFPGSKFHHPAVYAVLQQYVFPNEFVTAGVETLTMILTEHSRSAFGTEQAQKLVELCRGYLSRPIRHEIVRQRVQDLIEEITLIHKHQQAMLKAGYALIKDRPEAKVLKASTGAGISNTLALVSELGDIKRFPDGEHAASFLGLTTSKHISGTSIYHSKHITKQGAPNGRYAAVNMALHLAVRVPKYQAMYKAIKSRKPPRKGHFVALVAIARDFVTNVLYDMWRYDRPFFIKVEDYRQYRKDHPRPTS

SEQ ID NO: 198942 - protein, 342 aa, unidentified
MERTEGVRSFVGIDAHSGHCSIKVISAAGENLSELRVPTEVKRLRAALQGLAAPAWAMLESSFLAGFVKDSIEREVARVIVCETRENRWIAKSEDKSDPKDADRLARLLRVGEFKEVYVPKGIGRDRREILRMYGKAQGDVARPKNRIKGKYREHGIFPKGSKVFSPEHRGEWLEQLERPAIRQLVEALYEKLDRDVGFRDQVLEQLVELMNGTKEYELLKTIPGVGKVLAGVMSALIGDATRFAGKRQLWSYAGLGLFSRSSGDFGQSRVRGSSGGNRSLKHAALSAATSSIRGANRFSRHYAKMVDEGIDPAMAKRTVARQILATALAMLKRGQIYREES

SEQ ID NO: 198943 - protein, 427 aa, unidentified
MYRMAGIDVHKKKLAVVVSDVEVHGEYQFERCWFGANPEQLRLLSPWLAEHQVEEVVKESTALYWQPVWGALERYWQPICQKREGAGATSGILHLAQAQSNRAPRGRKKDFRDAERLVKRLVADELKLSFVPDREQRLWRTLTRRRYQLTRARVQLQNQLEAMLEEAQLKLSSLVSDLLGVSARRMLQAIADGESNPEALAGLADRRLRATPAQLSDALGACTELHPVYRRLINMMLGEWKVIEEHTAELNQELATLLRPHQDAVERLAEVPGLGVDSAQQILAEVGANAAVFASDKNLCSWVGICPGDQESAGESSSHRSPQGNRQMRRLLNQAGNAAVKTKGSIFEIVYRRLVPRLGHNQTIGAVAHRLGRLIWLILRKGVPYEERGPAVSQRSKQNRTSKMIRELRTLGYRVEFLNPVPSNPMP

SEQ ID NO: 198944 - protein, 371 aa, unidentified
MHEPTTFVGMDVHKQDIAVAMLVEGQPGPVQWQVANEPAAVRRLGQKLRREGGASVHCVYEAGPCGYALQRQLQQLGLTCDVVAPSMIPIRPGERIKTDRRDARKLAELARGQLLTVVRPPTEDEEAVRDLCRGRDDARLDLMRARHRLGKFLLRRGRVFGTGSRAWSQAHRWWLGTQVFERTAERVMFEDYLLAVEQTSARRRSLELHLEDIAREPRYVEAVGWLRCFRGIDTITAITLIAELHDFRRFRSPSQLMAYLGLVPSEYSSGPRQQRGGITRTGNRHVRRLLIEAAWHYRHKPHVSEKLAQRRHGQPVTMIALADRAQLRLCRRYRRMERRGKHPTKIVTAVARELVGYLWAALTPATPVTTN

SEQ ID NO: 198945 - protein, 369 aa, unidentified
MPHVTSIGLDVHARSVAAAAFNPFTGEVVHRDFGTDAAEIAEWALGFEEPRACYESGPTGFHMARELRALGLDCAVAAVSRMQRPAADARRKNDRRDAEFIARMLATHNIVEVPLPDAAVDSARDLDRALDDATVEYRRARQRLNMFLIRLGHVWDERNADGTRKGSWTRAHWRWISGIRLEGPQRDVLEYYVTAARCAESDRRQLEKKVLALARTDRWRPAVEALSCIKGIDTLTAFRLAAEAGSFTRFRTAPAFASWCGLVPSERSSGETERRGGITKTGNRLARTALVESAWHYLTCTPRPKAPAPGADVPAAIRARADDCTARLCRRREALAAAGKSSCKANAAVARELACWVWEIGRRAEGTLG

SEQ ID NO: 198946 - protein, 345 aa, unidentified
MVNLNVIAIDLAKNNYQVCKIGKERQVIYNKEVSRQKLLQLLVSEKQSLVAMESCGGTHYWARKAKEAGHIVKPMSARVVKAFRQGQKTDANDALAIGIAAQQPTVKPSRLLSVNEQCLQSISAMREHFVKQKVALGNLQRGCLLELGIPIAKSDSKLIDAVESLLEDTSFNVPMAFRASLKIVNEQFKKVVKEIIALEKLIEEEIKNDEICERLSKLEGVGPVGSMMLKVYFSCIEHFKNGREASACAGLTPVQHSSGGKEKIGSISKKSANKKLRSTLYQGALAVVSNVIKRASRTEKDEWLKKLIARRGKKVAAIALANKTIRTAFAMLKKNECYQPKLLTA

SEQ ID NO: 198947 - protein, 352 aa, unidentified
MTVTIVETATQVCAITGGVDTHADVHVAAALDAIGGLLGVQEFPATPAGYARLLGWLGGFGTVSLVGIEGTGSYGAGLARHIAAAGVRVVEVDRADRQDRRRRGKSDPLDAVSAARAAQSGRAAGAPRGRDGLVEAIRALMVAKRTARSERIQTISQARALILTGPGDVRTRFTRHGPAELVAELAGLRPRPGSMVRYHTLLSLRGLGRRAQYLDAQLERPDELITPLVTARAPGLPALYGVGADTAAALLIAAGDHPGRLRSEAARAHLCATAPIPASSGKVTRHRLNPGGDRQANHALYRIVITRMSSHPPSRAYVDRRTKEGLSKKEIIRCLKRYVAREVYPYLRTPGS

SEQ ID NO: 198948 - protein, 365 aa, unidentified
MGKIRQYKLKGERVSVGLEDSKKTWKLTVRHEGIEIDKPSMPADYGGLRRYLRSHYPSCAVKVLYEAGFRGYWLRDLLVADGYECDVTPPHTITQERCSRQKNDRINANRLAKLLELNDYKRCWIPPRQLREDRQVSRVYEQIKSKAIRVSNQIRRAIEYFGLERCFPSGCWRQREYREAAEILKRLHMSGSLRFSIQMLFDELAQLRGMQRVVLSQLRRLAKSPEYEKMVKLLHSAPGIGRLTAIRLALELGDIGRFKSKEAFAAFLGLVPSDYSTGDNEHRGHITKQGNRYVRGWLIECAWVAIRHDPVLHEKYLRVARNGKGRLTNGKKAIVAVARKLAVRLRAILLSGEPYQVGLISCAQG

SEQ ID NO: 198949 - protein, 309 aa, unidentified
MKQSVVYIGIDVAKAHLDVAWAQTVRRLPNQRSGHAALIRWIKQSTTPVQLICEASGGYEQALLESLEKSAVKVTLVQAVRVRQYARASGILAKTDKIDAKVLAAFGSAIKPQPMSPRSVEQKRLRQYEAQRRHLSRILVAEENRLAQLSCAELRTLSRSLMSKIKNQIETLDRRIGELIAQDQTLWEKAQKLTAISGVGARTAALLLAQMPELGQLNRRQAAALAGLAPFNHDSGSIRGKRAIFGGRRALRSGLYMAALSAARFNPILSRFYQRLRAKGKPHKLALTAVMRKLLLALNHSLKPEPIIA

SEQ ID NO: 198950 - protein, 429 aa, unidentified
MNYTQNKKIEQVTDTTMVVGVDIGSQTHYARAFDNRGRELTKRVFSFQNDIEGFNSFHFWTEKLKNENKKTAVLIGCEPTGHYWFAFAKYVQDHQRTLVMVNPFSVKKIKELDDNSPKKTDAKDPKTIAKLVVDGRYSIPYMPEGIYAEIRDLVYSRDRIMKQHNISANRIQRWLAIHFPEYLGLYTRFDATSGLAVLEQAPLPKDVIALGVEGIRKIWHDKKMRGRGVTEDRAKTLVEAAHNSVGLDGGIGTKSELYMLLEEHLLWTSQLEAVNKVLEESIRKVQHVEKLLAIKGVGSVTIAGFIAEVGDIRRFKSPKQIQKYAGLELVENSSGKHKGRSRISKRGRRKLRKSLYQVMVPLLARNKEFRTIYDYYVTRVKNPLKRRQAMIAVSCKLIRVFYAVLTKGVDYDRFKMMSDIHHESGLIAA

SEQ ID NO: 198951 - protein, 345 aa, unidentified
MEHSAGLDVSVKETSVCIVDETGKIVREVKVASEPDALLAVLTNPAYRFKRIGLEAGPLSQWLFSALAEAGLPVICVETRHMRAALKAQINKTDRNDARGIAQMMRAGLYRPVHVKTLRSQKLRMLLTHRKLLQSKAIAVENDLRATLRNFGLKVGMVGAAKFEARIRELVETIPDLATLVEPLLIVRRVLREQIAILHRRLLAIVRNDEVCRRLMTVPGVGPVVALTYRATVDVPARFRKSKSVGAVFGLTCSKYQSGEIDRSGRISRCGDEMMRAMLYEAAHIMLVRSTKWSWLKAWAMQVARHRGLKKAIVALARRLAVIMHRIWVDGTEFRWTRQQVAAAA

SEQ ID NO: 198952 - protein, 384 aa, unidentified
MVNNSITFIGLDTHKEFFEVAYIEDKRDAKPVSLGRIHGTKLALQKLVRQFESKYPGSTLHFVYEAGPCGYWIYRFLTSLGHCCFVVAPSLIPKKAGERIKTDKRDALKLALLLRSGDMDPIYVPEPEDEAMRDLSRARETAMKDLKDAKYQLKAMLLRNNIRCDIQDNWSAQHLRWLTELVLPHPSQQIVLQEAIQTISERIRRLERLDNELTYHVKNWRYYPVVKAIQAMRGVRLLVAVGVIAELGDLSRFDHPRKLMSYLGLVPSEHSSGGKRKQGGITRTGNTRARRLLVEGAHSYRYAANVSTELQKRQESLSKEIIDIAWQAQLRLCKRYQRLIKRGKNYNLVVTAIAREMIAYIWAISREIVLTPVNPAKRLARVPA

SEQ ID NO: 198953 - protein, 416 aa, unidentified
MAVTRWVGRAVGLDVHREFCELAICEGGRVRSGGRVASTPEGLGVLARSLLPSDRVALEVTGSCWEVARILEPRVNRVVVVSPDDTGIASARAKTDRLDARQLASLLWKGELEAVWVPDERCRILRRRLARRGQLMRARTRSKNEIHASLQRRLQAKPPCSDLFGVKGRAWLAALQLPAEERESVDAAMRHIEFLDQELAAVDRLIAQQALSWPEIRRLMTVPGVNLICAASFIAAVGNANRFLTSRKLVAYLGLDPRVKQSGEGPARSGRISKRGSPSARWALVETCWSVVLQPGPMRAFYQRTKARRGHGKAIVATARKLAVLFWCMLTRSEDYAHQQPTLTRKKLRRLEITAGAPKYTRRAVGSWSTNLLMRQAERELALQAEASYKRMVQDQRAGAPARKSGASVTPERAQV

SEQ ID NO: 198954 - protein, 359 aa, unidentified
MPRSIPTTTAEMITVGVDTHKDIHVAVALDGLGRRLGTLNVPTSLAGYKELVAWANGFGPLERAGVEGTGSFGCGLARFLRAKGIEVFEVIRPKRREQYRSGKSDPIDAEAAARAVLAGTATGRPKGTDGEVEMIRALRAARRSAVKARAQAANQLKAMLITAPEGLKSELRALSTAKLVTKVSRFRPGTSPSDVETATKFALRSVARRYQRLSEEISELDEQLDRLVAEAAPELLVVEGVGTDTAASLLIAAGDNPERLKNEAAFAHLCGVAPIPASSGKTVRHRLNRHGDRDANRALYVIALCRMSHEERTRTYVARRTKEGKTKKEIIRCLKRHIAREIYRILASVSLNNPPNSVP

SEQ ID NO: 198955 - protein, 341 aa, unidentified
MLHAGLDLSRRRLDVCLLDEAGQLVSQTAAPPDADGLSHLVERLRGRQVRAVIESMTGARFVHDTLEELGWEVLVADAQKVKGLAPLACKTDKIDARVLAELSWRDLVPAIWLPDPSIRRERELARYRLHLVRHRTTLKNRIHATLMTFGHPCPVSDLFGHAGRELLDRLAIPDPWRRNVDVSLELIDDLELQIAQLTVELRRQGADHRYIPLLVTAPGFGWINAYTVASEIGDIKRFASPTKLCGYTGLCPRVYQSGASDRRGPISKQGSRYLRWALFEAALHACSHPVYAERYQRTKQRLGRQRGPKVAQIDLSRKLTERSGTCSPATSPSLRQAPVFV

SEQ ID NO: 198956 - protein, 355 aa, unidentified
MLYLGIDQHARQLTISLRDEEGDVLQARQVSTEPDKIQAFFQHLTRERLSSDESFVAVLEVCGFNDWLIRMLRDYRCHKVILIQPEERKRQKTDRRDAAALSELLWVNRHRLLAGKPVRGLRQVDISSTTDQENRRLTTLRKDASRARTRLINKIKHILRRHNLQWEMPTKTFPTQPAIAWLKKLVLPEIDQLEMNHLLIDLEQAQQRMCELEEKLAQRCGNSEAATLLSSMPGVGHFTATALACRVGRVERFARSRSLANYWGLTPGCRNSGENNQRLGSITKAGSSMARWLLAQVAYQALRKDAKLREWFKRIKRRRGSSIARVAVMRKLATIIWHMLTKRTTYAKCRALATD

SEQ ID NO: 198957 - protein, 353 aa, unidentified
MTNEKYVGLDVHKATIVAAVQDGSGKCLMTSVIETKAETIRAFIKGLTGTVHVTLEEGTHATWLFDLIKPLVAEVVVCNPRHNALLQSGNKSDKIDANKLADLLRTGMVKPVYHDAHGAQSLKQLAQCYETLVADNIRVKNRIKALYRGRGIDCSGNGVYCESQRKDWVAKLEEPGARSRAQLLYTQLESVKKLRRQARNEMIKESRRQAASKLLRAVPGLGPVRVGLILATVVTPFRFRTKRQLWTYVGLAVVTKTSAEYEIVGGRVRKRNKPTSTRGLNRNHNRRLKKVFKSAALDATRTEPFASYYRDLIEKGTSPEIARVNIARKLAAIVLSLWKRGEEYDRQRMKKSA

SEQ ID NO: 198958 - protein, 391 aa, unidentified
MICVGIDVAKDKHDCCILDSEGTTLADCFTIPNNLDGFKRLLQTIKDCTQKSDKIKVGLEATGHYSCNILGFLLDNDLPVYVMNPLHTNLYRKSLSLRKTKTDRVDARTIATMLLSDVDLKSYTDTAYHNEELKSLTRYRFDKVQERAKLKQSVSRLVTILFPELEQLVSSIHGTSIYALLSEYPGAKQISEAHLTRLANILVTTSRGHYRKDRATHIRDAARTSIGSVMPAKSLELKHTIKLIQELTSEINEIEDAIRKIMDELKPPILSISGMGFYSAAMILAEVGDFSNFNSPDKVLAYAGCSPSTYQSGKLTNCYAHMEKRGSRYLRYALYTATKYVCYWNPVFTEYLTKKQAEGKHYNVALSHATKKLVRLIYALQKSGKAYLAIT

SEQ ID NO: 198959 - protein, 407 aa, unidentified
MTAPYCVGIDVALHAHRISVLGPDGEAVGPSFTIEATQEGCTELVQTLRARGAVPAATLVGLEATGHYWENLEASLVQAGYRVLLLNALQTRRYRDVLRRKAKTDDIDAYVVAGLLRSGSAEGCFVPDEQIQSLRELARLRARLMRERQDYLRQLVGQLDVVFPEHRTVLGDVSTVRARRLLAGFPTAHHLAQAPPAALRRMAPRGFSLQDATTLRDRARGSAYSGKAAHARGQVVRTLLTQYERLTTAIAELDQAVEALLPPTDATGGPSDATLLQTLPGVGPHTAGTLLGELGSFTRFANARALVAYVGFYPVISQSGERSALPYLSPVGSRIARHVLYLAAVNAVRRSAEWRALYRRKTAQGKTAKQALIVVAVKWLHTASAMLKHRAPYDPTRLAGLTATLST

SEQ ID NO: 198960 - protein, 343 aa, unidentified
MSEISMIGLDLAKNVFQVHGVDASGAIVLRRQLRRSALEKFFAKLLPCTVGMEACGSAHHWARVIGRYGHQVRLMPPAYVKPYVKRNKNDGRDAEAICEAVGRPSMRFVPVKSVEQQATLAVHGTRSLLVRQRTMAANALRAALSELGIVAAQGLEGLRELMAKLEAPNQDIPEMMRGALLVLARHWQALDADERALERQIAKAARADRDASRLMEVPSVGPIIASTVLAKVPDAKVFRSGRDFAAWIGLTGRDHGTGGKHRPGRISKQGDRMLRALFISGASAHLRQQKRRGVSDPWLRELLARRPYKVAMVAFAAKTARIIWAMLVKGEQYRVRASAAAAA

SEQ ID NO: 198961 - protein, 404 aa, unidentified
MKERPLLETIPLEVRVSVDIGSHQHRVAIGLSSGEVLEEFDMVHQSEGFDHFFARIATYEQQYACSVAVAMEGFNGYARPLDTMIRARDYRLYNINNLKLARFKEIVPGAAKSDALDARKGLELFQLRDHLPLAQDVLQEVVATPEENDILKLLTRRRRQLVREKGRVLNRLQSDLQAVCPGLLEITNDAGNLWFLRFLTSRPELTQLARLRRTSLLKIRGVGATYTGAIQAWQSDAVFSHDVAWVGEMIQADAARILELLGQMKALEAKIDAVAQESSVASILDSIPGFGRVCSAELAGEIGTIERFRSDASLGLYVGMSNLDNSSGKFQGSKAPKHVNTRAKAAMRIAVDRHRKCVPESQKYYAKKRAEGKSHNQAIRALGRHLCRVIYQLLKEERDYEIRD

SEQ ID NO: 198962 - protein, 326 aa, unidentified
MAVIGIDVSKQKLDCLWLRDPESLKVKTKVFANQVNGFAALIEWCCTHSGVAVGELKVFLEATGVYHESLAYYLHDRGVQVFVLNPAQVRDYARSLGIRGKTDKQDSLVLARFGATQKARRWLPEAREIRELKAMIVRYEALQEDLQRELNRREKAEVSQASLSVVASIDTMLDALRQEAERLKQEIDDHIDRHDHLKRDRELLQSIQGIGEVLSRHLLAFLHSRDFDCARQCAAYAGLVPRPWDSGTSVKGKPRLTKAGQPRLRAKLYMGAVVAKQHNPTVKALYQRLLARGKAKMSALGAAMRKLVQIAYGVLKTQTPYQPQPT

SEQ ID NO: 198963 - protein, 373 aa, unidentified
MKKILYVGLDVHKETITVAVAPRGEEEVRFIGTISNNSLAVDSLIRKLASGGDIVRFAYEAGPGGYTLYRQLREKGYECMVVAPSLIPRRSGERVKTDRRDALMLARLYRAGELTGIYVPDKDDEAIRDLFRLRCVAKRAGKQARQNLLSFLLRNGIVYSGTRNWTKTHWRWLHELSLPHPIHQLTLQEHIDAILQCQSRVMRIDGMLQQSVKNWRHEALVGRLQILRGISFLTAVGLASELGDLRRFSSARQLMAYAGLVPSESSSGQKVRRAGITKTGNRNVRWLLIESAWSYRLKARKSAYLLRRQPEASEEAKELSWKAQVRLCGRYQRLYLKGKPKGKVITCIARELAGFIWALGRLDDEERQKGISQ

SEQ ID NO: 198964 - protein, 264 aa, unidentified
MVDAHTEAYAGVDVSKGRLEICVRRGREAMEGEAFSVSNDPAGTQTLLARLLEERPALVILEAPGGFERPVAATLAAAGLPIAVVNPRQARDFARATGRLAKTDRIDAQILARFAQAVRPAPRPVPEEEAQALAEITARRRQVVGMLTAEKNRLGAATTKAVRKRLEAHLRWLEKELSRTDQDLEEAIEESPTWRENEELLRSVPGVGPVLARTLLAELPELGSLQPKQLAALVGVAPLNRDSGAFRGRRRAVWGGRATVRASL

SEQ ID NO: 198965 - protein, 347 aa, unidentified
MKRIAVDLAKSVYQVAESIHVGRVDRRRRLDPEAFRRYVQEQPEPVEWVMEACGTAHYWGRVAQALGHRVVLLHPRYVRPYRRRNKTDRNDCDAILEAARCADMHPVPVKSHEQQQVQQLHNLREAWKKTRVQHINLLRGILRELGVAAPSGTQAFLRQACELIERPEVCALRSSLQMVLAEISLCEQAMRDSEEQLARWHADDDIVHKLDEVSGIGLLTASALKTAVGKPERFASGRHLSAWLGMTPNEYSSGERRRLGCISCKGNTYVRTLLIHGARAALLAAKRCQTRTPERLTQLQRWALQTAERIGHNKAAVALANKLVRICWAVWCHERRFSGDWQSARPA

SEQ ID NO: 198966 - protein, 455 aa, unidentified
MLNMSASKRRKSKVEFAMVNEHAAAIDVGSRSHAVSIGAHHSQSKEYGVFTDELQQLCEWLVASGVKTVAMESTGFYWKQLFVMLQSYGLEVYLVNASFAKNIRGRKPSDMADSRWIWQLHTAGLLPNSFQPDFFTDTLRSYVRHRRRRIQDASRCINRMQKCLVLMNLQLPIVLTDIMGKSGQAIIKAILSGERCSDTLAQLADPRVKADKQTISRALTGFWKEEQLFELEQNWDLYHYYQKQIAECDQKIDALLSDQVQKKGANKLTYTPVKKKRRQKNDGPVPVEQYAYQLTGGVDLLQVDGISYQFIQTFMAEVGTDLSAFPSQGHFASWLCLTPNKKVSGGKVISSKTKKSKHRLRVAFKNAAVAAGKQKDSSLGHYYRKMKAKKGKGTAVTATARKLAIIVYNMIQKGEAYDPKRLEPKQKSGHRKRKIKHIQRTIEQLNVKSEEIRFE

SEQ ID NO: 198967 - protein, 429 aa, unidentified
MKIIYPRVCGIDVHKKFIVAVICISESVEPVYLKKRFSTFHNDLIRFRDWLIQNDCQNVCMESTGKYYIPVYNILESHISNIVVANPKWVRAVKGEKDDDKDAKWIADLFKLGIVKSSFIPQKDFRILRELTRYKYKLVNMRSSEKNRYQNALTSGNCKLDMVFTDVFGKSASNIIDLILSDNPYTDEDILSKVHKNCKASPDMILNSINGTDLTPVQKSRIELVNDHIKQLSSNIQRLDKLIDLMIEPYEDYISFLCQIPGVSRNSAIIILSEIGVDMNQFTSSRRITSWAGLTPSSNQSAGKKKSVRISRAGVYLKPCLVEVAHAAVKDKNHSYYANKFNKISKRRGKKRAYIAIARKILVAAYHMLLTGEIWNPADLAEVETPVEQRIKYVKNNLKSDIKQLLDIGLTVEELTLMIQQNANNIATQ

SEQ ID NO: 198968 - protein, 352 aa, unidentified
MKKIVVGIDISKEKIDVSAIDVRESQTGMVKLDYQVFENRPLGFRRMLVWARHLIKGIGLEDILFCCETTGGYDRCLCDYIYAKGLYIWREGALQIKRSMGVRKGKDDKADSLMIAEYAMRHMDKAVMYETPSETIRELKALFLYRHKLVQEKAEKNVRASHLDDTAAKSKSMRFILRDAKKSVKALEKSIKECEKQIMELIEGDEDLKRNYGHIVSIKGINIVNATAMIAYSNNFKGITTANKMASYYGVASFREQSGTSVDKKACVKYYSSSLLRATITQAAEWTIKENGIYHDYYLRLKADGKPYGIIINNVKNKLIHLVYSLVTNDIDYENNHEFLRAKRKCEQAESD

SEQ ID NO: 198969 - protein, 368 aa, unidentified
MSLQAKSLFVAMELSNKKWKLVFGDGSRERERNVPARCEEALVREVALAKEKLGLPSDASVVCCYEAGRDGFWIDRMLRKNGLRNYVMDPASIEVPRRSRTRKTDRLDARKLLQLLLRAELWGQRKAFSVVRVPTEAQESELRLHRERERLVKERTAHRARIKSLFVLHGIEVGNPATVPIESVCDWEGKPLAGPWVEELKREQKRLRLVEEQTKGLEKQQTAALTQSPTQALKKAEKLCRLKSVGTQSGWVLSHECFAWRTFANRKHLGSFAGLTGTPFDSGETLREQGISKAGSGRVRRTMIELAWGWVRWQPGSALTHWFIAHYVRGGTPRSKRKGIVALARKLLVALWKYVELDVVPEGAVLKV

SEQ ID NO: 198970 - protein, 346 aa, unidentified
MRRVHMYSIKAVGIDLAKLVFSIHGIDQHDKCKLRKTVKRNKLLAEVAKLPPCIIGMEACSGAHYWAREFIKLGHDVRIMASKFVIPYRQNEKNDANDAEAICEAATRPKTRFVSIKSEEQQAVLCLHRIRQGAIKDRTARINRLRGLLAEFGIIMPVGRYPAQKAICGILEDGENNLPFLARELINDLWQSIKGLNEEILKYDRKLYALANQIKAAKRLMSIPGIGEITATAVVATVNDAKHFDSSRSFAAWIGLVPRQYTTGGVVRLGRISKRGEKHIRTSLIHGARAVIANCKNKTDRTSLWVKDLVERRGFKRATVALAAKNARLIWALLHSEKEYQVDYVK

SEQ ID NO: 198971 - protein, 331 aa, unidentified
MAQNDLIVAGIDVAKDKVDVCIRSPSLRRTFASTAEGRRELASWLRRKRVGKAVMEASGGYEREWAKALRDAKIEVRIVDPKRVRDFARSAGRLAKNDTIDAEMIAWFAETFDEVPGQAYDAEREKLAQIVNARLGLLDLQTKLQNRGEHAGPEPVQKMQARMLKKIAVEITKLEAVIAAMIKATPHCAELAEIIESVPGLAETTSAALIAKMPELGQVNNKIGAALLGTAPYDDDSGRRRGERHIKGGRRKVRNAFYMACLGAATLHNPVLKAFYDRLIAKGKEPKVALVACMRKLICLLTVMIARRQKWDPARYTVSDPARPLPSACPA

SEQ ID NO: 198972 - protein, 433 aa, unidentified
MHEVEDEPLFAERAAGIDIAKAGIEVTVRVPSDTRVGRRQQETRSFTTLRRDLESLADWLRSWGVAKVGMEATGDYWKPVYFVLESRDFDCQLYHAAAVKALPGRPKTDRADSVWLARITERGSLPSSFVPPAPIRALRTHTRYRRHLTQARTAEKQRAEKLLEDGHLKLSSVISDIHGVSGRAMLEAIIAGERNPKTLAQLARGTMRGKIAQLEEALDCSFFTGEHAAILKMMLAAIDSFTAQIDELTARIEVLAQPYLSQIERLDAVHGVGTISAQDVIAEIGVDMTVFPTAAHLVSWAKWCPQVRQSGGKRKGANAAGRGNPYLSAALGEIAISASRTQSFLGAKYRRLVKRMPKKKALVATGNSVLTIFHALLSDSAASYHDLGPGYYEQRTNIRRQARNHLRNLERLGYHVTIQTINPDTGELLTATA

SEQ ID NO: 198973 - protein, 456 aa, unidentified
MGEHMGRKRVSKSKKVALPVLNPDAAGIDIGATEIYVAVPADRDPESIRVFATFTQDLNELADWLQQCRIRTVAMESTGVYWIPLMQILEIRELEVYLVNAKHVKNVPGRRTDVSDCQWLQYLHSVGLLRASFRPTQDICAIRSLLRHRASLVDMATCHVQHMQKALDQMNLQLHHVISDITGTTGLAILDAILDGNRDVQVLAALRDPRIKASHETIAKSLVGDYRQEHLFTLQQSVGLYREYQRRIAACEEEMQRLMKGLETKADPAILPTAKDSVKKCKVMPPARAMALREEAYRILGVDLTTIPGISVLHVQCILAELGGGVSKFRSAGAFSSWMGLCPDNDISGGKVLWSGTRKVKNRIAVTLRMAAQSLQQSESALGVFYRRMRARLGAPKAITAAAHKLARIVFHMLTTREPYDESVFAKAEQKNLQRMESRLKAQAQALGYQLLSAQS

SEQ ID NO: 198974 - protein, 338 aa, unidentified
MSIVRMGIDLSKNTFHVHAVDIEERVVVQRMMSRAQLRHFLAMTPPCSVATESCGSAFHWARYAKQCGHLPKIVASQFVKPYVKSNKNDFNDAAAICEAASRPSMRFVPTKSIEQQDIQALHRVRTRRVAERTALGNQIRGLLLEYGVPIGLSLVTLRQRLPAVLEDEQNELTPRARSLFRELYDELLELEGKIAYVERKINQIFKASEPCQRLAQIQGVGPLTSTALVAAVGDARVFKNGRHMAAWLGLVPRQQSTGGKPRLLGISKRGDRYLRTLLIHGARSALRVMGRKSDRRSRWAIDVERRRGANIATVALANKTARIAWAMLAHDDDYRAAA

SEQ ID NO: 198975 - protein, 348 aa, unidentified
MLAGQVDYVVGVDTHRDEHVLAVVAASTGAVVAQRSLPATARGYARALAFADEHAVGRRVWAIEGAGHYGAGLARYLSGRSETALEAGRGPRNERRLQGKDDQLDAARAARTVLSSEKLALPREGQRREALRLLMVARRSAVDVRREALVQLRSLIVTAPDELRGELRGLPAGQLLERCSRFRRSSLRTPDVHAMTLVLRTLARRIQAATLEAAELQTEILAHVRALAPRLLDEPGVGPIVAAQLIVSWSHKGRVRSEAAFARLAGVAPIPASSGQTTRYRLSRGGDRQLNRALHTVILHRRLHDPATRDYIARRVAEGKTRRDAVRLLKRYLARHLYHVLNGEPIMT

SEQ ID NO: 198976 - protein, 334 aa, unidentified
MIVLGIDVSKDKLDCYLGSEIEQKPRHKSQFQVENTAEGFEKLLQWLSTVSLSLKAMTVVLEPTNTYHVELAYWLRSQEANVCLANPKDVHHYAKSLGRDSKTDQLDCFALAMFGMTRKLRFWNPPSDKIRKLDALVRTQSSIVRERVREENRLKALPSVELQIVGKYLKERIALLKQQERSIKAEIEALIAQDKNLKVSAKKLGAIPGIGPVATALLLILFSQRAFSNGEQAAAFCGLIPKEYQSGSSILGKPRITKRGPGYIRGVLQMCAQSVLVTKKQSTLKAYYERLLERGKTKSCAFGALAHKLVVVAFAIWSKNADYKYGTTSENAAA

SEQ ID NO: 198977 - protein, 359 aa, unidentified
MQNKTKKLDFTGKNIYSGIDTHLKTWKISIMVDEVVCQTFTQDSKAKDLHSYLNKNYPGGNYFSAYEASFCGFGPHRDLIKYGIQNIVVNPADIPTTDKEKKQKEDSRDSRKIVRSLHNSELEAIYVPSMDIEGLRILVRYRKTLVKEINRYKNRTKSFLYYNNIKIPTELENGSKHWSKHYSNWLKSLSFEIEYSKITLDSIVETVEYLRKKLLEITRRLRQLERQGEYSEQICLLRTIPGIGLIMAMTILTELENIERFRNLDKLCSYVGLIPRTNSSGENEKTGGITPRNNWQLRNMLVESAWIAIRHDPALMMKYGQLRQRMEANKAIINIAKKLLNRIKHVLINKEPYEKGFVQ

SEQ ID NO: 198978 - protein, 342 aa, unidentified
MYYIGLDVHKKTISYCVKDASGQVHQEGKVGATRWELDDWMNTLPQPWTVAMEATIFTGWIYDHLLPHAQQVKVAHPLMLRAIAAAKKKNDRIDAGKIADCLRCDFLPQCHMASTAIRDRRRTLRYRHLLVRQMVQMKNRISGLLMETGVSHNKQRLHKVGYFRELLASNEEVNESIRPLLRVSRDSIVRLQKTEYALVSSLQRDPLLAERIKRLRTVPGVGPITALTWALEMGEVSRFPSIRQAISYCGLCGDEKSSADKVTRTPLSKQRNKHIQRVLVEAAKLAPRQDHNLALVYEREKQKGNANRATLAVARKMVAYLLAVDRGQRDCVPFADSQSAAA

SEQ ID NO: 198979 - protein, 409 aa, unidentified
MSEETPEVVYVGLDWAALVHAVCVMSAAGKVLAQFTIEHTAEGIASLIRRLAKHGDPELVQIGIERPNGRLVDLLLEAGHPVIPVSPNAIKTWRESEVLSGAKSDAGDAMVIAEYLRLRHHRLHPVQPYSSETKALRTVVRTRDDIVEMRVAATNQLSALLDDFWPGAKAIFADVESPISLAFLRRYPTAMAAAHLGEKRMTAFLTKHGYSGRRPASELLARLRRAPAGTNDSALVEAVHDAVLALVTVLEALNTAGKNLDRSVVAHLGEHPDAAVFTSLPRSGQINAAQVLAEWGDSRAAYAGPDAVAALAGVTPVTKESGKQRAVHFRWACNKRFRKAITTFADNSRHESPWAAHIYARARARVHDHPHATRILARAWIRVIYRCWHTGQPYDANLHGGAQRLPIAA

SEQ ID NO: 198980 - protein, 349 aa, unidentified
MRFYSQHHQFYCGIDLHTRSMYVCIMNHEGAILVHRNMPATPDDLLKVTEAYRSDLVLAVECIFTWYWIADLCHQIGVKFVLGHALYMKAIHGGKVKNDKIDSQKIAALLRGGMLPMAYVYPQAMRSTRDLLRRRLYLARQKAELQTHIQNTNTQYNFAAFEKRIDRASNRIGIETRFTDPAVRTSIEVDVAPMDALHQQILAIERQINSQVPEHDPVAVHLLRSIPGVGKTLALVILYEIHDIRRFPKVGNFISYARLVKCPHESAGKRVKGKNSKIGNVHLKWAFSEAACLFLRRNPRAKTYHQRLVSRYGKAKSLSIIAQKLGRTVYAMLKRRTPFDARRFFETVG

SEQ ID NO: 198981 - protein, 430 aa, unidentified
MKQYELLHSLFVGIDVSMKENVVHAMPFSPEDHPGHAHLRFFAPNTPAGSVGIVEKVSDFLKLYPDVIQVVIALEATSVYSFHLATFLSVAHFNGHIPAIVYSVNPKEIHAYKKTFTDVGKDDYVDAMVIADYARSNKIRSRPWKGPELLGLRVLTRLRFRIAKLMGIVKNSTGNSIYLECSGLMTGENPFCNVWTTTCQELLTTFQGPDEILSLSDEELLNFITEKGHGRFSHPLDVVEKVKKAARNSYRLDKRVYEPLTSGLSVSFFIIHSLEAAIKKLDKSIETMAKSFSSDSYQILLSIDGVGPVIAGGLLAEIGDIKRFKTDDALAKYIGLTWRGKQSGQSESPVKHLSKAGDVYLRYYVLLATGQIINYSAKYREAYERIRSRKTLFPYRAALNLVARKIVRLIFTLLDKHQLYSDNKVMVTLE

SEQ ID NO: 198982 - protein, 411 aa, unidentified
MDVLDTRCAGIDVHKKMVVACLITPDATGTPTKETRTYGTMTGNLLEMMDWLLDAGCTHVALESTGVFGKPLYNLMEGALEILVVNAAHMKNVPGRKTDVKDAEWIADLLRLGLLQASVIPDRPQRELRELTRDRTSLLQERSAEVNRLQKTLEGANIKLSSVATDIMGKSGRDMLAALVAERTDAAALAQLARGKLREKLPQLEKALRGQFAAHQRFLVAQQLAHIDGLDEIIVRVSAEIAERVRPFEEAIEQVDTVTGIGRRTAEVLVAEVGTDVARFPTPRHLASWAGLCPGNNESAGKRHGGKTRKGSPWLRAALVEAARAAGRSKKTYLGAQYRRIATRRGAKRAAVAVAHSILVIVYHILTRHEPYHDLGVTYVDERDRQAVERRLVKRLQSLGYDVQLQPLTAA

SEQ ID NO: 198983 - protein, 369 aa, unidentified
MSESTIFVGLDVHQSSIDLAVAEGGRRGEVRHLGTIGGDLASLDRAVRRLQAKGRRLQFVYEAGPCGYTIYRHLRSRGLACTVVAPSLTPRKPGQRVKTDRRDALTLARLHRAGELTAIYVPQADDEAMRDLCRARLAAKQAEKKARQQLGAFLLRHNRRYSGRSRWTKAHWRWLADQRMEHPAQQVVLQDAIAAIGYQQQRVAQLTEQIRQLLPQWRLAPVVAALQALRGVRLIAAIVCVAEVGDLRRFDSAGEVMAFLGLVPSEHTSGPRTRRGGITKAGNAHARRVLVEAAWAYRFPARVSRALLDRQEGLSTAVQQTAWKAQLRLCGRYRRLQARGKEAAVVATAIARELAGFMWAIARQVPLAD

SEQ ID NO: 198984 - protein, 363 aa, unidentified
MQYIAFDAHKHYTLASVARPDGQVVREERIEHERGALQASLARCEPGSPVAVETIGNWYWIVDEIEAAGCIPRLVHARKAKLMMGEINKTDRLDVRGLNRLQRNGTLPTVWIPPGELRDQRDLPRTRMVLVRQRTQLKNRLHATLAKYALHHFEVSDVFGVRGRAVLRQRLELLPPHTAYASGHLLKQVVDLGSQIREFEQRIHTTFKPTAAIQHLMTVPGVGLTLAVVIALEVGDVVRFATAEKLAGYAGTTPRVHASGGKTRFGRSRPDVNRYLKWAFVEAANAICLTRRRARSRHVSRLYERIARRKGHAKAIGAVARHLAEATFWILSKQEPYREPKLSTVSSTGDKREIPLSSPKLDR

SEQ ID NO: 198985 - protein, 418 aa, unidentified
MKHSKTEKIGTINKKTLIAALDIGKKVHYAYFRAPSGKDFQPFAFHNTRNGFDKFWERLCRFKEKQMLEEIIVGFESTGPYAEPICHYLRHKSVKLVQVNPMHTKRIKELTGNSPNKTDKKDPRVIADVMSLGHSLTVIVPEGVAAHLRRLTQARERAIERRTAMSNQLQHLVFLIFPELVHIIKPSTKTGMYLIKHYSDPKKLLFAGIDKLNAIIKKVSRGRLGPDRAEQLHGAAKKSVGITEGKESILFEITHLVSKIESENHYVEDLEKQMGDYLEKIPYSHSILSITGIAHVTAAGLIGEVGDFRKFKTISEVLKLAGLDLYEISSGAHRGCCRISKRGRALMRKLLYFAAINTTRKNGILHGPYQRHLAKGMPKIKALMAIARKLIGIIFALVRDHSNYIADYSSQLVFKKAA

SEQ ID NO: 198986 - protein, 409 aa, unidentified
MERQLERCCGLDVHKETVAACVRVGGRTGQAEQHVQTFGTTVGDLLVLRDWLAAHGVTHVAMESTGVYWEPVFYALESDFTGLLVNAAHIKQVPGRKTDVKDCVWIAQLLEHGLLRGSFVPPAPIRDLRDLTRYRKALIHDRTRVANRLHKALEEAGMKLASVASDILGVSGRAMLAALVQGTTDPAVLADLARGRLRGKLPALRQALASRFRPHHAFVIGQLLAHLDYLEEAITTLSAEIERVMAPWAEPLRRLDTIPGINQRTAEVILAEVGADMSAFPSARHLASWAALCPGHHESAGKHKSGKTRKGNRWLRTALIEAAAGASRAKHSALQARFRRVLRRRGPKKAVVAVAHALLRVVYHVLADGTVYREAGANSYDRHQSQRVTRRALQTLERQGYRVTLEPAA

SEQ ID NO: 198987 - protein, 402 aa, unidentified
MNCVGIDVSKGKSMIAVMRPFGEVVVSPFEVRHTANELSELAGLLKSLDGETRVVMESTGNYHAPVAWLLHDAGLYVSVVNAMLVHDYGNNSLRRAKTDKKDAVKLANYGLDHWLTLPRYIPEEDTRLMLKICYRQYQQYSKVQTMLKNNLISLLDTTFPDANRLFTSPPRADGSEKWVDFVATFWHCECVCGRSEKAFTTQYQKWCRKHGYNFNENKALDIYASACGHFGVMPKTDTTKLLVEQAISQLRATSAALAALKQEMQSLAASLPEYPVVMGMFGVGPSLGPQLMAEIGDVRRFHSKKALVAFAGIDAPPYQSGQMDVRSRSISKRGSASLRRTLFLVMSVILQRAPMDEPVYQFMSKKHSEGKPYRVYMMASANKFLRIYYASVKAYLDSMEYD

SEQ ID NO: 198988 - protein, 415 aa, unidentified
MSVLAPWVGRAIGLDVHREFCVVAICEGGRVRSAGRVPSTPEGLGALAESLLATDRVALEVTGSCWEVARILEPHVDRVIVVSPDDTGISSARAKTDKLDARTLASLLWKGELDAVWMPDERCRILRRRLARREQLMRTRTRSKNEIQAVLQRRLQGKPPCSDLFGVKGRQWLAGLELPVEERESVDAGLRQIAFMDAEIAAVDRLVARQALAWPEIRRLMTVPGVNVICAATFMAAIGEPDRFITSQKLVAYLGLDPKVRQSGETPARSGRISKRGSASARWALVEAAWSVVKQPGPLRAFYERTRARRGHGRAIVATARKLTVLFWCMLRRREDYAHQRPALNKKKLRQLELTAGAPARTKAAAGIWSTNRAILHAERALAEQAEISYQRMVTDQQAGRPSRKVGASATPERA

SEQ ID NO: 198989 - protein, 437 aa, unidentified
MAVRYAGIDWASEAHDVLVADETGTEVLAGSYAHDENGLSALCRVLMRLEVVLVAIERPDGLLVERLLDAGLQVLPLHPNKVAAARDRFRVSRGKSDRFDAFVLCELARTDHHRFRVLEPDSDETKAIRALTRAREDLVATRTGVMNQLRAELERFWPGPLRLFTHMDAEILLAFLERYPSPADARGLGVARMQAFLERERYSGGQHPTALMAKLRSAPRARVGELELAARRQLVLSFVAMIRTLNAQIKDLEGEIRARVRAHPDGPIFLSLFKSPNSVITAAELLAEIGDCRERYPTRDALAADAGQAAVAVESGKWKTAGFRRGCNKRLRVAFCRLADSSRHWHPWAQTLYAQARQRGHEHPRAIRTVGRAWCRVVWQCWRNHTPYDPTQHRALQRHITVTIPTRSGPVPDLTATQRMAGKAVTPRAAAGRARSA

SEQ ID NO: 198990 - protein, 313 aa, unidentified
MVAQPVFVGIDVAKAALDVAVSPTAERWTLAYTEREVAGLVPRLTALDPALVVLEATGGLEGPLAGALAAAGLPVVVVNPRQVRDFAKATGRLAKTDALDAAVLAHFAAVVRPTPRPLPDAATQSLAALVTRRRQLVEMLTAERNRLGSAPRTLRAEIQAHITWLTRRLGRLDTDLGQAIRTSPAWRVQDDLLQSVPGVGPVLAVTLLASLPELGTLNRKAIAALVGVAPLNRDSGTRRGRRMVWGGRAAVRAVLYMGTLVAVRHNPVLRAFYQRLRAVGKLPKVALTACMRKLLTILNAMLKHQTRWTPRHA

SEQ ID NO: 198991 - protein, 343 aa, unidentified
MNEAITIGIDLAKNVLQVHGVDAEGGVVFRRQLRRGQVLGFFEKQVPCLVGMEACATSHHWAREIAALGHEVRLMPPRYVKPYVKRNKNDAADAAAICEAVTRPTMRFVAVKTAEQQSMLMLHRTRELMVRQRTMLVNAIRAHMAEFGIVARVGLPQVRELLAVIADEEDERIPVLARRCLEGLAAQLASLQEEILAAERRIHAWHRASAVSRRLESIPGIGPITASALAATITDPSVFKSGRELAAWIGLVPRQASSGSRERLGRISKQGDHYLRWLLVAGSMTVIRHAKRRGTANPWLAELIAGKPTKVAAVALANKLARIAWALLRDGGTYRKPAASAAA

SEQ ID NO: 198992 - protein, 380 aa, unidentified
MAHEATTQETSYPKATLYVAFELSKEKWRVLCSAGGRKRHSGVMKPGSEEELVTILDRARKKFGLAPDVRVLSCLEAGRDGFWPHWFLTAQGIENLVVDASSMKVSRKGRRAKTDKIDVARLLADLVRHDRGDDDIWRVVHVPSKEDEVHRHEHRELEQLKEERKRHRNQVRSLLATEGITVKGDLMRVLGKPGDLRNWEGEPLSAWVLWRLERKAQRLIQVEAQIMEIERHRSESVKKADTVKLKKIAKLAKLRGIGVPSAWVLVMESLGWRQFNNRKEVGGSVGLVGTPYDTGESFREQGISKAGNARVRSLLVELAWLWIRYQPNSSITKWFNRRYGGQGKRSRRVGIVAVARRLMIQLWHYVEHDVEPPGAIIAKS

SEQ ID NO: 198993 - protein, 356 aa, unidentified
MSRILAIDLGKFKSVTCLLDSDTNQTEFWSMATDRHYLLAVLKNYHPDLVVIESCGLAGWVHDICSEEGYEVLVCNPNQEAWKWKHIKRKTDRDDALKLAKLAAPGQLVPVYIPCRQQREYRRLVKYRQVVLGRINRVQNSIRAIFAQRGMEMVRGQKAWALERLELIAQHRKPLAECSLDELWRGELDLELIQLEHLRQHQYEIHKKLKALAAADERVQLLQTIPGVGRKTAEVVVAYLDDPHRFQNARQVSSYAGMVPRRYQSGEMDRHGRIHKRGPRQLCSALVEAAWLMLRYNPWAKTVYERLTSGQRTRKKKAIVAVARKLLVRCWVMLLRKEPWNKETMVGQSAGIAVAV

SEQ ID NO: 198994 - protein, 346 aa, unidentified
MLIIGCDFHPSWKQIAWLNTETGETGEQKLVHASGDAKRYYAQVPGPALIGMEATGNSQWFVELAQELGHQIWIGDAAQIRASYVRKQKTDKRDAAHILKLLLEKRFPTLWTPDRGQRDLRQLVLHRHKLVEIRSRVKNELQHLSLNRGMQRKAKLWSQAGQKLLRELPLQRWAACRREDLLGLLEMLNQQVGKLDQAVQQAAEEHPQAKLLMTQPGVGPNTALAFVLTMGDVSRFPRGKQVASYLGLIPREESSGGRQKLGTITKQGNQLVRSLLVEAAQIAVRFDPGLRKQYLHRCHQKPKGVAKVATARKLAVRLYWMLRTQKPYPEIVRIESSPRVALVGAS

SEQ ID NO: 198995 - protein, 412 aa, unidentified
MKVAGIDVHKKVLMVVVVDASTPEEKPVRRRFVTMPSELHRLLMWLQEQGVEEAVMESTAQYWRSVWLELEPHMRLHLAQAFSNRAPRGRKHDFKDAERLVRRLMANELILSFVPNGEQRIWRSMTRMKLQLTRDRVRLQNQIECLLEEMRIKLSIVVSNLLGASGLRILHALAEGETDPKKLAQLGDERLQCTEEQLVDALTGRVQPVHGEMLALQLQRLQLIDQQMAELNRLIAQAMKSHQDAVIRLAEVPGLGVDSAQQIIAEVGAQASTFPSAAELTSWVGTCPGKEESAEQNHSSRSAKGNKYLRRVLNQAAHAAVAKKGSHFQTVFRRLLPRLGYQSAIWAVAHRLCRVVWKILHEGVRFIEQGREVAPREKKKRAQLLARALRKLGYEVTITPINQLAASATVQV

SEQ ID NO: 198996 - protein, 341 aa, unidentified
MDKELYFGVDVSKKTHDLAYYDGETIDWKNAHIQVSNDNAGFKKIGSWVAKVGKDFDTFLFCMEYTGLYNQNFRLWLESKEYIYGMVDPRKMHHFEPDLDDDQRSLDRIKTDELDAFRIAIYCEQNHKKILRNPSKLPSPVYLKLKRLLVERKQNTKQSTLCKQQLHDTCAYDTDLSVERKKLLLKNMQENQKAIDKEIDSYIQEDASISKNYELLTSIPGIGRIIALETIVLTENFTAISNPRKYACYIGIAPFKKESGTSVRKKTGVSKKGFSEAKADLSIAVLSAITYNPAIRGYWIRKKKEKCGGIVLNAIKFKLVLRMFAVIKRGTPYVETDAYKN

SEQ ID NO: 198997 - protein, 350 aa, unidentified
MDHKCKVIIGIDTHKATHVAVALDTQGTRLAALSIPTNPKGYLELERWSQSLGEVHAFGIEGTGSFGAGLSRSLLAQGHNVVEVTRPNRQLRYSQGKTDTLDAEGAARSVLSGQATARPKTQTGISEMIRHLKVARDTAVKSRSQAMVTLKTLIINAPADLRDVLDKIRGKVALIRHIAAFRPGEINNTMASAKAAMRALARRWLWLHEEIITHDKELERLVTERAPDLMTSHGIATLTVAEMLILVGDDPTRIRSEAAFAKLCGVCPIPASSGKTHRFRLNRGGNRQANAALYRVAIVRMRGHEPTLAYVRKRTKDGKSKSEIIRCLKRYIVREIYSQLCVPKSAQIAA

SEQ ID NO: 198998 - protein, 436 aa, unidentified
MRLLYPRCCGLDVHKTSIAACVLCLGDDGQVQQESRRFGTATADLLDLAAWLKARAVQRVAMESTGVYWKPVWNILEAEGLDLLLANAQEVKALPGRKTDQKDSQWLADLQQHGLLRHSFVPPRGIRDLRDLTRGRARLAQERSSVSNRIQKVLEDANIKLAAVASDVLGASGRRILKALIGGETDAGVLADLSQGRLRDKIPELRRALEGRVMRHHRFLLQRYGEQFEFLEKQIADCDTEIAQRMKLTPEEWAQVLTWLPPGAPQPLSPREEALAYWMELPGIARVSGSSMVAEIGVNMNQYPDAAHLASWAGLCPGNDESAGKRRSGKTRKGNVWLRRTMCEAAWAASHTKNSYFAAQFRRIAARRGKKRATIAVAHSLLVTAYTMLKQKRHYQELGADFFDTLNQEHVRRNCVQRLHKLGYEVTLQPKPKTVS

SEQ ID NO: 198999 - protein, 412 aa, unidentified
MEVLYPCCCGIDIHAKTAVVCLIKQGKRQTRTFTTMTDALLRLSDWLTAEGCTHAAIESTGVYWKPVFNILEAVLKVILVNARDAKAVPGRKTDVRDCEWLADLLRHGLLRASFIPPLEIRELRELTRYRQTIIKEHTAVANRIQKLIESANIKLGQVATDVLGVSGRLMLRALADGETDAEKLVELARGTLKGKKPELQRALTSRLTPAQRFVLNELLLRLAELEAATARVSEQIVREVAESFDPFVPEAVKLLETIPGIALRVAEVIISEIGVDMSRFPTDAHLASWAGVCPGNNESAGKRRAGQTTKGSPYLRAAITQAAWAAAHMKNTYLAAQYHRLIKRMGKNKALVAVAHSLLVIVYHVLAQRADYRDLGGDYFDRQHQQTQQQRLIRKLEAMGLKVTVETLPKAA

SEQ ID NO: 199000 - protein, 464 aa, unidentified
MPLRLGIDVACRAAHQVSLADEQGRLIWSGRRFRTTPPDLDQLWSSLPDDADPGEVLVVMEPTRNAWVPLAAWFRRKGARVVLVPPERSADLRNYYAKHTKSDRLDSQLLARLPMLHPDGLHLEQGLGPGDALKRAAKLHSTLVHRRTQSLARLDTLLELLGPAWHSAIGADLGNRTVLKFLAAGYADPHVVKRLGRVRLARFCHRHSRGAWGEPHADALLAAARETLELWSDGELDYPDLAEDIAIEARLALQLSEELKDLDERATLVLKAADPNGILTSAPGVATITAAAILGRLGDPNRFDSLAGARAFTGLVPILDSSGLTGRHGGPTKRGDAVLRQALFMAASQARRIDPTLAAKYHRLMVNAGKHHNSALCHIATTLLTRIIACWRAGQPYQLRDVDGSAVTIDQARTIIAERYAIPKDLRARRRTTTNAGTDRRSKESPRAPSTGPSTTHATTPGAA

SEQ ID NO: 199001 - protein, 388 aa, unidentified
MQIVTDRPQAPTAIRTDLGAIFVSLELSRSTWLITSLSPGGGEKMSKHTVRSGDVAGLRARLSQLRDKVQVRTGQVVPIIVIQEAGLDGFWIHRLLQDDGVESHVVDPASIATSRRRRRAKTDKIDGEALVRALLAYKRGEPRVCAMVRAPTPHEEDRRRICRERKTLTAERVEHVNRIKGLLFAQGISDYEPLLRKRRERLEELRTGDGRPIPEHLKAQIGRELDRLELILRQIKSVETERDALLRPSEEGTPAPGSMLKTLKGIGAEFAGVLWLEGLFRSFSNRRQVAAYAGLAPTPWRSGSVAHEQGVSKAGNPRLRTTMIQLAWLWVRHQPRSILTLWFRQRVQLNGGRIRKVLIVALARKLLIAFWKYVTAGVVLEGAEMTAA

SEQ ID NO: 199002 - protein, 341 aa, unidentified
MAQATIIGLDLAKNVFQAHGASETGSVVFRKKLTRNQVLPFLSEQPTCIVAMEACATAHDWAREIGKLGHSSRLMPPQYVKPYVKRQKNDMADAEAIAEAASRPTMRFVEVKSEDQQVSAMAYRTRQMFIGQRTQTINGLRSHLAEHGVIAATNKCGLKRLSAMIEDETVALPDKVRGMARVYVDHIAGLTAQIAEMTEAMKAVAKTSTVVKRLQTVPGVGLQTAMAIETFAPDPMCFTRGRDFSAWLGLVPKQNSTGGKSRLGKVSKMGQVDIRSHLIRGAMSVITAATRFGVKKGSWLERLLARKPKLVAAITLANRMARAIWAMMTKNEDYRTPEAVA

SEQ ID NO: 199003 - protein, 402 aa, unidentified
MNAVGIDVSKGKSMVAIMRPFGEIVSAPFEIKHTASGINSLVELINSVEGESRIVMEHTGRYYEVLAHQLSEANLFVSAINPKLIKDFDNDSLRKVKSDKADAVKIARYALDKWQNLKQYNVMDELRNQLKTMNRQFGFYIKHKTAMKNNLIGILDQTYPGVNTYFDSPARSDGSQKWVDFASTYWHVDCVRKMSLNAFIDHYQNWCKRKKYNFSQSKAEEIYGKAKELVPVLSKDAITKLIIKQAVDQLNSASTTVESLRTLMNETASKLPEYPVVMAMKGVGTSLGPQLIAEIGDVSRFTHKSAITAFAGVDPGVNESGTYEQKSVPTSKRGSADLRKTLFQVMDVLIKTHPQDDPVYQFLDKKRAQGKPYYVYMTAGANKFLRIYYGRVKEYLSSLPES

SEQ ID NO: 199004 - protein, 478 aa, unidentified
MIYSVGIDLHKGQHRVHCLDEKAQPCDAFSFQTAPEGLAALEQRIFRDGSNPIVVFEPAGLTWLIVAAYLRSCHPECRVVRAKGQKVAALRRYLRGPVKSDRIDALTLAKMPFIDPERLDEVYLAPAQTHALQRLTRQRKRLEDQITTHKKRIGSIVDGYLPGVRQAFSHPWSVQVRAFLHSQINPFAVIRAGEEVLHRFLTQVKPGNKGGRTESHFVYQACQKVLALQELCAAAGSTDEDFFIDLQDEIDRELRLMEAEEAESKALDRRIEELYQELHPSDNLRTIPGVGEHTAPVFVANIGDPTRFPGQSEFANWTGVVPAARQSSNVESKGLRMTKAGPTTVRWALYQAGQISRRWDPQLASVYYRQMVYHGKNHKQAMGAVMSHMAARVFTVLREDRPYELKDTEGKSISKLAARDLIMAKYRVPEDIRQERRKSKGRKANTLGLQKKRGTAAGREHEAAIAPQPATSLPSLVI

SEQ ID NO: 199005 - protein, 412 aa, unidentified
MDVFVERCAGLDVHRDSVMATVRLPGARRRQRERHTRAFGTTIAQLEVLSAWLAGFGVTLVGMEATGIYWQPVFHVLEPRFECWLLNAQHLHNVPGRKSDVIDSAWICELVEHGLVRPSFVPPPEIRRLRELTRLRKAEIQERTRTIQRLEKLLQSVGIKPTSVASQAYSISARAMLEALLAGTSDPNQLAELARGPMRAKIPQLREALANRFDIRHHGVLVSQLLAHVDALDQAIATLDERIALYTEPYAELIELLSTIPGVKQRTAQVLIAECGTDMSVFPTVRHFASWARICPGNNKSAGKNRSGKTLRGSRWLREALTEAAKAAARTKGTYLASHYWQIRGRRGEPKAIGATRHDILVAYYHIVRDRVPFRELGPDWLARRYSPEHRARRLVRQLEALGLEVTLKAAA

SEQ ID NO: 199006 - protein, 388 aa, unidentified
MIQVDDLSRSLIAFEQISTLVIVVELSQSSWLAAGVVPGIERRPLKKLDPDPTALLHLVEGWRDRATKAGRAITRTVLAFESGRDGFWLARWLRVHGVETFVMHSTSVAVSREPRRAKTDRLDTEMLIRVFLGWLRGEPRHCKMVAIPTLEEEDARRPSRERESLVGERTRIINRMKAALVRLGIRGFKPGLLTAPQKLDTLRTPEETPIPPNMLDEMRRDMARLAWVREQINAIEQARLERLERAPATGRHAMVRMLARVIGVGVETADMLVQEALSRNLRDRRAVARYAGLTGSPDESGSKRREQGLSKAGNARVRRGLIQLAWRFLRFQKDSALAQWYRGRTEDVAGKRKKTMIVALARKLLIALWRLVTIGEIPVGVALRTAVA

SEQ ID NO: 199007 - protein, 378 aa, unidentified
MPKAAHKKTSDMASKVYVAFELSEKNWKLVFSDGTRTSEASAPARDLSRVLEVIGRARRRPEGSCRVLSCYEAGRDGFWFHRALTDHQIENVVLDPSSIEVGRRARRAKTDRLDGRKLVALLIRMDRGDATVRRVSVPSPEVEDARRISRELHRLKNERTAHINRVRGLLALIGRTMKRMKEVRSFLDLGWRGRDGRLVGPVLRGEILRELSRIDLLNAQILEVKRAQKELFETDSACATVAAQLTNITGVGESSAAILSYELFGWRDLANRRQVAGAAGLAPTPTSSGNDEREQGISKAGNTRVRWVAVQLAWVWLRLQPETRLSRWYRDRFGSGSPRLRRIGIVALARRLLIDLWRSEVRRHPGGRDHEGVNVVKV

SEQ ID NO: 199008 - protein, 453 aa, unidentified
MAQRNRAVSLKPGKSRAALTITHPNAAGIDIGSAAHFVAVPPDRDDEPVREFPSFTVDLIAIADWLVACGVDTVAMESTGVYWIPLFELLESRGFTVLLVNARHVKNVSGRKSDVLDCQWLQQLMTYGLLSGAFRPAEQVCVLRSLWRQRGMLLRSQGRHVQHMQKALTQMNVQLANVIADVVGETGQKILRAIVAGERDGQVLGAMKNVRIRASTEEIAKSLQGNWRAEHLFALKQALDAFDFIGTQLTECDTQIEQQLQTLQVHDGDPAKGKKRGRARNAPKFDLRTQLFKMCGVDLTRIDGIDVTTALAVISETGADMSRFPSDKHFASWMGLCPGTKITGGKVMSGATKRCANRAAQALRLAAAALRTSQSALGAYFRRMCARMDKPKAVAAAAHKLARLIYTMLTKGEEYTDQGQAYYEERYRERVLRQLSQRANKLGMQLVAAPQAA

SEQ ID NO: 199009 - protein, 376 aa, unidentified
MGHDNTVYVGLDVHKESITAAYAVGIGEVELLGKIGTLKTDIDRLCQRVQSKATHVRIVYEAGPCGYGLYRQLVQKGFDCMVCAPSLIPRKPGERVKTDRRDALKLVRSLRAGDLSSVYVPGVEDEAFRDLARAWATAKADLKHARQRVKSFLLSHGVRYTGSANWGPAHRRWISTFAFPNHWQQLAFDECRRAVEDRLAQCDRLEAALREAVVNWRFYPAVLGLKAMRGIQFTTAVGMLAELGDLSRFEHPRQLMAWLGVTPSEHSSGDRRRQGSITKNGNSYARKLPVEAAWSYRYPARVSPDIQRRHEGIPKPIIDRAWDAQLRLCRRYRKLAARGKNVNTSVVAVARELSGFIWDISRLAMSLAIPKDAGPV

SEQ ID NO: 199010 - protein, 415 aa, unidentified
MHVQLPADRQVTVGVDTHADQHVGAALDPLGRLLGTQAVPSTAAGAAALLAWARRFGAVERVGIEGTGSYGAGLSRWLRARGVVVVEVARPKRPARRGRGKSDPVDAEAAARAVQAGTATARPKAGTGPIESIRALQAARRSALKARTQAANQLRALVVTAPDDLRARLRRLGLARLVATAAAFRPGAPSTPSAATKLALKSIAARHRRLSAEVAALDAHLGRLVAAAAPDLVALKGVGTDTAATLLVTAGDNPDRLRSEASFAHLCGVAPIPASSGKTVRHRLNRGGDRQANRARHLLAVRRLRWDPATVAYAARRRAEGLSKPEILRCLKRYIARQLYPLLAGHAALGPATLGQGGPRSGPPATPLSGGAAVTRQGRSVAEDPAAGGVDGRRGRSHRVPTPPAPAPRPPIHHP

SEQ ID NO: 199011 - protein, 434 aa, unidentified
MSQQNISTPSTPPVYAAFVGLDWGDEKHALSLCAAGAAVIERTTLPQTPEALAEWANVLRTRFPNGKIALCLEQARGALLAGLMQYEHIVPYPVNPKTLARFREALYPSRSKDDPIDADLLLDLLLKHREHLRAWQPDTVQTRQLTLLNEQRRHFVDHRTALTNELLSHLKAIFPQALELLGESLASRLATDFLKKWPTLQAVQKVKPAVLRQFYYGHNSRSEDLITQRLERVKNAVALTSDPALLAVHSLAIQTLAAQLQALRPFLDQHEQQIAELFAAHPDARLFESLPGAGSALAPRLLAALGSDRSRFPDALSIHCYSGIAPVTEKSGKTQYWVHLRWSCPKFMRQSWHEFANCSLKFSTWARACYDDLKKRMKHHEAIRKLAYKWQRIVWRMWQERQPYDETRYLRSLQKRGLKIYADLAPQPVAFAGE

SEQ ID NO: 199012 - protein, 361 aa, unidentified
MSCGKAAHSRRNDNDSTGAIRTAQLRHLCGLDVDKKSMAVSFTDHQQLKQAFRLPYSAELLLSYVRKHFPEQRGAFVYEAGPTGFGLYDELLAGGYSYLVVAPSMVPTAPGQRVKTNRLDARKLSEGLRGGQLCSIHVPATSYRDLRHVVQLRDAHVSQLTATKCRIKALLLYEGMRFPGNGQWSAGVLRELAALPCSEAVHFKLAHLIGTLHFHFNSAATAQKQIRRYCQNDPELRQSISLVKSLPGIGWIVAAHLVSRLGDWREIDNVRSIAGFLGLVSSEHSTSEKENRGSITRAGDSRFRNKLIQSAWVTIRKDPELPSPREYAKLRHKCRPYQASINYLAPESLSFPPLSRRNSRR

SEQ ID NO: 199013 - protein, 317 aa, unidentified
MTQTSTTTAGIDTSKSKLDIAVHGRTERWQLANAPAGWRILAGKLTTAGVTRVGIEATGGYERGVVEHLRTAGFAVQVLQPIQVKAFGRIHLRRAKNDALDAMLIAACTAALDRVRDAPAPRLAELAEHLTFLEQIEEDISRFKTRLEHIAELRLRRMVLGDIARLKIRRLTQIRHIAKQLRSHPDLAARLDLVLSIPGIGERTALALVIRMPELGRISREEAAALAGLAPFDNDSGQQKGLRRIAGGRARLRRSLFAAALPAAFRWNKALIALYQRLIAAGKAHNAALIACARKLLIYANTVVQRGTPWTERPISV

SEQ ID NO: 199014 - protein, 386 aa, unidentified
MVCVVDDAGQIKIRFEIANSGKSFAGLVKRLTKLGVEAVAIERCDGPLVEALLDAGLKVVVINPRQVKGLRTRYTGSGAKSDASDAYLLADVLRTDGHRLQALDRDSEATAVLRALSRTRKDLIEARVGLVNQLAAQLERVFPGAIGLFARLDSDVAIAFLRRYPTHQAATKLTQARFAAFLRRIAYCGRKPVEELLARVHEAPAAGLKPAEADGRAVCVLGLLRAIEAVRREERELEAEIIERLDAHADAHIFTSLPRAGHGVRAAAMLAEIGDVRARFPDEESLAALAGVAPVTRASGKMHAVGFRYACDKKLRNAIIDFADDSRRASPWAAKIYNDAIARGKRHPHAVRILARAWIRVIWRCWQDRTAYNPDLHRAAVMLQAA

SEQ ID NO: 199015 - protein, 404 aa, unidentified
MVFLGVDWAEEHHDVCLLDEQGKVLGRARVANSLEGVSRIHALVADHAEESAAVVVGIETDRGLLVQALLASGYQIYAINPLAVDRYRDRHSVSGAKSDAADAKVLADLVRTDRNNHRQVAGDSQQVEAVKLLARAHQTLVHTRQRQVNQLRSTLREFYPAALEAFKDDLGGRDAMAILEYAPIPSRARSVSQAKLISALRKSGRERNLETRAVELQNILRRPHLEQRATLVAAYEVIVKSCVRMIRELNAEMTALEKELTKSFELHPDAELYLSLPGLGFVLGARVIGEFGDDPNRYLDAKGRRAYSGMAPITKASGTRHVVLARYARNRHLADACYLWAFASLNGSAGAHQYYKVLRARGKSHHQALRALGNRWVGILHGCLRRRMLYSEDVAWTARAALAA

SEQ ID NO: 199016 - protein, 340 aa, unidentified
MHITTIGLDIAKNVFQVHGIDAAEKVVVRKQLRRGQVLKFFASLQPCLVGMEACATAHHWARELTKLGHEVRLMPAKDVKAYVKRNKNDAADAEAICEAVRRPTMRFVRAKSAEQQGRLMQHRTRDLLLRQQTQAINALRAHLAELGIAAAKGREGLKQLLKIIADEKDARLPIDARASLIVLAAQLQALHTMIGSIEKRIVVQHRANEASKRLECIHGIGVIGASAITATVNDPSAFRSGRDFAAWIGLVPRQDSTGGKQKLGPISKQGDRYLRRILVVGAVSVLRRAKLNPEKYPWLTQLLARRPFKVVAIALANKMARIAWALLANGSHYQPRLATT

SEQ ID NO: 199017 - protein, 347 aa, unidentified
MDHYAGIDVSLEASSVCVVDGAGKILREAKIASEPAALIGWFASLGLDLARIGLEAGPLSQWLYAAMKEAGLAVELLETRHVRTALQTMPVKTDRNDARGIAQLMRLGWFRPVHCKSMAAQETRALLTARKLVQSKLYDIEMSLRGILRGFGLKVGPTTPKRFARRVEELVAGHSTLEVIAKALLSAHAALLRELDMFEKLVRAMARRDKRARLMMSAPGVGAIVALTYVSAIDDPARFSSSKRVGPHFGLTPRKYQSGETDVTGRITKIGDAGVRTALYEAANVILTRPVKGAGLKSWAMKLARRAGMKKAKVALARKLAVILHRMWVDGTTFDARKAAFAGVAAA

SEQ ID NO: 199018 - protein, 383 aa, unidentified
MSIKYSVGLDVASKKIDICMSVIDCNQKVTVVASTSFPNTLKGFQSMDEWIVKKKKLQEIPLVMCMEATGVYHENCALYFSEKKYAVSIILPNKAKHYLISLGLKSKNDSIDAKGLSKMGAEQCLELWQPMGKLYYELRQYTRQYQNLQDQKTVINNQLHALENSMYMSEMMINQQKAIIELIEEQLKELEKLMKNLINSDQVLKQKVDNICKIKGIALLSVSTIIAETNGFELFKNYKQLVSYAGFDVVERESGTSVGKTKISKKGNSRIRRALFMPAFLAIKYKEKPLVDLYERTFAKHGIKMKSYVAVQKKLLVLIYHIWKKNELYNPDYKKDSPEMNSEAIQDNSLKSGFSELQNYEKKEDNETKDKKKEKIHSHCEVA

SEQ ID NO: 199019 - protein, 414 aa, unidentified
MRVIYQRVAGLDVHKKVVVAAIIVQRADGNWHQERRSFGTMTADLLVLSDWLMSFEITHVAMESTAEYWKPIFNILENNFEVVLVNAQHLSKVPGRKTDQSDAEWIAELMQHGLLKASFIPPVGQRELRELTRFRSTFVRERATLINRVQKVLESANIKLASVATNVMGVSGRAMLEALIEGHASPEQMAALAKGRLREKREDLVKALEGRVKPHHRFVLTELLCQIDSLDETIARFDQEIETYCRPFEEAVVLLDTIPGVARATAEAIVAEIGTDMSRFPSADHLASWAGVAPGNNESAGKRRSGRTRQGNKPLGSALAQAAHAAAHTKNTYLSAQYHRLAARRGRKKAIVALMHSILVMSYHMIQRNQPYHELGGNYFDQRRPEITAERLVKRLEKLGYQVTYQTLPTMEPA

SEQ ID NO: 199020 - protein, 358 aa, unidentified
MSKQIVSIGKSVSSSDTSTETSTNPQQARVFCGIDVSRESLAVAVLTPDQPIEQREFANSASGHKALIAWLGKMKALARVSLEATGIYSMDLALALDAATGIEVAVLNPKRVHDFAKSMMRRSKTDRADAAVLAEFSLRMEFVAWQRPSQSALALRAISRHIEALGLEHTRTSNRLHAAEGSLGTPRCVVEDLKRSLAGLERRMVKLRREARKLIDSDEQMRGQFLLLTGVPGIAEISALQILGELVLLAPDLKARQWVARSGLDPVHQDSGSSVHKPARISRAGSRHLRRALYMPALSAVRCDPHLKTFYETLLARHKSKLQALIAVARKLLHAIYGIFKSRTPYDGSKLFPQLQIA

SEQ ID NO: 199021 - protein, 365 aa, unidentified
MKKTSTKHDHLLISDYENELLTIGLDLGDRSSHYCVLNSKGEISIEGSLQSNPAALHKYFAGIRPCRVALEVGAHSRWASSLLNDLGFEVIVANTSQVRLIYESSRKTDKVDARTLARLARVDPSLLSPIKHRNTSAQSDLCVIRARQALVAARTQLINCVRGMVKSFGERLPTCSSDSFSDRVARLLPEALRPALDPLCKQIALLTEQIQSFEQQIQDTADHQYPETIALRQVSGVGALTALTFVLTLENPDRFRKSRDVGSYLGLRPKQSQSGQSAPQLGISKKGDSYLRKLLVGSAQYILGRFGCDTDLRRWGLELAKRGGPNAKKRAAVAVARKLAVLLHRLWVDQSQYEPLRAPLMHSLN

SEQ ID NO: 199022 - protein, 390 aa, unidentified
MKCVGSELLFYYSKCFSTFTKGLKELSQWLCDNNCKDVCMEYTRKYWIPVFNVLEDSCNITLAHPKYVKAIRGKKTDKKDAKWIANLFKHDLIAGSYMPPLAIRQLRDLMRYRFKLTNFMSSEKNRLQNCLTISNIQLGNVVSDTFGKSSMNIINRLLANPLDNSFDIAPLIHGSMKDKLPELELAIDGFFTPEQAGKLKVIKQHYEDLKSRKADLEKIILSLSAPYAEEINLILTVPSFKNIFSAIAVVSEISANMDVFPTAKHLCSWAGLTPTNNESAGKKKSVRISRAGCYIKPLLVQCATAVVKSVKHPEIRNRYLRLKQRRGHKRAIIAIARMLLTAIYNILKKKEPYNAELYRKSDVLPVNREITVEQAILLARTQGYRIKAAS

SEQ ID NO: 199023 - protein, 491 aa, unidentified
MANRKISTFERLQRGKLSRKQCKELGRRLQSPNPGLEIIHRNAAGIDVGSGSHFVAVPPDRDTQPIREFGSWTAALHEMAAWLKSCAIDTVVVQATGVYWVVLSDVLEGAGLKVWVVNAQGTKNLPGRKSDVQECEWLRKLHTYGLLRNSYRPPEEIRGMRDLWRLRERLVADAGRAVQQMQKALTGMNLQLTNALSDISGVSGMAIIRAIVGGERDPWKLAQLRQPGVRASEAEIAENLRGTWREELLFELRQVVAHYDFLGKQVVELDQLLEKRMAAMPSREVATKGSPVAEKEEVPEGKRRGRKPKTKVKPPPKNAPAFDIGRELTRLLGVDLRTIDGVNIHIAQTVYTEVGPDLSAFPTEGNFTSWLGLTPMRSVSGGKVIKHEKKRVKNRLADALRMGASTLERSQSYLGARFRYLKARLDGRRAVKAMARYLACLIYRLMTKGQAWIDRGEAYFEQKKAERELRTLQNRAQKMGLQLVPLATVNA

SEQ ID NO: 199024 - protein, 329 aa, unidentified
MFYLGIDVAKAKIDCCLILEDSAGKKKTKTFPNTPKGFEQLQAWLNHHAAGPAQTIALMEATSVYHERLAGYLFDAGCQVCVANPARARYFAQSMSKLNKTDKADSEVLARFAMTADLHFWQPLPGHIQLLNALLDRRTVLGEDLQREENRLEKAESTFTIEPVLQSIHKNIKQLSRHIQDLDRQIDDHIDQNPDLKNDKALLSSIPAIADRTSLLMLSFLRSHAFERASQAAAFAGLVPIQRQSGSSIHGRSRLSKAGSSKIRAGLYMAAIVATRHNPHIKGMNDRLLANGKTKMMAVGAAMRKLIHLCYGVLKHQRPYQENYCANSQ

SEQ ID NO: 199025 - protein, 441 aa, unidentified
MCPQTGSPQSVEMALDSGNTAEVRPFYLGLDVSLRTCTACLLDHLGREIVPRWTFRNNQPGAEELAQKVAELLKRHRATILLVGMEATGLYGWHLACFVSDAPLLHPWQARVYVFNPHRTLNFKRAMGEPGKTDRVDALIVAQWLRVGHLPAPFAVDMVYGPLQRLTRFRYHLTQTITREKLYTLGLLFLAFSEFGSAAPFKDPFGATSQAVLEELSLDELATKPLEELTNYVARNGRGGFADPERVARTLQQAARDSYRLNKVHGGVTRLVLSVSLTNIRTLTRHLKEVDAAIASELKAIPLAACLLSVPGLGPVYTAGLLAEIQNIHRFEDQAALAKFAGLTWRSHQSGDFTAEETPLTKTGNTYLRYYLVEGANSVRVHEPEFRAYYQIKYDEATKHHHKRAVTLTARKLVRLVDALLRGAQLYVPPGQRHGGRAAAA

SEQ ID NO: 199026 - protein, 356 aa, unidentified
MKIVFPTCCGVDVHKSFLVATIIKTPQDSLQPSYQKKRFSTFNSDLNRFADWLHENDCLDVCMESTGKYWVPVFNILEKRGIRVTIANPKWVKAVKGNKDDTKDSKWIGDLFRIGLVKSSFIPAKDIRILRELTRYRYKLTSMKSSEKNRFQNAFTVCNVALDSVVSDMFGKSATAITDYLTSDEDFDPQHCVSLLHRSLKKKAEDVLSSIEGYEITLEQKCRIGIVRDHLHYIEKLIERVDICINTMVEKYDGAISLLRTIPGIDRSSAITVISEIGVDMAQFGSSKRLCCWAGLTPGNNESAGKKKSVRISRAGVYLKPVLVQAAHAAVKDKLNPYYALPNAEERKELSLLSPE

SEQ ID NO: 199027 - protein, 352 aa, unidentified
MRKYYVGLDVHKVSIAIAVLDAHGKLITRTVIETSTEAVRDFFRNLGGEIHLTFEEGNHAAWLYDIVEPLVRRVVACNPKHNRIEGSRSDRVDAVKLAELLRLNALKPVYHGEHGTRTLKHLMRCYECLVKDITRVKNRLKALYNSQAIKQRGRELYHASKRQSWLEKLPNQGQRTRAELFFQQLDELKVIKRAAQKAMVAESKRHPAYRVLSQVAELGPVRIAQIIPTVETPWRFRTKRPFWHYSGLAVVTRSTADHEIEDGRVRKRKKPIIQTRGLNEDYNRRLKSIFKSAATHACHCGAYREYYEGLLKTGMREEMARLAVARKLSATVLAVWKSGESFDAGRILRKAV

SEQ ID NO: 199028 - protein, 354 aa, unidentified
MRKVKYVGMDVHKSTITIVVDDETGKFEMETVIPTKSEKIREFFERLGGDVKVVFEEGTYSAWLYELISPLVSEVFVCEPRHNKLMAVGNKSDSKDARSLAYLLRVDGIKTVYKGDQRQREIKELVRAYENLVSDATRVKNRLKALYRGRGIDCAGRAIYRRSQRDEWLQKLSEPGAHFRAQSLYTELEHIQGLRQAAKQRMIEEARQHPDYRILIRLPAFGPVRVAQLLAVVGTPHRFRTKRQFWPYSGLAVITRTSSDYQLINGKPVKRQKNFGTRGLNQNHNRQLKQVFKSAATTAMHIEPFKQYYQKQLDKGQRSELARLSLARKLAAITLTVWKSRSEFDPAQAIMVAE

SEQ ID NO: 199029 - protein, 507 aa, unidentified
MHREFAQVAVWEDGVVRQVGQIALTDEALRIFADSLGPEDEIALEATCNTQAIVRLLEPHVARVVVSNPQKTRAIAEAKVKTDKVDAEVLAQLLAADYLPSVWVADPATQALRRQVARRAHVVRQRTRLKNQVQAILHRNLIPRCPAADLFGIKGRCWLANQPLPPDEALTVEALLRQLDFHGQELRIIDAELGRVALGSPEVKRLMTIPGVDATVALSIVAAVGDFRRFRRPEQLVSYLGLNPRVKQSGGQPASHGRITKQGRAHARGMLVEAAWVATKTPGPLRAFHDRVRSRRGMQIAVVATARKLAVLCWTMIERSEDYAFARPSLTDKKLRALELRAGMPSRRGQKGKAAAYSLKEVRRRERELAEQAERAYRQLVADWQTKRLTQPKPKAGRGRRQWDATEKALSGASCAAGISPRTCTSLGGRPRPDRSLTPTPLPANNAPFGARTSHTPTRADTPSGPCFAGVPAGERPPHSHQPPPQARGKQLAHPRNRAAGLDTFIR

SEQ ID NO: 199030 - protein, 348 aa, unidentified
MNKKITVGMDLGDQSHLVVAMDEKGKEIEMKTIRNTELSLRKFFSRYRDATVAIEAGTHSPWISRLLKEIGCTVYVGNPRKLRIIWDSNDKSDLRDAKIRAMVCRVEPRLLWPIKHRDRQAYADLGIIKARDTLVQNRVRMINHIRIVTKTFGGRIPKCSTPSFSKQAPPHIPKELKYSLQPLIFSIDLLTRQIKKLERQINRLCKKYPETSKLLQVPGIGPITALAFVLTIEDPHRFTKSRQVGAFLGLTPKRDQSGKCDKQLRISKAGNVYLRSLLVSCGHYIIGPFGPECDLRKFGLSIVARGGKNAKKRAAVALARKLAVLLHRLWISDQKYNAFYSNIAKDTA

SEQ ID NO: 199031 - protein, 311 aa, unidentified
MSFIGIDVSAKTLDVAVEGGAMWQVTNDAAGMATLLTQLGPLAPELIVVEPTGRYHQLLTTTCVQAGLPVAVVNPRQVRDFARSMGQLAKTDRLDAVLLARYAARVQPVPRALPDEATRELAALVDRRRQLVEMLKAERQRLEHARASVRSSLTQHIRFLEQALADANTDLDQWIEQSPVWQAQDALLQSVPGVGAQTAHLLLAHLPELGRLSRRAIAKLVGIAPLANDSGRFRGQRSCWGGRAEVRHMLYMAALTGARHNPVLRDCYQRLLAAGKPPKLALMACMRRLLVILNTMMKTGRHWTVPTPSTP

SEQ ID NO: 199032 - protein, 401 aa, unidentified
MKSVLSVDVAKNKSIAMLMNSRGEILIDSTEMKHDLEDFESMKCKINELHLENLTIFMESTGTYHLAVERYFKENGFNTLVINSLTTKNNYDTIRKTKTDRKDCYRLAKLFFVNEVTYHDLSKKDLYANLKALTRQYFYLTQQNVSCKNRYKRLLNICFPELEEVFKGNRIYEDTVLNFVQQFPHADIIKSKRIDALYNNLYKTNERHIRQYKSIANRIKDASINSYPGVDVNHEDVRNLVDMAKVVQNNNNIIAELKEKMIGIAGESKYFNIVKSFYGIGDVFATELLGELGDITRFDNVKQLIAFCGLDPTIIQSGKSINVHGTISKRGNKYVRWILFNCSQMIVKMCAKQYPEHPVYIYYQSKKAEGKHYYESLTACSTKILRMLYSMCKNNKTFLEK

SEQ ID NO: 199033 - protein, 338 aa, unidentified
MQEVAVVGLDLAKNVFQVHGIDAAGVVVVRKQLRRSQVLPFFEGLSPCLVGIEACASAHHWGRQLMAVVHEVRLMPPAYVKAYVKRGKTDAADAEAIAEAVTRPTMRFVTVKTEAQQAILMLHRTRDLLVRQRTMLINALRGHLGEFGMVSAQGSAGVQAALRSLILEQERLPELAQAALRGLAGQLETLRAEIERLEHQILAWHRQDATSRRLATIPGIGPITASALAASPPDPALFRSGRQFAAWLGLTPRAHSSGGKKRQAGISKMGDGYLRRLLVVGATAVLRMARQRGVGGAWIQGLLERKKPKAAAVALANKTARIAWVLMARQEVYKPAAA

SEQ ID NO: 199034 - protein, 358 aa, unidentified
MAKKSKRRCDTLPVLHPDAAGIDVGASDLYVAVSADRDAQPVRSFPTFTRDLHALADWLEQCGIHSVAMESTSVYWIPIYQILEARGLEVYLVNAQHVKNVPGRKTDVSDCQWLQYLHSVGLLRASFRPPGFICAIRSLWRHRSSLIQMAAEHVLHMQKALDQMNLQIHRVLNDITGVSGLKILDAILAGERDPLTLARLCHGGVKNSEDTIAKSLEGDYRPEHLFALRQSLAAYHYYQKLVLEVDQEIKLQLGELQAAPTAERTTPARTKASAYQRRRYEPKTFDLRGELYRIFGVDLTNVPGISAITAQTILCEIGTDVSRFRNASAFASWLGSVLRRRSAVAKCCSPKADACEAG

SEQ ID NO: 199035 - protein, 529 aa, unidentified
MATNVKSRKTGSGSRSRKFRQAVLGKPGGVIQDRVRRVGPERFGIVAVDCAKARSKWMLADFYGEVLVPPTTVEHQRGPLGLAVLALQRARERHRLEDLVVCIEMTGTYHKPVQRAFRQAGFETRLVHPFASSHYRRPEHGDVKTDDHDLAAIFRAAVNGFGLVENEAVPLYRELQILCRHRRDLVNKKSKLQCQIRHHVEQGLPGFAALFDGDDLWTQATPLPLLQAIAQRGGTPLAVRDAGSKGVAEWLREQGVRFHRKTVERVTVWAANAAPHDAMAAPHTRVWSALLDDWQAKRQQIAALEQDIAAVFVQTPYVLLLSHPGINVVSGAELAGELGPIEHYASAKAISGRAGLFPSRYQSDGVDRGGNLSRFRNGRLRSAWILVADNMVKCNAWWREKAATWKAQGHNSRDIRCRIANRMTRVVFQMVSGRQLFRHPSRLDRGYVLDKLLAFHREHHTPPATIVRDLHHAARQIPAAERASEAEPLKAVAEKTRRSRGPQDLGSLLVAVLARLGVEAADRHTIESA

SEQ ID NO: 199036 - protein, 429 aa, unidentified
MNYNTQNAKIASITEKTLIVGIDVGSETHYARAFSWRNYEYSKKPFAFSNDEAGFAAFKEWMDDIAEKHGMEVIIPGMEPTGHYWLNLGAYLQEQGMKPVHVNPHHVKKSKELDDNNPSKNDRKDPKTIAGLVNEGRFSYPYIPTGIYAEIRNLSNLRIQTQEEITRIKNRMARWFSIYFPEIKDVYRNPDAVSGLMVIKQAPLPCDIRELGVEGVNKIWRDARLKGAGIKRATTLVTAAEHSIGNTEAPRSARKEIRNLLEDYEGYKKRMDELMEEIEKTLSEIPYIDKLMEINGIGIKTVSCFIAEVGDIGRFDNPKRVQKLAGYAIVADSSGKHNGESRISHRGRKRLRYALYEAAISVIGKNKEFKEIHSYYRTREKNPLKKMQSVIAVACKLIRIFYMILTKGVDYDGQKMLKDIVRPEIQPAA

SEQ ID NO: 199037 - protein, 315 aa, unidentified
MERSSAALVFVGIDVAKDRLDVHLRPSDEALAVGRDAAGLATLVERLAATSPQLVVLEATGGFEVMVAAALVAARLPLAVVNPRQIRDFARATGRRAKTDRLDAEAIARFAEAIRPEPRPIPDVAARALGELVARRRQVVEMIGSESQRRRQLREPKLVRRVEAHLAWLQKELSEIETDLDDAVRTSPAWRATEDLLASVPGIGKTSARTLIAELPELGTLDRRRIASLVGVAPVNRASGTFRGRRMVLGGRASVRTALYMPTLTAIRRNPAIRTFYARLIARGRPAKVAITACMRKLLTILNAILKSQTPWQHA

SEQ ID NO: 199038 - protein, 414 aa, unidentified
MELLHERCAALDIGKKDLKACVRTPSPKGKRSRRQEIRTFATTTNALLELRDWLVAEQVSLVVVEATGDYWRGAFYLLEDQLNVILVNAAHAKGLPGRKTDVCDAAWLCQLGECGLLRASFVPPEPIRQLRDLTRYRTTLTAERSREAQRLEKELEDAGIKLSSVATDITGVSGRAMLAALIDGERDPQVLAEMAKTRMRPKIPHLVQALTGNFGEHHAFLCRLHLQRIDELTAAIAELSARIAEQMRPFARQLEHLMTIPGVGQTVAEVIVAETGTDMGRFRTGANLASWAGVCPGHHESAGKRKSGKTRHGDRWLTGALGTAAMAAARTKDTTYLGARYRRLAPRLGKKKALVAIEHSILVAVWHMLTNNVDYHDLGGDYFARLDPERAMRRIIRQANSLGFTVRFDPIQAA

SEQ ID NO: 199039 - protein, 456 aa, unidentified
MAGKGKTRGTAARQLSTVHPHAAGIDVGSTAHVAAVPPERDDRPVRTFQTFSGDLHRLADWLRAVGITTVAMESTGVYWIPVFEILEARGFEVLLVNARDVKHVPGRKTDVNDAQWLQQLHQHGLLRGSFRPRDGLVRLRAYLRHRERLIDYAASHVQHMQKALMQMNVQLHHAVTDITGVTGLRIIRAIVAGTHAPAELAAYRDARCAASEATLREALTGNYRPEHLFALRQALELYEFHQAKITECDREIEAVLQDLTATRVAPAPPLPAARAAKARNEPRFDARPALYTLLGADLTQIHGFGPYTVLRLVGECGDDMRKWPTVKHFTSWLSLAPGNKISGGRLLSSKTRRSSSRAAALLRMAAVNIGKTQTALGAFYRRLAARVGKAKAVTATARKLAVLFYRALRFGLTYADPGSSYYEEHYRQRVIRNLSRRAKDLGFTLVAASPATPGVS

SEQ ID NO: 199040 - protein, 391 aa, unidentified
MTATLAAVTSTNPRPQATPSPVTLFLAFELGATTWKLGFTIGMAQHPRERTIPAGAIAQLLQEIRRAKERFGLPSDTPVVSCYEAGREGCWLHRCLHSHGITNLVVDSASIEINRRQRRAKTDRLDLHKLLTMLLRHQSGERKVWSVVQVPSAAEEDRRHLHRELLTAKRDRTRVVNRLQGLLAGYGIRLALQGDVEAKLDQVRQWDGSPLLPALCNRLKHAWQQVQFLTTHIRTLEAERRAALRRQDDAAVAKVQQLFTLRGVGINSAWLYVMEFFAWREFQTPKQIGALAGLTPTPYQSGESRREQGITKAGNRHMRTMAIEIAWTWRRFQPTSALTHWYETRFGHGSARLRKIGFVAMARKLLIALWRFLKTGVLPEGAKLKGELQAN

SEQ ID NO: 199041 - protein, 371 aa, unidentified
MNNIRFIGLDVHKQSISVAVADGGRSGSVEYLGEIDNDPVAIGKLCARLQRPGKTLSFCYEAGPCGYGVLRQIKGLGHQCDVVAPSLIPRKPGDRVKTDRRDATMLARLHRAGELTAVWAPDADHEAMRDLIRLRGVVRQVVTRARQHLQGFLLRHGRTHGQGTAWRMAYRRWLSTLAFEHPAQQIAFQDYVDAVTDAERRLKGVEEQILKLIPAWSLCPVVDALQAVRGIALVTAVILVAEVGDFTRFANPRQLMAYFGLVPGERSSGETTRRGGITKTGNSYARKALVEGAWAYRMKPRVGRHKVDRIEALPKPVRDIAWKAQVRLCARYRQLSARGKTANVVIVAIAREMVGFVWSIACMVQSAPKAA

SEQ ID NO: 199042 - protein, 334 aa, unidentified
MENIALIGIDLGKNSFHIHCQDHRGKAVYRKKFTRPKLIEFLATCPATTIAMEACGGSHFMARKLEELGHFPKLISPQFVRPFVKSNKNDFVDAEAICEAASRPSMRFVQPRTESQQAMRALHRVRESLVQDKVKTTNQMHAFLLEFGISVPRGAAVISRLSTLLEDSSLPLYLSQLLLKLQQHYHYLVEQIKDLESQLKRKLDEDEGGQRLLSIPCVGTLTASTISTEIGDGKQYASSRDFAAATGLVPRQYSTGGRTTLLGISKRGNKKIRTLLVQCARVFIQKLEHQSGKLADWVRELLCRKSNFVVTCALANKLARIAWALTARQQTYEA

SEQ ID NO: 199043 - protein, 348 aa, unidentified
MGYFAGLDVSLEETAICIVDDAGCIVREVRAASEPETLVAFFKACGLKMERVGLEACSLTAWLHAGLTEAGLPAICIETRQAKAAMGAMPNKTDRNDARGIAQIMRTGWYRAVHVKSPACRSWRALLTARRMVLNKRRDVENGIRALLREVGLKVGTPSRKDFPARVRELVADDPVLMSLAGSLLSVIEVMTGEVEALTKRVLDEVRVEPTCRRLMTVPGVGPLTALAFRATIDRPDRFRRSRDVGAHLGLTPRRYQSGETDVQGGISRCGDELARTALYEAAHSLLIRGTKWSALRAWGMNIAKRRGMARARVAVARKLAVILHRMWVDGSAFRWGKQAAAPVMAAA

SEQ ID NO: 199044 - protein, 348 aa, unidentified
MVVIGVDSHKRTHTVVAVDEAGRKLAERTVATTSEGHLDLVGWSRRWPERTWALEDCRHLTRRLEADLLKAGETVLRVPTKLMAGARRSAREPGKSDPIDALSVARAALREPNLPAARLDGVERELRLLVDYREVLIADRTRHQSRLRWFLVELGIPEPPLRKLAVPVVLAGMGRALVERTEPCARIARDLLTRITELTLAIDALAREIGKLTENLAPTLLELVGCGPLTAAKLVAETAGIGRFRSRAAFAAHNGTAPIPVWSGNVVRHRLNRGGNRQLNVALHRIAVTQLRCPGLGQAYVAKRQAAGDTKTEAIRALRRRLSDEVFRRLQADEAARVGFDGVSRVAA

SEQ ID NO: 199045 - protein, 406 aa, unidentified
MELVALHKRVIGLDVHQAQITACAIIEESDGTTRIEQRQFGAFKRDRRALAEWAAALLPDEVVMESTGIYWKSPYAALEAVGIRAQVVNARHVKHVPGRKTDIGDAQWLATLARAGLLRASFVPPMALRELRLIARQRQKLSGQLSSEKNRLHKVLTDGGIRLGVVVSDLHGQSARAMVKAIVAAQPPHQVLKLASRRLKASREELFDALQGELTDSHRFVLDELMRHIEEIEARIARFDTRLLEGLASEKNALTLLQTLPGVDLIGAAMLLVEIGTDMDAFGSADRLASWVGICPGNNESAGKHKSGRVRKGNLYVRRLLCEFAHAASRTRSVFQSKFQSLVIRRGHKRSIVALAHKLLRTLFFMLKRHEHYRDSATDYEALSVQRNAPRWIKALTRFGFIPATI

SEQ ID NO: 199046 - protein, 386 aa, unidentified
MTQAVDLSRCLVALRQDSTLIAVVELSASSWLVAGMVPGIDGKPLKKLEPDPAGLMGLLARWRAAGLKAGRVIDRVVVAYEAGRDGFWLARWLRARGVEAYVIHPTSVAVSREHKRAKTDRLDTAMLLRVVVGWLRGERGHCGMVAIPTVEEEDAKRPSRERESLVVESTRLINRMKGTLARLGIRGFKPHLRKAEQRLAALRTPEGSAIPPNTLDEIRRDLARLALIRDQIAALEAARLERLTQAPEQGRHAMVLLLARVVGVGVETADMLVQEVLCRELRDEKAVARYAGLTGSPDESGSKRREKGLARSGNARVRRGLIQLAWRLLLFQKDSALVQWYRARTAAPGVRKTTMIVALARKLLIALWRMATTGQAPQGFVLRPAA

SEQ ID NO: 199047 - protein, 425 aa, unidentified
MQVVYSRCCGLDVHKDSLTACVLVFDEHGRRQVRKKEFPTYWQQLQRLKLWLYANQVQHVAMESTGVYWKPVWNILQGHFPLLVTNPYHMKNIPGRKTDQNDAEWIADLLAHGLLRGSFIPPPGIQELRDWTRYRVKLMQEYNRIHNRIHKVLEDANLKLSSVASDILGASGRAIIQAIIRGQEHPDWLADKAMSTLRNKRDQLRLVLKGRITDHHRHLLRELMDDVERVEQKICRVQAEIAARMQPYQPLVDRLTTIPGVDILTAWTLIAELGPDMSVFPDADHAASWAGLVPGSFQSAGKRKSSRTRHGNRWLRRALCQSAWAVAHKKDCYLTAHFYRRASRQGAKKAIVATAHQILIIAFHILRDGTIYRERGGDAFDRMNPARTTKRLSQRLESLGYEVILKPRDPAPPPTPSLPRRPARN

SEQ ID NO: 199048 - protein, 336 aa, unidentified
MRYIGVDLHTTQITVCYLKAEEDFEIRKYQLVEMEKFVNSLELSDEIAVEATGNTRWFCEQVQAAVSRVVVVNPRQFEVVKNSCKKTDKNDALNLARFLRADLLPEVRPKREEATTVQSLVNTRTKLVRLKTSLINKIHALYVSNGRKLKKASLGSEKGLEKVLLSEWSAIERIELEIIIEQIRSLKVSIKKLDKAIEAESEKLKGYESLVSMSGIGSLSAGILLSVIGEVKDFETADKLASYFGIVPRVSNSNETIKTGRITKRGNRTGRTTLVQCSLSAIKKSEYLKKYYEQVKARRGHGKAKIALARKYLGIIYNTLTNNWVFRDFNNFELAE

SEQ ID NO: 199049 - protein, 326 aa, unidentified
MKEQKKRDKVTIGLDLGDRRHRFCVLGCNGEVVEEGSLLNERVQLSALVGRYPAALVVMEAGCHRPWISRYLEALGCEAVVSNPRKVRAIYQHERKSDRRDALMLARIARMEPALLYPVEHGSQEAQQDLLRIKLRDSLVRARVGVINSIRATIKSLGYSVPHSSSERFHKVIKAALPAALREIIAPSVQALEELSLRIKVLEREISALYFVLKIEDPTRFPQVRDVGAFIGLCPRRNQSGENDPQLRISKRGDAYLRRLLVSAAQYILGPFAPASALRQYGLSLAAEGTSRAKKRAVVATARKLAVLLLSLWKNERPYVPFLQLS

SEQ ID NO: 199050 - protein, 338 aa, unidentified
MKVYAGLDLHATNTYVAMIDAENKVLYKQRHRNDVPSILSALDPFKEDIQGVVVESTFNWYWLVDALTDHGYRVHLANVSAIKQYEGLKQIDDRRSSLWLANLLRLNILPTGYIYPKEERPTRDLLRKRLQLVRHRTSHVLSVKNILARNLGIRMKTYDIKKLKASEVSTFFADTEMRLAILSSVGLIQHFQEEIDRIEKVIIKKFKVKQEFKKLLTVPGIGEILGLTIMLEVGHIDRFPTVGDYSSYCRCIRSIHTSNGKVTGYGNSRNGNQYLSWAYLEAAHFARRHHEKIQRYYERKRAKTNKVIAIKAVSHKLARASYYVMRDGVDYDEARLFV

SEQ ID NO: 199051 - protein, 387 aa, unidentified
MKNNSDSKKQPRGFEEWTSPKLAALQEAWRQKQGTEEKLTIGLDLGDRQSNYGVLDQSGEVIGRGQVVTQSQPLEVWLGQMPPSRVVIEVGTHSPWVSRLVKQTGHEVVVANARRVKLISESSRKNDRVDAEMLARLGRVDVQLLSPIQHRSKQGQADLIGVRVRAELVELRTSAVNAVRGFVKSFGQRMPKCDAGVMNRSHAKEVDEAIRAEMELVLEVVEKLNEVIAKADGELKKVNAERYEKETAKLEQVTGVGTLTALTYVLTLEDAGRFRRSRDVGSYVGLRPKSSQSGERDPEMRISKEGDVYLRKLLVQCAQYILSKRGPDTDLKQWGLRIASKGKKKAKRRAVVAVARKLSVLLHRLWVSGEVYEPLRQRQRRQHTVAA

SEQ ID NO: 199052 - protein, 350 aa, unidentified
MLIIGCDLHTRFQQIAMVDTTTGELVTRRLEHENGEARKFYAGLGEKARVGIEATGCTQWFERLLAELGHELWVGHPAEIRARAVRRQKTDTRDAEHLLELLLSNRFPRIWVPSVEERDARQMLQHRDKLVRMRTSLKNQLHYLAMSQGVCRKRQLWSERGRQELERLQLGPWASRRRQALLELLDRLEPRLEELDQAVKAAAEGHAQAVRLMQQKGVGPVTALAFVLTLGPVERFANSRKVVSYLGLNPREDSSGGSQRLGHISKQGNQMLRGLLVEAGQSAAQHDPQLRCKYQRLRFRRGANVAKVAMARQLAVRLYWQLRQAPNAAPPVRTPGSPARTLVDANPPTC

SEQ ID NO: 199053 - protein, 359 aa, unidentified
MTSEIKYIGMDVHKEAITIAVRNGSGKLVMESIIETQAATILQFIQSLRGELHVTLEEGTWAAWLYDLLQRHVHELVVCDPRRNALLKEGNKNDKVDARKLSELLRAGLLRPVYHGENGLRTLRELARSYSTLSKDMTRVMNRLKALYRGLGISCGGIQVYDPRYREQWLEKIPEAGVRRRAELFYGHLDGLHALRQQARRELLSESRRHKASKKLREIPCIGPIRAALLVAQMQTPHRFRSKRQLWNYSGLGVRTRDSAQYRYVRGQLQRSKKPQQLRGLNQNHNHQMKEIFKSTATSTTRCAGPFQDFYARLLAKGMEPDMAQLTLARKIAAITLTIWKKGDRFDANQLNQLNVQAA

SEQ ID NO: 199054 - protein, 486 aa, unidentified
MAYSAYTEVASPAVAPAKNADWMNAHYARFQSPYAAQDKPSLKTSQIQIRKERDNMIKINYMSTLFVGIDVSSKSNVVCAMDFDENQYISSSFKNNQPGADELAKMILECMNTHSNLNTIVVALESTSVYSIHIANFLSTCEVLMPYKPYVFCLNPKATANYRKSYIAMEKSDPMDAYLIADFARCGRTKKCEPWRGGQFLALKRLTRHRLHLAECITREKTYMVSNLYLKFSELQLLDDDKQPFSNIYGATSSAVLTEFMSLQEIIDASEEDLLQFLSQKSRNRISDISKTSELLKKAARDSYRLDKCMYEPLNVSLASSFNCIQTYQKEMKLIDQAIEKCINGMNPNAFTILKSIPGIGPVWAGGILSEIGDINAFHSSDALAKYAGLIWLKNDSGDFVSEDNRVSKAGNTYLRYYLGEAANSVRRHIPEYKEFYSKKYAEVTKHQHKRALALTSRKFVRLVFGLLVKNQLYTGEKLDAEFNNE

SEQ ID NO: 199055 - protein, 330 aa, unidentified
MKNWNFILGVDVSKLTLDIHCAELNEHIQIANGTEGFKGFKKWVKELRIDLEKSIIVMEYTGGYEYKLIQFCESLSIPYTRIPGLAIKNSLGITRGKTDKVDSKRIAIYADEKIKSISPDKPLNKRILQLKEILSFRKRLVRTNAGLKASLKERLFMYDITSKDIIKKITEHSIKKNKADIKKLDIAMEDLVKDDPDMLKNFTIIKSIKGIGPVNALMTIAYTENFTSFSNPRTYAVYVGVIPFDHSSGTSIYGRKRVSHIANKELKQELNQAAKTAIQWDKELSAYAYRKLQSKPYPIVLNNVKFKLILRMFSLVKRGALYVENYEKAA

SEQ ID NO: 199056 - protein, 321 aa, unidentified
MSEIGFTQVVSRGCGIDVHKKTVVATIKGEGLKSQTREFSTFTSSLTLLKEWLLSEGITHVAMESTGVYWKPVYNVLEPSGLVVWLVNARHIKYVPGHKTDKKDSAWLCKLLLAGLLKPSYIPKKEQRVLRDLTRYRKKLIEQNASEQNRIIRILESCNIKLSSVLSNVQGVAGTKLISKLCDGEPVTRADIDQIYHSKMLCSRDDLYEASQGLIEEHHIYLLKTIRANIAHTESVILGLTKQIRELLEPYENKVEQLRDIPGLDRKTIEDLIAEIGLDMSVFPTEKHFASWIGICPDNNESAGKKKVDESHTETNRPKLP

SEQ ID NO: 199057 - protein, 337 aa, unidentified
MQMYAGIDLHSSNNYIGIIDEQDKRIFGKRMDNHLPAVLSVIEPFKKELKAIVIESTYNWYWLVDGLQDYGYKVHLANPSAIKQYEGLKYTDDKWDSFWLAHMKRLNILPEGYIYPKEYRSLRDLLRRRMLFVQQRTSNILSLQSMITRNLGIRLSGKAIKKLKAEDASQMFNSNLAFMASNHIGIIHFLNKTIKNIEKEVISQVKLKKGFNMLRTIPGIGEILALTIMLEVGDIKRFAKVGCFSSYCRCVKSERISNGKKKGKNNNKNNNKYLAWAYVEAANFAIRFSLEAQKFYQRKKAKRNNIVATKALSNKICRASYYIMRDHIPFDEARLFG

SEQ ID NO: 199058 - protein, 389 aa, unidentified
MKIYVGIDIAKLNHFAAAISSDGEIIIEPFKFTNDADGFQLLVSKLESFDKNSLIIGLESTAHYGDNLVRYLVTELYQVCVLNPIKTCQMRKNNVRKTKTDKVDTYVIAKTLMMQDNLRFVSFFDLDMMDLKALGRFRQKTIKQRTRLKIQLTTYVDQVFPEIQYFFKSGLHQHAVYALLKEAPSPKEIASMHMTHLANLLKVNSHGHFTKELAKELRVLAQKSVGANDSAISIQITQTIQQIELLDSQLEKIEAEMTDIMKFNDSVIMTIPGIGYINGGMILGEIGDIHRFSNPNKLLAFAGLDPSVYQSGNFQAKTTRMSKRGSRVLRYALVNAAWNVVRNNATFKAYYDAKRAEGRSHYNALGHCSGKLVRVIWKMLTDNVEFNLK

SEQ ID NO: 199059 - protein, 422 aa, unidentified
MGKHRYKTVGFKALDWAGLSERLAGRRVVFSIDVAKDDFYAALMTAEDALEALIKWVHPRETTALLAHLSALAQVAQVEVVMEPSGTYGDALRWQLTQRGLGVWRMGPKRVHDAAEVYDGVPSLHDAKAAYLIGRLHWQGVSRPWREADAERRALLAEVSLVDLYKARHQAGTNRLEAQLSRHWPEVLRVLGCKSVTLARLLAQYGDAAHVAADETRARELMRHSGRSVLGAERIEAVLASARTTLGVPCVEAERCLVQELARDVIETAKRLREAERTLERRATEDATLTRLSAVVGVTSSAVLMATQGRPQDYSSPASYVKGLGLNLKERSSGKHVGQLKLTKRGPGVARHYLYFAALRQIRRDPEIRRWYQARIQRPGAVRGKSVVALMRKLAQGLWHVARGQPFEPGKLFDSKPQAGAA

SEQ ID NO: 199060 - protein, 337 aa, unidentified
MQSVIAFDVSMGKSYMVIYNAARSCIFEGEILHNRPHFEQLNKQIIDLVQKDGQVPAIVFEATGVYSRPLERFMNDHGFQYCLLNPLESKIQTATMRIHTTDKSDAHRLAQTHFTTERRIKKPQDNYFDQMRALSRYYHELDEELAMFRSRMHTLLQLTFPEMESLFTQKSELFLNILQLFPHPDCVKNLSKTVVRNRLLANTDKKLAPKTAEKKAIQLIGAAQDSYPAVDQDDIRCEQLKDYAKRSLAILRKREELIQQMVDLSKERNEYQILISIPGIGKNTAVRLIGEIGDITRFENHKQLNAYAGIDIKRFQSGTLFYKDKINKRGNSHLRGF

SEQ ID NO: 199061 - protein, 420 aa, unidentified
MDVVLERCAGIDIGKDEVVACVRTPSATGKSRRKETRTFLSFTGELEAMADWFAAEGVTEVVMEATGSYWKPVWYVLEERAFELKLVNARHVKILPGRKSDVLDAEWLAELLEHGLLRGSFVPPLAVRELRDLTRYRKRLVQAHTSECQRIQKTLEDAGIKLDSVASDVLGVSGRAMLAALVGGERDPEVLAELSKGVLRKKIPELRQALRGRFRDHHGLLIGLCLEHTAHLEAAIATLDTKIDALFAANTSEAGVPFERARDRLDTIPGVGKRAAETIIAEIGVDMTRFPSAGHLASWAGMAPGTNITGGKRQSGRTTKGDVWLRDMLTQCAWSAARTRDTYLSAQYWRLARRIGKKKAAIAVGHSILVICWHLLTEDTDYDDLGGDYFTRRVNPDRHRDRAVQQLHELGYQVTLKQTA

SEQ ID NO: 199062 - protein, 411 aa, unidentified
MDKVYDKCCGIDVHKKLIVACFRKGNKQEVREFGATTRELLELSDWLKSGECEIVAMESTASYWKPLFNILESSDLNAIVVNAHHMKAVPGRKTDVKDAEWIADLLQHGLLQPSYIPDKSHRELRELVSYRKSLVGERSRELNRLQKMLEGANIKLSGTVRDINGKSARNILEFLITGESIDDAKYDEMYEKKIIAHNLKASKEQIIDDLNGVMTALQRRMMKELLVHLDELNVHIKNLNDEIDNYMKPEEKQAVAFIEEIPGIGHTSAQAIISVIGTDMSRFATDAHISSWAGLCPGDNESAKKRKSGKTRKGNSLLRSTLVICAHSCIRNKRSYFYAQYMRISAHRGRNRAYVAVAHSMLVAIYHVLKDGVVFNDLGADYYNQFNKERKINAYLKKLKALGWEGPIVAA

SEQ ID NO: 199063 - protein, 345 aa, unidentified
MPIVGGLDIHRKQITFDYLDTVTGEVKRGQITPADRKHVRAWLARFAGRGEVAFALEGCTGWRYIAEELAAAGLEACLAEPADTAAARGRKRHAKTDKTDARHLRTLLAEGRLPECWIPPAHILECRALLETYHDLRAEHTAWVQRIHAVFFHQGAPRLGEGMLRTEQDLAGLRAAAAAHLSPAGQLQVATALDMLAAVEARLGPLRRQLLDAARHLVGAKVLAARLYGAGPITALALTCWLGGKDRFSSSRKAVRFTGLDVTVHSSDRKGPPGRLSRQGPPVLRWAVYEAGKTHGRTSAPDHGYYATVKDRKNGKRAALSEARKIVRQACHILAELGDDALTTT

SEQ ID NO: 199064 - protein, 346 aa, unidentified
MTMKCMAGIDLHSNNLFCAIVDMDGKRVFEKKLPCDLESVLRALKPFKRRLEKIAVESTYNWYWLVDGLQDHGYAVVLANPAGMQQYDGLKHADDKSDGFFLAEMLRLKILPTGHICERQWRSVRDLLRRRMGLVHQRTSLILSLKSLHTRLTGRELGTGRIKTLAPQDAEKLFQHPADQLITRLDLHLVEQLGQSIQQIETTILAEVKGLPNYQVLQTMPGVGKILGLTITLETVDPKRFASPGDYASYCRCVDSRRMSNGKKKGENNGKCGNKYLAWAFVEAAQLARRHDLACRKFHDRKSAQVNKIVATKALACKLAKAAWHMMSRNTPYDSGRIFPGVPKPI

SEQ ID NO: 199065 - protein, 324 aa, unidentified
MNKNKQFCGIDISKDVFDVVDHEDNHHQYPNDQSGFKEFRKILTKQSHCVMEVTGSYYQGLATWLHSKSIDVSVVNPLSVKRFIQMRLKTSKTDKADARMIRLYSEAENPDLWQPPSEYIIEANELHRLISLLLRQRTALKNKLHSLRAKGITKSLVITSVRRQIRNLDNEVSTLEVKLEEVVKAHQADLITRLCSIPGIGKRTAIYLIVLTQGFEKFETSRQLISYFGLDPTIHESGSSVRGKSRISKTGNNLIRNLLFMCSFTACKHNKSCREIYQRIIAKGKSKKLALIAVANKLLKQSLAIAKSGLYYDENYRSVNLNNM

SEQ ID NO: 199066 - protein, 344 aa, unidentified
MTIVESTRPVTGGVDTHADVHVAAAIDGNGGVLGVRSFATTPAGFAELHGWLTGFGVVARVGVEGTGAYGAGLARFLRARDLEVIEVDRPNRQLRRRAGKSDTIDAIEAARAALSGRASGIAKTADGDVEAIRALMVARRSARDVRIKYLNQIRHLGFTAPDELRERLRDVPADQLARTAASLRPGAGTVMHATKLAIRTLGRRVLDLEADAHHLDQLIDDLVCRTAPTLLEIHGVGTHTAAILLVAAGDNPHRLHSEAAFAHLCGVAPLPASSGKVIRHRLDPGGNRQANHALWRIVFTRMSSDERTRKYVARRTSEGLTTREVMRVLKRYVAREIYPHLAHT

SEQ ID NO: 199067 - protein, 339 aa, unidentified
MKLYAGIDLHSSNNYIGIIDEQDQRLYQKRLPNQIEYILPALEPFKKDLTGVVVESTYNWYWLVDSLQEQGYKVHLANPSAIKQYEGMKHTDDKWDSFWLAHMKRLDILPEGYIYPKEERHVRDALRRRLLFVRHRTSHILSFQSAITRNLGYKMSSRDIKKLDQSDADRLFNDPFLVLTARNNISVIRFISEKIKEMEEAVKSHVKLKPEFEYLLTMPGIGNILGLTIMLEVGDINRFPKVGNYSSYCRAVKSERLSNKKKKGEGNRKNGNKYLSWAYVEAANFAIRHYPEVQSFYKRKKAKRNGIVAIKALSNKLARASYYVMRDRVPYDANHLFRS

SEQ ID NO: 199068 - protein, 355 aa, unidentified
MNSEKYIGLDVHQATISVAVLDSKGKLVMESILETKAATILEFFAGLRGTLSVTFEEGTWAAWLYDLLKPHVAKLVVCNPRKNALLKQGNKSDKIDDRKLADRLRLDDLKPVYHGETGVRTLRELARSYLTIVKDLTRVMNRLKALYRSWAIPCAGRDVYYTRHRDEWLSKIKEAGVRRRAEQLYQQLDMLQHLRQQARRELLAESRKHSITAKLRQIPSLGPIRSALAVALIQTPHRFRSKRQLWAYSGLALETRTSGEYRFVNGQLRRSKKQISIRGLNKDHNHDLKGLFKAAATRASFQPGPFQDFYQRSLAKGIKPTMVRLTLARKIAAITLTLWKKGENFDVEKLKSQAA

SEQ ID NO: 199069 - protein, 359 aa, unidentified
MNLLKSVVGIDISKDDFHVCLKQLSDHVVVKGSRSFSNTPEGFNAFSTWISSKVKDLSTLFFVMEATGIYHENVTHYLYSNGFSVSVVLANKIKYFAKSLNLKTKTDKADASMIASYGLERNPDLWKPMIPQYATLRQLSRELSALKKDLIRYKAQRHALSYAHDILQFVSALKDEQISFIEKAISTVEEELLRTAKGDIEFDKRVKKLETIPGIRRISILIILCETNGFELFSNIRQVVSYSGLDITEKQSGKFNGKSKISKKGNSRIRHCLYMPSLTACRYNVPIKNLYDRIIEKNPTTKKKGVVAGMRKLLSLCFVLWKKNEVYNIDYQWNNKQTSGNDEAMLSYSPGSKIQIEKE

SEQ ID NO: 199070 - protein, 422 aa, unidentified
MNVKSNVGEPKLAAFIGLDWGDSSHAVALADADGNLLEQRTLVHSAEQIHAWLQSLKSRFGGRTIALALETSKGPLIHVFSDVPWLVIYPIHPATSARYRKAFTPSGAKDDQPDALLLLDLLIHHRQKLRPLMLEDGPTKLMGRLCELRRKTVDRRTQLTNTMRAVLKEYFPQALALVGEVLYTPLALDFLERWPDLVSLKATRPGTIKRFYYLHNVRRPQAIQERLDLITKAVALTTDEAIVKVAVRQLQRLIEELRLLQKHIVDDEKQIRVLFKDHRDAALFRDLPGAGPALAPRLLAGFGTDRSRYQSAAEFLRYSGVAPVKEKSGGRIWIHWRWNAPRFLRQSLIEWAGQSILYCSWAKAYYQQQKAKGKRHWMILRALAFKWVRILWKCWTTYQPYEEARYLQSLIKRKSLLVHDAA

SEQ ID NO: 199071 - protein, 322 aa, unidentified
MAVVMIGVDPHKASHTAVAINAAEGPLGEVQVQACAVQAERLLGWAAAWPDRTWAMEGAGGLGHLLAQQLLAAGEQVLDVPPKLAARVRLLATGDTNKNDPNDARSVAVAALRSRGVREVSRDDHAAVLKVWSKRHRDLGRTRTQVACRLHAVLCELIPGGVSKQITAGQATQLLTSITPSGAMEVARRELAAEFTEDLRHIDTQIRDTRKRLATAVAAAGTSLTGLFGVGPVIAAAVIGDVRQVSGFPGRDHFAAYNGTAPIEVSSGQRKIYWLSRRGNRRLNHAIHMAAVTQIRNRHSAGRAYYDKKLAEGKTAKRPCAR

SEQ ID NO: 199072 - protein, 402 aa, unidentified
MQFFVGIDWASQAHAVCVIDATARVHWQGSVPHTAEGLTECLGRLRRLRRRGPVRIALERPSGLLVDTLVDAGLEVVPIHPNALKASRPRYSAAGGKSDPGDAFILADLLRTDGHRFRPLRPPSDDTRALRALVRGRDDLVAQRVALANQLRALLERFWPGAAAIFADIDSPIALAFLLRYPTPHSAARLGDKRLAQFLGQHSYCGRRPVAELLARLHRAPASLVGEAEAEAGGEVVRALVAVLTPLVAHIQQLSAAIEAALSQHPDGRLVQSLPRSGAVNAAQILAELGDDRGRFPTDEQLAAEGGLAPVTHASGQHHAVVFRWACNKRLRRALTTFADNSRHASRWAALIYQRARARGCRHQHAIRILARAWVRVLWRCWQDRTPYDVSRHRAAQAGAAA

SEQ ID NO: 199073 - protein, 473 aa, unidentified
MDNKLPLLDPLAAFVDVGSEHMHVSVGGDTPKVFGTVTSQLHALRDWLLSEGVHSVAMEATGVYWLPLYGVLEAAGLEVRMVNGRQTRNLPGRKTDMADSQWGATLHMHGLLHAGFVPAADIRRLQDYLRLRADHVASAASCVQLMQKAFDRMNIKLHDVISSLSGVSGLAVVRAIVAGERSPEAPAALCAVQIRRRKEQAVIEALRGTWANEHLFLLEQALQSWDHYHKLIADCDTRIAAVLPPDDEAPPPLPKSTRKTSVNAPHITRLREKLAQMCGGRDLTRLPALSEYGVLQLIGEVGTDLSIWPSEKHFTAWAGLAPGSHDSGKRKKGVRRGRNRTGQLFCTMAQSLVRSKDIALGGFYRRLAARRGGLIATKALARKLAGWFWRVMVKGDDYVEQGLARYEEQVRNRQGTRSEAACKGIGTTTGSAIKCCSRNGMKTMDAGDVHGKLMRKIISDIAEMVESSMAYAK

SEQ ID NO: 199074 - protein, 343 aa, unidentified
MQTVTTIGLDIAKSVFQVHGHDGAGQVVIRRQLKRRSVLAFFQKLPPCLVGIEACASAHHWSRELQALGHKVRLIPPAYVKPYVKRQKNDAADAEAICEAVTRANMRFVPTKTPEQQSGLVLHRTRHLFIRQQTAVINAIRGHLAEFGIVAPVGRHGVEELLNVLADPNDKRVPELARACLSAFGAQLRRIKEQVLEFDRLIRAWHRSDEMSMRLDEAPGVGPVLATAVVATVADPKSFRSGRNFSAWIGIVPKQHSSGGKNRLGNISKQGDRYLRGLFVAGALAVIRYAKIHGTKHRPWLTALLARRPTKVAAIALANKIARMVWAMMAKGERYKEPVALAA

SEQ ID NO: 199075 - protein, 343 aa, unidentified
MDYFAGLDVSVKETSVCIVDDAGKIVREARVASEPEALLQVLTNTIYRFKRVGLEAGPLSQWLYSVLAEAGLPVICVETRHMRAVLKAQINKTDRNDARGMAQMMRAGLYRPVHVKTLRSQKLRVLLTHRKLLQSKAIAIENELRASLRNFGLKVGMIGTMKFEARFRELVERLPDLAVLVEPLLIVRRVIREQLGILHRRLLAIVRDDDVCRRLMTIPGVGPVVALTYRVTVDVPARFRKSKTVGAVFGLTPAKYQSGENDRTGAISRCGDEMMRIMLYEAAQSMLVRTAKWSWLKAWAMKIARHRGMKKAIVALARRLAVIMHRIWVDGTEFRWTRELPVA

SEQ ID NO: 199076 - protein, 372 aa, unidentified
MKKISTAAAKQIRNFSQPKLTIGLDLGDRSSWYCMLDERGEVVLEQRLGTTPKAMKEVLGGMPRSRIALETGMHSPWVSRVLSELGHEVIVAHARNVRLIGESRRKDDRLDARTLARLARIDPQLLCPVKHRSARAQADLTVIRARTGLVRARTALVNTARGLAKSYGERLRGCNVRNMNPEKAEGLSPELQRALEPLLAGIESLSERIRECNERIEQLAQESYPQVAVLKQIKGVGTLIALTFLLTLEDPHRFHKSRDVGCYLGLQPGRRNSGQSEPQMHISKEGDPYLRTLLVQGAQHILGPFGADCDLRRWGLKLAERGGKSGKKRAIIATARKLAVLLHRLWVSGEVRTVAQQQPESDAGSGIKSKHS

SEQ ID NO: 199077 - protein, 381 aa, unidentified
MKTVHTKRTGQAGRPSVGADRCVARVVPSLLPKSSNSCQGYPSPHLSQGRASLEQIKSIKEDCLLEAPLIFVGIDVSKAQLDVAIRPSAQSLSVTNDRAGIKSLIKHLKKLRPQLVVLEATGGLERQVLSALIAGEIPVVMANPRHIRDFAKSIGQLAKTDRIDASVIAHYAEAVRPKPRPLPDEASLELRALSARRRQVVDMIVAEKNRLATASKVVKKRITAHIAYLEQELNDADQDLDRFIEKNAAWKQNQQILCSTPSIGPVSSPTLLVELPELGALDRKKISALVGVAPFPRDSGTLKGRRTIWGGRASVRSALFMATVVATRFNPVIRDFYKRLKAKGKPSKVCLVACMHKLLTILNAMIKNKIRWSENFTRQTT

SEQ ID NO: 199078 - protein, 402 aa, unidentified
MTNPIPHAGLVGGIDSHTDTIHVALIDKLGRDVADHEFATTNSGYRAAVAWLVGHGQVALVGVEGTSSYGRGITTALAGAGIRVVEVNRTRPAERRRAGKSDRLDAYRAARSVLSGEATTPPKDGTVEPLRALMVARRSALKAQQAAWRQIGALLVNAPARIRDSHRDLPPARLLAALVGCRPAQVADADHADILYALRTLARRHRDLTTEIEELTGRIGARAAAANPALLAIKGVGPVIGAQLLLTAGDNPERLRSGPSFAALCGTAPVPVSSGRTDRHRLSRGGDRAANSALHLIVNNRMSNDARTRAYRDTHLARNWTKKDVYRSLKRAVAREIYQALVGRSTVPDYSDLRPARHAKNLTLAAAATDLHVWPTAISQLERGKRRDDQLAQAYRQWLNAA

SEQ ID NO: 199079 - protein, 342 aa, unidentified
MEHYAGIDVSLECSSVCVVDGSGKIIRETVVATEPEALIGWFGRLGLGLARIGLEAGPQSQWLYAPMKQAGLAVELLETRHVRDAFKAMPVKSDRNDARGIAQLMRLGWFRPVHCKSIGAQQVRAVLTARKLIQSKLLDIENSLRGILRGFGLKVGKTTARSFAGRIQELVRGQPDLETIAQALLSIRAIALREFNAFEKRVRAMARSDARTRLLMSTPAVGPIVALTYAAAIDDPARFKSSKQAGPHFGLTPKRYQSGETDYSGRISKIGDAAVREALYQAAHVMLTKPVKGCSQLKSWAMRIARRAGRSKAKVALARKLAVILHRMLANGTTFNPAAAAA

SEQ ID NO: 199080 - protein, 342 aa, unidentified
MKQYVGLDVSQRETALCVVNETGQVIFEGKAKSNPGALTDLLSKHAPHAERIGFETGAMASWLWHELRRVELPVVCIDARHAHAALSVRMNKSDQNDARGLAELVRVGWYREVKVKSEESQKIRAILVARSRLVSMRRDIENQVRSLIKECGLLFPRAIGQQFRNQVSELLGVDHLLLSVISPLLSIHENVCQQQGKFDNEVRRLAKLDETTRRLMTVPGVGVVTALTFRHTIDDPSRFRSASTVGAYLGLTPRRSQSGETDTNGKISRWGDRLLRTYLFEAATVLLYRTKKWSSLKAWGMKLAKRIGMKKAKVAIARKIAVILHCIWVDGTSFDWGQPKPI

SEQ ID NO: 199081 - protein, 336 aa, unidentified
MSKKATLKQCLGIDVSMKKIDCCLSFYTEDLKIKVVATSGFENSPDGFIKLREWLNKKQDNGLALYVNMEATGTYHEEAAYFISGVGYRLSVIQPTKGKQYAKSLDEKNKTDKIDAGMLARMGLERELTLWSRPNETLRILKRMSRERIGLIRDRNALTNQLHALNHSFDAFADSVERLKERIALATKQLGDIELQMRKVTESDPELSKKTKHAITIPGINFVTAITVIAETDGFANVGNRRQLVSYVGLDVVMKESGTLTWRPHISKRGNAYIRAGLYMAAVSSIIHNKTLKAYFNRLKDNGKPGKTGIVALERKLLVLIYTLYKNGQDYSPDHR

SEQ ID NO: 199082 - protein, 425 aa, unidentified
MKALKSHVAGIDVHKEMLAITVLIGELDGEPKEYQFESSTFTDDLMALGLKLKEMGVTDVAMESSGIYWKPVFNVFNPLGLKVVVANAAHIKNVPGRKTDMNDSRWIAELHRFGLIRASFIPDGEFQRMRLLSRHRTNLTEDLARVKNRIQKVLEDGNIKLSIVVSDIFGVSGLKVLKQIAGGYTHPNILITEVTTKIKRMEEMKKALTNCLTTEHCFVINVLMKQYEELKNRIEEVENELCKKVEPYAHLVEELDKIPGIDAILAMGIIAEASANMSSFKDERAFAAWSGVASGNNESAGKKKRAKCRKGNPALRKMLIQAAQGAIHCKKSFYRSKYNKLSFRLGSKNKAKVAIANKIARVVYKVLAGNQYKDLGYMRGDPREERIKKLLFELKSLGVEIQNHTHQNIYSKRDVKVEASGIVYS

SEQ ID NO: 199083 - protein, 371 aa, unidentified
MKKSSTTLYIGLDVHKDSIAVAYAPELRGTEIISLGSIGTRQCDIDKLIRSLQSKASCLLFAYEAGPCGYGLYRYLTRKQFTCHVVAPSLIPKRPGDRVKTDRRDAAMLARLLRAGDLNPIYVPQIHDEAIRDLSRAREDAMHDLKSARFRLKAFLLRQDIRYTGRANWGPAHLRWLAEVVCPTPAQQIVFQEYVRSVSEQQERLQRLEVELREQVGDWRLYPVVQALQALRGVQFTVAVTIVAELGDLTRFDNPRQLMSYLGLIPSEYSSGTQRRQGGITKGGNTHARRALVEGAWAYRYPAKVSRHLQLRLEGLPKAATEIAWKAQVRLCKRFRQLSARGKNANQVVVAIARELAAFMWAIARTVPLAP

SEQ ID NO: 199084 - protein, 322 aa, unidentified
MSLPNPLCVGIDVSKATLDIAATSEFGQFTTGNDADGFDAIIAELRKHSVTLILMEATGGLESAVVCSLQAEGFEVAVVNPRQARDFARAMRYLAKMDRIDARVLAQMAEVIHRHPERERFIRALPDAERQALAAMVVRRRQLITMLVAERNRLHPAHPQSRKSINIIIQALENELARIDEDMNRHIQSHFKELAKRLISIKGVGTMTAAALLAEVPELGSLSRREISALIGVAPVNWDSGSMRGRRTIFGGRAGARTALYMAALVATRFNPVIKAFYMRLLAAGKAKKVALVACMRKLLTILNVMLRKNEEWNESYHHVAP

SEQ ID NO: 199085 - protein, 478 aa, unidentified
MIHSVGIDLHKGRHRVYCLDEKAQPCDAFSFQTTPEGLTTLEERIFRDGSNPVVVFEPAGLAWLMVAAYLRSWHPECRLVKAKGQKVAALRRYLRGTAKSDRIDALTLAKMPFIDPERLDELYLAPAETHALQRLIRQRKRLQDQITAHKNRIVAIIDGYLPGIRQAFSRPWSAQARAFFHSRINPFAVVRDGEEALHTFLAQAKPQSKGGRAESYLVYRACQNVLALQELCQAAGPFNEDFFIDLQEEIDRELRLMEAQEAESEALDQRIEELYKKLHPSDNLRTIPGVGEHTAPVFVASIGDPTRFPGQSAFANWTGVVPGAKQSSDVESKGLRMTKAGPAIMKWALYQAGQIGRQWDPQLASVYYRQMVHHGKNHKQAMGAVMSHMGARVFTVLREDRPYELKDTEGKPISKAAAKALILAKYQVPEDMRQERRRRKGRRANTPGSRKKEGMAAGRVHEAAVAPQPAATIPSPGT

SEQ ID NO: 199086 - protein, 342 aa, unidentified
MEITTVGLDLAKNVFQVHAIGSTGEVVVRRVLRRAQMMPFFGKLAPCLIGIEACGTSHHWARELVRLGHEVRLMPPAYVKPYVKRGKTDAGDAEAICEAVRRPTMRFVPIKSVEQQAALSLHRTRDLLVRQRTQLVNMIRGLLAEFGIDLPKGITHALAFVRRVVVGEAQEVPQLVAKVIGALAEQALEGQHRIRQLERDLLAWYRSNPLARRIATVPGVGLLGATALAATVTDPTQFRSGRQFAAWLGLTPLNNSSGGKERVGRISKMGDQYLRRLLVTGMTALVRRNLHHPEAADPRIAALLARKPVRLATVAMANRTARAIWAIMVRGEVYRAPQSAAA

SEQ ID NO: 199087 - protein, 364 aa, unidentified
MNKCHLNTELSSHEGTRCQFNGGRCAIKLGIDVHQDFYVVVEQMGGTNPKPPQRFGKQAFLSWAAKLKQSGAEVQAVYEACGFGFALQRQLSALSIVCHVVCPQKLDERNKRVKTDGLDAKALCLKLDRFIQGNRDAMALVRVPTEQEEQLRAIHRQREQLVGARKRLEAQGRSLMVNHGLEPVKSWWKRGNFGALQVPEWMKELLLNSQPILLGLQQKIAALTLQLQVAAASKQPRGLGAMTSVIIDREIGDWNRFNNRRQVGSYTGLCPGEYSSGNTRVQSCVTKHGNPRLRAALVELAWRLVRFQPSYKPVLKWRAILAKGALATGAARKKAIVAVARQLAVDLWRVRTGRCKPEALGLEI

SEQ ID NO: 199088 - protein, 331 aa, unidentified
MNVFWDCLGVGVDVSKAELVVVGITSNESYIKRVSNEMKAIRALAKGLQDSGYQGQIVCESTGHYHLKLAVVCHQYGLPLIVINPLQSSKHSKAGIRKTKTDPEDARMLATMCITEPNLPGPAELTLDNALIRLTMGQLASIEKQLQQQQQSLAQYEETYAELGLEPSETQQALRTHCKALKRLQKQFEKELEALLLQSKPDDEAAHKLHAIPGFSPVVSGLVGQFGRDVKGADSWVAYVGLDVSVRESGTWKGRGKLTKRGNAYLRKRLFQAAWGACMNYDYVRAYYDQLKSQGRKHVEAVCIIARKLLRIAYHVVTKGIQFDQKIAFGN

SEQ ID NO: 199089 - protein, 429 aa, unidentified
MNCTQNKKIEQVKETTMIVGIDVGSEKHYFRAFNWRGIELTRKPVAFSNSMEGFNSFYNTIVELMQKSELEEALVGIEPTGHYWFALGQFMGEKDIKFVMVNPHHVHKTKELDDNSPSKNDRKDPRVIAGLVRDGRYFYSYMPTGAYAELRNASNRRFVLVEEQTRAKNRLQKWIAVYFPEYKGIYTHIDAKGGMLVLKKAPTPEEIVRLGVEGIIKIWKDAKLRGNGHKKAMLILAAAMRSIGLKAGLTEARMEIQDLIEDYELQTKRLERVNDLIKGLCQQVRYADKLLEIKGIGITTVAGFIAEVGDITRFDSTKELQKLAGLELVSDSSGKHNGKTKISKRGRKRLRYLLFEAAISVVGKNEEFKEIHRYYTTREKNPLKKMQSLIAVACKLIRVFHAILTKGIRYDASKMLKDIRHPGEQLKAA

SEQ ID NO: 199090 - protein, 328 aa, unidentified
MNSICLSTEQVILPVLGLDVAKKSIQAELRIAGKNVRFGFANNPKGFAQLARILDQHNAPKIWAGLEATGPYSHALALWLHARAHRVSVLNPRRVKQYARSAGNRNKSDRLDAAVVADFLCAHRPAAWRPPLQELVQLRALVRRREELSLMLQAEKNRLEGVPSQVRCSLKRIIVTLCAEKARVEKLIRQQIRSHKQLCRDHQLLCTIKGIGSLTAAILLAEMAGPGQVQRARQAAAHAGLVPRHEESGTSVRRNRGIGKEGNRYLRKALYMPALVAIKYNAPLRYFASRLRAAGKPKMKIVCAVMRKLIHIAFGILKHQQPFNPSLA

SEQ ID NO: 199091 - protein, 526 aa, unidentified
MKETIVKHLPPSQLGNDRLRPTVGFIIMSLSGARRRHILGVIPSPGTSLRGGASGLADNRYGMPFPGQARGFIWLPGGYFNLGRRIEAPEPESVVAKSQPEIRAPDFNLEYSMKAQPESRTIHRYVALDLHKEYVMTGAMNAAQEWVLRPRKVEMMRFREWAAANLRQGDAVILETTGNVWDIYDIVAPLVTRTVVAHAGAVRQIAEARVKTDSEDIKRLLRLLIADIVPEVWVPPAPVRELRSLISYRNRLVKTATMIRNRLQSLLHRHNLKLGENGLTDAEWWESQPLSALEKLQVRQELALLSRVEQSKAELETELAKMSMSAKWGKSAVRLLQLPGLGLITAMTVLAAIGDIRRFASPKQLVGYTGLGAGIHQSGKEHQDKGITKSGRKELRWALVEAAWRAVRSSEVWKQRFDQLAKRRSEHKAITAIARKLLVTIWYVLTREETDRYASEEDLAYKMLVLSWELNEEARLGLTYKQFAKYALMKLGIETDITRFVRKNVPRRVAPRDEVLARMKELGLSL

SEQ ID NO: 199092 - protein, 394 aa, unidentified
MKLVGIDVGKNSHHFCVMDKETGEFNVTPSSFSNNKEGFDFLINSLKPYSKKSILLGMEDTGHYHVALLKFLLSNGYTVALINPKTTDLTRKMEGAITKNDKLDTITICDVLDTPERKKQYRITKVDRFDLYEQRQLTRHHHNLKEELNIYCNRLQKSIDLVFPEFNTLFGSKYGVVYMNLLKTFGSAEAIASTDIRTIRKCFEIKGRGGRISLTAEKLKECAKNSIGISSEVETIQIKHLVSQIMLIKEQIAEIDKKIEELSITNNSPILSIPGISHFSGTSILAELGDIGNYSKPSRIIKFAGVAPYHYESSQYNAQHTAITKKGSKYLRKTLYQVILPVINNNPVFKKYYRLKISQGKGHRCAQGHCIRKLLRVIYHLLETGQSFDPALLR

SEQ ID NO: 199093 - protein, 366 aa, unidentified
MASLPSGPGTVHVGMDTSMREIVCGVLRPGTDVPAVERIANDEASVRRLVGRLGDRRLLATCYEAGPAGYELHRLLASMGVACEVIAPSLVPKGASDRVKTDRRDAVRLALALRAGMLTAVRVPSREEEAVRDLVRARGDLLEDRKRAQQRLNALLLRHGRIWGGGAKWTIAHRMWVDRQRFEEAALQEALDAYRGALEAREAELRAAEARLSAWAGRDPLAPAVARLGAYRGIAELTALTLAAEVVDWRRFPSARAFMGYCGLTPSEYSSGARSRRGAITKAGPQAVRTALAESAWAYRHRPAIGALLRRRQAGADAATLARSWKAQQRLHATWTKMTARGKPHGVVVTAVARELAGFTWAEMTS

SEQ ID NO: 199094 - protein, 350 aa, unidentified
MVTIGSDPHKSSHTFVVADGNGRQLAEKTVKAVPEGHLEALRWASQWPERVWALENSRHLMRRLERDLLTAGEAVIRVPSRLMAEKRKQGRQRGKSDPIDALAVARAALREPGLPVAQLEGVGREVRLLVDHREDLVGDRSQMQNRLRWHLHELEPGYRVAAGALSRVAALNKLEGLLVGHSGTVAELARELLERIRELTVRIDQLESQLGQLVRPLASSLLALQGCGVLTAAKVIGEVGNISRFHSKAAFARYNGSAPIPVWSGNDDHHRLNPGGNRQLNAALHRIAITQARSGGLGRAYLDHRLQEHDTNKEAMRALKRRLSDEVYNRLLTDERTRLSDTETPDAQAA

SEQ ID NO: 199095 - protein, 407 aa, unidentified
MRLFVGDDWAEDHHDVELMDAAGRVLARKRLPEGAAGMARLHELTGQHLGEDAEDAEVVIGIETDRGPWVAALVAAGYVVYAVNPLQASRYRERHGVSGAKSDRGDSHMLADMVRTDSHQLRAVAGDSPDAAAVKVVARTHKTLIWERTRQVQRLRYQLREYFPAALAAFEDLDAPDALELLTRAPDPARARRLTRAQVSAALKRARRRDIPAKATAILAALRSAQPGPPEAVTAAYAVTARSLIAVITVLNEQVKTLQGQVEAVFGRHPDAEIYLSQPGLGPILGARVLGEFGDDPHRYASGKARKNYAATSPLTRASGKKKIIAARFIRNDRLTDALMAQAFTALSTSAGARALYDAERARGTEHNPALRKVANRLVGILHGCLKTRTLYNEATAWPHRENRLAA

SEQ ID NO: 199096 - protein, 338 aa, unidentified
MKLYGAIDLHSTNNVTVVINEQDQVVYQKRLPNDLSLIAQQLSSYRRSLEGIVVESTYNWYWLVDGLMEKGHRVHLANTAAIQQYNGLKYTDDHSDARWLAHLLRLGVLPEGYIYPKEERAVRDLMRKRGQLVHQRTANLLSIQSLISRTTGNSISAKYIKALNIQHVDGVLPNPDLVLALKANLAVMNSADAQIEILEKAVQDRVKLRPQFKFLKTVPGIGPILALTIMLETGEIERFASVGNYASYCRCVGSKKISNGKRKGSGNTKNGNKYLAWAFVEAANFAIRFNSRIKSFYQKKKSKSHAIVAIKAVAHKLCRACYYIMKDQVAFDITKAFA

SEQ ID NO: 199097 - protein, 399 aa, unidentified
MIAVGIDVSKSKSTVAILNGDGSIRAKPFDVHHVADELQALVDYIKRTSEPPTILMEPTSHYHYPLLKAFTEAELPVCLINPYQMKKYGDTELRKAKTDKRDSLRIAQYALEKSYSLIPYTPQDQKYEDLRFLSRQYSQRISTLTVAKVQLLSLLDETMPGITTILPLKSRDPDNCVLLRFIKRFKSFDVIRKMGKTRFLDSYQVLVKKTKDRFAGSKGLAIYELVLNSVTTRGENPLSAMTQDQCVDLVSTSQKAADEINLQMRIIAETMPEYKVLRSMAGVGDRLGPIILGEIGDIRRFHSGKALNAYADNDAPPYQSGQFESRNRHISKRGNPALRKACFEVMQALKLTKPQDDPVYLFLLKKEQEGKPYNVAKMAGVDKFLRIYYARAMETLKQQ

SEQ ID NO: 199098 - protein, 286 aa, unidentified
MNFIGVDLHKKSITVCVMDEKRKVLARKTFACTQTDEIVEFCRQFRPFKVVVEATASYVWFVELVEPLAEKVVLANPKKLRVIAESTTKTDRLDAQVLTEFLVLDMIPESYQPTPRQRQHRALVRHRQYLQGRITSVRSKIRHILSNYNADRKDLFSANCGPAYLKEVRLSDVDRFVIKQLWAEWQDHLAQRLAVSKKLKAFVAKAPQREAEAREILKTAPGVGPVTAEVVLSELGDISRFRNAKAVCAYAGLVPVVRQSGERKSKDMKITKEGSGLFRWTLEEAA

SEQ ID NO: 199099 - protein, 361 aa, unidentified
MRSRESQDAGPAPPVHPEQLLGLDTPVFARLGDAGGSRGRKGAIVEPEKVFVGIDVGKYHVEIALSDRGEVSRFTNDDSGIGEILGLLDGRSVGLVVLEASGGYERQLLASLLGAGIPAVAVNPRQARDFAKALGRLEKTDAVDARMLSQFARSVRPPVRPRVSEELAEMQDWLTRRRQLVEMLVAEKNRSQHAKQGVLKDIREHIDWLKKRIRDSEKELGEMLKKAPEWNAEVEVLDGIKGVGRVMAIMLLVAVPELGTLNRKQIAKLVGVAPLCCDSGTLRGKRTCWGGRADVRACLYMAALVAARFNATIQAFYRRLIAVGKPKKLALVACMRKLLTILNARIRDHRAALSGPRAALS

SEQ ID NO: 199100 - protein, 420 aa, unidentified
MKVVYRTCCGVDVHKSFLVATIIKTTSGVEPSYQKKRFSTFNNSILHFKEWLVKNQCRDVCMESTGKYWVPVFNLLENEINVTIANPKWVKAVKGNKDDTKDSKWIGDLFRLGLVPGSYIPCKLIRILREFTRYRYKLTSCRTSEKNRYQNALTVCNVALDSVVSDIFGKSATSVIDYLIEQSDNSINHEEIASRLLRSLKKKSDSVIESIEGYQMTDSQKYRMRLVRAHMDYITSTINDIDTMLDSLIAPYENAVQLLCTIPGVDHNSAITVISEIGTDMAPFSNSKRLCCWAGLTPGNNESAGKKKSVRIARACVYLKPALVQVAHAAVKSDKSPYYKQKYERIMKRRGKKRAIIAIARMILTAIYQMLSTGETWNPTDLFKIDMPEPMKEKQKEKAIKQAMKLLIRQGKISESQLAS

SEQ ID NO: 199101 - protein, 334 aa, unidentified
MEKVTTLGIDLAKSVFSLHGVDEKGQVILRRTVRRDQLVKVVAGIAPCLIGMEACSGAHEWGRRFQELGHTVRLMAPKFVVPYRKSGKNDGNDAEAICEAVSRPSMRFVPVKSAEQQALLAMHRVRQGFVVERTATINRLRGLMSEFGVVLPLRSIMVRRQGAAAAENLPELARRAIGDLLDQLRVLDERIHGYDREIEAQAKLCEPAQRLMKIRGIGPTTALAIVATVGNAREFKNGRQFAAWIGLVPGQYSTGGKTRLGHISKRGDAYLRNLLVQGARSVLHTAATHRDPVSRWALELQPRRGYYRTLVAIANKNARIIWALLAKNESLRTL

SEQ ID NO: 199102 - protein, 437 aa, unidentified
MGVEEVKDEPLYRGRVCGIDVGKAELYATIRVPSDSNPARRASETRRFATTKRGVLELAGWLRCWQVPAVVMEATGDYWKGPFYRLEAEGFECVLADARQVKNLPGRPKRDPSDSAWLAACFERGAVTACFVAAPEFRLIRLHTRYRRDLTEERTREKNRAEKLLESAAIKLSSVLTDLHGVTGRDIMGHLIAGERDPRALAQLARGRARAKISELVAALEGAEFFTAEHAALLRTMLDRIDQIDAGIARLSQTIEQLLAPWEEQLQQAESMPGWRRRSAEDALAETGPDMTRFPTGAHLASWAGRTPLESSSGQRKGKARAKKGNRYLAAVTGETAVAAGKTQTREGARYRRLARRRGKPKAQVALGNTQLKVYHALLSHPGTRYQDLGPDYYERQRDTRRQIAHHVGKLGALGFEVTLCRIPEPEPGESATTPAA

SEQ ID NO: 199103 - protein, 351 aa, unidentified
MTIIGIDAHKATHTLVAVDHRGRKLGEKTVPATSAGHAGAIRWAHTAYDVNNLIWGVEDVRTVTARLERDLMDTGAVVVRVPPYLMARVRGSHRVAGKSDPIDALAVARAVLQEPNLPYARHDPHSLACKLMTDRRDNLVRQRTAIMTRLQWRIHQLDPKRDLSQGKLQWTKHRDELISWLTTKDGLLAEFSRDEVYEIGQLSGKVVDLGHRITAYVEDVAPSLLQIPGCGIVMAAKIVGETADVTRFRSESAFARFAGVGPLPKWSGNTTGTMRGNRSGNRQVNMALHRIAVVQLRMDGPGAAYYRTRTEAGDQPSKARRCLKRHLARAVYRALKADNQGREDAVRVGMG

SEQ ID NO: 199104 - protein, 339 aa, unidentified
MTMIGIDPHKATHTAVAVDDDERVIGELTLEASNDQVERLTGWADRFTKREWAVESASGLGYLIARQLVAAGETVFDVPPVLASRVRLLGSGKSQKNDPNDARSIAIAAFRSDRLATVQPDDHVTVLRLLVKRHRDMARLRNKHCSRLHALLIELVAGGIGTKISVSNASGLLDDVTVGDEAARYRVLVAREVVDDIGRLDRSLKASKKRIAQAVQASGTSLMDIVGVGPIGAATIIGYTKDVSRFPTRDHYASYNATAPVEASSGSNKRHRLNLRGNRILNHAIHIAAVTQLRHDTNGRAYFDKKIAEGKRPKEAIRALKRRISDAVYRRLIADTNSQ

SEQ ID NO: 199105 - protein, 318 aa, unidentified
MLNESFVGIDVSKDWLDVGWEPAQQTERLAHDEVAMVGLCERLVQERPCLIVLEATGGLETHLASALAAAGLPVAVVNPRQVRDYARACGRLAKTDRIDALVLAAFARAIRPQVRAPKDDETLELGALLARRRQLIDMRVQEKLRLERASPVQRDSIKEHIAWLTERITRLDTDLTHRLHTSTLWRDKEDLLKAIPGVGTITRVTLIALLPELGKLNRREIAALVGVAPFNRDSGQHRGERVIWGGRAQVWRVLYMAAVAAIRSNPVIRAFYQRLRAQGKPGKVALVACMRKLLTIMNAMLKHNTPWNPNALDLEHSC

SEQ ID NO: 199106 - protein, 349 aa, unidentified
MRFYTKTHTHYCGIDLHAKTMYLCILDKDGQVLLHQNLQSRPENFLAATQPYREDLVVAAECMFTWYWLADLCRKEGIEFVLGHALYMKAIHGGKAKNDKIDAFKIAMLLRGGNLPKAYVYPPEMRATRDLLRRRLHLVRRRGNLLAHIQNTHHQYNLPAPTAKIAYKANREGVAEAFPDPDARKSMEVDFMLIEHYDHVIRDLELHLERRAKQHDPQAYHRLRTVPGIGKILALTILYEIHDIGRFDRVQDFLSYTRLVKCDHSSAGKKLGTGGAKIGNVHLKWAFSEAAALFLRNNPRGQKHLRRVAGRHGKAKALSILAAKLGRAVYLILSQERAFDMERFLARKN

SEQ ID NO: 199107 - protein, 341 aa, unidentified
MQITTIGFDLAKNVFQVHGIDAAEKVVVRKQLRRSQVKKFFEALPPCLVGMEACASAHHWARELTKLGHEVRLMPAKDVKAYVKRNKNDAADAEAICEAVRRPTMRFVQVKSAAQQGRLMQHRTRDLLLRQRTQVINALRAHLAELGIVAAQGREGVKELLAIIAEEGDARLPLDARASLIVLAAQLQALQTLIGSIEKRLVVQHRANEASKRLIGIPGIGIIGASAIASTVTDPKAFRSGRDFAAWIGLVPRQDSTGGKQKLGPISKQGDRYLRRILVVGAHSVLRRAKLNPEKYPWLTQLLARRPFKVVAIALANKMARVAWALLARGGTYRVPALAAA

SEQ ID NO: 199108 - protein, 337 aa, unidentified
MTLYCGIDLHGNNSVVAVLDENDQTVYEKRLANDLATIVGVLRTYQAELAACVVESTYNWYWLVDGLMEAGFEVQLAHTSAMPQYAGLKYSNDFSDARQLAHLLRLGILPTGYIYPKQERGLRDLLRRRLLLVRQRTLHHLSLQSLIARHSGQSLSSNQIKMLKTQQLTAYLSPPILLAGQITHQARCWLDKAIDRIEKELQQQITPREDFQLLQSVPGIGPVLGTTIALETGTIERFASPGNYASYARCVKSERISNGKYKGQGNKKNGNKYLAWAFMEAAHYAAIWNPQIKRYYQRKQAKAHVLVAKKAVANKLARACYHMLKRREVFDVTRAFR

SEQ ID NO: 199109 - protein, 336 aa, unidentified
MSTLPSPSTTLVAYLDERRISTTLAGYSDLERWSSNFGSIVAFGVEGTGSYGAGLSRYLTEEKHQVFEVNRPDRSTRRRFGKSDSIDAEAAARSVRAGMALGTPKSGDGNVEMIRMLKITRDSAVKTRSQAMNEIKALILTAPAELRESFKGLKASKLVNRCLRLRPGEMTTPVAAAKFAFRSLARRKQQLDAEISEIDVELIRLTKETAPELVDAFGMGPNTAATLLTTAGDNVERITSEAAFEALCGVSPIPASSGKTTRWRLNRGGDRQANSALHQIVIVRLKSDKRTQDYMERRIREGKSKLEVIRCLKRYVAREMFNVLKQLPQNKAQNTT

SEQ ID NO: 199110 - protein, 384 aa, unidentified
MNKNSIVFIGLDTHKEFFEVAHELEGRDEHVIHDGRISSAKASVIKMVRDFQSKYPQATLHFVYEAGPCGYWIYRLLTSLGHCCYVVAPSLLPKKPGERVKTDRKDAMKLAHLLKINDVPIIYVPEAEDEAVRDLSRARQTATNDLNHARLQLKGFLLRNNIRYDGTANWSAKHIRWLNELILPHPAQHIVLQEMLHTINERMRRLARLVNELEHQVKQWRYYPVVKAIQAMRGVRFLVAASLIAELGDLRRFDTPRRLMKYLGLTPKEESSGDHRRLGKITKCGNGRARRLLIEGAHAYKHPPKVSTEIQKRQEMLSKEVIDIAWQAQLRLCRRYQRLIHRGKHRNLVVTAIAREMIAYIWAISREIAIAPIDVAKRKSRVPA

SEQ ID NO: 199111 - protein, 350 aa, unidentified
MSNSCLTKNIKAMKVKRQNVGIDVSKGSLASCLVFLDEDFEIKIKASRTFPNNAKGFTELLSWADRKKNGDIELSFTMEPTGVYYEGLAYYLFEKKQIVHVVLPNRAKKYADSLQEKVKTDKQDAKSLGRLGVERKLKKWSVGSPVYRKLKALTRERNALIKERTVFQNQLHALNHSADPFKKTVTRLKQMIRFINKQIKTIEKDCENIVDKDEMIKAKVDKVTTIPGVGFITAIVVIAETHGFALITSIKQLVSYAGLDIRIRESGKWKGKSKITKKGNVQIRKALYFPSYSSVKYSETSRKFYERLFDKKGLSLVAATAVQRKLLGLIYTLWKNDTTYVENYQQNKAA

SEQ ID NO: 199112 - protein, 295 aa, unidentified
MDTVRYIGLDVHRDTVSAAVLDREGKLMMQSVLATRAPAILDFLGGIQGTLQVTFEEGTHSAWLYDLLVRRVARLVVCDPRKAALMKDGNKSDRIDARKLAELLRTNQLKPVYHGEHGVRTLKELGRSYLTLTQDVTRVMNRIKALYRSWAIPCGGTTVYAPRHRAEWLAKIAEPGVRIRAQRLYQQLDVLQPVRQQARHDRLLESHKQPAVKLLRQIPSIGPIRAALLVALLQTPHRFRTKRQLWAYSGFAIEIHDSGEYRCVRGKLQRNRERITVRGLCLVCGCCKFGWQQWC

SEQ ID NO: 199113 - protein, 354 aa, unidentified
MKRTTKYVAFDVHQATTVASVREEGGQVIARSVLPTDPGALTEFLRGMRGARHVTFEEGTQAQWLYELLAPLVDRVIVCDRHGAPRQGNKGDQVDADQLSELLRRGALRAVYHGSADRATLKELTRTYRNLVEDATRVMLRLKALFRARGIATAGTAVYHPRHRARWLAQLLEDGARFRADALYAELDILRTLRPKAKAVMVTEARRDPAWRVLRTIPFLGPVRVALLLATMQTPWRFRTKRHLWAYAGLAVVSRSSADYTLVAGAPVRRRRAPMTRGLNRNHNRVLKDVFKGAATAATARPGPLQDFYHGVMARGTREELARLTLTRKLAALTLRLWKKGERYDPTKLTTPAR

SEQ ID NO: 199114 - protein, 337 aa, unidentified
MQKSYLGIDVSKLSFDLSLLIVKKGVKQAVLTTKFENNKDGLKAFKKYLVDNGVGFTENSLLVIENTGIYHRLLWQFCSKQGLPIYIGNAADLKWSFGIARTKNDKVDSIRLCDYAYKNREDLKPTPALNKNFIILKDLLSNRSKLLRQLNGIRQTIKELKTSNDKGTQKLMDNMNKAAIEGSKISIKLIEVEMRKMIKADAEVLANYELMVSVPGIGEITAIFILCCTNNFAIKISGKQLASYAGVVPCEHSSGTSVKGRNKVSHMANKELKSILTMGALSAVQAYPEFGDYYERKKKEGKHHNKILNAIKNKMLLRVMSVVNSRTSYVNNYKKAS

SEQ ID NO: 199115 - protein, 468 aa, unidentified
MGHKRPQYRRTRSKKVKHPSLLERINRDAAGIDCGSEAHFVAVPPERDEEPVRSFKTFTSDLQRLADWLEVCKIKTVAMESTGVYWIPIFEILEERGFDVVLVNSRHVKNVPGRKSDVVDCQWIQELHSVGLLRGSFRPDAEIATLRAYLRHREKLVQTAASHIRRMQKALLEMNLQLDNVISDITGATGMRILRDVVAGVTDPEALAAHRDYRCRASEKEIAASLTGNYRAEHLFALRQNLELYDTIQRQIRDCDAEVETLLHELARKHDKSKGTLPRPRCKFKFCDNEPRFEIRDPLFRLSGVDLTQIDGIAPYTALRLIAEIGADMNRWPTCKHFTSWLTLAPKNKVSGARLISSRTQPSANRAAYLLRMSAMVLGRTSTALGAYYRRIAYRVGKPKAITATARKLAILVYRMLKGELNYADPGEQTYDAHYRERSLRNIRKRAQRLGFELVNLETGELLHGAVS

SEQ ID NO: 199116 - protein, 426 aa, unidentified
MSVRDYNKQVVRRQRIGSTTLVVGVDIGSAFNAVGFMNKEGKVLGSYPKMPNSREGFEEFVKRTEELKAKHGLRDVIIGLEPTGHYWRKFAYFAKEKGYEVRFVRTTALKHHRELDESSSAKSDKRDALTLTNITREGKYIDTVIEDGRMRHLRILVKVREKIQKRNVSAKNSLHAALDDYFPELKRIFWSMQSRGLWALLERCPFPEDVVTFRVSALKEMIGRASRRRAEASRKATALYQAAKESIGLRQIGSADRYRLRMCLEEVKRTELTIKDIEREIKRMLKNIPQAEYLLSIPGIGPISAAVFLGELGNPSYFPGARQIVKYAGYDPQESDSGYRVSRKFISKKGRWLMRKHLFLMSMRVVVLSRYFQEYYQRKLQTKNRFGQLPRKKEVLCAVAIKLIKVIFALLRDQRNFEDTITCSVE

SEQ ID NO: 199117 - protein, 313 aa, unidentified
MTQVIAAGVDVGRDWLDVAFAPGGRSFRAPNGAEGVRFIVERLRRQGVSRVVLESIGCYATRLVRGLVEAELPVWVVDPRRIKALRLVEGSRAKTDRLDAKLIARFALLMSEATRPIPGADALELRALSARRRQLVEMIAMEKTRLKQTVDQGIIDGLKSVIGFLSTERARIEAAIATRTRTSEEGRRKEEILLSIPGIGPAVAATLMADLPELGTLDNKAIASLAGLAPHVQQSGTAPARAHIGGGRPCVRTALYMAALGSIRAKVGYRHDYRAMRQAAKPAKVAIIAIARKLVVAANALIKNDRTWTPQTH

SEQ ID NO: 199118 - protein, 397 aa, unidentified
MIAVGIDISKAKSTVAVIDSDGTVLASPFTMAHTQPEMEAFVTYLKGLGEPTTILMEYTGHYHYPVLKKLQDEGFPVCIVNPYQMKKYGDVEIHKAKTDKKDALRIAAYALEKSYKLVPYSSMEQKYEDLKFLSRQYSQRITYVAKLKVQLIALLDQTMPGITRILPLNSRNPEKCALLLFIKRFKSFDEIQRIGKARFLASYDVLAKKASERSASSKGLSIYELAVDSITTRGKDPYIWLSQNQCVDLLSTTQNAADEIISQMRNIAETIPEYKVLRAMHGVGDRLGPIILAEIGDVHRFHSGKALNSYAGNDAPPYQSGQFESRNRHISKRGSSTLRKACYEVMQALKLTKPQDDPVYLFMLKKEQEGKPFNVAKMAGVNKFLRIYYARAMELYK

SEQ ID NO: 199119 - protein, 355 aa, unidentified
MTFVGFDLHKRYITACALDAGGGIIAEIRQLSTALDAVLTWLGALPGLVTVGLEATLYWEWLATRLTEQGYTVRVAHAHAVKLIWQARAKTDPIDARKLAELLRVDLFPAIWIPDLQTRRRRQLLRGRAFLVRERTRLKNRIHGHLLSENLVPPGADLYGKGGRAWLAAAPLSPVLRAQTERLLTLHDALSVEIQGLDGDVKRAAQGNPLVKQLTTMPGVGVFSALFVQAEIGSIDRFRSSHELAAYAGLVPTTRSSGGKTTHGGLGKASNRWLKWILVEIVVTLKLAPGPVGTYYRHLLRAKGKPKAQTAAARKLCCYLYWMLKEGWTYDEWLQQHVNSQRSEVRPVQRMGAMA

SEQ ID NO: 199120 - protein, 340 aa, unidentified
MNIKRIGLDLAKNVFQIHAVDHREHVVLRKTLRRDRMAAFFTQLSPCLIGIEACGSAHYWARELTRMGHTVRIIQPRLVKPYLKGQKNDANDAEAICEAVSRPGMRFVAIRTERQQTLQAEHRVRARLIRARTALSNEIRGLLGEFGVVLPAGIAQLRKALPEIVSQQVQWDECFIRLLCELSEELQGLDERVARHDRRLQQSARDDIRIKRLLAIEGMGPVVASALVAAVGDGRQFRSGREMAAYLGLVPRQHSSGGKARLGHISKRGDRYVRTLIIHGARAVLNACQNKTDRRSQWLQGVSERRNRNIATVALANKNARIAWALLSREEDYHGIQVTG

SEQ ID NO: 199121 - protein, 343 aa, unidentified
MVYVGIDLHRKSSQLCALDEHGEQLLSRRVVNEPEALLAALAQLPERPAVALEAAFGWEWLADLLESEGIELHLAHPLRTRAIAAARVKTDAVDARTLAELLRGRLLPEAYVAPRELRQQRQLLRQRICLTQLRTSLKNRVHALLAREGIQRRHATLFGPAGRAFLAGLPLRPPERARLEQLLRLIAVFDTEIAALAAEIEARAKSDPRVSVLTRLPGIGRYTALLVIAELGDVGRFASAAKLCSYAGLVPRVRASGGRVRLGAISHQGSPYLRWALVEAAQQASRRPGPLRHRYERIARRRGRNVAKVALARQLLTLCYYGLRDGEIRCLARASSAWDMAAA

SEQ ID NO: 199122 - protein, 331 aa, unidentified
MKNKRFIGIDVSKKVLDFYILKLHFHFTVTNDPAGYAQFLEICCVKLSCKGDDLFFCFENTGRYSRLLSVFLHENGITYAMVPALDIKQSKGLSRGKSDKKDAKSIALYAWRKRDELIPTKLHSAEVGQLRQLLALRDKLIKHRTAYKNAIKDLNDCFYEGETKFIQQTQLRMIGHYNIEIKNVEQQIEDIMQANAEWGTNYKLIQSVKGIGPVIAKYLMIYTENFTRFSNPKKFACFAGVAPFEYSSGSSVKGRTKLHPCANKHLKSLLNIAAMGVVQLKGEYKIYYQRRIQEGKNKMSTLNIIRNKLILRVFAVVKRQTPYIDLTTFAA

SEQ ID NO: 199123 - protein, 392 aa, unidentified
MEAIERYVALDVHKHYVMVAAINAAHEVVLTPRKMSLERFAQWAPEHLTQSDQVVLEATANAWTIYDQLTPLVHDVKIAHPLLVKLISAARVKTDTRDTLHLARLLGAGLIPVVWVPPPPVRALRMLVAHRQRLVRQRTQAANRLHSVLHARQIAPPPGRLGSSESQAWWDQLELPAVERLRVQQDRTILQTVERLIAEVDAEVTRLSTQDPWKDLAPFVMQLPGFAVVTSMTVLAAIGDITRFPSAKKLVGYSGLGASVHASGQTHHTGPITKQGRRELRTVLVEAAWSAVTHHPFWKDEFERLVPSLGKGKAIVAIARKLLVVVWHVLTHQVADRHADWPMVTRKLQRWGASHGLAVSAGVSRGTFAQQVLARLGLAGDETLVAHAGAGT

SEQ ID NO: 199124 - protein, 362 aa, unidentified
MKKSSRMSVIHPHAAGVDIGAEFHVVAVPPDADAEPVRTFQSFTGDLHRMSDWLKTCHITTIAMESTGVYWLPAFEILEAAGFNVILVNARDAKNVPGRKTDVNDAQWLQKLHSFGLLRASFRPEHDISVLRSYLRQRERLTEYRAAHIQHMQKALMQMNVQLHHAVSDITGVTGLSIVRAIVSGERDPSVLIQYRDVRCKKTPEVLQQALTGNWQPEHLFALEQSVAFFDFYQEKIRECDDQIETSLLQLSTGTEEPEGVLPSARHRTKQPNQLSFDVRPLLWKITGADLTQIHGFGPYLALKFVAECGTDMNRWPDASHFTSWLCLSPGNKISGGKVLSSKTRRSSSRIAAALRKVRTSP

SEQ ID NO: 199125 - protein, 410 aa, unidentified
MDTLIERCGGLDVHKDTVVACVRVPARGGGREQSIQTFGTTTAQLLALRDWLVAQGVTRVGMESTGVYWKPVYYVLEDALECWLLNARHLRNVPGRKTDVADAAWICQLVEHGLVRPSFVPPKPIRELRNLTRYRKAQIEERTREAQRLDKVLQDAGIKLSSVASDVLGVSGRAMLRALIAGTRDPETLAELARGTLRRKIPALRQALHGRFGPHHALLVGTILAKLEFLDEALGHLSAEIEQVIAPFAAEAALLRTIPGVDRRTAEAVVAEIGVDMSRFGAAGRLASWAGWCPGNNESAGRHGSGKTRKGSKWLHTYLTEAAKAAARTKGTYLGAQYARLRGRRGSARATVAVGHSILVAAYHILDRHEPYRELGPDYFRRRHSPEHQTQRLVRQIEALGYHVRLEEVA

SEQ ID NO: 199126 - protein, 366 aa, unidentified
MKKTSTVRVNGNMIFKGHQLTIGLDLGDHWSCYCVLDEAGKIILEQKVAMTPEAIKQTFSRIPQGLIAMETGTHSPWVSRLLTELGYKVIVAHAQKVQMITKSNRKDDRHDARTLARLARIDPELLGPVRHRSAQAQIHLTVIRARAELVRARTALVNAARGLVKSYGQRLPKCGTRQVSRELGAGLPAELREVLEPLLKEIESLNERVKEYDERMEKIAKESYPHVELLKQVKGVGTQIALTYVLTLDDPHRFLKSREVGCFLGLKPGRRDSGQSQPQMHISKEGDRYLRTMLVQGAHYILGPFGEDSDLRRWGLKLSARGGKSAKKRAVVAVARKLAILLHRLWVSGEVYEPLRNSQKAMRTAA

SEQ ID NO: 199127 - protein, 387 aa, unidentified
MIYVGIDIAKLNHFASALSSDGEVLIEPFKFTNDSDGFFMLLSKLSSFDKDSIVIGLESTAHYGNNLLMFLVPKGYKVCLINPIQTAVLRKNNIRKTKTDKVDTYIIAKTLMMNDLRYVTLQDIGLIQLKNLGRFRLKMVKQRTRLKIQLTSYVDQVFPELQYFFKSGIHHKGCYALLKEAPSPEAVASMHLTHLTHLLKTNSHGHFKKETALELRVLAQKSVGGGDKSLSIQIAQSIEQIELLDSQLKRTEQEITDIITSLDSVIMTIPGIGAVNGGMILGEIGDIKRFSSPSKLLAFAGLDPSVYQSGNFQAKRTRMSKRGSRAFRYALMNSAHNVVKNNATFKAYYDKKRDEGRSHYNALGHCAGKLVRIIHKMLTDDVTFDLD

SEQ ID NO: 199128 - protein, 344 aa, unidentified
MRIAVLGVDLGKNVCSIVGLDASGAVVLRRRVRRDTLIELVAKLPACIVGMEACCGAHHIGGVFAAQGHDVRLMSPEYVRPYVKAQKNDDRDAEGIAEAATRPTMRFVEMKTVDQLDMQTLHRSRDRLVGERTALINQLRAVLLERGIVVPQGKHKFEQYLTIMMDEHEGEGLSARMRMLVTDVRAQWRDLDRRIGAFDAEFARWAKENEDARRLGTIPGVGVTISTALIAAVGNASTFEHGRDLAAWLGLVPRQSTTGGKPRLMGISKRGNKYLRKLLIHGARAALPHVAEKDTALGRWAKNLLSRVHHNVAVVAFANKLARICWAVLRSGQKFAANGAPSAV

SEQ ID NO: 199129 - protein, 372 aa, unidentified
MKQSTTTYVAMDTHKKTISVAIAVSGRRGETRFIGEIPSRPEAVSKMVDRLAKRHGKLAFCYEAGPCGYGLYRQITLLGHECVVVAPSLVPTRPGDRVKTDRRDAVTQASLFRSGELTPVWVPEDAHEAMRDLCRARQAAMEALRRARQQVLSFLLRHGRVYSNGGHWTRKHRLWLAAQRFEHPARQIAFEELVQAMDEAQARRDRLAKQMQELLPSWSLAKVVTAIQALRGVALISAITLVAEIGDFKRFANPRQIMAYLGLTPSERSSGAKTARGAITKAGNTRARRVLVKGAWTYRLPARIGAAILKRNEILPQAIKEIAWKAQVRLCARYRRLVRAGKPTNVVCVAIARELAAFVWAIATNDAIAAMA

SEQ ID NO: 199130 - protein, 349 aa, unidentified
MFVGIDVHKQLHAAALLDERGGELGALIIANSPEGYRRLLGWLAQHDAERALIGVESPGSYGRALVGALVAAGHEVLHVPAWRTHRERHRQGPGKTDPGDALAIADVVRRKHADLGPAIEPELVRALGMLELQRRRFVRDRTQAIQRLRADWTQLDPVSETRIVHLDRQKVLGRLKQIRFGDTLTERIAARCIRELARDIEDLNHRIAELDHEIAALIDEHDNPLEDLLGVGTLLAATLIAQAGDVRRFKSPAAFARFCGAAPIPCGSGQTAGRHRLHRGGNRQLNAALYRIAIVQQRHHPAAKAFLARKIREGKTPREARRALKRHLANVIYRRLLAWADTTPAMNPT

SEQ ID NO: 199131 - protein, 310 aa, unidentified
MNPNPVDYIAIDVCKKNLQVHTAQKSFVLANSPVGLSELFEIARGLDNPVVVFEATGGYERLLRTSLRESKVPFHMVDPRRLRGFAASEGIRAKTDLIDAALIFSFARQKQLQPIPPPSQESIRLGELMDRRSHLSEQLAREKNRSQKAAPEIRDLIEEMIVFIEKQITMLDEAIRKLIGTCQRMKELSAAMQSVCGVGEITAWTILAYLPEIGRVGRNQLCALVGVAPFNRDSGNKQGKRFIQAGRAKIRRCLFLAARSAATHNPVIRDYVAHLTQEKGKHYNMALTAAMRKLIIHLQSIVKKTELELA

SEQ ID NO: 199132 - protein, 398 aa, unidentified
MDSHLCVGIDIGYRNHRVGIADSHGQILEEFDIPHATEGFDHFFRRVEHHREKLDLPVAVAMEGFNGYGRPLDRLIQQKGYRLFNVNNLKLARYKEIFPGAAKTDPIDTRKILELFRLKDQLPMAKNALQEVAKVPAVNEKLKRLSRRRRHLVEEKIRVQNRFQADLQAVCPELLAITNGADNLWFLRLLTFRDDLRQLARLRRATVLQIPSVGQKYARVIQDWQRKATFSSEVEYVGPMIIQDAKRILELLKQIYVLDEAMAELAEQSGIARRLSSIPGFGKTCIAELAGEIGTLNRFAGEASLALYLGMSPLTFQSGQVCRTRSPRQVNRRAKAAMMTAVTRHARYVLESTAYYDRKRAQGKTHNQAIRALGRHMVRIIWSMLQHQRDYELRGDIP

SEQ ID NO: 199133 - protein, 297 aa, unidentified
MKNIKVLGIDLAKNVFQLHGTDAKGKRVLSKRMSREKLTEFIGNLSPCLIGIEACMGANYWARVFEQMGHTVKIMSPQFVKPYVMANKNDQNDARGIAEAVTRPNMKFVSVKKIEQQDILLLHRARELIVKQKTAQSNQIRGLLAEYGIIIPKGLSHIKKLPDILEKNDAKLTIKSKAIFLRLHEQFKAIVDQLEIYKKELETIVSQDSQCQEILKIEGPITASAIVATIGDAKVFKNGREVSAWLGLTPKQHSSGDKTRLAGISKRGDRYVRTLLIHGARSIVKNCDKKTDIGLTH

SEQ ID NO: 199134 - protein, 425 aa, unidentified
MSEKIVVGIDVSKAFSDICILSPNNDIIKRLKISNDINGMKSLIYVLEKVEDEYEDRAVIIMEATAHYHQILANFFRKHNYEVIVINPIQSGALKNINIRKIKSDKTDAYNIALLYRIKNYNETITHSDTVNSIKKLCRQHKELTDEIVEHINRLIAFLDISFPDFKKVFTDLQGKTPLSLLEKYPTIQEVLSPENKQDIIQLIKENSHKSSSYAEVKYEKLLKAAEKSIEVCIVSLSSAVLIQTTVRVIFSLQEALKAIDNEIKRLSLLDEKFHKEIVLLQSIPGVGEYTACVVLSELGDISNFSKPKELVAFFGLDPGVTQSGTYNRKNNKISKRGSPHVRSILHMLAKSNVYPNRNREYLNPVMRAYFEKKIAEKPYKVVMCAIMRKMVQIIFAVLRNQKSFELRTPEEHQKLIREKSKLVA

SEQ ID NO: 199135 - protein, 389 aa, unidentified
MKIYVGIDIAKLNHFAAAISSDGEIIIEPFKFTNDADGFQLLVSKLESFDKNSLIIGLESTAHYGDNLVRFLVTELYQVCVLNPIKTCQMRKNNVRKTKTDKVDTYVIAKTLMMQDNLRFVSFFDLDMMDLKALGRFRQKTIKQRTRLKIQLTTYVDQVFPEIQYFFKSGLHQHAVYALLKEAPSPKKIASMHMTHLANLLKVNSHGHFTKEQAKELRVLAQKSVGANDSAISIQITQTIQQIELLDSQLEKIEAEMTDIMKFNDSVIMTIPGIGYINGGMILGEIGDIHRFSNPNKLLAFAGLDPSVYQSGNFQAKTTRMSKRGSRVLRYALVNAAWNVVRNNATFKAYYDAKRAEGRSHYNALGHCSGKLVRVIWKMLTDNVEFNLK

SEQ ID NO: 199136 - protein, 341 aa, unidentified
MEEVSTIGLDLAKHVFQAHGARLSGAVVFRKKLRREQVLTFFAGQPRCLVAMEACASSHHWARAIGELGHEVRLIPPAYVKPFVKRQKNDMADAEAICEAAQRPTMRFVAVKSEAKQAAAVIFRARDLLVGQRTQIINALRGHLAEYGLIAPQGPSHVERLITQVEDPASGIPDAARSCLMRLVEMLRRLQDEIAELDREIAARAKTDDVARRLMTVPGIGPLIATAIEALAPPAETFRSGRDFAAWVGLTPVQRSTGGKERLGRTSRRGERTLRRLLIIAASGVVRWAKRKGVPPGSWLARMLARKPPMLVIVALANKNARVAWALLTKGGMYRAPAVTA

SEQ ID NO: 199137 - protein, 355 aa, unidentified
MNAVGIDVSKGKSMVCVMRPFGEVVLEPFEVLHTAQNLRDLAEKLKALDGETRVVLESTGNYHKPVAFVLHDAGLFVSVVNPVLIHDYDNNSLRRVKTDRKDAVKIANYTLDKWTRLRQYLPEDDTRLALKNCYRQYQQAVAIRTMLKNNLISSLDLTFPDANKLFASPPKSNGCEKWVDFIGDFWHSECVSSLSEEVFAKKYLKWCQKHGYIFTRSKSDEIYACALNSASLPKSPTSKLLIQQQVAQLKAVSQSVAAFQQEMLRLSQQLPEFDTVMEMYGVGPSLGPQLMAEIGDVRRFSSKKSLIAFAGIEPLPNDSGKVVGNDKGISKVGSAVLRRTLLSDYVCYFTDTATG

SEQ ID NO: 199138 - protein, 341 aa, unidentified
MSIITVGIDLAKNVFAVHGVDDNGQAVLVKPKVSRADLLPLIAQLPPCLIGMEACSGAHHWARQFRQYGHAVKLMAPKFVAPYRMTGKRGKNDAADAAAICEAVTRPSMLFVPVKEEHQQIILCLHRTRQGFVEERTACYNRLRGLIAEFGIVLPQKVTCLRREIGVHLENLPGYANLCVGDLLAHTSELDAKIAEYDRAIAQAARDDERSKRLMKLPGIGPVTASAMLASIGGGHDFDNGRQVAAWVGLVPGQYSSGGKARLGRITKAGDNYLRSLLVMGARAVLNSIGDKQDRFSRWAQALQERRGYWRGVIAIAAKNARLAWAVLKYGEDFKLGLIKD

SEQ ID NO: 199139 - protein, 338 aa, unidentified
MTTIMENIALIGIDLGKNSFHIHCQDRRGKAVYRKKFTRPKLIEFLATCPATTIAMEACGGSHFMARKLEELGHSPKLISPQFVRPFVKSNKNDFVDAEAICEAASRPSMRFVQPRTESQQAMRALHRVRESLVQDKVKTTNQMHAFLLEFGISVPRGAAVISRLSTILEDNSLPLYLSQLLLKLQQHYHYLVEQIKDLESQLKRKLDEDEVGQRLLSIPCVGTLTASTISTEIGDGKQYASSRDFAAATGLVPRQYSTGGRTTLLGISKRGNKKIRTLLVQCARVFIQKLEHQSGKLADWVRELLCRKSNFVVTCALANKLARIAWALTARQQTYEA

SEQ ID NO: 199140 - protein, 321 aa, unidentified
MKEEKVYVGIDVAKASVDIAVHQSKQRWHFANDDEGISQAVSCQQDLSPVLIVLEATGGIELPLAAALAAAGLPVAVVNPRQIRDFARATGKLAKTDAIDAQVIAHFAAAVKLTPRPLRDAEAREFSALLTRRRQVSEMITAERNRLRPTCSKVVRELIKDHIARLEEERAKLDNNLRDTIRGSSVWREKDDLLRSVPGVGPVLSATLLADLPELGILNRKQIAALVGVAPLNRDSGNFRGKRTVWGGRAKVRTTLYMATLAATQHNAVIRAFYQRLCAGGKENKLALTACMRKLLTILNAILKHRTPWRYANSYTIGPCS

SEQ ID NO: 199141 - protein, 336 aa, unidentified
MDRRYVGIDLHRRRSVIYAMDAEGNKMFCERIANDALRLLEVVSQAGDGAEVVIEATYGWYWAVDLLQDAGFNVHLAHPSGNDWGQRRVKNDERDARDLADLLRLGRLAEAWIAPPVVREARELVRYRARLVQLRSGLKAQVHAVMAKEGVLPGVTDMFGPKGQQLLDAMELADAYLVRVESLRDLIEVYDREVAMLERRIHELLRDDRGYQAVQELDGVGRTIAAIFVTEIGDITRFRSPEALCSWAGLTPRHRESDTKVVRGKITKQGSKLVRWAALEAIVRYHGGPPLREHFHRIAERRGTNKARIATARRLMTLVYYGLRDGEIRCLQRGAA

SEQ ID NO: 199142 - protein, 354 aa, unidentified
MVAQSPVVSTQSAAAARSRGTAGGKRIPAKPLSSERAAHDPAPVKPRFVGVDVSKSWIDIADASGGKERVANQARAIAAAFRGRWSDCTSIVCEATGGYERALMDVASAQGLPLRRAHPNRVHAFARASCGLAKTDALDAKMLAKFAAFTADEPAQPLPSAKTRELAAMVARIVQLTDLHQSETCRSKMEPVAAVKASLAAVLQILGGQIKAMQKAIDAFVAADPILKENAAILRSCKGVGPKSAQAILAMLPEIGTLDRRKIAALVGVAPITRSSGSSINAASITGGRKALRDILFMAALSASSHNPTFKAFYDRLRADGKPHKLALVAVIRKLIVTLNAMVKTRQTFKNALT

SEQ ID NO: 199143 - protein, 363 aa, unidentified
MPMKKPTRRLIAEVPRSSSRVGMTIGIDLGDVWSHYCTLNEDGEVVDRGRFRTSPSGVEKWFTDLPRIRIAMEAGTHSIWVNEQLQELGHEVIVANVRELRAISHSDRKSDQVDAEKLARYARLDPKILRPIAHRTVAQQEALTLIRARNLIVRLRTAAVNAVRGLAKPCGYRLPASSTLCFAKRCMAVMPPALAEALGPVLEQIATMTVKIKHYDRTIKRLTETEYPETQALLQVYGVGQLTALTYVLTLGSKERFQRSRDVGCYLGLRPRRSQSGERDPQLGITKAGNTYLRSLLVECANHVLGPHGRDSTLRLWGLHLASRGGKQPRNRAIVAVARKLAVLLHRIWVTQEPYVPFYAAAA

SEQ ID NO: 199144 - protein, 391 aa, unidentified
MIYVGIDVAKDKHDCFITNSDGEVLFKAFTITNNLDGFNDLYQKIESVMDDVTKVKVGLEATGHYSYNLLGYLIDKGLPTYVINPLHTNLYRKSLSLRQTKTDKVDARTIASMLMSDVNLKSYSDTSYHNEELKSLTRYRFDKVKERAKLKSSVSRLICILFPELEKLVPTLHMASVYALLSEFPGAKQVANAHLTRLTNLLSEASKGRYSKDTAITFRDAARTSIGSNMPAKSLELKHTIKLIQELDSEIDEIENEIKIIMDEINSPILSIPGINYRMGAMIIAEIGDFNRFDSPDKILAYAGFSPSTYQSGQLDGAYAHMEKRGSRYLRYALYNATKYVCHWDPTFAAYLAKKRAEGKHYNVAISHAVKKLVRVIYHLEKTKQQYIKAA

SEQ ID NO: 199145 - protein, 487 aa, unidentified
MKKRAYRSTTVKSVKVAEVLKALPDGPVWIGLDIAKAEVLAVLRDATGQVLRPWKTKQPSEIRDLTALLSQVAETHEVNVAMESTGTYGDALRQALEDAKLPVYLVSAKFTHDFSEIMDGVPSQHDGKDATIVAELAAMGKASPWPCPTLSADEDALHEEVQWLDAQQAILQVWLGRLEALLARHWPEATELLALDSVTLLRTLTEHGGPQALAQDPQARQKLAKWGGRLLLPEKIAAVLESARTTVGVRMTAATQKSMQRCAEAAHQARTAVRRTKASLTRRAKKHPILSRMAKAVGHATACVLWAAVGNPQDYHCGEAYRKAMGLNLKERSSGQYVGQLKITKRGSSMARRWLFFAALRILQQEPVWTWYLKKKHKDNERGGKAVVAIMRKLALALYAVANRDVPFEVARLLPGRPAPKPRREVKSILGALPPAPRDLSPSCRSRTNGAAQTRGLAPPKRSVPAPELALGSVPTGALSSAQARQS

SEQ ID NO: 199146 - protein, 359 aa, unidentified
MSTAINQLDFTGQNIYVGIDTHKHSFTVTVEGELLTYRTFSQPPEPDKLVHYLHRNYPGASYHAAYEAGFSGFWLQDYLQQAGVGCIVVNPCDVPTTSKERKQKRDPLDSRKLARGLRNGELTPIYIPPLSQQMDRGLLRTRKCIVANLTRCKNRIKSILSFYGIPYPERFQRAGTHWSKRFMDWLKSLDLGEESGNKSIQLYLEEAEHLRSLVLKATRMINQLSQSSKYDKQSKLLLSVPGIGRLTAMVLLTEIGDIIRFKNLDHLCSYVGLIPNVYASGDKEYVGDITHRGTSHLRAYLIESSWSAIRYDPALSLKYHQLSVRMKGNKAIIRIARKLLNRIKYVLVNEKEYVTGIAA

SEQ ID NO: 199147 - protein, 342 aa, unidentified
MPDVTPCLHPGQVRRWVAIDQHKFSIVAAVLPPDGGKPEVCRIETTERAIHRFIERLGGPAGLSVCYEAGPGGFALWRLLTRIGVACDVVAPSLIPVRAGDRVKTDRRDAKKLVSLYRAGLLRFVHPPTAELEGLRDLLRARDDVRLARMAARNRVLKQLLRHGRIFREGKTAWTKVHRAWLARQRLDDPLAHEALEQLLIHLDGIERQLATLDARLGEIAGGERWSGQVEVLTRFRGISTLTALGLIAEIGDFARFSHPRELAAWLGITPSEYSSGPQQHSRALLAGESVDEVAFLLGHRDGNVTRAVYVREVADARRRAMRRSRMNAEFGAVLNLALATE

SEQ ID NO: 199148 - protein, 468 aa, unidentified
MGTCHVKKAAARGQAKDGLFEVINPNAAGIDVGASEMWVCVPGENDRERVRSFGTDTVELEAIAAWLLQRGVRTVAMESTGVYWIPLYQVLENHGLEACLVNARHAKNVPGRRKTDRLDCQWLQKLHACGLLSASFRPPPEICRLRTCMRHRATLVQEQAAQIQRMQKAMREMNVQLDAAVSDVTGVTGMRIMDAIVAGEHDPATLAAMADPRVRRSPEQIARCLRGDYRPEHLFVLRQALAAYRFFLEQIRACDEEVERYTVEMEQAAGRADATLPAAADDRRKRKRGNVPEYDVRTHLYRLTGVDLTSVPGIGELSALGLISETGVDMTCWATGRRFASWLDLCSSPKVSGGRVIGQGRRHAANRAAQIFRQSASSLKNSQCWLGSFYRRMRVRIGAAAAVKATAHKLSLIYWHVLCTRTEYRDIDVSQYEERLRERTIRNLKRRARQLGMDLVPAEDPSEAVPMT

SEQ ID NO: 199149 - protein, 423 aa, unidentified
MNHFTDGQYTAYIGIDWADTKHDICLQAANNNQLEFDCIPHQVNDIEQWALSLRQRFGGPIAIALELSKGPIVYALQKYDFFVLFPINPSTLAKYREAFTPSRAKDDPTDAELALDLLLRHPDRFQPLEPQSVEIRALATLVEQRRDLVSDRVRITNRLRNTLKQYYPQVLEWFDRINTPLFCDFITRWPTLEQVKRARKSTLERFFRQHSMRFPQVLETRYQAIKAATPLTRDVAVVTPHRLYTLVLAEQLRVTLQAIRRYDEEIAQLAPQHPDYALFSALPGAGPSLAPRLLVAFGEQRERFTSAAEVQKYSGIAPVTERSGRKHWVHWRWQCSTFLRQTFVEWAAQTVNKSFWAGAYYRQQKAKGSSHQAAVRALAFKWIRILYRCWQTRTPYDELTYLEALRRRRSPLLEQLGAMTEST

SEQ ID NO: 199150 - protein, 338 aa, unidentified
MKLYGGMDLHSTNVVTQLINEEDKVIYRKKQSCDLDLILQGLEPFKDRIEGLAVESTYNGYWLVDGLMEAGYRVHLVNTAAVKQYEGLKYTDDDSDAFWLAHLLRLGVLPTGYSYPKQSRAVRDLLRKRGQLVRQRTAHIVSIENLYTRNTGNRLSCNATKRLTQAQIQQQFDDPNVALAIDSNRAIMNALDQQIKVLEQAILKQAKLDDRHRCLLSIGGVGEILALTILLETGDIKRFAQVGNFTSYCRCVGSEKLSNGKKKGQGNTKNGNKYLAWAFVEAANFAIRFNEQAKRFYQRKAAKRSRVVALKAVAHKLARASFYVMRDQVPFDSAKLFV

SEQ ID NO: 199151 - protein, 319 aa, unidentified
MAQHEVVVAGIDVAKDKIDVCIRSLSQRQTFPSTAEGERKLIAWLRKHKVGKAVMEASGGYERSWAKVLREAGIEVRIVDPKRVRNFARSAGRLAKNDAIDAEMIGWFAATFSEAPIQTHDAAREELQQLVNARQGLLDIQTDIHNRGEHAAPKPVQKMRARLLNKITTELVRLETLIAARIKATSHFAESAEIIESVPGLAGITAANLIAGMPELGQVSNKVAPALLGTAPYDDDSGRRQGERHIKGGRRKLRNALFMPCLGAATQHNPVLKAFYQRLLAKGKKKKVALIACMRKLIVILNTMIARREKWDPSRYALA

SEQ ID NO: 199152 - protein, 335 aa, unidentified
MNRYIGIDVHKDDCHGTVQDESGEIVKQGYFRNSPPGYEGFFDGIEEAEVVVEAGAAWQPVYDWLDGNGFEVKLADPRKMRIIAEVKIKTDARDSEALAHLLRANLIPEVYVPCDERRELRRIVKRRGKLVMERSKYKNRIRAELRKRGIDSEGYYLGTQKAKRWLRNLEIESVDDYLEIMNSISERIRKLEKEIKEIAGEMKETQLLMTIPGVSYYSALTIIAEIATVDRFPTAEHLCSYAGLVPSTSQSGSKETHGHIQGGRPLLRWIVCQCAHNHVHNTDSHLTSFYERLDKKKPGNHATVSTGRKLLKVIYWMLKEKEEFHSEGYDPRQSS

SEQ ID NO: 199153 - protein, 357 aa, unidentified
MTVTNQFAAHVGLDWADKKHDVCVQFKNGERVFDVIEHTAEALDAWLTELHQKVKGRIAIALELKKGPVVYALQKYPFITVFPVHALSLARYRQAFSPSGAKDDPQDAELALELMLRYPQKIKAIEPDNPDIRLLQQLVEQRRQLVEDKRRFVNRIINTLKQYYPQPLEWFSHRGSLLLCELLIRWPSLQQLKRARRDTIRNFLNAKGGRAMALTEQRVASIDNAIPLTTDPSVIEANALMATALATQIKVVSEIIKTYDERIEALFDTLPDAELFKSLPGMGPCMGPRMLAALGDNRDRFNSAEEIQNYAGIAPVTERSGQKSWVHWRWQCAKFVRQTFVEWAAKTVNSSYWARLY

SEQ ID NO: 199154 - protein, 408 aa, unidentified
MNAVGIDVSKGKSMVAALRPMGEVALLPREFLHTEVGLEQMAYAITTLGEDTRVIIEATGRYHEPVAAALHKYGIYVCVLNPLYIKQSGGGSIRKVKTDKADAMKIAKYGLDNWVDLREYTPMDTVRQQLKLCSRQYNLYMKTVVSLQNNLISLTDKTFPGVNELFSSPERADGHQKWVDFVMTFWHCDCICHVSEKAFTERYQKWCKRKGYHFSTEKALDLYAGSCGHFTTLPKNDNTKLLITTAAQQLLAGKMTLAALRAEMTRLAMQLPEYNTVRAMYGVGETTAAQLMAEIGDVRRFPRRSSIVGFAGVDPGVDDSGKHSAKSVPTTKRGSPHLRKTLYQIVCTYLRKAPANELVYQFLEKKRAEGKPYFVYMTAAQNKFLRIYYARVKECLAAFDAQQDTTQS

SEQ ID NO: 199155 - protein, 388 aa, unidentified
MNNTNKSRANKKQPAAQASTAGVLSKSKTIKIGIDVHVDRYVAVRITDGNTPQPPQSFKPEEFVLWMAKQIALAEKVFTCYEAGPFGYSLHRKLEKMGATNYVVRPRDWDEYGKRVKTDKRDARELALHLDRYVSGNRDAFCVVRVPTEAQEQQRSVSRQRESFQREKQRLAAQGRSHALYYGYRLQGEWWRGKTWKDMGLALPPIVLDLLEPLGRLIGALEDELKIRTTQVEEAAPESLPLGLGKMTCEILEREVLDWDRFKNRRQVASYTGLCPSEDSSNNRRFQGSINKHGNRRLRPVLVECVWRLTVFQPEYRVVKKWRPLLLDPKTSRPRRKKIIVAMARAFAVDWWRVRTGRCKAQDLGFKLKPDAAQLNAQPHGVNCKTCE

SEQ ID NO: 199156 - protein, 459 aa, unidentified
MPENSGGSDRGSRGKAIEGLPVVRPQVAGIDLGSEQHWVCAPALEGTGREVADFGATTAELVRMAQWLKQRKVESVAMESTGVYWIAPHEVLEAEGLEVRLVDTRQLARVPGRNQKTDPTDCEWIQRLHSCGLLRGSFRPQEQVCMLRTLIRDKANLVAESGDWVRRMQKSLDQMNVRVHRAVSDLAGSTGMAMVRAIVAGERDARQLAKLRDPRCRHSEEEIAEQLQGHWREDHLFSLQQAVKMYDAVQQRIAAYDKQILRKLAEMTPPERRRGSAPAAKNPQKANAIKMRGQEPMRQALYRMSGVDVTQIDAVGVATVEVVLSEYGPDLSPFPTEKQFVAHTTLAPHVPKSGGKPVKKKKRDSASTRVAAALRMAALALRHSPTALGAYYRQIARRIGADVAVFATARKLATLIYRLLRWGQPYVDEGAEVYEKRYQEMRIKALKSTAGRKKSTAGA

SEQ ID NO: 199157 - protein, 461 aa, unidentified
MAKKNTTSRKSKSKAPKSVLERINPNAAGIDIGANFHFVAIPEDRAEENIRKFGPFTSDLHRLADWLAEHHIETVVMESTGVYWIPVFQILEQRGFEVKLVNAAHVKNLPGRKSDVSDCQWLQQLHTFGLLNGSFRPKDEVCVLRTFLRLRDTLVKDCGSHVLRMQKALTEMNVQIHRVLSDITGYTGMAIIRAILTGERNALTLAQMKHPQVKASTEQIVKALEGDYRPEHLFALQTAVELYDAYHLKITECENKIEQQLEQFETKLDFDQVLEQSGALKVRSAKVRLELQRQAYLTSVCGVDLTRLPGLSTLAVEVIISETGLDMSCWKSEKHFCSWLKVCPDNRISGGKVLSSKSRKTKNRAAGMFRLAAQGAMQSKTAIGAFIRRIRARLGAPTAINAGANKLARLFYRMLKFGAAYVEQGQTYYEQRYKDRLLHNLSKRAKELGFQLTPHEPAAVS

SEQ ID NO: 199158 - protein, 338 aa, unidentified
MSIVYVGIDLAKNVFAVHGVDEAGKAALVRPSVPRARLHELVATLPACTVAMEACTGAHHWARLFAARGHVVRLIAPKFVTPYRMSGARGKTDAADAAAICEAVQRPNMRFVPVKSLEQQSQLMVHRARQGYVQARTACINRIRGLLAEFGHVLPLRADTVRRQAGALLEDLPGWANTVIGDLLSELHRLDERIAVYDRHIAQISRADDRAKRLMGLAGIGATTATAVVAMIGNGHEFKCGRQFAAWLGLTPGQYSSGGKTRLGHITKAGDGYLRSLLILGARAVLARARSNGDGISSWALALQQRRGYWRAVVAIAAKNARLAWAVLRQGENFKMPA

SEQ ID NO: 199159 - protein, 364 aa, unidentified
MGEGICFAGLDVHARKTAAAAVMLGTGEVWKAQFGGSPGEAIEWLQTLPGEIRAVYEAGPTGFRLARQARAAGLEVMVCSPGAIPRQPGDRIKTDMRDALKLARLHAAGQLRPVAVPSAELEALRDLVRAREDLRGDLMAARHRISKMLLRRGLIYTGAGSPWASQHHAAWLGSIQLTDPLAQSVLGEYLAGHEVVLARRTRLDGLIAEQAKDEQWAALVGRLRCLRGIDTLTAVGLVAEIGDFTAFAHPKQLASFLGLVPSESSTGERRRQGSITKAGSSHARRLLIEAAWHYRRKPAVSLTLRRRQTGQPPAAIEAAWRAQLRLSSRWAHLDARRAKRRTTVAVAVARELACFVWEIARQPD

SEQ ID NO: 199160 - protein, 391 aa, unidentified
MPQSNDLSRSLTALDQDSTLIAVVEMSQSSWLVGAIIPGVERRPAKKLEASEGMLLALLHRWRDEAAKAGCTIDRITVAFEAGRDGFWLARWLRQRGIEAHVIHATSIAVSREHRRAKTDRLDAALLQRAFLGWLRGERGHCTMVAIASLAEEDAKRPSREREALVGERTRIGNRMKSTLARLGIRGIRPGLRKAAERLEQLRTPEGAPLPPNTLAELRRDLARLRLINDQIGEIEAARLERLRQQPDEARHPMILLLARVVGIGIETADMLVQEVLSRKLRDRRAVARYGGLTGSPEESGARRREKGLARAGNARVRRGMLQLAWRFLMFQKDSALAQWYRARTADARGATRKTMIVALARKLLVALWKLVTTGELPNGVVLRPAIPAAV

SEQ ID NO: 199161 - protein, 394 aa, unidentified
MSMAIQSGKDKVVIAVDPHKASWTASAVDSSLQPLASVRVPVSRDGYQALRRFARQWPTAGWAIEGAAGLGAPLTTWLRTDGIEVVDVPAKLAARVRVLSSGHGRKNDDADALSVGIAALTSPALRTAEIDAVTAALRAIVEHRDDLVKTRTQTINRLHVVLTRLVPAGAKRHLSADHAAEVLRGARPRDPAAKTLRVLAMDLVSEVRQLDRRIAKAAKDIQMAVSASGATLTKLHGLGALTAGKILGRVGDVRRFRSAAAFASYTGTAPIEVSSGEVVRHRLSRAGDRQLNFCLHVMAIAQVRHNTAGRAYYLRKRSEGKSRNEAMRCLKRRLSDIVYRQLIRDADTKGGPGRTLGGGSIVSRGRLIPRTPALQTSHFPSPPPNPTTRQKPPT

SEQ ID NO: 199162 - protein, 339 aa, unidentified
MVLIGIDPHKGSHTAVAIDGYETQLAEVRVRSSKQQCDRLLEWASMFPDRRWAVESAGGLGYLLAQQLVAAGEDVVDVPPTLSSRVRVLGSGKAQKNDPNDALSTAIAALRGRRLRQVALDDHVTIIRMLANRQHDLVAHHTQALCRLHAQLANLSPGGVSGRLSPTRAQAMLATIRPADGVIAARKQQCGELLADVVRLRGALADIKGRIEVAVLASKTSVTDVYGVGPIVAAIIIGHSGDAARFASRNHYASYNATAPIEASSGPTKRHRLNQRGNRQLNHAMHLAAVTQISHDTPGRAYYQRKIAAGKSTKEAMRALKRKISDAVYRQLIADTTRP

SEQ ID NO: 199163 - protein, 364 aa, unidentified
MNSTVLPASVQPNIDCNYIGLDVHSDNVVVCVRRNILKVGGELQGKTIKLKKVSICDSQDSLTQLLSEYADGQQHVMTAESTFNWYWLADIAEEHGWNFRLADPCTVSQANIKAANDETDAQYLAERLRMGSLKSTTVLPRALRGARDLTRHRMRVMQEVSEKKIRLSNLYHNHCAHPLHGKQLQDLQFAYEENGIDAVLASGISGNGSELIIADLLAGLHDAQMRLERIEAQVYERLDQIDTYREGRLLLKNSMKGCGDVLSAVIITEIGDISRFRTMGEFVSYCRLAPASKLSNGKSKGQGNAKNGNAYLSWALTELATLMARYNKSIQHYLERKVKKNRLTRHWHTGTCRKARSLCVSSVT

SEQ ID NO: 199164 - protein, 378 aa, unidentified
MRFYNRVHKFYCGVDLHARTMYLCILDHGGAVVLHREVPAEPGAFLEAIAPFREGLVVACECLFCWYWLADLCQAENIAFVLGHALYMKAIHGGKAADDKIDSSKIAHLLRGGNLPFAYAYPKGLRETRDLLRRRMYLVHKRAEVVAHVVNTNSQYNLPPFGKKLIYARNRQVLKIAQRFGDASVRKNIELDLALLDSLDELIGDVELYLDRTVKVDDADSFYRLRSIPGVGKILALVLFYEIHDIGRFASEGEFLSYARLVRPLKTSAGKVKGGGGAKIGNAHLKWAFSEAACLLARESDQAKRFLARKEKQHGKPKALGILAARLGRAVYHMLRQKRAFDAKRFWNGEPKVPPTPKGKSVMTPGRRRKGARCVLEA

SEQ ID NO: 199165 - protein, 315 aa, unidentified
MAPPLLFVGIDVAKAECVVALRPPGTTWSVPQTEAGWAALATRLQALAPTLVLCEATGGLELPLASVLAAAGLPLAVVNPRQVRDFAKAKGLLAKTDALDAAVLAHFAEAIRPLPRPVPDATTQTLAALVTRRRHLVEMCTAEENRLGSAPPSLRAGLRAHIRWLQRQLASLHTDLDQTIRTHPGWRVQDDLLRSTPGVGPILSSTLLGGLPELGTLSRRAIAALVGVAPWARDSGRHRGARRCWGGRADVRAVLYMATLAAVRCNPVLRAFYQRLLAAGKLKKVALVACMRKLLTILNAMVKTQTPWTPQVRET

SEQ ID NO: 199166 - protein, 338 aa, unidentified
MKLYAGIDLHANNSVVVVIDEEDRILYQKRLRNERGEILHALTPYHDTLQGIVVESTYNWYWLVDGLMTAGYRVHLANTTAIEQYKGLKHTDDESDARWLAHLLRMGILPEGYIYPKEERAVRDLLRKRSQLVRQRTSNILSIQNLLTRNTGSSLSGNRIKQLTREEVEQILPQAELALAVKSNLAVLQCLEEQIEQLEEVVRAQLKLRDGFRPLLTVSGIGQILGMTIMLETGEIGRFATVGDFASYCRCVGSQKLSNGKRKGQGNVKNGNKYLAWAFVEAANFAVRYNAQIKRFYQRKQAKTNGVVAIKAVAHKLARACYYILRDQVPFEVNKAFA

SEQ ID NO: 199167 - protein, 359 aa, unidentified
MKSKIKQLDFKGERIFTALDVHKKNWRVTVGSKEFELEHYSQNPNAKDLARHLKKNYPGAKYMVAYEAGFCGFGIQRSLKEEGIDCIVVNAADIPTSNKEKRRKQDKIDSRKIYKRLAAGDLAAIYIPQTAMEHARSLMRERSRIVQDQTRCKNRIWSLLLFSDLTVDSNRPKQYWSRKFIESLKQLDCGSEPLRQALDLAIEEYILVRQLLTKATTKVRELSGTKFFVQIQELLRSIPSIGLINAMVIHTEIQDIYRFKTLDHLCSYAGVVPDSDSSGDTQRITGITHRSNNYLREAIIESSWIIIRKDPAMLMMYKTYCARMNENKAIIKVARHLLSRIRYVWSTQTKYEKGLLDRA

SEQ ID NO: 199168 - protein, 343 aa, unidentified
MKLRTITIDLAKTVFQACGVNERMKPQFNTRLKRDQLLDFIRQQALTMVVMEACYSSHYWGREMAKLGHDVKLIPAQHVTPFVRGNKNDHNDAFAIAEASQRPFIRFVPIKTEHQQEICCLHRIRERLGKNKVALSNQSRGLLSEFGVVFPCGHAAFLHGLTSIIDNPQYSHRLQDMVIDMLSEYKTTINRLKRIEKQLTEFVDGCESGRILLSIPGIGVINASAFLASIDKGQAFSSSKEFAVWLGLTPKQHASGNISKMGGITKRGDRYLRKQLIHGARALVSRAPKSSDPLALWAMKLRVTKPFNKVAVAMAHRLARLIWVLLTRQEHYRAMPASLEVSA

SEQ ID NO: 199169 - protein, 364 aa, unidentified
MQQNRRSVGLDVHARSIVACGLDGQTGRLFERRLCPDHTEIISWVRSLPGPVAVTYEAGPTGFGLARFLTAEGIDCLVAAPSMLQRPAGDRVKTDVRDARHLARLLHLGEITAVAVPSVEQEAARDLVRAREDVRGDLMSARHRLSKLLLRHGIVYYGGRAWTGRHDQWLRAQRRSAVFAAPALGMAFDIAYDTVLAAVARRDRLDAAITAMAAASEHTPVVRRLCCLRGVATLTAFGLAVEIGDWHRLTGRGMGAYLGLVPSESSSGASRSQGSITKTGNGHARRLLIEAAWHHRTPLRPTVALRRRQDAAGPAARDRGQRANRRLHARWIAFDARRKQPAVANTAIARELAGWCWSLAVLND

SEQ ID NO: 199170 - protein, 412 aa, unidentified
MRCIALDVHRDFCEVAIAEAGEVRLAGRVRTEPEALELFARSLAASDRVALEATGNGLAIARIIEPHVDRVLLANPKAVKGATQTAKTDKVDARALAQLLAGGFLPEVWIVDETTRMLRRRVARRAQLVRQRTREKNQVHAILIRNLKARPPVTDLFGVQGRRWLAEQTLPEDECETVAACLRNIDFLEGELGLLDKSLAEHALSSAEMQRLMTLPGVSFVTAAALMAAIGDITRFPTARHLVAYLGLNPRVRQSGSAPARHGRISKQGPGEARHLLVEAAWHAARTTGPLRAFAERIKAKRGANVATVAVARKLVVIAWHMLSHGEDYAFARPSLVREKIRRAQLLAGAPRRQGYRNPVRIFASAEQHRLEKQLAGQAETAYRRLVQDWQPAINKGAGVTRGHASSSPRRA

SEQ ID NO: 199171 - protein, 422 aa, unidentified
MQVVYQRCAAVDVGKDVIAVAVRLPGDGPDGRATIKRMFKTFYGVLAEAARWLREQGVTHVAMEATGIYSMPVYHALLEHGDFEKVLVCNAGHVKNVPGRKTDFSDAEWLAHLLECGLLAGSFIPPAEVKAARDVIRYRAKVAQQRVSEIARLGNVLQDAGIKIDSVASSIATKSGRAMIEALIDGERRGPVLAELAKGKMRAKIADLSMALEGRFGDHHALMCRLHLDHIDHLEAMIARLDAQIETMMTPFQCWRDLLTTAPGIGPLSAAAVISEIGVTVAGFFPDDAHLASWTGLCPGNHESAGKRRPGRRRKGNQHLQSILVECAWSAVRHDGYLKSLYHRHVMKWGGYRSSTAKNKAIVVVAHALIVIIWHILATGKPYHELGADYFTSRLDPERETRRLIARLQALGHRVTLDDTAA

SEQ ID NO: 199172 - protein, 366 aa, unidentified
MTSTSTASRPRRRRPAGEVVLGVDTHRDAHVAAVLSLVGEVIGTEEFPATAAGYRNLLGWAKASGTVRRAGVEGTGSFGAALSRYLLAQGVDVFDVNRFDRADRRRRGKSDPLDAENAARSVLSGRAHAQAKTGDGPVEIARMYKLAKDSAVKARTQAINQLKAVLIRADPQLREELAGLGNAELFRTCAGLVDDSLNHEAGEGAVLHATHVTLGLLARRIRQLSDEVQDLEGRLTRLVERHAPQLLEVVGIGPDTAVTLLITVGDNPERLGSEASFAALCGVSPVERSSGSRRYRRLNRGGDRQANAALHRIVQTRLRVDPRTQEYYERRSKEGKTRREIVRSLKRYAAREVFHLVRPVQSQPSL

SEQ ID NO: 199173 - protein, 357 aa, unidentified
MESQEVKYVGVDCGKRSIEVVRINSENSLERRQFSTTESGINNLLQWLTLNDIVGLEAGSQSFRIAKSILNKGVQVIVLNPGNLATIYQSLKKTDKEDSLKIARLIQRFPIEELPTVPIPNDEEEDNRRLCTEQENWTRQLTQSKNRLHSLFTQAGLTHITKKHLRTKANREISVALLPSRYQKEAERILKVLDLVEQNLKLIEEEIKEALKKNKAYVQTIMSMPGIGMITSLAIMSYMGDCKRFSSAKQAAYYAGLVPRVDISGDTVRYGRIINRGCHSIRRVIVQAAWSLVRCQHGGKVKEFYQRLYLKKGAKKSIIATSRKMIEVLYVMIRTGKLFDSMPENILNRKLTQYGLM

SEQ ID NO: 199174 - protein, 425 aa, unidentified
MFVASGDDEQIIERVAALDIGKAEVVCCVRLPAAEGGKRRVQEVSTHSAMVPSLCELANRLVELGVRRVVMEATSDYWRAPFYLFEAHGLDPWLVNAKDVKHVPGRPKTDRLGAVWLCKVAERQMLRPSFVPPAELRRLRDLTRYRADLVGVRTAEKNRVDKLLEDACIKLSLVASDIFGVSGRAMLDALIAGERDPQVLAEMARTRMRVKIPQLQEAFAGLMLGTFDDHHRVLLSRMLARVDGVDADIAALDTQIEAHLAPFADAAARLTQIPGVGATAAAVIIAEIGVDMTRFPTPAHLCSWAKFAPAVHASAGRTKASTTGHGNRYLARALGEAAVCTNRTPTFLGARYRRLSRRRGKKKAIVAVGRSILVVVWHLLADPTTEFRDLGADHYDRHVNTLAKQRNHVRQLEALGYRVTLDPAA

SEQ ID NO: 199175 - protein, 364 aa, unidentified
MPTIADPGPGVIWGGVDTHADVHVAAAVSGTGKVLGTAAFPADPGGYARLLAWLAGHGEIALAGVEGTGSYGAGLARYLRERGITVAEVTRPDRQRRRRHGKSDPVDAVAAAMTALNGQDTAVPKTADGAAESIRALQAARAGAVKARTQAGNQLRDLAVTAPAGLREQLHGLRTPARVRAAAAFTPGDLADPAEGTKAAMARIARRWQNLDAEVTGIDAQLRDLVTRAAPAGFLDLPGVGIQTAAALITAAGDNPARISSHASLAALAGTSPVDCSSGKNQHHRLNRGGDRQANAAIWRIVFTRIRTDPRTRAYLAKRTAEGKTRKEAIRALMRYVTREVYKHLIRPARSPAEETAPPIPSTP

SEQ ID NO: 199176 - protein, 342 aa, unidentified
MTKILKQVAGIDVAQNELVVSLGRIDQSLYKDIYAYKTFANKQSGFAALLVWIKKHTDHEVTVRYVMEATGVYHEKAAYYLSDQGFEVSIVLPNKISSYMKTLEIKTITDKTASKAICQFGLERGLDLWQKPKNIFRDLKQLTRERDQIVADCVIAKNQLHAEQAEAFPNDRSICRANQRIKLLNEQEREIKQEIAQFVKTDNELHKKINLITSIPGVGSLTAVIVIAETNGFELIRNKKQLVSYGGLDIIRKDSGTSIKGKPRISKKGNRHLRKAIHMPALAAIRNDERFKTIFVRLVSKHGIKMKAAVAVQRKILEMIYTIWTTERPYDKEYLQKAQLPA

SEQ ID NO: 199177 - protein, 339 aa, unidentified
MKYIGLDVSKKFSYVTVMDEKGIVEMHGKVDNKEEALVACFEKVEGDSSLVMEATRNWYYLYETLEGRVKEIHLAHPLKVRAIAEARIKTDKIDSKILADLLRVSMLPESYIPPQDVRDQREQLRYRASLVSLQTQVKNKVHALLDKNGRHCPYSDLFGGRGMDWLLGQGLREVYAEELTGYLEVLEALKEQITAVGKNILANSQQSPEARLIQTMPGVGYYLSMLITYEIGDINRFPDQHKLSSFAGLVPSTYASGNVVRHCRITKQGSKWLRWALIEAAQKAPVNSPKLKAFFERIARRQGRKTARVALARHMLKIIYHMLKEKQPFAEDSKRSAIA

SEQ ID NO: 199178 - protein, 332 aa, unidentified
MDNFYFIGVDVSKKKQDFCVLFEGKVLREEQVSNHQQAVARLIGELKNDLEMDNEQFLICAEHTGQYTFPLVCACKSVECKLWLENPSQIKYSSGMQRGKNDKVDAKRIAIYASRFGDKVKYYDRPTEEIERLKQLERERALYVTDLAKYKGQMYDQKDFMPAALYRKKTKRMKGLIQELQAAIDAITAEMEKIIGSTEVLARQMELLMSIDGVGKVVALNVIIETEAFSRFDNPRKFCCHAGVAPFSYTSGSSQHSKNKVSHRANKNIKKLLHMAAVSVTHRKEGELKAYYMRKVEEGKNKMSVINALRAKIVARMFAVIKRNEVYTPIYS

SEQ ID NO: 199179 - protein, 362 aa, unidentified
MEYFCGLDVGMDETAVCVVDDKGTVMLETAVVTDPDAIKAALAAYLGRLRRLGHEAGSLSPWLHAELLKLGLPAVCLETLHVRAALKAQRNKTDKADALGIAHIMRTGWFRRAHIKSEACYRLRLLLTHRRNLKRKFLDLENAIRHSLKVFGIRLNRVGRGGFAQAVREACAGDALVSELIDAMLTARAALWKQYCRLHDLVVRLVAGHALCRRFMQIPGVGPIAALSFMTAVDDPSRFRRSRDVAAYFGLTSRRWQSGSSIDVQGRISKAGDGDVRRALYEAASALLTRYKRKDKVKTWGMAIAKRTSHRKATVAVARKLAVIMHAMWVDGTFYCGDPDAAQADVSARAAAKDRKLLGAHA

SEQ ID NO: 199180 - protein, 416 aa, unidentified
MQDNYRLKHMFVGVDLHKATHTAVMVNCWGDKIEEITIENRPADFEKLLKFAKKHTPKGMTPVFGLEDVGGHGRSLAVYLLEKNQIVKEVNASLAHDRRKSNPMYRKNDSWDAQCVADVLKDKMLELPDANPQDIYWTISQLVNRRDAIVKAQTALKNQLHGQLEHNYPSYKKFFSDITGKSALALWEGYPSPKSLVGVEVEELAQYLREASRNACSTKKAKAILELVKADGDTTRDYQETRDFLIQSHVRDIRFKLEELRLIEAELAKLMATLEYQLETMPGISTVTASQLVSQIGDIKRFSNHNKLARYAGIAPVNFSSAGKGKDSKSKLGNRELHGIFYNIAKGQIQISKGSGKKRNEIFREYYERKMAEGKTSGQAMVCVMRRLVNIIYGMMKNKTAYRHPVISEPIPAKAA

SEQ ID NO: 199181 - protein, 346 aa, unidentified
MEHYAGIDVSLERSSVCVVDAQGKIVKEAKVASEPEAVVAFFETLGIAVKRIGLEAGPLSQWLHAGLKRAGFETVLLETRHVKAALSAMTVKTDRKDARGLAQLIRMGWFRPVHAKSMASQEVRALLVARKQLLGRLIDVELSIRGILRGFGLKVGPVTRKGFEARIRELVTGQAMLERIAAAMLSARATLKTEYDKLHKTVLAIVREDAVCRRLMTVPSVGPLVAITYKSAMDDPNRIVKSKAAGALFGLTPKKYQSGEKDVTGGITRAGDEMVRTALYEAANVLLARITRFSKLKRWGMDVAKRRGSKRAKVALARKIAVILHRMWVDGTTYRWTNAQPIAVHV

SEQ ID NO: 199182 - protein, 327 aa, unidentified
MEWTVAIGVDTHRDQHVAVALDRLGRRLGALELEVDEQGFAGLIDFACSLGQPAFAIEGTGSYGASLARALLGAGFAVYECERPERRSRREKNDLLDAERAAQRLLSGKPLPLPRTGSERERLRLLLAERRSARQARLQADNQLKAALVTLEPGLRRQLSELRGASLVRSLAARRRPELAPLLRLAKRSLWLAEELAEIDRELAELTARLCPRLLAEDGVGPLCTAQVLVSTAAPNRLRSEASFAALAGVSPIEASSGQVKRHRLNRGGDRQLNWALHMSALNRIRCHAETHAYYQRLLEDGKSKREAIRIVKRVLARRLYRTLMAP

SEQ ID NO: 199183 - protein, 468 aa, unidentified
MPTNHRPHKRRLDELACVYPNAAGLDIGSAEIVVAVPPERDAEPVRVFLTFTPDLYALVAWLLACGIDTVAMESTGVFWIPIYELLEQHGIVPYLVNARHVKTVPGRKTDWNDAQSLQKLHALGLLQPSFRPDAEIRTLRTLVRYRAELIERRAPHINHMIQALKHMNIQLSLVLTDVTGVTGLAMLRAMVAGERDPQRLAHFRQPGCKHSEAEIVKALTGTWDEAQLFVLRQAIDLFDYYTTKIGECDTKLEQQYQAMESRWEPNAPLPDLPPAKPDSKSKNALNFNARAQIARVIGVDLVAVMGLSAVTVQTILSEIGTDMERFPTVKHFCSWLGLAPHNDISGGKVLRSRTMKVRNRANQAFRQAAQSVAKSDSSFGAYYRAMRARLGPKQAIVATAHKIARTVYQLLKTGEAYREESAAEYDHKRRERERKHLERRAQKLGYILTAIPSTAPESPPEGGCAGSF

SEQ ID NO: 199184 - protein, 394 aa, unidentified
MILVGIDIGKNQHTFSIVDMNTGEILSNPSLFNNNQEGFLFLIKKLNIYSKSDLLIGMEDTGHYHFALLKYLLDIRYTVALINPTTTDLTRKLQGSITKNDPLDSLTICDVIGSNQRKKPYRVTKVNCFDLYEQKQLTRHHHNLKEELNTYKNRLQKCIDIVFPEFNSLFRSKYGIVYMNVLKTFASAQKIANSDIRTIRKCFEYDGRGKRITLSADQLKAAAKTSIGIPSVAEEIQIRHLVCQIEMIEEQLSEIDKKIEEFSLQNNSPILSIPGISHFSGTSILAELGDICNYTKASQIIKFAGVAPYHYESSQFTAQHTAITKKGSRYLRKTLYQIILPVINHNTVFTAYYNKKLAEGKGHRCAQGHCIRKLLRIIYHLLSTEQTFDPALLI

SEQ ID NO: 199185 - protein, 350 aa, unidentified
MQGNGRWIGLDLSKETYEMCYFDQKGKVGRSGGETTKGGRTKLYAKLKAEDIVAMEVNSLAFVMEKEMRVIGCTVVILDASQLSIIYSSTKKTDKEDALKLARLVKIYEKEDLPIVDVPTEKEYYRRKLTKECKTLKDDRTQEINRLHALFLQCGITTMKRSNLQTDANRQKELPQLFGYEVGQAKRVCERLTLLEAQIKELEQTITKECKADKDIERLKTIPGVGDKTALAFTAYVGDGKRFNNGDEVANYLGLVPRVDCSGSINRYGHITKKGNRIVRALLYQAAWSIVRSKHGGALKAKYFYMTEHGKGKKISITAIARKMAKLLYVVMKNKQMVYQENPVSALQAG

SEQ ID NO: 199186 - protein, 317 aa, unidentified
MHHKNPTTWIGIDVSKKELEIHSHDSALKLPSAIANTKTGISKIISKFKKCDDPHLVFEATGGYEKLLLVMLQNADIKASRINPALARNFAKAKGLLAKTDSIDARILTDYGIQFSPRETAPLDPILEEIQSLVKYRRHLNDELHRERMHLEHMLPKSIESMVNSRMKSLQKQIKKVTAMMINLKVKSAPLDQAVELLTTTKGVGDNSALSLLVAMPELGKISNKEASSLAGLAPFNRDSGKMRGQRKIYGGRREVRRALYMAALVGSRHNLVLKEFYQRLLEKGKPKKLALTAVMRKLLCHLNSLMKRHLQETQPV

SEQ ID NO: 199187 - protein, 339 aa, unidentified
MQHVAIDLGSKESQVCIRREDGTILVERKHPTRKLGELMRTLPPSRIILETSSESFRVADQAREAKHEVRVVPATLAKQLGVGERGVKTDQRDARKLSEVSCRIDLPSVHIPTPEARELRSMLRSREALVASRTQLVNHVKGWMRTQLLRLRSGSTATLPERLRGHATTLEQSLPVHIEETLVVLDALTVQITASNRRVKKLAAEHEVARRLMTIPGVGPITALTFIAAVDRVERFEHAHHLQSYMGLTPGENSSSERERRTGITKAGSTSVRRTIVQAAWATIRVAPSSPMVRWANQIADRRGKFIAVVALARKLAGIMFALWRDNSTYSSLRSAMQT

SEQ ID NO: 199188 - protein, 350 aa, unidentified
MDTTIPPLASIGIDIGKEVFHVVGFSTDGKIAFRRKIKRLALVETFKKLPPSVVGMEACLSAHFVSRALRQLGHEPRIIPAIYVKPFVKGQKNDYNDAEAIAEASLRPNLRTVREKTQDQLDLQACHRVRSRLVSRRTATINQIRAFLIEQGIAVRTGSRTLRNSLMAILKNRQDEISPRMSGLIAGLYEDWIALDERIDTIASEIEKISEKETNCQRLMSVPGIGPLISTAVVAAIGTGEAFERGRDFGAWLGLVPRQYSTGGRSILGRISKRGSKYLRTLFIQAANVILMRPHNWERFSFGAWLLNAAPRLHRNKLATALANKLARIAWSILRNEKAFDTPRHEVVAI

SEQ ID NO: 199189 - protein, 338 aa, unidentified
MKNTLIYPHTPAFFLGIDVGKPDLFCHIIGPDQTLSQRFDNTPEGINTLLKWLLSIATPQQFAACLEQTGHYGRAISHALADAGLAAVYLVNPRQIKAYGEQRLRRNKSDTADARLIAQFLQSEHSKLLPWTPSGADNQQIKDLSRYADSITQDNARLKTKCDMTTHKPILRSLRRRIKAQEKEIADIRLRINKIVEGNEALHRQHELLASVPGIGDVTCQILLAELPDLELFSNARQLAAWAGITPRHFVSGTSGRSTTPITKIGSVYLRRALFMPAMNARVFNPLLKAFADRLKENGKKPKQIIVAVMRKLLHQIYGILKSDTPYNPEKRGLCSAP

SEQ ID NO: 199190 - protein, 344 aa, unidentified
MLFYCGIDLHARESVLCIIDAQDTIHFRDKVPNQLSHILEILHSFNPKPKVALEATLNWYWLVDGLQEAGFEVKLAHPFGLQVIKKAKVKTDNRDAFHLARLLRLDALPESYIYPKETRPLRDLLRKRQKIVSLRAAEYTSLHRTLLQHGIVDIPATQAKEFNSRDIEHYFEHPVIQCRCAMELERMQFYTRQIKILEEIILGNATEEPDFLLLQTIPGIGKLLAAIILYETGDVNRFPTAKQYCSYSRVVPGIAQSSNTVRRGKGSKQGNPYLKYAFMRAAALAVRFDGPIRRFRLKHLNRRRSKARKLISVSIVAHKLAVAAYQILKDKKTFQVENMFGPYI

SEQ ID NO: 199191 - protein, 343 aa, unidentified
MSEQYAGPQIVGMDLHRRRSVLVRMTETGEHLETVRISNDAEYLREVMSRAGEAPEVVLEATYGWYWAADTLAELGAHVHLAHPLGVKMFSYRRVKNDQRDAADLADLLRMGRLPEAWIAPPATRELRELVRHRAKLVGIKSNLKCQVHAVLAGAGVTVLMSDLFGVEGHQLLERVDLSPAARARVNSQLRLIENLEFEIGLFANLVAGRLRADPGYAAIQAVPGIGAVLGAVFVAEIGEVSRFPGPAQLASWAGLTPRHRESDTTVHRGRITKQGSRLVRWAAVEAVQRVGGHTRLGQIRDQVGARRGRNIGVVAAARELIVLVFYGLRDHHIRCLAPKPAA

SEQ ID NO: 199192 - protein, 393 aa, unidentified
MPIWMRPTGEIEKHPHLDRFVIMGWPAPLQSNRVGLLCFGRERNGPMSIFVLGIDLGKNVCSLVGLDEAGAVVLRRRIRRRIRRDGVVDFVSRLPACTVAMEACCGAHHLGRVLGAAAAGHTIRLMSPEYVRPYVKANKNDDHDAEAIAEAATRPTMRFVPVKSETQSDIQALHRARSRLVAERTALINHLRALLLERGIVVAQGRHKLEVALSVSADEDDPRLSPRMRVLVEDLRAEWRSLDERIAAFDAEFVHMARQDEAARRLSTIPGIGVINATALVAAVGDARSFGRGRDLAAWLGLSPRQATTGGKPRLLGISKRGNRYLRANLIHGARAVLPRIMAQDTPLGRWVRGLSDRAHKNIVVVALAAKLARIVWAVLRKERGFDPAIAAA

SEQ ID NO: 199193 - protein, 361 aa, unidentified
MQSTTIIAFDHHAATTVATVLLPGQRTPALHSLPSDILTIRRFVARVHRQGPVTCCYEAGPCGFELHRALTAHRMPCEVIAPALIPRRAGDRIKTDRRDAGQLAVLYRAGALTAIHIPSDHEEAARDLLRCREDIRADLLRARHRLSKFLLRHGRRFTATKKAWSKRHDAWLRAQTWPLPALDQTHRAYLRAVDEVLARLRDVETQLRELLDLEPLRPRVQRLRCFRGIDDLTALTIAAELGDARRFATAPSTMAFVGLVPSEHSSGAKRVQGGITKTGNAHLRRVLVESAWHYRHHPFVSATLRARQRGAPAEVIARAWTAQQRLHRRYQRLAARGKPKQHIVTAIARELTGFVWAALTQ

SEQ ID NO: 199194 - protein, 457 aa, unidentified
MEEKIVLDLVNINAAGIDIGSRSHWVAVGQTDVEIKEFGVYNENLYELADWLSEHNIKSVAMESTGNYWQNLHAVLISKGFDVTLCNGKFTKNIKGKKTDVKDCQWIQKLHSLGLLSGSFLPDEDTEILRTYTRHRSNLIKQAASATKKMQKYLRLMNIRLDVVVKDVVGLTGLKIIRAIVLGETDQKKLASLRHYNCKKSEEEIAKALHSNGRKDFLYALKDELDTYEFVQKKIRECDNQIAEKLDDIIGKDPEKQQHYIDKKPYKRINKNTPKNIDINLKSYQMLNGIDLMAIEGMSYNTVLAIISEIGYDGFKKFKTAKHFTAWLRLSPNNKVSGGKVLSSKVGKGSSRLKIALRNAANSIGNLKDSTPLRDFFVRINFRKGRVSAVTATARKLAIIIWNMVVKGEQYVNPEGYLYLDQKRKLGLVKRIKKQIDKFGITQEDLDLNLNHCKTTT

SEQ ID NO: 199195 - protein, 310 aa, unidentified
MTSQVTVIGIDVAKETLSLCDARTGEVFELSNEARAIKAWLKTLPSHCAIAIEATGIYHVLVASLAHARKHRIYLINGFRLSNYRKGIGGRNKDDRSDAQLLARYLSHEQAQLEPWQPPSKVYCRLQALLHRRAVLVRNVTSLRQSFSQDPMLARALKPVLKRMAVLEQRLETQIQLVLEEAGLKEQSKRCQAIEGIGPLTAAALILAFLRGHFRNSDAFIAFLGLDVRLKESGRYSGRRKLTKQGDPEIRRLLHNAAMAAARTKRWRELYQGYLARGLKTTEALTVLARKLARIAFALMQTQTTYQPRG

SEQ ID NO: 199196 - protein, 462 aa, unidentified
MAKQRRGGKNSRRAAKDILAELPPLNLNAAGIDVGNAAHYVAVPPGRDAQPVREFGSFTADLHRMARWLKACRVDTVVMQATGVYWIGLYQVLEEHGLNVQVVNARYTKTLPGRKTDVQECQWLQKLHTFGLLNNSFLPAAEIRELRTYLRPRENLGVGAATCLQHLQKTLTEMNVQLANVISDLSGVTGMAILRAIVAGERDAERLAQLKNERIQASRAAIARSLEGNWREELLFVLKQSLEMYDIYLEKIAACDQRIEAHLKTMTAKVDVQAQPMPEARRVKYPRRHQPRFDLRGQLYRVTGVDLTQIDGIDVQTAQTLISEVGVEMSAWKTEHHFSSWLGLCPDNRISGGKVLKRRTRRAINRASIALRLAAWNLLRSQSALGANFRRLRARLGAPKAITAMAHKLARLVYRLLKFGTQYVDKGMAYYEMKYRQHQIKWVMKQAAALNLQFVPSTAVTG

SEQ ID NO: 199197 - protein, 424 aa, unidentified
MARKEDTKIVQVLHPICCGLDVHKESVTACLIAQTPAGERIEQRQFRTLTRDLKALKDWLLDNECPTVAIESTGVYWRPVFNVLEGTVRVILVNARHTKHLPGRKTDMSDSKWLAGLLRHGLVRGSFIPEERMRQWRDWCRTRRMFVDTVGDFKRRVHKLLEMANIKIASVLSDIFGATGQNLIRLLLSNKPITLSEVEECLRGNLASKKEREKKTFELYDAIEGFFGDHQRNILKPLLRTIDTLEKEIALIDERLQGLLAPYHDVIERMAAVPGIGQVSAWAIIAEVGPSLEAFDTMEAFSSWCGVAPGNNESAGKRKSGKSPVKGKMIKTILIEVAWSAIKRKDSYYRAKYYSLKARLGSSKKAIVAIAHRITKALFHIMKHGAHFKDLGKDYLSLLHLHMRYAYLSREAEVIGYKLVAITN

SEQ ID NO: 199198 - protein, 456 aa, unidentified
MKIPQSTIRLLTGRLVTILLNREVSTMKSNTQNAKIEAITEKTLVLGIDVGSETHYARAFDYSGIEYSKKPFKFSNTETGFVTLKEWILDLKERHEKDKVVPGMEPIGHYWFNLGKFLQDNEMKLVLVNPHHVKKSKELDDNNPTKNDRKDPKVIAGLVREGRYMIPYLPDGVYADLRTASNIRFQLQAELTRIQNRISRWFNIYFPEYKTVYGNPDAKSGMLILKAAPLPEDILTLGIDGVNQIWRDAKLRAVGKARAKTLIEAAEHSVGSKEGAVSARMEIRMLLEDYESRNIRLQEVMTLIEGLAKQIPMAEKLLEIKGVGIKTVSGFLAEVGDISRFNTPKELQKLAGLALVESSSGKHKGETTISRRGRKRLRYLLFEVTMSLVAKNPEFRELHNYYTTRRLNPLKKMQSLMAIAAKLIRVFYAMLTKGVDYDPKKMVSDIKRPAVYLQAA

SEQ ID NO: 199199 - protein, 355 aa, unidentified
MTANRPCVTGGVDTHGRSHHAAVINSAGRVLGSAEFEANTAGYRRLLAWMRRHGELAQVGVEGTGTYGAGLTRYLLAAGVPVAEVDRPNRRLRRQRGKSDPIDAEAAARAVLAGTATVPPKDRGGIVESIRALRAARSGAVKARGAALNGLKAMIVSAPAELRAVLDHLHTVPLVKTCAGLRPDRQRLDDPLQGTKAALRSLARRIVALEDEINELDAALAGLVRRAAPHTISLLAIGVEHAGQLLVTAGERPERLRSEAAFAHLCGVAPIPASSGRTQRHRLHRGGDRAANRALHLAVVVRLRCCPRTRAYVERRTQEGLSKPEIMRCLKRYLAREVFHTLSADLQDLQGLDGI

SEQ ID NO: 199200 - protein, 343 aa, unidentified
MEYGAIDLHAKESEIRIIDEAGAVVFTRRIPTTPARLTEVFGSRVPLRILLESGTGSGWVATHLEALGHAVVVADPNFAPMYGHRQRRIKTDRRDVAALAEANRLGIYRAAHRVSAPQHDVRRRLRVREQLVHVRRQAINLLRAQLRSEGVRVPTGAAETFAARFTASAASAGVREAMAPLLELLAAVAPLLAQAEQWTRQAAKADPVARRLMTVPGVGPVVALAFEATVDDVSRFATAGAVAAYLGLVPREDSSGERQRKGAITKAGPTRMRALLVQSAWHLWRSPSGSATLHAWARRLGERRGRRIAVVALARRLARILWALWRTGEHFEPTRVGRLAVAA

SEQ ID NO: 199201 - protein, 497 aa, unidentified
MPTKANIYSDCNPQVLKLFEQAGHPARVLCVALDYAKAQHMALVCNGLGDLLKGAFAVDNTPAGATQLLQQVRQCAKQRRIPTQQVFFGGEDYPTFAENFLRHLRKEKFLVVRVNAWEAKQQRSNFQASSDELDLLGIARCCLNRRGQPVQDLPVAYANLRIATRDRNELVRLATATSNRIHTYVDRLFPGFLSADKSGLAPFCQASLDLMAERFSPAEVRRRPRGALGQWLARRAVEEPHAVAAQLKELARGALGPAPEQTALLQRTLAQLVGLYRGLEGSISGLDRELAYWLARTPGALLTSISGIGITLAAGWMAELGPPQQWRAVRRICSYAGVVTKTKQTGGPEKEPMPTYVQQRCNKRLKNVVLQAVEKVRQYGPEDLRRSAQELEANGSHTEFGMAKRLVRLAKYLVVTGTIYRPKTLLDPDTPKEKLVLYYQTAWDKFLLKWKGKSDLKDVFAPAHPLGQWRQMVKELYALELRLPQQRATPTPGASAP

SEQ ID NO: 199202 - protein, 381 aa, unidentified
MTETTRTMDSSAPAAKLYVAFELGSTKWVLASTVGRGQRPRLHQVRAGDVAAVEKELRTAKTRFGLPVDAAVASCYEAGRDGFWLHRWLQQQGVASVVVDSSSIEVNRRARRAKTDRLDAMKLLDLLIRAAAGEARVWSVVQVPSPEAEAARQLTREITTVRVDRTRVRNRIQSLLATQGIRCELTRRFPERLGALQTGDGQPLAVTWRDRLTREWAHLQAIEARLLTLRTARRAGILAGADRVAQVAQHLCRLRGVAETSAAIYSAELFGTRTFANGRQLGALTGLVPVPYRSDQRIQDQGISKAGRAELRRVSIQVAWCWLRWQPDSALAAWFRQRFGAAGGRSRRIGIVAVARRLVIALWRFVEHGEVPAGAQLKPTT

SEQ ID NO: 199203 - protein, 338 aa, unidentified
MSDVYVLAIDLAKRSFQVCGTARGGAVLFNRTVSRAKLMHMLAVQAPCIVAMEACATSHYWGRVAQGHGHDVRLIPPIYVKPFVKRQKNDAADAAAIAEAVLRPNIHYVAVKTAEHQARAVAFRTHQCFVRQRTQLINALRGHLAEFGIVVAQGPVHLREVVGLLENGEAEAIPVTVKDIARLYLDQIDVLGGRIEELATGLRAASEEQAETRRLCTVPGVGPVTAGAIMAFAPDLRAFASGRNFAAWLGLVPRQRSTGGKILHGGVSKMGQTDIRKLLIVGAMSRIRWIVRKGVMPDNWLGRIVARKPRMVAAVALANKMARNIWAMMTREQNYRMA

SEQ ID NO: 199204 - protein, 392 aa, unidentified
MNYFLGVDIAKTNHVASLLNQSGDVIIKAIKFTNSTDGLNKLLCTIQDKLGDLNNIEVAMEATGHYWLSLYSALVDSSFNVSVFNPYQIKSYRGAFNNRKQKNDAIDSVIIADYLRVFGSSVSQLPKDDLLSLKQLTRYRSDLVANVATLKTQVIGVLDKVFPEYSKLFCDVFGETSKQLLLKYPTPEDILKISTTKLSNLLSKHSKGRFDKNTAIRIKEVAKNSFGIKFTANACSFEIKQLINQIIFIENQIEEVAKEIKELYSKLDNHLLSVPGVGQNLAPVILAEIGDINKFDSPNKLIAFAGVDPTENQSGNKQSSGDKISKRGSSYLRHAIYTASLVAIKNEPELRAYYDKKIGEGKHHFVAMAGISRKLLTIIFYILKYNRDYERH

SEQ ID NO: 199205 - protein, 398 aa, unidentified
MTAAQTHSMQGATARLFVSFELGWSKLKIASTCDPLQKPRIQEIRARNLEALQAELAKAKKRFGLPEDATVVSCYEAGRDGFWLHRYLTTLGVKNVVVDPGSLKVNRRRKRAKTDRIDARLLLDNLLDHEAGKKHVWSVVHVPTLEQEDRRQLHRELETLLGERTEHVNRLKSLLATLGLKLDKVDANFESWLDKQRVLESGAEVPGDYRERMLREYRRWELVNRQALDLEEEQKQRVRTSTAPAMTKVRKLMRLKGIGIKSAWLFGMEFFGWRTFRNRRQVGSLAGLTPTPNQSGETSKELGINKAGNSWIRSLIIEIAWGWLHWQPQSKLSCWFKAHFGSGTGRSRKKGIVALARKLLIALWRWVEFNEKPEGAVEVDWEPKVRPTKAPREGRGAA

SEQ ID NO: 199206 - protein, 323 aa, unidentified
MTVYIGIDIASKKFDAAELRDGAYRCKTFENTPTGFTALYNWLKTDSIPDIHVCLDATGSYGTALATFLYEKNLKVSVVNPARIKGFAASELTRTKTDKADSRLIARFCKAAQPAPWRPVPAPVRKLQVLVRRIGALNGMLRMECNRRENADIDAQESVERMITHLKMELKSVRQAIKEHISNVPELKKQNDLLLSIPGIGAVSASLILSFMASKDFTKAKEVTAFLGLNPRHHQSGTSVRGKTRMSKMGDAKLLCALYMPALVALKHNPDIRAFGLRLLAAGKPRMLVVGAIMRKLIHIIFGVLKSGTGFSSRVTVNAGFNQ

SEQ ID NO: 199207 - protein, 315 aa, unidentified
MTKQVIGIDVGKEELDVGVAGEKQVRVWANDEAGRAELSDWVVKQAASLVVVEASGGYEAALVSELVDRNQAVALVNPSRVRAFARAEGILAKTDKIDARVIARFGAIMKPQARVRRDEAQVALNEQVTRRRQLVLMLTAEKNRRDTASPAMRAHIASHMAWLQAEIEALEEQISQAIKSNPAWAETAKQVESVPGVGFITAATLVADLPELGQLNRQKIAALVGVAPFNRDSGKHRGKRRIFGGRTSVRSVLFMATLSAIRHNPVIKEFYQRLLAKGKLKKVALTACMRKLLVILNTMVKNGQVWNPPTPSPAI

SEQ ID NO: 199208 - protein, 435 aa, unidentified
MKKFLPCCAGIDIGKREMTATILTGSPDVEPVQQTRTFGTTVQELNRCLEWLRSNQCSTVVVESTGSYWIPVWNVLSEQLAVIVANPEHVKARRGEKTDPEDSRRLAERLRVGDVRGSFIPDQDVIELRDLTRRRKRLLFNANSERNRIQKLLEHANIKLGNVVSDVFGASGQAILRALLDHPDQPPAELAELAKGTVRRKRAALRESLEGHRLNDHLRWMIQHSLDHLVFLEQQINALTERTLEKLKRFQREYELLQTIPGIGPETAAVIIAETGANMAQFPSARHLTSWAGVCPGNNRSAGKQKSSSIKRANKWLLAALVQSAWATVRDRGSIFRKRFYRQMMHRGRKRALIAAARALLAVVWQVLHQGVPYAEPTNELFQQRERSKKVRHHLRRLQELGVDITPIELPPTPTIRKPQPDFTRPLGALGIHAR

SEQ ID NO: 199209 - protein, 326 aa, unidentified
MSKVIGIDISKQTFDVSFREETKVVHKVYDNSEKGFKALKLRMGHLKETRAVMEASGPYYVSLAGYLHSHGINVSVVNPLKIKRFGQMKFYRAKTDKKDSGMIMEYGETEYGSLAVWKPEGKGVQKLKQMRTAVELLRKQLSQSKNQLEAFKSSGLLDNEVDKGLKKVIGATEESIKEIEDQMLIVCQTHYKESLELLTSIPSMGNKTAMMLIAMTDNFSKFGHYKQLIAYVGLAPRVYQSGTSVNGKGHICKMGKALIRKLLYMCSWTAKFCNKACREMYERLKAKGKPERVIKVAIANKLLKQAFAVVTSKQEYIENYQPKIWI

SEQ ID NO: 199210 - protein, 428 aa, unidentified
MQYALPLVLPDVPAGGVCAGIDWATADHVVCVVDLAGRVTDRFCAAHDKAGITAMITRLRQGKVTEVAIERGDGPLVDALLGAGLTVVVITSRQVKNLRSRYGAAGAKDDRFDAFVLADTLRTDRARLRPLVPDAPATISLRMAVRARRDLVRHRVAACNQLRAHLAVAFPAGITLFHDLDSPISLAFLARFGSQDAAAGLDEQAIGAWLATIAARGRPAPASELHARLQAAPPGATGADGAAQAGITAALTATLTALSTQIKALEAQIAGQLAAHPDGHIFTSLPRPGTVRAARLLAEIGDCRSRFPDPESLAGLAGVAPVTRRSGTRIAHGFRWSVNRQLRDAVCDFAADSRHASPWAAAIYDAARARGKDHPLAVRITARAWTYVIWRCWHDGTGYDPAKHHALQAILSRQQAAQAAGPARQEDQ

SEQ ID NO: 199211 - protein, 412 aa, unidentified
MDVIVERPAALDVHNATVMACVRVPGEGRRRAEHVAEFQTTVQGLLALRDWLEAHEVVQVAMEATGVYWKPVWAVLEDRFSCLLVNARHVKQVPGRKTDVQDAQWLCQLLEAGLLKPSLVPPKPVRTLRNLTRYRKSQIRDRQREMNRLHKIMQDTGIKLDCVATDMMGKSGRAMLDALVSGTTDPVVLADLARGQLRKKIPALRAALEGRFDTEHSLIVGRILSHIDYLDEAIDELSGAIEQQLGPFAPAVELLCTIPGVGRRAAEVIIAETGGDMTVLPTAKHLASWAGMCPGNDESAGKRRSGKTRKGSKWLSQTLVECAKTANRSKDTYLAAQYTRLRARRGANKATIAVCHSILTAAWHMLQSGETYTDPGGDFFARRDPERTRKRLVGQLERLGYSVKLQEGAALA

SEQ ID NO: 199212 - protein, 383 aa, unidentified
MDHKKRTLDGEKSVPEPVLYVAFELANSTWKMACSDGSKLRHVTVTAGDLAQVQGMILGAKRHFGMGDKVHTVSCYEAGRDGFWLHRYLQSCGIDNVVVDSASLEVNRRLRRAKTDRIDAGKLMSMLVRYHSGETHLWRVVRVPSPEDEDARHLHRELEALKSERTRHRNRIHGILIQQGLRVRNPSTKKFIKELDLMRTWDGGELPAEMKVRLARVHERLRLVEEQISSLVKEKTHRLKGQSARMAQVAQLLRLPGIGPVSSWTFVMEFFGWRRFRNRREVAALAGLTPTPYDSGNRLREQGISKAGNRRVRTLAIEIAWAWLRFQPRSKLSRWFLERFADGGSRMRRIGIVALARRLLIDLWRFLEYGVVPEGAQVRALPI

SEQ ID NO: 199213 - protein, 327 aa, unidentified
MLYAGLDVHKNFCQAIVMTKDGELVKEDRIKSEKEDIEEFFSCLENVEVAFEASGNYEYYYDLLDSLGCKVYLSHPLKTRLIAEARIKTDKIDAKALADLLRGDLLPTSYVPPEKIRRLRHLVRHRIALGQHRTKLKNQIHAVLRRKNLKYNGQDTFSKDGIKWLRSLNNPEIDSYLAIYETVMREIKSADNEINREGIKHKEVKLLTTIPGIGIYSALLILSEIGDIHRFKSEEKLFSYAGLIPRVHQSGETNYHGRITKEGSKYLRWILIEAVQVHIRYAPDSKITYHYYRIKKKRPGNVAKVAAARKLLQAIYHMLKNETEFRG

SEQ ID NO: 199214 - protein, 355 aa, unidentified
MQKIYIGVDFHARQQTICYLTTDSGEILLHQLKHQDKAAVRAFYAQFSGQVIVGLEASGYSPWFERLLEELGCEVWLGHATEIRRRARWRHKNDRRDAELILDLMLHDEFPRLYLPPLQSREVLRMLRYRQKLIKMRTIGKNSLQALALQSGLAKGPHLFTKAGLQELGSATMSPAMQWQREQWLQLLEPLNQRLLETMLWLKQQSQADQRISRLRTHPGVGLLTALCLVHSLEPVSRFASTRKVTAYAGLDPVERSSAERQRFLGISKGGSRVLRFLLVEAAHTAIRKDDDLRRFYQRLAERHGRPKAKVAVGRKLLIRAYIMLRDEIDYAEFQRRAVAARPARYAPGRSCPVA

SEQ ID NO: 199215 - protein, 351 aa, unidentified
MNITTVGIDLAKNVFQLHCVDERGHTVLKKQLKRQHMASFFAKLPACLIGMEACGSSHFWARKLQEFGHDVRLMAPQFVKPYVKTNKHDAADAQAICEAVGRPNMRFVAVKTVAQQAALSLHRVRQGFVKARTAQANQIRGLLGEFGLVIPKGIAHITQYVPDLLEDGANELPTVMRQLLLKLLDNFKQMDRQVKEMDAQIVDWHRASEDSKRLEQIPGIGPVTASALVACIGDAGNFQNGRQMAAWLGLVPKQESSGGKTVLLGMSKRGDRYLRTLLIHGARSVIYARQRRSVKPDPESQDWLQRLLARRHTNAAAVALANKMARIVWAMLAHGRHYQPDWADKALLAKG

SEQ ID NO: 199216 - protein, 474 aa, unidentified
MGNRAGVDWASEKHDVRVCNAAGDELLASTFAHNEAGLGSLCRVLVQMKVELVAVERPDGVLVDRLLDAGLRVLALHPNQVAAARARFRASGGKSDHFDAFVISELARTDSHRFRVLEPDSDQTKALKALTRAREDLVTARTALVNQLRAELDRFWPGPAELFSSLDSLISLAFLKRYPAPLDAQKLSAVRLAKFLANQHYSGRKTPEELLAKLRTAAVGCAGETEAQAGRAIALALVATLETLGKQVKQLDRQIALAVRAHPDGAIFLSLFKGADTVLTASVMLAEIGDCRARYPTHESLSGDAGQSPVAVESGKHKVAHFRWACNKRLRDAFCTLADSTRHWHPWAQAVYARAIAKGHDHQRAIRTLGRAWSRVVWRCWQDGVPYKLARHHAAQQYITVIIPSPSGDCVDVPATQRMAGDALPQHPQPGRWRCSGQPARSATFTAKTAEHGLGQSKAGPSGAERSEPRSGGS

SEQ ID NO: 199217 - protein, 345 aa, unidentified
MAMLADQVDVVIGVDTHKECHTAAIVDRFGGVAETFEFGANRAGYRSVLQRVAAHNGVRVWGVEGTGSYGAGLTVFLVEAGERVVEVERPERSARRQGAKSDTIDAVRAAREVLARDHQIEPRQRGEREAIRVLLATRNGAVVARTKALNHLQALVVTAPERLRGNLGGHSATELVRRCARLRVGMDRPVEDQATVRALRACARRALVCGAEAAELEAELEKLLERCVPELLAEPGVGPMSAAAIYLAWSHTGRFRNDAAFASLAGVAPVPASSGHTTRHRLSRGGDRQLNRALHTIALSRMRYHPETRAYVQRRIAEGKNIRDIRRCLKRHLARRVFKLLEQGT

SEQ ID NO: 199218 - protein, 369 aa, unidentified
MSSLSKINPHCAGIDIGNESIFVGIEDCDVTSFGTFTDDYINLIAFLKKHNITNVVMEATGVYWITLFEMLEAAGISLTLVNGKQVKYLPGRKSDVADCQWLQQLHSFGLLRPCFIPDDITRTLRTYTRLRADHLSLASSHIQHMHKALTLMNIKVQNVISQLHGVSGMRIMTAIAAGERSPERLADLCEKSILKTKRERVVASLKGNYKSEHIFALKQALCAYDFYQNQIAECDKQIEALLNDHTDSMPPPTMLTPPKPIRHNPPQIDDLHSKLMKMTGGNDPSQITGLTDKTLLELIAETGTNLQKHWMTEKHFSSWAAIAPNIHQSGKTNKRRKIKRTPASVKSSVKPLSPLPPVNIPSFLLSTNE

SEQ ID NO: 199219 - protein, 365 aa, unidentified
MTIVAQARPFVIGVDCHARTHTYAIIEASTRRQVASEQFPTTPAGISRALAWAGRRTSGDMACLWAVEGVGTYGARLARAVTSAGYDVAEAPRMNARGRRGIGKSDPLDAAAIGTAVLGLEESQLRAPRRDEGTRAGLRILSAARDQLTRDRTLNANALLALLRANDLGIDARKPLAPTQIATITRWRARQEQIELSIAREEAVRLARRVLEVTTQLAANQKRMTELIQQSPAAPLLEMVGAGAVTVATVLTAWSHPGRLRSEAAFASLAGVNPLPASSGNTVRHRLNRGGDRRLNRALHTITMTRMVHDPRTRDYVAKRTQEGRSYREIRRSLKRYIARTLYRQLNTLYATTEPVPSPVAGVAP

SEQ ID NO: 199220 - protein, 361 aa, unidentified
MKKPSKHLIAEVPRSVAKVGMTIGIDLGDVWSHYCTLNEDGEVVDRGRFRTTLSGVGKWFTDVPRARVAMETGTHSIWVSEQLRELGHEVIVANVRELRAISHSNRKSDTVDAEKIARFARVDPEILRPICHRTVAQQEALTLIRARNLIVRLRTAAVNSVRGLAKPCGYRLPASSTLCFAKRCMSVLPPGLAQALGPVLEQIAAMTVKIQQYDRTIKRLTETEYPETQALLQVYGVGQLTALTYVLTLGSKERFKRSRDVGCYLGLRPRRSQSGDRDPQLGITKAGNIYLRSLLVECANHVLGPHGRDSTLRQWGLHLASRGGKQSHNRAIVAVARKLAVLLHRIWITQEPYIPFYAVAG

SEQ ID NO: 199221 - protein, 355 aa, unidentified
MTSTKYIGMDVHLESISIAVMNSVGKVVMECVIETKASTILQFIQGLRGDLHVTFEEGTWAAWLYDLLKPHVTEVVVCNPRKIALLKDGSKSDRIDARKLAEQLYMNKIKSVYHGEHGLRTLKELARSYLTISKDLTRVMNRLKALYRSWGIPCAGNEVYAPRHRAEWLGKISEAGVRRRAEHYYQQLDVLRLLRQEVRRDLLLEAKKHKAWKLLRQIPGIGPIRAALIIAILQTPHRFRTKRQLWTYSGLGLETHDSAQYCVVEGQLQRSKKPVTLRGLNKNHNHDLKDIFKGAAMRASTAAGPLRDFYEALLAKGRRPTMARLTLARKIAAITLIVWKKEVRFDANDLKPQAA

SEQ ID NO: 199222 - protein, 419 aa, unidentified
MTQFSINQIKRQYRIKALHVGIDLALEKNVCIVTDESGEKIDHFSFPQNRGGYDYFLQRVKMITQKQAESQLLVAMEPSNYFWKLMARELEENEITYHLVNAYTVKKHREGNQLDRSKDDRRDAAQIAELSRNGHYTETRLQKGRYEEIKQYAVTYHQIMPSIHREQHILWGLVGQVFPEYFQVFKNLNCETSRAILINNACAAAIRKKTEDEFLNEVKSMYMGKRMSVTKVHQVYQMAATSIGIVEGLQAIQLAIQIHFTNIQTLQTQLNKITDMMTNSLVFFPEAEYLLSIKSLGSISVALFLAEIGDPKRYKNAAQWVKLAGIQPVPCSSGKKQHGHTPMSRQGRPQLRTLLYFCCLRLIQYDAHFAQLYFKLQRRPKNPLTKMQALGVLMNKLLHIMWALINQNTFYDPAFTQSI

SEQ ID NO: 199223 - protein, 430 aa, unidentified
MKSNTQNAKIEAITEKTLVLGIDVGSETHYARAFDYRGIEYSKKPFKFSNTEAGFVTFKEWILDLKERHEKDKVVPGMEPTGHYWFNLGKFLQDNEMKPVLVNPHHVKKSKELDDNNPTKNDRKDPKVIAGLVREGRYMIPYLPDGVYADLRTASNIRFQLQAELTRIQNRISRWFNIYFPEYKTVYGKPDAKSGILILKAAPLPEDILTLGIDGVNQIWRDAKLRAVGKARAKTLIEAAEHSVGSKEGAVAARMEIRMLLEDYESRNIRLQEVMTLIEGLVKQIPMAEKLLEIKGVGIRTVSGFLAEVGDISRFNNPKELQKLAGLALVENSSGKHKGETTISRRGRKRLRYLLFEVAMSLVAKNPEFREIHNYYTTRRLNPLKKMQSLMAIAAKLIRVFYVMLTKGVNYDPKKMVNDIKRPAVYLQTA

SEQ ID NO: 199224 - protein, 340 aa, unidentified
MNHYAGIDVSLEASSVCVIDGSGKIVREAKVASEPEALIAWFGSLGLSLTRIGLEAGPLSQWLYAALRDAGLAVELLETRHVRNAFKIMPVKTDRKDAHGIAELMRLGWFRPVHCKSMEAQETRAMLTARKLVQKMLHEVEMSLRGVLRGFGLKVGKTTPVQFEARIKELVAGHQNLEVIAHSLLAARATLRREFNGFEKRLRAMARVDPRARLLMSTPAVGTIVALTYASAIDDPSRFKSSKVVGAHFGLTPTRYQSGETDRTGRISKIGDGAVRAALYESAHIILTKPIKGCTGLKSWAMRIAKRAGMNKAKVALARKLAVIMHRMLADGTTFANQPA

SEQ ID NO: 199225 - protein, 396 aa, unidentified
MLRTNLQKQNDFTGQDFYIGLDVHKQSWYVTIRSLGIEVGHFTQVPDAAALHQYLHRNFPGGNYHSAYEAGFCGTGAHEQLCKVGINNIIVHAADVPTTDKQQKNKTDLHDSRAIAEHLERGNLKMIHVLSQEQQELRSLFRLRECRIKETTRANNRLKSFLMYYGITIPETVSKRGDLTGRALAWLDIEMRSAAGTIVLQQYIAELKYQRKQLYQVTKALREQVMVFDGQTYTNLITIPGMGSITGMGLITEIGDFRRFDDPDEYASLLGLCPWEDSSGDCIKTKGMQPRCNKHLRPLLIEASWHSIRKSRNLFAYYSKHAGGKNGKKAIVKVARKLAMIARGVALSGQPYREDYRMKKDDRKPAKNNKAKRFFSGITEQHINKQPGYGRMPMPG

SEQ ID NO: 199226 - protein, 384 aa, unidentified
MDVNTSNYTLCSLDPGYGVEKDNYFAEVQFTNDFIKNVVNYVTNLKKKLKDCEFVCGYEAGCLGYSTYKDLTKVGIKCVLMAPSTMAVQKGGKKVKNDRRDARVIAQCLAYQTYKEVYVLSEHDEAVRGYLRMRDSHNKALKRIKQQIIAFCTGHGLFSPTKSNWTVAHLKWLKGLKFNDPVEQEIINEYLSSYTYLCDKIKAMDVRIEVLASEKQYCENVKKLRCIKGIETNVALTLLAEIGDFNRFSKPTDFAAYLGLIPGEQSSGDKVRGTGITKAGNSTLRQKLTEAAKGYWRGRIGMKSATFKKFEKKLPKEVTEYALKANTRLQRKFFNMTHVKGKNMNVAASACAREMACFVWGLITKHYDKAPAVPKTDEELLDLN

SEQ ID NO: 199227 - protein, 509 aa, unidentified
MVQQRLDRPPGVPKCPRATSALNGPAPRRGGPWRKSHGKSAPASTLISAERQYRERSSSRQVERPHREDIALTTNCNQPASPAQQSTAALSQIVSTNNFVYFAGIDWGSEKHRVCLMDRSGAILGERWAEHSGSGLADMAQWLREKSRDAPHTLAAAIEIPRGAIVETLAEHGFHVFSLNPKQLDRFRDRHFPAGSKDDSRDAFVLADSLRTDLCCFHPVRLDSPAVIRLRELSRLEDELLSEFNRAANRLREQFHRFFPQLLQLSPAADDPWLWTLFETAPSPARAAKLTEAKIARLLQQHRIRRIDGSQVRAVLKCKPLTLAPGAAEAAAEHALLLLPRLRLLHQQRVDLARRIQTVLDELTAPSEQDPQEHRDAAILLSLPGLGRKVAATMLSEAAQAIAERDYHALRSFSGAAPITRQSGKKKVVSMRYGCNLRLRNALYYWAQKSIPNDARSRKHYTELRARGKSHGGALRVMADRWLKVLVAMLRSRTLFDSQLRPETSLSAA

SEQ ID NO: 199228 - protein, 349 aa, unidentified
MLIFAMDLGSSQSAICTLNTCTGAVRHSACRTQAARIHTLLQRQRPNLVVIEISPLAAMVHDVAVSLEIAIQVADTTQDAWRWRNVKRKTDRDDALKLARLAALGQINPVHIPEPRMRQWRELVEYRQTLVAERTRVKNRIRQVVLVHADHRPRAGKYGWSQTARAALRALARPLAECAADELWRGLLAAELERLTDLDARLAALEQRLDRLGRADARVAIVQTLSGCGARVAEAVVTTLDRPERFAHRRQVGAYAGLTPRRFQSGQMDRQGRISKRGRPLLRQMLNQAAWQAIRREAYFRALFLRVSRGVKGRRKIALVAVMRQLLVVAWAMLRDRQPYRPALLARAA

SEQ ID NO: 199229 - protein, 346 aa, unidentified
MEQYAGLDVSLDSTSVCVVDASGRIIREAKVPSEPEALIAWFAAHGAPMVRIGLEAGPLSQWLYAGMRAAGPAAELIETRHVRAAFKARTVKPDRTDARGIAHLMRLGWFRPVHCKSLPAQEVRALLTARKLLQAKRHDVEMSVRGVIARSGPSGRPTTPRTFAGRVRELVAGHPILTAVAEALLAAREAMRTEFRAIERRLLAQARADARVRNLMTTPGVGALVALTFAAAVDDPARFRSSRMVGAHFGLTPKRYQSGETDVTGRISKAGDAGVRVALYEAANVILTRPVKGSALKDWALGVAKRAGMRKAKVALARKLAVVLHRMLTTGEGFSPTGRSASATAA

SEQ ID NO: 199230 - protein, 338 aa, unidentified
MKVKRIGLDLAKQVFQVHGVDGEDRVALKRQLRRQQVLAFFSKVEPCLIGMEACGGAHYWGRELMKLGHTVRLMAPQHVKPYVKGNKNDMNDAEAICEAVGRPSMRFVAVKTVAQQDLQSCHRVRTLLVRQRTAKANEIRGLLSEYGIVVVNRIESLRRALPVLLESADSIPGEGLRQFLMALREDLVYLDERVRQLDQVIERAAREDAVARRLQQIPGIGPVTATALVASVGDARQFRRGRDMAAWLGLVPRQQSSGGKAVLQGISKRGDAYLRTLLIHGARSVARVASRKTDIRSQWVDRISRRRHANIAAVALANKNARIAWALMTRGTDYMPQG

SEQ ID NO: 199231 - protein, 330 aa, unidentified
MSRFVGIDVAAKTFDVVVRINGKANKVEQFSQTPDGHASAVRQLKKLAPELIVMEATGIYYLDLAVALAKANLPVSVINPKSFHHFAALKLNGNKTDAVDAALLAEFAQCMSPRLWQAPSDELLGLRDIGRQLNRLTASRTQAKNRLHALTSKSTTLLMLIEDEQEGIEQLERRIKRLTNAALALIAGNAILAAHFSHITAAKGIGETSAIAILAELCVLPSTMKAPQISRYAGLDVRQTTSGSSIKKPARLSKAGNVYLRAALYMPAMSAVRHDVRAKAFYEALTGRGKKKIQAQCAVMRKYLTGIWACMQAKTVFDSTLLFSEKHMQS

SEQ ID NO: 199232 - protein, 344 aa, unidentified
MGEVITIGLDIAKSVFQVHGVDEAGTVTLRKRIGRAKMVEFFGKLTPCLVGIEACPAAHHWGRELQALGHTVRLMPPTYVKAYLKRSKNDANDAAAICEAVTRPTMRFVPIKTKDQQAGLMLHRARQLLVRQRTMLSNALRGHLAELGIVSAKGRNGTGALLEIIADAGDSRVPPVARGILDVLARQYGALGAEIGSIDRSILAWHRSCEASRRLEEIPGIGPIVATALVAEIGDWKAFGSGRSLAAWIGLVPKQQSTGGKDKLGSITKQGNRYLRWLLVAGAMAVIRYAQKHGTLKRPWLGRLMARRPTKVAAVALANKIARMAWAIIVHGDRYREPKPLLAA

SEQ ID NO: 199233 - protein, 349 aa, unidentified
MLADQVDYVVGVDTHRDEHVLAVVVAPSGAVVAQRSVRASARGYAQALRFVEQYCSGRRVWAVEGVGHYGAGLGRYLSGRGETVLEIGRGPRGERRLRGKDDQLDAIRAARTALASRTLTLPRAGERREALRLLLLARRSAVNVRREALVQLRSVIVTCPDRLREQLRRLPAGRLVVRCSRFRRSSACTSDELASRLVLRSLARRVEAATAEAAELEGEIHAHVRALAPQLLDEPGIGPIVAAQLIVTWSHHGRVRSEAAFARLAGVAPIPASSGQTTRHRLSRGGDRQLNCALHTVILYRRQHDPTTKDYIARRVAEGKTTRDAVRSLKRYLARHLYRLLQTQEPLMA

SEQ ID NO: 199234 - protein, 411 aa, unidentified
MRLFVGDDWAEDHHDVEVMDEAGRVLAKRRLPEGVAGIAQLHELAGRYLPEYAEDAEVAVGIETDRGPWVAALIAAGYTVYPVNPLQASRYRDRHGVSGAKSDGGDSHMLADMVRTDSHQLRPAAGDSPEAAAVKVVARTHKTLIWERTRAVQRLRHQLREYFPAALEAFEDLDAPDTLELLGKTPDPVRAAKLTRAQIAAALKRARRRGIAEKTDAILAALRGEHLGLPAPLTAAYAATARSLIAVITTLNEQVKILEEQVREHFGRHPDAEIYQSQPGLAAILGARVLGEFGDDPGRYADAKSRKNYGGTSPITRASGKKKVVIARFIHNDRLIDALMAWAFSALNASPGARAYYDQLRTKGIEHNDALRRVANRLVGILHGCLKTRTLYDEATAWGHRENLSQSRVAA

SEQ ID NO: 199235 - protein, 400 aa, unidentified
MRAVFGIDVSKVSSEVAILVNGEKVHGYTMANDAIGFSRLLGDLKTVYKPEIIFEATGVYSRRLQAFLDEHGYAYTRLNPLEAKKQLDSLRVRKTDQIDAEKLAQSQFVLNRKPTYVQEEVYQDLRNLSRFYQNLTEDIVRAKNRLHKVLQVTFPELETILSTPTGEQYWNLVIAFPCKDFVLELSKDKLSKSIRQSTSKRISDKRVAYLAEKLIALANQSYCAVKKTSPMLEEVRYYTKELLRLFEQRQTVLDKMVTLAKPLPEYDILLSIPGIAETTATSIIGELGDIRRFQSANQINAFIGIDLRHYESGNFIAKEHITKRGNPYARKILFKCIHNIASASHTNPCHIADFYEKRKRQSQTTSTKPHTIASIHRLIRTMYYLITHNKLYDYTSTQNR

SEQ ID NO: 199236 - protein, 360 aa, unidentified
MKKIVEKELVAVSQATGDTIGLDLGDRWSRYCLMGASGEITKEDRVRTTADGLREQFGHLKGVRIILEAGTHSPWASRELKSQGHDVIIANARKVRLIYESDRKNDRMDARMLARLGRVDVNLLSPIQHRSAEVQADLAVVRGRDALVTARTQLVNATRGIVKSMGGRLPSSTTAAFANKVESLIPTELQAALTPLIKSIRHLSEQIQRCDRRVAELSEKKYPETRLLQQVQGIGPLISLTYVLTIENPKRFSKSRTVGSYLGLRPKQSESGKSSPQLGISKSGNGYLRRLLVQGAHYILGPFGKDCRLRRWGLELSARGGKNSKKRAVIAVARKLAVLLHRLWSTAEVYDPLYGLAVPA

SEQ ID NO: 199237 - protein, 355 aa, unidentified
MNSLGIDVGKKKCRAALKDERGDVIREFFFSNNNEGISALIQSASHYGKCTAVVESTGNMWIRIHDTLEENEIDTILANPYKTKIIAEAKIKSDKLDARILADLLRADLVYESYVPTKEFREKRGLVRHRISLVRNRTMLENKVHPLLDKYDYKSELTDVFGKSGIIWLKTLDVSTIDRLIMNTTLAAIENINLQIETISKELAKYGWDSDDVKILLSMTGIDVFSAMLIAIEIVDVKRFCTPWKLVSYAGLAPSTRESSGKTKTGRISKQGSPWLRWILVQCAMTAVRYDQRLKSFYERLKSRKGSAKAIVATAKEILVIIWYMLTRRELYRHINKDRYEQKLSRLKKIKESAV

SEQ ID NO: 199238 - protein, 351 aa, unidentified
MLYAGVDAHKKYSKVVLTDDRGAELAQASLSNDPGCFQKFFSQATEPVKAVVEAGRTWGVIYDLLESIGVEPVLANPLKTRAIAEAKIKTDTIDAQTLAALLRADLIPMVHVPSHEVRAQKNLLRQRFWLVELRTRVKNRTHHILDRNHVTLPSCSDLFGKAGRRLLDQTEIPAPDNLLLKAHLELLDYIEKQIDNAEKWIKEALKDHPSIAILRTIPGIGKILAALVALEVDDVSRFSYADKLCAYAGLVPTTYASGGKVRHGSLLPSCNRWLRWAYVEAAWIAQRTSPYCHAYFERIIRRKGANCANTALARRLCEITWHCLTEHRHYEERSPSRVNRNCSAAFESSWS

SEQ ID NO: 199239 - protein, 333 aa, unidentified
MSYQYALGIDLHKNKSTWKLLDSNRSVIWSKNVMCQPESLELAIKQLPVNPVNLPVAIEPTCGWRWVSRLLEKNNCDVHIANPYKLRLIAESKKKTDEEDAKTLAEFLLIGYLPESYMVTDKIEEWRQLVRVRVSLVEARTKIKNQINSLLTATRPVSKKQLLPDDLKIQELASLIKEQTIHIQVLEREIKKIVDTDPVCKLLLSIPAVGVVTALSIVAEVGDFSRFKSADKLASYAGLVPSQRSSGESIRYGHIVKTGSKLLRTTLVETAMRFRPKYDTRLNTWFERVKRDRGAMRARTALAHKLLTIMWSMVKNNQPFVSSCDTVKSGNLV

SEQ ID NO: 199240 - protein, 385 aa, unidentified
MRDKTFVPREYDVFAGLDVDKKSIAATFSSHQGFIRSLSMPYKVEDLLNHVRNHFADQKVAFAYEAGPTGYGLYDGLAAQGYRCLIAAPSMIPRAPGQRVKTNRLDSKALSESLRGGQLKSIHVPSPLYRQLRHLTQLRDTMMSEAVGMKQRIKSLLLFEGITFPPAPAGSQWSFIVKAKLRKLPCSNTVRFKLDQLLDSLEFAEKQVFKSTKEIRRFCQTDPELSQCIKYMMTVSGIGWIVASQLLARIGDWRELENIRQLGGFLGLVPMEHSTGDKTDRGPITHTGDGRLRSKLIQAAWSAIRKDGELREFFRSVCQRHPRKVASRVAIVAVARKLSVRISVVLMQQRPYAVREKVHSAPLTQEETSPQGTTRRQAEPGVETP

SEQ ID NO: 199241 - protein, 403 aa, unidentified
MQTLVERGCGLDVHQATVVACLLIVGKDGKVQKQMRTFGTTTRELLNLREWLLSQGCTHAAMESTGVYWKPVYAILEGGLQIVVANAQQVKKVPGRKTDVKDAEWIADLLCHGLLRSSFVPPKAIRELRDLTRYRRKLVESQAAERNRLLKLLESANIKLASVATDVFGTSGRLMLRALIAGKATAQEMAELARRKLRSKIPQLQLALEGKLEGHHRFLLKLQLDRLERAEGDLAVLEQRIQEKLEPYAAQLALLREIPGVDWTLAAVIIAELGVDMSVFQSVSQLASWAGVCPGNNESAGKRKSSRIPKGNVYLKTALVEAAHAAARTKGTYLRDKFYRLKARRGYKRAVVAIGHKILVSVYHMVSQNVSYNDLGDLYLDKLNKNHLTRNLVHRLAPQQKAA

SEQ ID NO: 199242 - protein, 353 aa, unidentified
MNNRKYIGMDVHQASISIAVSDAAGKVLMECIIETKAATVLEFIQGLRGSLWVTFEEGTSAAWLYDLLKPHVAKVVVCDPRKNALLKAGNKNDRVDARKLGELLRAELLTPVYHGESGVRTLRELSRGYLAVSKDLTRVMNRLKAIYRSWAIPCAGQQVYSPRHRAAWLEKLREAGVRRRAEQTYQQLDFLMDIRKETRKELLAESRKHPARKLLEQIPRLGPIRVALLIALIQTPHRFRTKRQLWNYCGLGLRTRSSGEYRYTGGQLQHARKPPALRGLNVNHNHDLKHLFKSAATQAGNDPLGVFYQNLLAGGMEPAMARLTLARKIAAVALKIWKKGERFDPAKLTQQAA

SEQ ID NO: 199243 - protein, 309 aa, unidentified
MEQFVGIDVAKDRLDVHLRPSGESFAVARDGEALAQLVERLQALAPLLVVMEATGGYETVVASALAAARLPLAVVNPRQIRDFARATGKLAKTDRLDAAAIAHFAEAIRPPVRPVADPQAQALGELVARRRQVIEMMVAERNRRRRATQHRVLQAIERHLELLQAELSELEGDIDEAIRNTPAWQADADLLASVPGIGPATLRTLIAELPELGTLDRRKIAALVGVAPINRDSGTLRGRRTIAGGRASVRSALFMAALVASRANPVIAAHYKKLRAAGKTGKQALTACIRKLIVILNAILRDRKPWQPA

SEQ ID NO: 199244 - protein, 370 aa, unidentified
MGEYSEAFVAFDVAKKKHAVAIAEGGRTGEVRFVGEVENSPAAIERTIKKLGKKYDRLHVCFEAGPTGYGLCRQVRDLGHDCMVVAPALIPKWPGERVKTNRRDAVTLARLHRAGELIGVWVPDEVHEAVRDLVRAREAAADDLRRKRQQLLSFLLRHGRIYENGGHWTLAHRRWLARQSFEHTAQQIVFQEKIDAIEDAAQRLHRLDERLRAVVPTWSMARVVEVYQAMRGASFLVAVIFAAEIGDVRRFDTPPQLMAFLGLVPGERSTGDTVRRSSLTLAGNRRARRALVEAAWTYRYPARVSEMTLRVRLEGLPKAVRDIAWKGQVRLCARYRRLSAAGKKPPVVVAAIAREMAAFLWAIGREVAPS

SEQ ID NO: 199245 - protein, 326 aa, unidentified
MPSNGERFNRVIAFEVSKADLVVYCAPQDVSSTIPNTKSAVRRYLKKQTRTKPGPEVSDLLVVCEATGGYERFVLEAATELGLACHRAHGSRVRAYARYRGTHAKSDAIDARLLADYGLHGENLKLYQPPSPAQDRLRALLGRRTELRRAMEAEQCRLDHALDKDIAHSIKALIAVLQRLLAGIEAKIVLLMKEDADLAEKARLLQGVKGIGPITAATLLGYVPELGSLSRGAAAALLGVAPFDRDSGKIKGKRHIFAGRGEARSCLYMAAISAMRYNPKFKEFATRLKQRGKPFKLVAAATMRKLATVVNAMLRTGTPKTAQTLA

SEQ ID NO: 199246 - protein, 343 aa, unidentified
MARFVGLDVSQKLTSICVVDDTGRRLWRGQCATDPEQIARVSSRHAGDDARIGIETGPMTPWLVHEFRARGLNVTCLDARHASAALKMQMNKTDQNDAEGLAQIMRTGWYRSVHVKSLDAHRARALLGARAQLVGMTTRLSNHIRGVLKTFGLLPGAMRGLPFDRRVEAMLADRDDLASIARPMLVAWRQLREQIAAFDKEVRALAKNDPTCRLLMSVPGIGVVSVLAYVSTVEDPKRFARSRSVGAHMGLTPRQYQSGEIDRSGRISRCGDTLARTLMYEAAVVILTRVKRASNLKDWAQAIAKRSGLGKARVALARKLSVILHSIWRSGEAFRWSEKPAVG

SEQ ID NO: 199247 - protein, 435 aa, unidentified
MDEGNRNRLEEFRQLRREIRQSEEHLIVGIDIAKDRHHAFFGTATGKTLLRRIVFSNDHEGFRKLLDQTEALRVQHGLKRVVYGMEPTANYHKPLGEYLIKLGKTVVLVSGVTVARNRESLDGRWDKHDGKDSANVADLISQGKCLYYEHPLAELRGLRGLLSLKRRLKKQEHGYRVRIRNHLIAQYYPEMDRDYERLGAEGLSIVRWCLAASEIAQLDVDPFIERVTSRRITMEKRRRLEEIWEKAAGSIGCDGVPGVDHEAKIMVEGLRQIREMIKETEQKIEELCKAFPEYQYLLTIPGFGPDVSAKVLGAIGDPDRFQNGKQVLKMGGLDLSADRSGKDSDRAIPEISKRGKADLRYALYQAALIASFKNRDVMIYYTNKIRGREREKGIHVKMRVKLAAKLLVIAWTLMKKKEPFNPVYLKAELTERKYF

SEQ ID NO: 199248 - protein, 342 aa, unidentified
MKFYCGIDLSARDCHVCVIDQQQKVIVEQKLRNELSQIVKVLAPYKGRVKIVVESTFNWYWLIDGLQAEGFDVVLAHTLGLYLITGAKVKTDRRDAYSLAKLLLVGAVPQAYIYPVETRPVRDLLRRRARLVQVRAGEYGSLRRLLLRQGILSSKQQEIKTATEAELEQWLEHPLVRLHASQELRRIELYSQQIAELEKSVLTLAQTERSYELLLQLPGVGQTIALTILYEVGELTRFANVKVFSSYCRVVPGIAQSGKVTGRGRASKQGNHYLKAAFSQAAVHAVRCYPKVRRYYERQLKRHQGRGRQMICYNIIAHKLAQAAFHVLKEQTEYREELLFGP

SEQ ID NO: 199249 - protein, 337 aa, unidentified
MIVIGVDVHKHSMSAVAVDGVGRQLDCLETSDEDELVSWSRRVGRRRLWALEDCRHVTRGLERTLQRERQRLVRVPPRLTAPERRRGRTRGKSDLIDALAVARAALREPVLDSPRPEEARLRELKLLVDHRDDLVDERRRAQQRLRWHLHELDPTLQVPLGALDRAIWLERLTRQLGRREQTTQVRIARELVTRCRALTRSIRELDRELHSHTTELAPQLLELPGCAALTAAKLLCEIGPIDRFRSDAQLARHAAVAPLDASSGKHQRHRLDRGGNRQLNCALHRIAVTQGRIHPPAKAYLERKQAEGKSRREALRCLKRQLARTVYTTLKNDPLLT

SEQ ID NO: 199250 - protein, 370 aa, unidentified
MTKIIRIGVDTSKNIFVLHGVDAAERPVLRKKLRRRQFLEFFAKLEPTKIGLEACGAAHYWARELAALGHEVVLLPPQYVKAYLKRGKNDAADAQAICEAMSRPTMRFVPVKTAEQQAALMLEGTRQGLIARRTQVTNTIRGYAAEFGLIAAKGLDKIEPLLARIAKEAQLPRLAKELFAVYAKEYAQLKGQIAKIEAKLMAWHKSNEQSRRLAEIPSIGPIGGVLLTMKVIDPHAYRSGRDLSAWIGLTPKDHSTAGKTRLGVITRAGDERLRSVLVAGATAVVKQVRLGKGKHPRWLVELVNRKPPKLAAVALANKTARIAWKLMVSGERYDHARACHREGRNAALVGGSAPRPSLPPTRELPAPTNA

SEQ ID NO: 199251 - protein, 343 aa, unidentified
MKITTIGIDLAKNVFQVHGVDEHGKTVLKKQLKRDQMMPFFANLPHCRIGMEAYGSAHFWANKLQELGHTVKLMAPQFVKPYVKTNKNDAADAEVICEAVSRPNMCFVPIKNGGQQAVLALHRARQGFVKARTVQANQIRGLLAEYGIIIPQGIVHIGKRLPEILEDGENGLPGTFRQLIDRLGNHLKELDKQVNELEVQIQTWHRENAASKKLAQIPGLGPIAASALVASIGDAKNFENGRQLAAWLGLVPRRNSSGGKPTLLGISKRGDTYLRTLLIHGARAVIRVAERKAAHAGSWLAGVMERRNKNVAAVALANKNARIVWALLVHGRDYQVDYGSAAA

SEQ ID NO: 199252 - protein, 311 aa, unidentified
MEKDKVYVGIDISKDGLDVAIHASDKSWHFSNDNPGINNLRKMLVKLKPALVIFEATGGYELPLYLSLDKAGLPVSPINPRQIRDFAKSTGKLAKTDVLDARVIAHFGYAIQPIPHHLPDTQELKVAQSRRTQIIEMITMETNRLRGAQQPIKSRIEAHITWLKKELEDADNELRESVLNDPVWREKDALLQSVPGVGPVLSATLIAEMPEMGTLDRRQIAALAGVAPLNRDSGNFHGQRSVWGGRAHVRTVLYMATLVATRRNPLIREFYLRLCAAGKKPKVALTACMRKLLTILNAMLKHHIPWSYSPC

SEQ ID NO: 199253 - protein, 420 aa, unidentified
MKVTFQTCCGVDVHKSFLVATIIKTISGVEPSYQKKRFSTFNNSILQFKNWLIENQCRDVCMESTGKYWVPVFNLLEDDINVTIANPKWVKAVKGNKDDTKDSKWIGDLFRLGLVPGSYIPCKPIRILREFTRYRYKLTSCRTSEKNRYQNALTVCNVALDSVVSDIFGKSATSVIDYLIERSDNSINHEEIASRLLRSLKKKSDSVIESIEGYQMTDSQKYRMRLVRAHLDYITSTINDIDTMLDSLIAPYENAVQLLCTIPGVDRNSAITVISEIGTDMTPFSNSKRLCCWAGLTPGNNESAGKKKSVRITRAGVYLKPALVQVAHAAVKSDKSPYYKQKYERIMKRRGKKRAIIAIARMILTAIYQMLSTGEAWNPTDLYKIDIPEPLKEKQKEKAIKQAKKLLIREGILSESQLAS

SEQ ID NO: 199254 - protein, 319 aa, unidentified
MAQNELVVVGIDVAKHKVDVCIRSPLLRQTFETTAQGQRKLVARLRKHRVNKAVMEASGGYERGWARVLREAGIEVRIVDPKRVRNFALSAGRLAKNDVIDAEMIAWFAETFSDAPSQRHDAAHEELQTLVKARLGLIDFRMRLVSQSEHAARGLVQKAHAHVLKSLASENARLEAAICTKIKSMPDFAERAEIIESVPGFAETSSANLVAGMPELGQVSNEIAAALIGVAPYDDDSGKRRGERHIKGGRRWVRNAIYMPCVGAATLNNPVLKAYYQRLIAKGKEPKVAIIACMRKLIVILNTMIARRQKWDPSRCALR

SEQ ID NO: 199255 - protein, 411 aa, unidentified
MDLMYARCAGLDVHQATVVACVRMPGPRPDARHAETQTFATTLRGLEALAAWLTAHGVTHVAMESTGVYWRPVFAVLEGTVQVQLVNARHVKMLPGRKTDVRDCEWLAQLLECGLLRGSFIPPAAVRDLRDLTRLRKALIRERGHHVNRIAKTLELANIKLGSVVTDIMGKTGRAILQALSAGLDDPEQLAARAQGSIRKKQAALREAVEGRLTPHYAFLLQQHLALIDTLDAHLTTLDTRIEAAMAPFAETAALVHTMPGVATRAAQAILAETGMDMRPFPTAQHFASWARLCPGNHESAGKRRPTTTGKGATWLRATLQEAAWAAVRTKKSYYRALYHRLKARGGPKKAIVAVQHAMLVALWHMLTRRVPHQDLGADYFDRRNTARTRRHHVRRLQQLGYQVLLVEPAA

SEQ ID NO: 199256 - protein, 412 aa, unidentified
MFKIFRNNCCGLDVHKTWIYACIGITDPNGRTEYKQARFSSFSKGLRDLAAWLAKYSCTEVCMESSGKYWIPVFNILEKSCFVTLAHPKYTKPQKGNKTDRKDAKWICDLFMCDMIKPSFIPSPEIRQLRDLMRYRFKLTNMLTGEKNRAQNCLTISNLKLDDVFSDVFGKSARSITNYILEHPGETFDVSPFVDPRCKTPVSEIQAAVDGAISPEQAVKLRQCLAHIDELEAHRKEIESEILQIAEPFSAVLDLLYTLPGLDKNPMTAIAILSEIGPDMSVFPSSKHLVSWAGCCPRNDQSNQKVKSRRISRAGSYLKPLLVQVANALIKSKKHPEFKERYHRIKSRRGHKKAIIAVCKMLLTAIWNMLSKLEPYNPKGFLEHRPVKQEKTLTVSQALELLRLRGYTITNQ

SEQ ID NO: 199257 - protein, 379 aa, unidentified
MYTKSKSQDYNELGVILSIGLIDRNRRHLSTLLALKNGVRTVGGSKRSNHNPVQHLHYYLIIFIGTKMARTVFIGIDVSKETLDISINNKHQRIENVETAISEFIKSKMANVFVKLCVVESTGGYKKLVIKLLREHNIAVHRAHPNRVYAFAKACNHFAKTDKLDAKLLEKYAEFITKNDEVVEYIVSQKQEELKELRAVERNLNDEVHANKCRLHKVTGKAREYIEKQIEFAKKQLEQIRQDIEDIINSDPDLKEKSKLLTSYKGVGRKTASILLIEVPELGRLDNKEIACLVGVAPKTSESGRKVSKAQIIGGRFYARKALYMSAVVAVRHNKKMKVFYQRLVDSGKAAKVALVAVTRKIIICLNAMIKNNNFYLDV

SEQ ID NO: 199258 - protein, 328 aa, unidentified
MEREYIGIDLHKASFQVCAMTSTGARQWEQRWPTTDAGIAELLARCGAQSRVAVEASSPTWAFVDRIVDHVGAVHVIDARKTRLKAGYAAKTDRLDAQRLADALRRDSVVGIYYPPPTIRDVRELCRYRGHLARMQASLKQRIQALLLRQGVQVPIKGLFTARGSMWLAALTLPGWAGASLTGLRQVVTDVRAQLVPVLAELRTIAATDPIARALDARPGFGPVFSVTLRAEIGTMTRFPDGPHLASYAGLVPRVERSAGRSWSGRITKAGSPWMRWALIEAAIHQFRRQDDFGRWARHLAIRKGMLKARVGVARALCDELFEAWPRA

SEQ ID NO: 199259 - protein, 364 aa, unidentified
MDILGIDISKAKFDAALLIGERIRHAAFSNTEAGFEQLLVWLAKHRPDPIASLHACMEATGNWGLDLAAFLYGKQVQVSIVNPARIKAFGESELARNKTDKLDAALIARFCRAHAPPAWTPPAAHLRELRELVRRCDALKTARVQELNRKTAGFASLAVATSIAAHLEWLDQQIEAVTAEVRQLVAADPTLARNLALVRSITGFGEISATILLAELPNIAEFTPKALAAFAGLSPQEHSSGSSMRKPGKMSRIGSERLRSTLYMCALSAKRTNKALAAFVQRMTAAGKPPKIILIAIARKLLVYAHAVVRTQTVRSLPGCPFARLTPNTVSPGSLSRARPIRRRPSFRAAPAQGCRRAARCRPA

SEQ ID NO: 199260 - protein, 331 aa, unidentified
MNYAGVDLHKVALLVASETDSGETTPARRIGCHEREEIVKHFKALRPFVAVIEASSSYRWLYELLSPLGKVVLAHPLRLRALVSARAKTDKLDAALLARLLRAGLIPEAYIPPKGMHELREVTRNRARLTWGATSAKNQLHTLLQGRNLRSPFEAVFCKGGRQWLAGQDLGVSGNMMRDELLRRLSYYEEERRRVDACLDAMAAEFPEEESLVGLYGFGRYTALLVVGELGEPGRFRRTKQVGAYAGLTARVHQSGGHEYHGHISKQGSGWLRWVLVQAAIKIIRKDEKLKNFYTRIRKRAGRNVARVAVARKLAGICWVRLMRWHREHAA

SEQ ID NO: 199261 - protein, 348 aa, unidentified
MIVVFGVDAHKRTHTVVACDETGKELAQLTVTATAEGHLRLLRWAEQFGPRQWAIEDCRHLSRQLEADLLRAGEKVLRVPPKMMADTRRRARTRGKSDPIDALAVARAALAEPDLPTAVLDGPARQLRLLTDYRETLIRQRSAAQSQLRWHLHELHPGWDPPARSLNTTRTLNHIENQLAGYQGIVADLARRHLTRIRDLTREATDLEQQITRLVTHLTPSLLNIPGCGPLTAAKLVGETADIRRFPTPDKYAMWTGTAPIPVWTGNTPRHRLNRGGNRQTNTALHRIAITQIRCHPPAQTYLQRRLTAGNTKNEAIRALKRRLANTIYHALQHDTTNQQPTTQPLAA

SEQ ID NO: 199262 - protein, 353 aa, unidentified
MKRDKYMGMDVHQATTVVAVIDAEGKIVLETIVPTAAGAIRRLVESISGPLHVTLEETTQAEWLHDLLQGFVAEVIVCDPRRNKLLAEGSKGDKADARKLAELLRTGMVRSVWHGRQTTRGLKEMVRAYETFAIDTRRTMMRIKALYRSRGIATKGSAVYQQKQRDQWLMHLTEQGMQQRAAWLYEQLDHVRELRKRAKAAVLTEGQRHQAVQLLRTIPQVGPIRAAQIVATAGTPHRFRTKRQFWSYSGLAVVTHTSAEYELRAGRVVRRNKPVATRGLNSNCNRRLKSVFISAATAGGVSHPWQTYLDNLKEKGMKSDMARLTLARKIAALTLAIWKKGESFDPKKLNWTN

SEQ ID NO: 199263 - protein, 464 aa, unidentified
MNEESKPGSEHGVGRKEEGISALGRKVAGIDVGSRVHWVCAPARGGEGREEEVFGATTRELERMAGWLLERGVESVALESTGVYWIAVHEVLEGQGLKVLLVDARALARVPGRTKTDRRDCEWIQRLHSCGLLRGAFRPPEQICMLRTLVRDKGILVAEQSDWVRRLQKSLEQMNVRVHRAVSDLTGATGMALLRAIVKGERDPRQLAKLRDPRCRQSEEEIAEQLTGHWREDHLFSLGQSLKMYEAIQERIEAYERAILEKLGEMERDDCQGENPPPLPNKVKAQTIRKRGQEPLRQALYRVSGEDLTAIDALGVETVQAVISEYGTDLSPFPDEKQFVSHILLAPNKATSGGKPVKHKKRRGSASSRVGAALRMAALSLRHSQTALGAYYRQIARHKGGDVAVFATARKLATLIYRTLRWGKSYVDEGAEAYEKRYQEARLRRLTSIARELGYQLTPLAVKA

SEQ ID NO: 199264 - protein, 301 aa, unidentified
MEHYVGLDVSLKRTSICVVNHTGSVVREGVVDSDPEAIALFVRSNAPGAVRIGLETGATATWLWNELKRLGLPVICIDARHAKAVLKMQINKSDRNDAAGIARIMQTGWFKEVRVKDLDSHAVRALLASRALLVKIKRDLENQVRGLLKNLGLVIGRATFNVFSARAGELIEDRPDLVAAIGPLLEARKAIEQQVRDLDRKVLKLARHDVQVRRFMTATGVGPITALCFKATIDDPTRFRRSRSVGAYVGLTTRRHASGEVDWSGRISKCGDAMLRTYLFEAANVLLTRVPKWSALKAWGA

SEQ ID NO: 199265 - protein, 337 aa, unidentified
MMYSGIDLHSNNSVVAVIDEADRIVAQKRLPNDLTKVVGFLSRWKSELAGVVVESTYNWYWLVDGLQDAGFHVHLANTAAIKQYDGLKHSGDETDAHHLAHLLRLGILPTGTILPREQRAVRDLARKRMQLVQNRTMHILAVENIMTRQLGARMTSNQIKRLAAADIDTMPLSADVGLAIKANLAVIATLQEQIAVLEKRLQERVRPRAQYGLLTSVPGIGETLATVIILETGPIDRFAAVGHFASYARCVDSVRTSNRKKKGEGNVKNGNKYLAWAFVEAANFARRYCAEANRFHARKKAKTNNVVATKALAHKLARASYHILKEGKPFDVTRCFA

SEQ ID NO: 199266 - protein, 357 aa, unidentified
MNDQERGLDFNNQDFYLGIDVHKRSWAVTIRSNNIVLKTFSMNPSPKELSDFMKKRYPCGNYYSVYEAGFSGYGMHRELESLGFSNTIVSPSEIPATGKEKLTKTDEVDSRKLARELEKGTISGIYIPSQLQQEIRSLSRLRHQQIKKQTRIKNQIKSYLDFYGHKLPKNCEMQHWSRKFIEHLRTLEFNYDIGKEHLEIYVAELLVIRNRILQILILLKKYFQQYEKYHIIELLRTVPGVGFTVATTLYSEIMDIERFTNNEKFASYIGLVPSTMSSGEKKKVLGLSFQFNRYLRSLLIESAWVAIRKDPALTLAYNNFMVRLSAQEAIVRIAKKLLNRIYYVLKNKKKYVYSVVK

SEQ ID NO: 199267 - protein, 453 aa, unidentified
MKKETVKKSVVKIGTGLPVFNPHAAGIDIGDTLYCVAINDGKGGHEVKTTSAFTCDLHEIVDYLKSNGVTTAAMESTGVYFLPLFILLEEEGIEPYLVNAKHVKNVTGRKKDDTDSIWLQKLHTCGLLQKSFQPDNEIRVLRNYTRQRGKLILLSSDSVRRMQKLLELMNIKIHTVISDLLGKTGMAMVKAILAGERDPQILSTLCDPRIKASKEEVIKSLQGIWNEEHLFMLEQALENYEFHQNQIKRCEEKIKQQLLKQVAIIKEGDITCLEETQKKKSKAKPKKNQFDFSISPYLIAIAGVDLCKIPGINELTALEFIAEVGTDMTKWKSAKHFAAWLNLVPNTKITGGKIVSSKMQKKKNKAGQILRQGASCLSANKTPIGDSYRQMKARLGGKGAAITTGHKLARIIYTMLLKNTECNIELIIDNQEKYREEKIKRLEKQLNKLKLAS

SEQ ID NO: 199268 - protein, 350 aa, unidentified
MNIIGCDLHTRYQVIAWVNKETGEIVTRRLEHEKGEARDFYRRLPAGATVGIEATFPALWFERMLAEFSHVLWVGDAAEIRARAVRAQKTDTRDAEHLLRLLLTNRFPRIWVPSLEERDLRQLLVHRNKMVRMRTAVKNQLQAMALSQGLCRRWKLWSAHGQMELMGLELLTWASRRRQELLEMLRQLNGSIKKLDEAVEEAAGSRAEVVLLQTHPGVGPVVGLAFVLTLGPVKRFRHSQQVASYLGLNPREHSSGGRQRLGAISKQGNEMMRWLLVEAAQTAARFDPELQRSYQRLKFRRASGVAKVAIARRLAVRLYWMLRSQTDYAHLVRMSGSPSSGVVDRGPSRS

SEQ ID NO: 199269 - protein, 312 aa, unidentified
MAHIICGVDIGAETLDARIGRGGAWQQFVPTNDSIDRLAAFCRTHQAGLVVMEATGEYERLPFHRLWAADIPVAIVNPRSVRQFAEAMGTIEKTDKIDAGMIAWYGETKRIVPTPPPSDDQRALTALVRRLRQLIELRTAQNNQRRLVDQAVALDSFTTILAMINREIRSLQARIIAMIDADPLWLALDRAFREVKGVADRTIACLMANLPEIGTLSGKAIAKLAGLAPIARDSGKKNGNRPVRGGREAVRSILYVVAEIVRRHDPDFKAFHQTLRAAGKTAKVVRVALARKLLVRLNAKARDVRRELAQPA

SEQ ID NO: 199270 - protein, 428 aa, unidentified
MNYNQNRKISQITENTLIVGVDIAKHKHVARAQDFRGIDLANRLVFTNDLKGFQTLTQWINHLKGCHQKNRVIVGMEPTGHYWMTLAYYLKTHDIKCVVVNPLHVKRSKELDDNSPTKNDTKDAKVIAQLVKDGRYSEPTLPESIYAELRQGMKLYDQMVQDRNAIKAKVHNVLDRYFPEFLTVFKNWEGNAALQILRAGLFPKDIVKMPEEAILFEIKKAAQRAVGMKRVQKLKEAAAKSVGLSVGVRFAKKELRYLMEQYDDLTARIDELAKELSEMVLTIPGAKEISAIKGIGVMTVVGFFAEVGDLSQYHHPRQILKLAGLNLRKNESGEHKGRTTITKRGRKRLRALLFRVAMPLAATNPAFKRLHEYYRHRPENPLTGKQALIALCGKLIRVMFVIGRRQCAFSEERMIQDMPHLQNQKQVA

SEQ ID NO: 199271 - protein, 414 aa, unidentified
MEVLHERCAGMDISKRDVKVCIRVPGDRGGGYRNEVTTFGSMTEQILQLRAFLLEQRVTLVVMESTGDYWKPFYYLLEDAPFEVLLVNPRHVKGLPGRKRDVSDAQWLADLAAHGLVRGSLVPPPPIRVLRDLTRTHADLTRDRTREYNRLQSVLEDAGIKLTSVATKINGVSSRLMLDALVAGERDPKVLSGLAKASLKGKREQLTMAMTGRFTDHHAFMLKLHLQVIDQLTAAIDELTSQIEVVTEPFRDQLDLLITIPGVSEQVAVVIIAETGGDMGKFATAGHLASWAGICPGHNQSAQVSKKAKTRPGNSYLKGALGQAAMSSMQVHDTFLQDRHHRLKPRIGGLKTIVALEHSILRSIWHMLVTNQPYRELGAGYHQRRNPHNALRSMARQAQRMGYAVHFEPLPQTA

SEQ ID NO: 199272 - protein, 386 aa, unidentified
MQTDNHTMKAIKLHLGLDVHKDSITIAIAPAGRASEIRLFGTITHDLHALERALARIRKVHPGSPLEVAYEAGPCGFGLARRLKQLDVPCLVAAPSLIPKAPGAPFKTDKRDARAIARLLRAGELTAVYIPEPTDEAIRDLCRARTDAIDDLRRCRLRLKSFLLRHGYRYQGKANWSQPHLRYLRELVLPHPAMKTILEEYLQGMDAAHERVERLEQAMQTLLAGWRLAPAVAALMALRGFQLVAAMITVSELGDIHRFAHPRQLMTYLGLVSTEHSSGPRQHLGAISRCGNGHARWLLTECAEHYVLPPKVSKELARRQEGQPRHVRDLSWKAQNRLHLRFTRLLARRLARHKAKVAVARELCGFVWALLRTQDCYRQPAGGAAS

SEQ ID NO: 199273 - protein, 364 aa, unidentified
MKKFCIGIDIAKKTFDATAIFVESIDSLNEVGYRQFENCPSGFRALVSWAKKLCKQCNGKLSEDGLFCMETTGGYDRQICMYLHDKGQNVWRESALQIHRSSGFRRGKNDKADSRNISEYAAKHQDKLVLFSPDPTVIMELKEIVNYRATMVERRKEAKTRLSEKKFTTVLGKSQTERVINKMSESEIKTLDEIIEKCNQEIERIINSDEDLKRNYLHMTSINGLGLVNAACIIAYSSNFKKITTPNKMSCYAGAHTFYDESGTSVHKKDPSKNVCCKMIKNNLRMAARSAIIYNREIKAYADRLEKKGKPYSIVLNNVINKLLHITYSLVKNDCDYEYNHELLRKLKTVEPVLKTEPSLEAAL

SEQ ID NO: 199274 - protein, 453 aa, unidentified
MTKRKTGDHPDLKMVNPQAAAIDIGSTMHMAAVNPDADIMPVRAFGTFTKDLHDLADWFQSCGVTSVAMESTGVYWIPAFEILEAHGFEVILVNARYAKNVPGRKTDVSDAGWLRQLHSYGLLRGSFRPEAEIATLRAYMRQRERLTEYAAAHIQHMQKALMEMNLQLHHVVSDITGATGMRIIRAIVGGERDPEVLATFRDVRCKSSMDTIKAALVGNDREEHVFALTQSLELYDFYKAQIEACDRRLEAAVGALTVRADGSLAPLPKARIKGRQHNAPSFDVRAALYGVLGTDLTQIHGLGPSLALKLVTECGTDLRAWKSAKHFTSWLCLAPGNKISGGKLLSSRTRRSSSRAAALLRLAAVTIGRSDTALGAFYRRLSARIGKQKAVTATARKIAVLFYNALRHGITYQDQGAAAYDERHRQRVLSNLQRRAKTMGYALAPISETAGVS

SEQ ID NO: 199275 - protein, 403 aa, unidentified
MNSVGIDISKGRSTVAVMRPFGEVVISPFEVHHTDSELSALARRLKSLNGETRVVMEATGNYHAPVAKLLHDAGLYVSVVNAKLVHGYGNNELRRVKTDKKDAVKLANYGLDRWLTLPRYVPEENTRLLLKNCYRQYRQYSKVQTVLKNNLISLLDTVFPNVNRLFSSPIRGDGSEKWVDFVAEFWHCRCVSEKSEKAFANKYQRWCKKHGYNFSVAKAHTIHAEASGHIGVMPKSETTKLLVEQAVAQLRATSVALTALKREMLTLAAQLPEYPVVMGMFGVGPTLGPQLIAEIGDVRRFYSKKALVAYAGLDAPPNDSGDVTGKHKSMSKIGASSLRRTLFLVMSVYLRSAPLDEPVYQFMDRKRAEGKPYHVYMMASANKFLRIYYATVKAYLESLEHTT

SEQ ID NO: 199276 - protein, 464 aa, unidentified
MKQYRRAKLEPQDGDDSGHVRTVDGGATPGRLPVSIGVDIGDRFTEICVLDRDGEVAQRTQVPTTKKGIRRFFEQAERCRVAMEVGTHSAWIQRELDELGFETYVANARKLRAIWDNDSKTDRTDAYLLGEIVQIKPKLLRSIKHRGEEGRLDLKLARARAAMVRARTLLVNHVRGAVKVVGARMPPCHADAFHKQVEALPDELRPMLEPVMAQVGDHTALIRGFDAAIKERAAAVPAVALLTQVPGVGDLTALAFVSIVEDPSRFPKTRRIGSYLGLRPRLDDSGDLKPQLRITKAGDKFLRCLLVQCAQHILGPLGPDSDLKRWGSKLSERGGKNAKKRAVVAVARKLAVLLLTLWKKGEDYDPLKKAKQTGEVQPVTAPTMGLVTTKEVLDAIQEDKLVAKKRRSRANATSAKRPATKVKRVREKATRSVTPKPTRGSRSCRVVPALRGVESRPTAPATGP

SEQ ID NO: 199277 - protein, 346 aa, unidentified
MMIIGCDYHPSWQQICWVDTVTGETQERKLEHASGEAEKFYRGLPAPALIGMESTGNCQWFLDMASAAGHDVWIGDAAKIRAAEVRQQKHDRRDAALILKLLLEGRFPRIWTPSGEEKDLRQLLIHRYKLVRIRAQVKNELQHLAMNQGVTRKRKLWSKAGEKVLRELALAPWASRRREDLFRVREMLNGQIDVLDRAVVEAAEKNEKARLLMTQPGVGPITAMAFVLTMGDVQRFPRGKQVASYLGLIPREYSSGEHRRYGSISKQGNRFMRMLLVEAAQCAVRYDPGFRNEYLHRCHRKAKGVAKVAAARKLAIRLYWMLRTNTGYPGVVRAESSSRVPLVSAS

SEQ ID NO: 199278 - protein, 361 aa, unidentified
MNTLYVGIDVSSKSNVIYLMLPNGDKHSNFSVANSHEGSTQLVKRILSALTSHSLDTVLIGLEATSVYGDNLVYFLREDATLAPFNRKIHVLNPKQVKKFHDAYNDLPKNDYVDSFVIADCLRFGRINKEVYMGDYRYKALQNLTRARFFAVQNLVKEKQRFMNVLFKKYSTMTQEKVFSDTFSTTALAVYDEFESAEALANMDLHELTDFIIEKGKNRFPDPDAVAKAIQKAARSSYRLPKTVNDSVNQVLSISITSMKALESQIKEFDKAIKAQMELLPNVLISIPGIGPVYSAGIMAEIGDINRFNSQAALAKYAGLAWKQHQSGGFESEVTRLIPSGNRFLKYYLCCLLYTSPSPRD

SEQ ID NO: 199279 - protein, 375 aa, unidentified
MKEKVRFLGLDVHAETIAVAVAEPDGEVRSLGTIPNRVESIRKMIKKLGPAEKLRACYEAGPTGYVVYWQLAELGVQCEVVAPTLVPIKAGDRVKTDRRDAEKMARCYRSGDLTAVWVPDEGSEALRDLVRAREAAKQDQMRARHRLSKFLLRSGQRPPIGVRPWTRPYLIWVAQLRFTQIAQEATRQDYLHEVEHMRERVARLEQAIMEAVKLALPALQQVINDLQALRGIADISAVTIAAELGQVSRFDSARQLMGYCGAVPSEDSSGKRIRRGGITKTGNAHLRRIVGEAAWSYRRPPGIWYGLRRRQESISEEVKEIAWKAQHRLHKRYMKLGAAGKPQGKIITAVARELLGFIWAIGTRAETIVSQRTAA

SEQ ID NO: 199280 - protein, 372 aa, unidentified
MGTTDRYHQGQADRLTAEGRRAPVSPEPEQLMGPTRPDNARKGGWNNKRQMEARDMDKVYAGVDVGKATLEVGIYGERWVGQYNYDVAGVAQLIGAVQGREVGLVVVEATGDLERRLVTALVVAGVPVAVVNPQRVRYFARADGQLAKTDRLDAQVLAKFGWAMQPTLYEAQSAEGEELSAVVTRRKQLVEMLAAEKNRLNTATGSVRRQVEAHIRWLEEEVKALDEAINHLIQTAPQWQERDALLHSVPGVGAVTASTLLAELPELGTLSRQKVAALVGVAPINHDSGRRRGERHILGGRATVRRVLYMAALTATRVNPVIRSFYQRLLAAGKCKKVALTACMRKLLVILNAMLRDHRRWNPDLTLMPSPA

SEQ ID NO: 199281 - protein, 323 aa, unidentified
MSQPNLQCMGIDVAKLSLDIATTDTIEPFTVGNDEDGFAVITDKLKHTKINLILMEATGGLEAAIACKLQSEGYDVVVINPRQARDFARSMGYLAKTDKLDAAMLAQLALVIDRHPDRSRYIRHLPDEARAVLAAMVARRRQLNHMLVAERNRLYPSHPQSRKSIDNIIDALQNELDRINEQMKQHMTAFFQEQARLIGSVKGVGDITVASLIAELPEQGKLNRREISALTGVAPLNRDSGKMRGKRTTFGGRAGVRATLNMAALVATQFNPAIKLFYQRLLAAGKPKKLALVACMRKLITILNTMLRKGEEWNASFQSQVIS

SEQ ID NO: 199282 - protein, 390 aa, unidentified
MEALTVNDLPPAAADDDAVRCSFAIEMSKKSWIVAVNAPLADKISRYRLQPCDWRGLLELMARIRRRVAKELNRRVEIVSCYEAGYDGFWLHRLLEAHGVRNYVIDSASVQVDRRARRNKTDGIDAGQMLRSLMAHLRGEPKVLSVVRVPSIAEEDDRRLHRERHRLINERIQHVNRIKGLCALHGIYHYEPMRPLRMRALEHLRTPDGRRLPPRVKAEIIRELQRLELVLKMLDTVEAERDAIASDKNTLAHRNAKKIQDLVKLKCLGPEFASVLVGEVFYRSFANRRQLGSYVGLTPSHFQSGPMCHDQGISKAGNAKARSTMIELAWLWSRHQLKSQLSVWFHRRVGGLKGRIRRITIVGLARKLLIALWRYLETGVVPAGAALKKV

SEQ ID NO: 199283 - protein, 415 aa, unidentified
MFYVGIDIAKDFSVCSVIDDKEEMIIKPFPFNSSTGGFKKLINNIVSLNCDNKDITIGMEATGLLFENLYRYLSNLNYNVILLNPYQTAQYRNMVTMKYIKNDNIDSLIISLLIKSGRYSKGYVNEEQLQSLKVLFRHKENIKDQLKSLKRETSSLLAVVFPELDKVIKDPYNVSGLILLDKYPTSKHFKNVTVKMILRLFRKTKGNNFNEAKAELLLSYANDTIYSGVAKDARAFFIRSNIILIRALQEQIKSLEDEMLKIFDKPLNSEDIITKEDEDYISSVLDNLRTIPGVSDKTLLALLAECGNLDRFKNAKALIGYLGLYPTQEQSGNTLKYGRLAKRGARYAKKALYLASVAAVRHNSELKQIFRNQLTLGRAKKEALIIIARKLAYIIWAIYNHNQPYNPARVFVAHP

SEQ ID NO: 199284 - protein, 394 aa, unidentified
MTATLTVSIGSTTPVLYLAFELGWNEWKLAFASNRADNPRLRTIRGRHTEALQQEIAKAKKRFGLPEGARVVSCYEAGRDGFWLHRYLASQGVGNIVVDSSSIEVQRRGRRRKTDRLDAAKLLSQLIRWHLGEKKVWSVVQVPSAVDEDRRQLHRDVQEMKAERTQHSNRIKGLLAGCGLAVVKIDKDFPEVLQGLRQWDATPVAAELHKRLLREYERWRLVDRQIKDVENERIRKIRSAADEPVQKVRKLLHLRGIGVNSAWLFVMEFFGWRRIKNRKQLGALAGLTPTPYNSSETTHEQGISKAGNRRLRMMAVEIAWCWLRYQPGSALSQWYKERFGSGTSRQRRIGIVALARKLLVALWRYLESGEVPAGAETLDWKTKQRGRKHQPVAV

SEQ ID NO: 199285 - protein, 405 aa, unidentified
MICVGNDWASDHHDVCVMDEHGTTLATRRLPENAAGVTAMHDLLARFAHDPSEVVVGIETDHGMWVAALVAAGYQVYAINPLSVSRYRDRHHVGGTKSDKADAKTLADLVRTDRHNHRLVAADTVEVKAITVMARTHQNLVWARSAQQNVLRAQLGAYYPAAVDAFGGDLAHKDCLAVLRRAPTPRQGAALTVAAIRSALKKGGRQRNTDTRAREIQQALRGGGHLSAPEALTAAYAATVTVTVNMLTTLNTQIDQLETSMAQSFRAHPDAEIYLSMPGVGDITGARMLGEFGDDPERYATAKSRRNYAGTSPRTIASGKGHVVLARHIRNTRLNAAAMAMAQSALTGSPGARVYYDSLRDQKKSHPQALRALANRLIGILHGCLKHRTLYNEHTAWNHRANLAA

SEQ ID NO: 199286 - protein, 458 aa, unidentified
MAHRKKKIPAQLVEDEDYQLRHEKVAGIDIAKAKGDVCTRLPAARAGGRRRSRVEENVPARSRDILDLGARLLADGVELVVMESTSDYWRMWYYLLESLGLAVALVSSSQARQLAGRPKTDRLDAQWLARLAEMGLLRPSFVPPPEVRALRDLARARVHLVRDRTRAWQRLEKLLEGALIKLSAELSSLAKVKTARLILDALASGERDPKALSALALGPLRARRGDLEAALDGMMAGPHHAMLIRVHLDRIDGLDRAVAAVEDEIAAALEAIPAAQGVNAAGEPSPDPGPDPAVLPADARLAEIPGVSLDLARAIIAETGLDMSVFPTAAHLVSWAGLAPVARQSGPRQGKPKKGQGNGYLKGALTQAANGAGQTDTFLGERLRRLAARTGGSRARCAVARSILVIVWHLLSDPQARYADLGAGWHARKTSRDKKIRGHLRQLQALGVDTSSLNTTAA

SEQ ID NO: 199287 - protein, 398 aa, unidentified
MKTSGLDVHKDSIFCAIYDGTSYSVVKEFSTTTVSIRSLSDYLKSEQVEKVAMESTSSYWVPVWDILWEGGFDLMLVNPLHIKQLPGRKSDSKDAQWIAELLHRNMLRGSLVPSPLIQELRTYTREYRTLVNQRTKVLTQMDRILVMCGIRLSSCISNIDSKSFMQVVEALIRGETDPETLVWLVYGNRKNKESGKLKECLTGHIKSHHRLKLMTCKQQFDLFESQIQLYVSHMQKICVEHFSEEIYNLTTLPGVSQISAMIIIAETGGDMSAFENSGKFTGWTGLRPRNDESAGKFKSTATTKGNKHLRAIIVQVAWAASRTKGSFFMDKFTKLAIRKSRKKALVAIGRKMLVIIWHILSEKTQYNPCLVHIYDPIKVNYKIKYHEREIERAKKLIV

SEQ ID NO: 199288 - protein, 341 aa, unidentified
MKNKSFIGIDISKNVIDVSIFCEETPIKDFSHDVFNNSRKGFGEMCTWLKKNHVVLSNCLFGMEFTGSYSMELEKFLNARNYQFCMLSTHVIKHYPMGPKDKSDKIDSAKIADFLYRYNGTECVKPYKMPDKTMQRLKALMNERKFLVEQRTCFMNRRQLCSTKEDAQLYDGYIRKLGHDIENIELEEQKLLATDDSLLTTYKNLLTIPGIGFVNAINAIVITRNFTAFETARQYASYVGVAPHSHTSGTSVRWRPRPSARCDGQAKADLSMAATVAVQYDAELQSFYNRKLGGKQDSDTKRKALNAVKFKLVLRMFAIGKQNRKWEPLDSKSSNEKLAIS

SEQ ID NO: 199289 - protein, 341 aa, unidentified
MAEVCTIGLDLAKHVFQAHGADASGAVLFRKKLRRAQVLSFFATQPPDTVAMEACGSAHHWAREIGKLGHAVRLIPPAYVKPFVKRQKNDAADAQAICEAAQRPTMRFVAPKSEQAQAAALVFRARDLLVRQRTQIINALRGHLAEFGIVVAQGPAHVSSRVRAVEDPAEPVPEIARAILSVLIEMLHTLDGRISLLDREIAQRAKEDVTARRLMTIPGVGPITATALTALAPPAETFKRGRDFAAWIGLTPLQHSTGGKQKLGATSKMGERTLRRLLIIGASAVLRWAARHGAPAGSWLSRMLARKPPMLVRVALANKMARMVWALMAKGGVYRAPAVSV

SEQ ID NO: 199290 - protein, 428 aa, unidentified
MKIKIIEGIDQLDNKALDVAFDVSGESLDYSSYCLTERGKELWEGALSNRAGSIKKELLELDALAREKGYPGIRVLCEATGVYHRRLLKVANKLGMKTALISGEAVNMTQVVQSNDYIKSDEKDPKTMLLVSKVGKPLKDRNLSGGWLVMRQLNLEYERNQCDGTRFKNRIRQGLFELFPDLGFKSQWIFESRASIAIAELYGFNPYRIIDAGRSGFTQKLRRRKLRKQTINRLWEYAKQSTIMLEDKGITDCLEDEIRELHAHLQNLLSKRLELRSRMVAELEKLHRKGSVNIDPHAAPVGPFMLARTFAETGPLSDFINSKKLLRYAGLNITCRSSGTFKGQDKIAKKGRARLRRCLQQASLKLVVKGGLYGEYFHAKKASGKSGNQAMVAVSRKLLKMLFGLERSGGVYNAERVFQNQLPLRQAA

SEQ ID NO: 199291 - protein, 388 aa, unidentified
MSKQTAAASTIQISSPAQTLMLAFELGEGSWLLGFSAGFGEPVLRRKIASRDTVALLREIERAKEKLDLPAEASVKSCYEAGRDGFWLHRFLESRGIENFVIDSASIEVNRRSKRAKTDRLDVNGLVDLLARHLAGSRKPVFSVLTVPSEQAEDLRQLGRELKLVKRDRTRVSNRIKGLLANQGLLIDRSQDMAKQLASLRLWNGSKLSHHLRARLERYASDYGFYTARIKELDRERKAVLRANETEATEKVWRLLWLRGVGIETAWCYGMEFFGWREFRNRKQVGSLAGLTPTPHDSGNQQREKGIGKDGNRWVRGVAIEQAWAWLRFQPESELSQWYQERFGRGSKRLRKIGIVALARKLLIALWRYVETGLLPEGAVIASSVRLP

SEQ ID NO: 199292 - protein, 453 aa, unidentified
MEQKNEISMEVVNPHAAGIDIGSRSHWVAVGQQEDEVREFGVFNEDLYSVAAWFKECKIRTVAMESTGTYWQSLYAVLLSEGFEVILCNGKFTKNIKGKKTDIKDCQWIQKLHTLGLLSGSFLPDKQTEELRTYCRQRALLLDSAASASKKMQKYLRLLNLRLDVVVNDICGLTGLSIIKSICEGEKDPKKLASLRHYNCHKSETEIAKALETNGRQDYLFGLKQEHDMYQVFQVKIQECDVEIKKLLDKIIDENDSKRQHYIDSKPHKKVNKNTPENVDLNLKSYQYFEGVDLMAIEGMSYSTVLSVMSEVGLEGIKKFKTAKHFANWLRLAPNNKISGGKVLSSRIPKGSNRLKIALRNAANAIGNLRESTPLRDFFQRINFRKGRVSAISATARKLAVIIWYMIVKNKPYYNPIEYLYLDQKRKLGLVKRIQKQITKFDLKPEELGFVTN

SEQ ID NO: 199293 - protein, 424 aa, unidentified
MKVTYQTCCGVDVHKSFLVATIVKTTGGIEPSYQKKRFSTFNSSILEFKQWLLDNDCHDVCMESTGKYWVPVFNLLEDEINVVIANPKWVKAVKGNKDDTKDSKWIGDLFRLGLVKGSYIPCKIVRILREYTRYRYKLVSCRSSEKNRYQNTLTVCNVALDSVVSDIFGKSSMSIIDYLLEQSGTSINHEEIASKLLRSLKSKEDAVIESVEGYQMTDAQKYRVRLVRAHMDYITAEINDVDKMIENMIFSNPDFENAVQFLCIIPGVKRDSAITIISEIGTDMSQFGGSKRLCCWAGLTPGSNESAGKKKSVRITRAGVYLKPALVQCAHAAVKSDKSPYYKKKYESLVKRRGKKRAIIAIARMILTAIYQMLSTGEQWNPSDLYKIDMPVALVEKQKAKAIKQAKKLLQREGILPPDEPLAS

SEQ ID NO: 199294 - protein, 371 aa, unidentified
MTHVTSIGLDVHARSVSACAFDPFTGEVVQRSFGTDAGEIAAWIKGFEEPKAVYESGPTGFALCRQLRALGVDCAVGAVSRMQKPAAEKRRKNDRRDAAFLARLLATRNVVEVWVPPAEAEAARDLSRALDDAREDLQRARQRLSKFLLRRGHVFDETDALGRRRGAWTREFRRWAEEWLRHDELAAASAFDHYATCVRCAESDKRALEKLVLAEARSERWAGVVGALSCIKGVDAVTAFCLATEAGCFSRFATAGAYASWLGLTPSEHSSGEKEATGGITKTGNSASRRALVEAAWHYASCSPKPKAAPAGYDVPPRIRGRAADATRRLRARHEALRAAGKRPCVANVAVARELACWVWEIGRSAEGTLG

SEQ ID NO: 199295 - protein, 412 aa, unidentified
MTAINQFAVHVGLDWADKKHDVCVQFKNGERTFHVIEHTPEALDVWLTELHQKVKGRIAIAVELKKGPVVYALQKYPFITVFPVHALSLARYRQAFSPSGAKDDPQDAELALELMLRYPQKIKAIEPDNADIRLLQQLVEQRRQLVEDKRRFVNRIINTLKQYYPQPLEWFSHRGSLLLCELIIRWPSLQQLKRARRDTIRNFLNAKGGRAMALTEQRVASIDNAIPLTTDPSVIEANALMATALATQIKVVSEIIKTYDERIEALFDTLPDAELFKSLPGMGPCMGPRMLAALDDNRGRFNSAEEIQNYAGIAPVTERSGQKSWVHWRWQCAKFVRQTFVEWAAKTVNSSYWAKLYYQGLREKGKSHQSAIRALAFKWIRIIYRCWKARTQYDEAKYLLALEARHSPLLKP

SEQ ID NO: 199296 - protein, 340 aa, unidentified
MTNVVGVDVAKATFDVAVGLAKPGKFQTRAKMANREEGFKELMTWLDKHAPDAAVCMEATGIYHEALALFLVQQGRTVYVVNPAQVKYFGKSQLTRTKTDHTDAKLIAQFATSQQAGAKPMSPWTPPTPAQRTLRALVERLDDLKGMERMEANRLDVANDAVRDSVEASLKELRKQIQALEQRINKHIDKDPGLHHDAALMKSIPGIAKTTSASLLAALGDLRRFDAPGKLVAFAGLNPALRESGTLKGQVRISKTGASSLRAKLYMPAVSAKNHNPIVRAFCERLLARGKLPIVTVCAAMRKLLHLVWGVIHTNTPFDAGYVGHHRTTTPYASAECMVA

SEQ ID NO: 199297 - protein, 422 aa, unidentified
MLEQTRDEQEIIERVAALDIGKAELVCCVRVPDPGGGRRRVQEVTTYSTMTRSLQVMVDRLTDLGVTRVVMEATSSYWKPPFYLLEAHGFETWLVNAKDVKHLPGRPKTDRLDAVWLCKVAERQMLRPSFVPPIPIRRLRDLTRYRMSLVSDQGAEKNRVEKLLEDAQLKLSVVASDIFGMSGRDMMAALIAGERNPQALAQLARSRMRGKIPQLEEAFVGQFTDHHGYLLTKMLARIDALSVDIADLDTKIEARLAPFADTVARLDEIPGVGAVTAAVIIAEVGLDMTRFPTPAHLSSWARFAPGVKESAGRKKGTGSTGHGDRYLARVLGEAAVAASRTNTFLGERYRRIARRRGKKKAIVAVGRSILLIVWSLLSDPETRYYDLGPGFYDSRINPERKKRNHIRQLEALGYKVIVEPAA

SEQ ID NO: 199298 - protein, 381 aa, unidentified
MKKNSIAKLQVTKSQIRSMAAKQRLTVGLDLGDRSSRYCILDEAGEKASEDQLPTTKAGLDSIFAKMAPSRIALEVGTHSPWVSRQLAAMGHEVIVANPRKVRLITQSVKKNDRMDAEQLARLARVDPRLLAPIRHRGPEAQADLGVIRARAELLEGRTKLINAARGLTKPMGERLKSCDADTVKESMADGLSEATQKVIRPLLKSVEAITQQIKVYNEQIQEIEKRYPETELLKQVHGVGPLVALTFLLTLEDAERFEHSRDVGPYLGLTRKQRESGKSEPELGISKAGDELLRWLLVQAAHCILRRGAPDSDLRAWGLMKVGAGAGKKGSKSRKKKAAVAVARKLAVLLHHLWVTGEVYDPQYNRKAAEASQASKRAAA

SEQ ID NO: 199299 - protein, 404 aa, unidentified
MSVQSAPVTSSTIVVAVDVGKTSAMVSVTDDARRRLMGPVEFAMTRSGLGAATQRVLDVAPACPQIKVGVEAAGHYHRPVVDYRWPPGWEVLELNPAHVAEQRRVMGRRRVKTDKIDVEAITELVLAGRGRVIGEREVLLGEVAAWAQHRSRRVAVRTATKNQLLAQLDRAFPGLTLALPDVLGTKIGRLVAAEFTDPARLAGMGVNRLIRFAAARDVQLRRPVAERLVAAAKDALPTRDAVVARRVLASDVALLADLSSWIVDAETELARLLPLSPFSTLTSVPGWGAVRVSNYAAALGDPNRWPGPKQIYRASGLSPMQYESAGKRRDGSISREGSVALRRALIDLGIGLWLTEPAAKSYAHGLKDRGKRGGVIACALAHRATRIAHAMVRDHAVYNPARWT

SEQ ID NO: 199300 - protein, 343 aa, unidentified
MQAVTTIGLDIAKSVFQVHGVDGGGQVVLRRQLKRRYVLAFFEKLPPCLVGIEACASSHHWSRELQALGHTVRLMPPAYVKPYVKRHKNDAIDAEAICEAATRPNMRFVATKTREQQSCLTLHRTRHLFIRQQTSVINAIRAHLAEFGIVAPVGRNGVEELLTIAADASDKRLPDVARACIVALGAQLRALKAQILQFDRLIMAWHRSNQASRRLDDIPGVGPALATALVATVADPRAFRSGRNFSAWIGIVPKQHSSGGKDRLGSISKRGDRYLRGLFVAGALAVIRYAKIHGTKRRPWLTALLARRPTKVAAIALANKIARMAWAMMAKGEHYKEPVALAA

SEQ ID NO: 199301 - protein, 352 aa, unidentified
MPTITTIGLDLAKKVFQVHGVDAEGKVVVARKLRRKEVLAFFAKLPPCLIGMEACGSAHYWAREIIKLGHTVKLMPPKYVKAYVKRGKTDAGDAAAICEAVTRPNMSFVPVKGLEQQGLSMLHSARSQLIGQRTQLINGVRGHLSELGVIAARGLLGFAELAAIVRDESDQRLPTTARIALMVLVRQIEMISTEIAALDSALRKENMASELGPRLETIPSVGPVIASAFRARITDAKLFKNGRHQSAWIGLVPENDSTGGKVKQKGLSKKGDRYLRSLLVNGAMAVVRQAQKRPDKHPWVAKLLGRMSAKQAAIAIANKTARIAWAIMVHGGVYEAGHRAPQYRAQACAAAG

SEQ ID NO: 199302 - protein, 342 aa, unidentified
MEAASIIGIDLAKNVFQLHGAAADGTIVFRKKLSRPQFARFMADQPPCRVAMEACASAHHWAREMARHGHEVRLIAPHYVKPFLKRQKNDAADAEAIVEAALRPTMRFVEPKSADQQARAVAFRTREQLVKQRTEAVNALRSHLYEFGHVAPEGIGYVPRLAKVVDDPNAGVPELARDICRMLLEQIAHLTERINALKARINALSNEAELPRQLQTMPGVGPITALAVETFAPPMEQFRRGRDFAAWLGLVPRQHSTGGKQRLGKTSKMGQRDIRRLLVIGATAVIRWASRRGAPKGSWLARMLERKPIPVVAVALANKMARGIWAMLARGENYRGPVLIGA

SEQ ID NO: 199303 - protein, 350 aa, unidentified
MVVVGADVHKRTHTFVAVDEVGRKLAEKTVTAITAGHAEMVMWARQRFGDDVVWAIEDCRHLSARLERDLLALGQKVVRVPPKLMAQSRASARTRGKSDPIDALAVARGFLREPDLPIASHDEISRELKLLVDRREVLVAQRTATINRLLWRVHELDPGHAPKPRSLDLAKHRRLLGQWLDTQTGIVAELARDELADITRLTETINTLATRIGERVRKVAPVLLAMPGCGELTAAKLVGEAAGVSRFKSEAAFARHAGVAPVPVWSGNTRGRVRMTRSGNRQLNAALHRIAVTQIRLDGVGQTYYRRRLTTGDSTPEALRCLKRRLARVVYGHLHTDHNNHHKPCQTAAA

SEQ ID NO: 199304 - protein, 317 aa, unidentified
MSNTTESFVGIDVSKDELEICIRPTNKSLTFANTEDGIALMVEHLKTLSPSLIVLEATGGYEMAAVNALGCKGLPVVVVNARQVRDFAKSTGRLAKTDRIDAQVIAHFAQAVHPPLRPLKDEQTQRLEALNTRRKQIVKMITAEQNRLHQAPKWTAKTIKSHISWLNKELKKIDKDISNLIKGSPIWREKDAVLQSFKGVGPITSSKLLASLPELGTLNSRKISALVGLAPLNRDSGKFRGTRGTWGGRRHVRSNLYMAALSASRSNPIIKDFYLRLIQAGKPHKVAITACMRKMLVILNSMIKNMTIWQEPVSEKS

SEQ ID NO: 199305 - protein, 356 aa, unidentified
MSSKLNTAIAVAGIDIGKNSFHVIGLDKRGAIVLRQKWSRGQVEARLANTPPCLIGMEACVGAHHLSRKLQALGHDARLMPAKYVRPYSKGQKNDFRDAEAIAEAVQRPTMRFVATKTGDQLDLQALHRVRARLVGQRTGIINQIRAFLLERGVAVRQGLRFLRIELPGILAKRTDVLSPRMLHLIEGLADDWHRLDERIEVLSSEIGALACGDPACDRLMTVPGIGPIISSATVAAIGNGAAFAKGRDFGAWLGLVPKQISTGDRTILGKISRRGNRYLRSLFVQAAWVVLVRVGPKHWDRYGLKSWIEAAKKRLHHNVLAIALANKLARIAWAVLNKERKFECIRTNKMSPRAA

SEQ ID NO: 199306 - protein, 423 aa, unidentified
MQKIAQFHQSDKPSPTHLLLAVDVSSRTLDIYSRYHQAGTEFELCESVHNDLSTIHQTLESYQKQACRLGYSGLSMVVEPSGAYEKKLTHAALQKGVDVWMVNPERMYKAGVIHHGDDGKSDPLDGKVLFMMARMGKVSRLVPLPGIWQQLRRLGQWMEDATLAAADARIHIGVIRRGLFADWRQSGDLTWGPTGRAIQTLYGFDPWKVTADSFETYITRMQAHHKGLPRRCLAGIWQQAQSSCQAPLPHRQRQALQGQLDHLWNAWSLHQDRKTHLGQQMVDLVDGLDPSDHWIPPLMSGFTKVARAKILAETGPLERFPHWRALLAYAGLKVRMRASGKYRGQDKITKKGRILLRKHLGQLAWVLSRKDRVFGPYYHRKLAEGMPARKAKVACMRKLVKLLYGAAKSNQQFNPERVYRSAG

SEQ ID NO: 199307 - protein, 411 aa, unidentified
MDKVYDKCCGIDLHKKLIVACFKQGNRQEIRDFGATTRELLEMADWLKEGGCEMVAMESTASYWKPLYNILETCELKAMVVNAQHMKAVPGRKTDVKDAEWIADLLQHGLLTASYIPDKDQRELRELVRYRKSLVGERARELNRLQKMLEGANIKISGTIRDINGKSARNILEHLLSGKQIDSAEYDILYEKKVIAHNLKATKEQIIDDLNGVMSALQKKMMRIILNHLDELNAHIRELDDDIDNFMKPEEKEAAKVIQDIPGIGNTGAQAIISVIGADMSRFPTDAHIASWAGLCPGNNKSANKRKSGKTRKGNGLLRDTLIVCAHSAVKNKSSYFHAQFARISAHRGSKRAYVAVAHSMLVAIYHILKEGVVFKDLGADYYNQFNRERKINAYLKKLKALGWEVPVVAA

SEQ ID NO: 199308 - protein, 406 aa, unidentified
MIEAMFSSCAGLDVHSKSVMCTLIKKGEDGQITKQTRQFKTFHNDLRELAQWLKDSHIELAVMESTGIYWKPVYLAIEDVGVVVLVVNAHHVKNVPGKKTDVISSEWLAELGLCGLLRASFIPSRDLRELRLITRYRRKLSGILSGEINRLHKVLHECGIKLSSVVSDIDGVASQAMIKALIEGKKTPEQIAKLFRGRLRADIETLTAALEGNISDRHRFLLERIQNHIEWLQKEMARIDRQVFSAMEPYDMEWKLLQTIPGIDEISAAMLLAEIGPDMKRFVNKDRLSSWAGMCPGNDQSGERKKSGRTRKANKYIRSLLCEVAQSARKTNSQFKGFFKGLLIRRGFKRALVAVGHKVLEAAFTVLSKKEPYKDPTIDYEKLVVNKNGARWIRALKEHGFLPIHC

SEQ ID NO: 199309 - protein, 417 aa, unidentified
MEKHNNSRKKSEQPSKRAKARGPVQRDTKEVLAELVGKLKEKLDPKKVTAMSAGEKHQQGELRPNLDRLTVGVDLGDQWSHYCILGLEGETLAEGQLRTTPQDVAEFFEALNAARVVVEVGTHSAWVQEVIRGYGHEVLVANPRLMEGSKRRKRKNDRIDANKLARLGRVDPQSLHPIEHRSKEVRQDLVILRARDALVAARTELINATRGLVKSMGTRLPKCSSPSFAQKVEEAVPVEIREALLPLVRMTAALSDGIQGYDEKIEKLASEKYGHTALLRQVKGVGPITSLAYVLTLENPERFEKSRDVGPYLGLVPKQEDSGESQPQLGISKAGDTMVRRLLVGSAHYILGPFGPDTDLRRYGLRLCERGGKNAKKRAAVAVARKLAVLLHRLWVSGEVYEPLRQGMAATTAHAAA

SEQ ID NO: 199310 - protein, 292 aa, unidentified
MISTKYIGMDVHKESISIAVRNSAGKVVMESVIETKASMILQFIDGLRGDLQVTFEEGTSAAWLYDLLKPHVTKLVVCDPRKNKSMREGNQNDKIDARRLAELLRLDHLNPVYHGEHGLRTLKELVRSYLTITKDLARVKSRVKAIYRSWAIPCTGKQVYAQRHRAEWIAKINEPGVRQRADCFYQQLDALRVLRQGVRRDLIAESKKQKAWKRLCEIPSIGPIGAAVLLGILQTPHRFRTKRQLWAYGGLAIETHSSADHRRVDGHLERSRKNVLVRGPQPQQQSRSEEPV

SEQ ID NO: 199311 - protein, 349 aa, unidentified
MRNRERSHSLNQIVTIGLDLAKNIFQVHGIDACGKVVVRKPLRRGEVMKFFASLPPCLIGIEACATAHHWGRELGKLGHTVRLMPPAYVKAYVKRGKTDAADAEAICEAVTRPTMRFVAVKSMEQQGVLMLHKTRDLLVRQRTMLINALRGHLAEFGIIAAQGTAGVKAAIEAFHAMQDSLPTLAGKALHGLIKQMRVVASEIDTIEEQILAWHRNNAASRRLAGIPGIGPITASAIVATVSDATLFSSGRSFAAWLGLTPRAHSSGGKEKLVGISKQGDSYIRRLLVIGATAVIRRARQDNASKSWAAKLLTRKPARLVSVALANKTARVAWALLARNQAYIAHVGAA

SEQ ID NO: 199312 - protein, 311 aa, unidentified
MPPLPVYCGIDVSKLTLDAFCLGHYCHQSNDPKGWRALIAWLDRLSPSASVVAEATGGYERAPIGAFRKAGHPTHVVQPLRVRQFASSMGQLAKTDRIDAKVIADFAQASQPRTDTPKTDLQERLVSLVSYQDQIKLKIVALQNQMEICADPLIDASAKRLLKAHHCELKAVAKAIKTLLAQSDELTLKFQTLTAFQGVGETTALALLAFLPELGQTSKAKIAALAGLAPFNHDSGQSKGKRAIHGGRAHVRKSLYMAALSASTHNPILSKFYHLKRSQGKPAKVALTAVMRKLLVALNFSLKNPNFSLAS

SEQ ID NO: 199313 - protein, 410 aa, unidentified
MRICAHPNFYKAGDVMFFLGIDIGKNNHVASMLDDAGKPVFKAFSFANTTDGGESLLSKLEKHGANDENLAIGLEATGHYWLAVYSFLKDKAFKLHVINPIQTDGWRKGIEIRKRKTDTIDSLLIADLVRYGDFIETQLPDEAVLSLKNLTRFRTYLVDSISDLKRKVICVLDQVFPEYQHIFSDVFGTTSKEVLLQFGSPAELESLSTNTLAELLAKLSRRKIGADKADMLSSAAKTSFGVTFCRDSFTFQLRMMIEQIKHIESQVKDTEKEIKRIMAELATPITTIPGIGKTTGAVILGEIADITKFDNPKKLVAFAGIDATVKQSGEFEGTENRMSKRGSPYLRRALFQAALVACVGRNPDPVLSAFYQKKITEGKHHNTAVGAVARKMCNIIFSVLTENRPYEVRK

SEQ ID NO: 199314 - protein, 407 aa, unidentified
MAGLQVVYERCAGCDVHKKTVVVHMVVPGHSEARTFGTMTRELLTLLEWLEASQITHVAMESTGVYWKPLYNLLETTGMTVYVVNAAHMKAVPGRKTDVQDAEWICDLMRHGLLKASLIPSRPQRELRELVRYRISLVSERTAEANRIQKVLEGGNIKLGSVISDVLGTSGRTMLEALLAGQRSPEEIAALADYRVRATREELADALRGRLTSHQHLMLRLQLDHVRYLDQQIEAVETEVTTRLAPFAAQMTQLDTIPGGSERVAEVVVAEVGVDMTRFPSAAHLTSWGGMCPGSNESAGKRRGARTRKGSPTLRRALTEAGQAAGRAKNSYLSAVYRRIAARRGRKKAAIATGRRILEIAYYVLRDGVAYEELGANFYDEHKKDAVVRNAVKRLERLGYKVTVEAA

SEQ ID NO: 199315 - protein, 330 aa, unidentified
MQHEANSNAVPSAAVSDVSLPVAGIDVAKDQLDVFIDVVAQRLRVSNNDEGVARLVATLRQHKVRLVVLESTGRYHRAAAAALLQAGVNVSVVNPKNVRAFAVADGRLEKTDAIDAQVIASFGRALNPRITAKTPEKQTVLADLVSRRRGLVQVRVAERNRGQGQLPTLAATQSTKLLRLVNQQIEDLDRAIAKLIEGDDDWHNTSKIIDSVPGIGPETANQLVSSLPELGKLNRQEIAKLVGLAPLNCDSGTQRGQRHIRGGRDHVRNCLYMATFNARQRCDKFRRFFDGLVGRGKHYQVAMTACMRKLLVILNEMVKNKTHWDSKFAS

SEQ ID NO: 199316 - protein, 428 aa, unidentified
MNCNTQNAKIASITEKTLIIGIDVGSEAHYARAFDWRNYEYSKKALEFSNTEAGFMALRAWVEDIAEKHGKTAVIPGMEPTGHYWFALGKFLQDNGMRPVHVNPHHVKKSKELDDNNPNKNDRKDPKTIAALVNEGRFSYPYIPTGIYAEVRSLSNLRFQTQEELTRIKNRIARWFAIYFPEYKDVYGDLKAASGRMVLKVAPLPDDIIKLGAEGVNQIWRDAKLRGVGMKRAKTLITAAEHSVGSKEAPETARIELRHLLGDMDVYTSRLEELLRSIEGKLREIPYVDKLMEIKGIGLTTVSGFIAEVGDIGRFDNPKQLQKLAGYAIVANDSGKHNGESRISYRGRKRLRYVLYEAAISLIGKNAEFREIHEYYRTRKKNPLKKMQSVVAVACKIIRVFYTILTKGIDYDANKLMGDIRRPQIETA

SEQ ID NO: 199317 - protein, 397 aa, unidentified
MIAVGIDVSKSKSTVAILNADGTQLVRPFNMAHTLPEMNSFVKRLKSLEGPVTILMEYTGHYHYPVLKKLQTEGFSVCLINPYQMKKYGDVEIHKAKTDRKDAVRIATYALEKAYKLTPYSAMEQKYENLRFLSRQYGQRISDVSRLKTQLLDHLDQTMPGITGLLSLKSRTPEKCTLLLFIKRFKSFDEVCRIGKTRFLSAYAILVKKTSDCYAAAKALAIYELALNSITTRGDDPYIWSVQAQCVDLLAAAQNGADAIILQMQNIAETIPEYKVLRAMHGVGDRLGPIILAEIGDVRRFHSAKALNSYAGNDAPPYQSGQFESRNRHISKRGSPALRKACFEVMQALKLTKPQDDPVYLFMLKKEQEGKPHNVAKMAGVNKFLRIFYARAMELYR

SEQ ID NO: 199318 - protein, 343 aa, unidentified
MEYYAGIDVSLKDSSACVVDSSGKIVREVKVASEPEALLRFFANFGFPMTRVGLEAGPLSQWLREGLVGAGFEVVLLETRHVKAALSAMTVKTDRKDARGIAQLLRMGWYRPVHAKSASAQEVRALLVGRKLLQSKLLDVELSIRGILRGYGLKVGEVSRGRFDARIRELTEGQAMLETVIGAMLQARAILWSEITRLHREMLKIARADRVCLQLMSAPGVGALVAITYRSAVDDPGRFEKSRTVGAYFGLTPKKYQSGETDIDGGISRVGDAMVRTALYEAAHIMLTRTTRFSALKRWALEVAKRRGMKRAKVALARKLATVLQRMWLDASEFRWGKAAVAA

SEQ ID NO: 199319 - protein, 503 aa, unidentified
MHKKVLMVVVIAATTPDEKPERRRFTTMPSEMGRLSVWLREQGVEEAVMESTAQYWRSVGLELEPYMRLHLAQAFSNRAPRGRKHDFKDAERLVRRLIAQELILSFVPDGEQRTWRNLTRMKLQLRRDRVRLQNQMECLLEEMRIKLSIVVSDLLGASGLRMLLALAKGESDPKKLAQLGDERLRCTEEQLVDALTGRPQPMHREMLALQLERLQLIDSQIAKLNALIGQAMKPHQEAVMRLAEVPGLGVDSAQQIIAEVGAQASTFPSAAELTSWVGTCPGKDESAEENHSSRSAKGNKYLRRVLNQAAHAAVKKNGSYFQAVFRRLLPRLGYQSAIWAVAHRLCRVVWKILHEGVRFIEQGREPDPRAKKKRAQMLARALRKLGYEVTITPINLAIAENGMQLQQRIFEGVLSPCFRGGYPTRSQLWRDLENRSFILSATVVGRTVQLSSRVENYAGVGAVPIPPPVLLQTKIAIAIANSPKLCDAAMYKWPQSRGFELRC

SEQ ID NO: 199320 - protein, 370 aa, unidentified
MGPAVEPQLREAPVMSEGSWVGLDVHARSVVAGVIDMGSGEVRSLRVPPGSEATVAWLKTLPAPVRVVYEAGPTGYGLARLCAEAGISCVVAAPSKIRPAADRVKTDRRDAERLARLLRLGEITPVRVPGPVEEAARDLVRAREDARGDLMRARHRLSKLLLRHGAVYDATAWTRAHDAWLRKQRFQDGPLAIVFDECYSRMIDAKTSRDTLDKAIAELAASEPYVDVVERLVCLRGVSTLTAFALTVELGDWNRFRPESLAPFLGLTPSESSSGERRRQGGITKTGNTHARRLLIEAAWHQRSAPRLSVTLERRRTGKSLAVRAQADSSARRLHGRWNALEARGKPRLIVVVAVARELAGHCWALATME

SEQ ID NO: 199321 - protein, 344 aa, unidentified
MNYMGIDHHKQYSHLTLVDKRGQEIKSGRVENLRREVEEFLKGVEGKIVAAIEAGCSSYTMVDLMKGLGVEVKVAHPKELRAIAAAKIKTDKRSAETLAHLLRADLIPEVYQRREENRQAQRVLRQRVFFVRSLTRVKNRIRALLAQQGEEVQSEVSQVRNIFSRAGQRLLRELPLAEPDKSLLQSLLKNYKHLEARIKESDRLVHRLYRQMRPARLIRTVPGFGKFFSVLVATEIADIKRFTKVGSLHCYAGLVPSTYSSGQRSYQGRIIKEGNQWLRWAVVEAVWPAIRADFDLRLYYEKLKKRKKSNVAKVATARRLLSIIYQLLKEDRPYLPYRREGHKR

SEQ ID NO: 199322 - protein, 355 aa, unidentified
MSTMPCIDGEVILGVDTHAETHTAALADPIGRTLATTTVPATRRGHRALIKWAGLRGSVRVAGVEGTGSYGASLARFLALQGVEVIEITRPARKGRRHLGKNDTRDAEAAAKAVLSGEATAVPKPRNGIVESIRVLHLARASAVKARTQAALQLRNLIITAPDELREPLADLTTKQAVARCARIRRSGGLDTVAATRKALRTLARRWQALDAEVRELDQDLKRLTAQAAPRLLAQSGIGRETAAKLLIVAGDHPDRLRSDAAFAALCGASPVEASSGKTRRHRLNRGGDRQGNCALWTIATNRMLHHEETRAYVERRTHEGLSGPEIRRCLMRHLVRRIYPLLRADLRAATTVPT

SEQ ID NO: 199323 - protein, 401 aa, unidentified
MQENQQHDSVDVFVGVDVGKGHHHAVALDRTGKRLYNKALPNDETRLRALITELKAHGQLLFVVDQPATIGALPLAVARDEGILVAYLPGLAMRRIADLHAGEAKTDARDAAIIAEAARSMPHTLRSLRLADEPLAELTMLCGFDDDLAAQITQTSNRIRGLLTQIHPALERVLGPRLDHPAVLDLLERYPSPAELAATSEKTLANRLTKLAPRMGKSLAAEIVQALSEQAVIVPGTQAATIVMPRLAQQLASLRKQRDEVASEVERLVHAHPLWPVLTSMPGVGVRTAARLLTEVAHKAFASAAHLAAYAGLAPVTRRSGSSIRGEHPSRRGNKVLKRALFLSAFAALRDPISRDYYARKVQQGKRHNQALIALARRRCDVLFAMLRDGTLYQPKSTPNA

SEQ ID NO: 199324 - protein, 339 aa, unidentified
MNFIGADLHKKMITVCVLNENRTVLARKTLPCNQPDQIVEFCRQFRPFKVVVEATASYLWFVDLVEPLAEKVVLANPKKLRVIAESTKKTDRLDAQILAEFLARDMIPEAYMPTPRQRQHRALVRHRQYLRGRMTSVRCKIRHILSDSNADRKDLFSAQCGTAYLKEVALSDADRFVIKQLWAEFEDHQARLLALAKKIKVFIAKAPKREAEARQIIKTAPGVGAVTAEVVLSELGDVSRFRNAKAVCAYAGLVPAVRQSGGQRSKDLQITKQGSGLLRWALVESAWRLVNQSPKWTAIFGRLRKRSGNKRAIVVVARKLLCVLYAMLKTSTPYKVITT

SEQ ID NO: 199325 - protein, 389 aa, unidentified
MKIYVGIDIAKLNHFAAAISSDGEIILEPFKFTNDADGFQLLVSKLDSFDKNSIIIGLESTAHYGDNLVRYLVAEFYQVCVLNPIKTCQMRKNNVRKTKTDKVDTFVIAKTLMMQDDLRFITFFDLDMMDLKALGRFRQKTIKQRTRLKIQLTTYVDQVFPEIQYFFKSGLHQNAVYALLKEAPSPKEIASMHMTHLANLLKVNSHGHFTKEQAKELRVLAQKSVGANDSAISIQITQTIQQIELLDSQLEKIEAEMTDIMKFNDSVIMTIPGIGYINGGMILGEIGDIHRFSNPNKLLAFAGLDPSVYQSGNFQAKTTRMSKRGSRVLRYALVNAAWNVVRNNATFKAYYDAKRAEGRSHYNALGHCAGKLVRVIWKMLTDEVEFNLE

SEQ ID NO: 199326 - protein, 421 aa, unidentified
MDKNDDSRLEEFRQLKRDIRGSTRHLVVGMDIAKERHHAFFGTPAGKVLLHRLVFDNTRDGFEKLCFQADILKTQHGLAHVVFGMEPSSDYHKPLGEYLIEHGHGVVLVAGTAVKKNRELLDNRWDKHDTKDAANVADLVTQGKCLFYEFPSLSLRELRSLLSLKRRLKKSEQGYKVRIRNHLIAQYFPEMDAYFNYAEGPDIVRWCLNPERLAGLHLQEFARMVSLGNAHQMSRLEEIHTKAAVSIGCAAHPSVAFEASLLLDGLKSLHLMILETDRRIAEVCKKFPEYPCLLSIPGFGPDISAKVLGALGNPHRFENHRQVLKMAGLDLSADRSGKRTDVTPVISKKGKADLRYGLYQAALIASTRNTQFMTYFTNKLKGREREKGIGTKMRVKLSAKMLVIAWTLMKKKEMFDPGCLG

SEQ ID NO: 199327 - protein, 424 aa, unidentified
MKNTAARKRKQVPEGYLVVGVDPHKKRHAAVAITQDFTTRNKFKFDNTREGLEMMLDRAKVEMVRYGCRGVIFAIETGGHYWRNVAYFLDEQGVPYRFINQFTLKRRREGKDLNRRKNDYRDGEVAAQLLCTGEFTESKLPQGVYAELRTAHNAYQRLVKERTRITNLVKGLLDALFPEFTQVFKDPGGLTALSVLSTRPIPRVIAGLTEDEFEATIEARHKGRRLMRKKLRALHYLARTSIGIDAGARSLSYEIAFLVDKLKLIRQQIRIMEGTLVRLVDETEEGKYLLSIRGLNYIAVAGLLAELGCFRQYRSAKQMIKMTGSNPTESESAGKKRARTPMSKQGRPLLRYCAWTSVIPMLRFNLDFRAWAKQRRERPIHANPLGGREVVGAALNRLLRLAFALVKNQSYYQDVKPALTPVAV

SEQ ID NO: 199328 - protein, 381 aa, unidentified
MLYVGIDQHRKQLTVNVREESGNVILRRQVSTEWKKVRAFFDEVRDLAKAHDGYMCVVEICGFNDWLLKLLPEHGCRETVVVQPGEQSSHKTDRRDASGLSETLWINRDRISQGLPVRGLRRIQLPDPAAQGDRRLTSQRHDLGRELTRSINRLKAVLRRHNLEQECPTKGIQTKRARIWLNELRLSPVERAELNHQLARQDLLRKQLNELQIAIFKRFESNPMAQLISTMPGAAAYSALGLACRIGDIRRFKHPRSLANYWGLTPGSRNSGETDRLGSITKRGSALARFLLGQLVLHVLRKDSWMRLWFRQIKRRRGSKIARVAVMRRMSTILWHMVSKQEPYLYGGPPRARLARSTGPGRPVDTERPAGSEGSAATNRS

SEQ ID NO: 199329 - protein, 402 aa, unidentified
MNCVGIDVSKGKSMIAVMRPFGEVVVSPFEVRHTANELSELAGLLKSLDGETRVVMESTGNYHAPVAWLLHGAGFYVSVVNAMLVHDYGNNSLRRGKTDKKDAVKLANYGLDHWLTLPRYVPEEDTRLMLKTCYRQYQQYSKVQTMLKNNLISLLDTAFPDANRLFTSPPRADGSEKWVDFVATFWHCECVCGLSKKAFTAKYQKWCRKHGYNFSQDKALDIYASACGRFGVMPKTNTAKLLVEQAISQLQTTSAALAALKQEMQSLAASLPEYPVVMGMFGVGPTLGPQLIAEIGDVRRFHSKKALVAFAGIDAPPYQSGQIDVRSRSISKRGSASLRRTLFLVMGVLLQCAPMDEPVYQFMNKKRSEGKPYRVYMMASANKFLRIYYGRVKEYLASLEEN

SEQ ID NO: 199330 - protein, 459 aa, unidentified
MTKRKKKSPVNATPLDTLKQLNLNAAGLDIGTEEIYTCVPADRDEQSIRVFGTFTTDLYALADWLEACGIETVAMESTGVYWIPVYEILEDRGFDLCLVNARHLKNVPGRKTDVLDCQWIQQLHTYGLLRASFRPPEEICALRALARHRDNLIRYRSAHIQHMQKALQMMNVKLTQVVSDITGVTGLSIIRAIVAGERDPQVLAGLRNPKCAKSEAEIAKALQGNYKPEHLFVLKQALAQYDFYLKQIQESDAELEAMYAALPPSDDPVSPPPKPRTAKPRKNQAHFDLATALYQMTGVDLTAIDGLDALTVHKIITETGVDMSAWPTVKHFTSWLCLAPYNDKSGGKVLRRGSKKTQNRANTAFRIAAQSLSRSQSALGAFYRRMRAKHGPAKANKATAHKLARIFYHMLKYREAYVDPGESHYEQQYRERVIRNLKRRAARLGMELVPTSDQAPVVS

SEQ ID NO: 199331 - protein, 422 aa, unidentified
MDPEPEFAAFVGIDWADRKHVWCLQAAGSMRRETGELEHKVEAVEIWVAELCRRFGQRPIAVAIEQVKGALVFLLNKYECLHMFPVPSTMTAKMREALYPSGAKDDPRDADLLLDILRLHRDRLHGLSPDDEATRRVQNLVEERRKLMAEKTAQGNRLISYLKIYFPQMVEWFEQLDIPLVCDLLERWPTLEELQRESGEDLRRFFRQHHCHRGLMERRILAIGRAIPAGGDGAVIEAKSAVVKVIVQLIRSLLQGIAELDRKIEEVAAAHPDFFIFESLPGAGAVMAPRLLAAFGSQRDRYSCADELQTYSGIAPVTERSGKRKWVHFRWACPKFLRQSFHEWAGHSIAQSAWARAYYQQQRGRGSDHHAAVRALAFKWIRIVFRCWKDRVAYDESKYLAALAKRGSRLGKLAVVGMGAGL

SEQ ID NO: 199332 - protein, 352 aa, unidentified
MTKKAIDTLMSIGVDIGKDTFHLVGFDFDGQLVLRKKIKRLALLQTFETLPRCVVGMEACLSAHFVSRSLRRLGFKPRIIPAIYVKPFIKGQKNDYNDAEAIAEAALRPNLPTVPEKSQDQLDLQALHRVRSRLVSRRTATINQIRAFLIEQGITVRKGLRALKNSFETILEQRKDEVSPRMRKILFGLYGDWLWLDDRIEAVSKEIEEISQREENCVNVMTIPGIGPMISTAMVAAIGTGEAFDRGRDFAAWVGLVPRQYSTGGRTILGRISKRGSRYLRMLFVQAAKVILMRTNRWPDFSFGDWLTRASERMHRNKLAVALANKLARMAWSILKHKTAFDAPRNAVVIGI

SEQ ID NO: 199333 - protein, 335 aa, unidentified
MQIYGIDLAKEKFDVSFFDLTSKKVSNQPSHKVVTNNLKGIGKFLKDLPSDAILVAEHTGVYGDTLLMCCIDSNVKIAFVGGYVIHRYRATPDRAKTDVLDCALLRDFGERYPDKLKYKTFPEEALYELRQLTRHREMLVEQRKQLITADKSEDCRPVRSLAVKRSMDRIKEMLDTEIAETEKEMLKVINGHDSIHHNYELVKSVDGVGLITAVELLVKTENFTKITTARQYAAYAGTAPYEKSSGKMDKGAHISKIGNRRSKTLLYICAESARLHNKEIKLYYERRTLIDKKPRHYVLNAIANKLLRIIFTLVENDEFYDVNYIRQDPRVVKHN

SEQ ID NO: 199334 - protein, 337 aa, unidentified
MTIIRIGLDTAKHVFQVHGVDENERAVLRRQLRRGEVEPFFIKLAATRIGLEACGASHYWARVLRSLGHEVVLMPPQYIKPYVKRGKNDALDAAAICEAMSRPGMRFVPIKSAEQQAQLMLLGVRDLLIKQRTMLINAMRGHAAEFGVIAAKGRAKVAELLQRAHTAEAGVPALGLAMLKVLSEQIDALEARLKAIEAELMALHKADPVSQCLATQPGIGPIGAVSFALKVSDPKAFGSGRHFAAWLGLTPKENSSGGRHRQGRISRQGDEGLRRLMVLGATAVIRFAKPGKASPWLIELLARRPRKVAAVALANKMARILWAMMVSGEVYRRPQPA

SEQ ID NO: 199335 - protein, 342 aa, unidentified
MAVQSLHSPRYFYGGGFVVKVVFPTCCGVDVHKSFVVATIITTPTDSLQPHYQKKRFSTFNSDLNRFATWLLEHNCLDVCMESTGKYWVPVFNILEKRGIRVVIANPKWVKAVKGNKDDTKDSKWIGDLFRIGLVKSSFIPELKIRILREFLRYRYKLVSMKSSEKNRFQNAFTVCNVALDSVVSDMFGKSATAITDYLTSDESFDPEHCVSLLQRSLKKKAEKVLESIEGYSISDEQKARIKIIREHYDFIEKLIAKVDTCVNEMVEKYEGEINLLCTIPGIDRNSAITIISEIGTDMSQFGSSKRLCCWAGLTPGNNESAGKKKSVRISRAGVYLKPALV

SEQ ID NO: 199336 - protein, 455 aa, unidentified
MSNGSRRRLSRGDRRRNEKLARLRAIITRETAVLAFDLASDKQVCALTDPDSRVLARRTARVKAWQLAQTLDWGLAAAAEAGFTSVVVACEPTGHRWRVLDQLAAERGVVLVCVQPLLVARAREAEDFTRNKNDDTDAMIIARLVTELRCYLPERADPAWARLRHLGARRARLVVEVGAARQQVRDLLECAWPAVLDAAGKPLDSANWLTAVATGLDRIGATGELSELGQRGWEDFAAAVRAELAPTRWYSAIVRAVFDAATDPAAAAVGVVDQRAGALERVRFALADLAHLRARIAEVETRMTRVLDTLGVTELVTGIPGVSAVGAATILAEAGDPIRFSSARALVKHAGLCPRANESGKYTGTTSISGRGRPELRLAAWRAVFTALQHNPVLAARHAHLTGRAENPLTDTQARIAIAASLLRQLHAVIVTRTAWDPAIAAGLDRREDGAACAA

SEQ ID NO: 199337 - protein, 343 aa, unidentified
MQIRSVGIDLGKTTFHIVALNAAGKVLLRKKFTQKQLITFTANMQTSLIGMEACSGAHFLGRVLREQGHDVKLIPAQFVKPFVKSNKNDFLDAEAIAEAVDRQNMRFVPIKTDDQLDLQAMHRVRDRLVARRTSVINQLRAFLLERGMVFARTPFKLKQAMPEILENADANLTPRMRNLVSLLWNEWKDLEQQIVAMNEEVEQIASSDPACQRLRQIPGIGPLVATAIVAAIGNGAAFRKGREFSAWLGLVPRQHSTGGKARLFGISKRGNSYLRKLLVHGARSAVLRVKRERSPFGPWLDALERRSPVKVVITAAANKLARIAWAVLSSGQDYRAVPDAIST

SEQ ID NO: 199338 - protein, 400 aa, unidentified
MRVVFGIDVSKASSEVAILVNGDKVHGYTIPNDSIGFNRLLGDLKTVSNPEIVFEATGVYSRRLQAFLEDNSYAYTRLNPLAAKKQLDSLRVRKTDKIDAEKLAQSQFVLNRQPTYVQEEVYQELRDLSRFYQNLTEDIVRAKNRLHKVLQVTFPELESLLSSPTGEQYWNLVIAFPCKEMVLELSRDDLSTVIRNSTSKRISDKRVTYLTEKLTDLAHKSYCAVKKTSPMLEEVRYYAQELLRLSERRQVVLDEMVSLAQPLPEYEILLSIPGIAETTVTSLIGELGDIRRFQSANQINAFIGIDLRHYESGNFLAKEHITKRGNPYARKILFKCIHNIASASHTNPCHIADFYEKRKRQSQTISTKPHTIASIHRLIRTMYYLITHNKIYDYNLATSQ

SEQ ID NO: 199339 - protein, 341 aa, unidentified
MQITTIGLDIAKNVFQVHGIDAAEKVVVRKQLRRGQVMAFFEALAPCLIGMEACATAHYWARELTKLGHEVRLMPAKDVKAYVKRNKNDAADAEAICEAVRRPTMRFVAVKSAEQQGRLMQHRVRDLLMRQRTQLINALRAHLAELGIAAAQGREGIKELLAIVAQDGDSRLPVDAHASLIVLAAQLQAVQTMIGSIEKRVVGQHRSNEESKRLETIPGIGVIGATAIAATVPDPKVFRSGRDFAAWIGLVPREDSTGGKQKLGPISKQGDRYLRRILVVGACAVLKQARQQPEKYPWLTQLLARRPFKVVAVALANKMARVAWALLAKGGTYRAPRLKAA

SEQ ID NO: 199340 - protein, 313 aa, unidentified
MAQMVPTVGIDVSKDRLDVAVHPTDEEFSVTNDAMGWRLLVRRLRPLMARGIGIEASGGYERGAIGALLEAGLPVRSVNPWKLRLFAKAAGVLAKNDRLDAGVIARFVATMPSRELRRDVAVEHLAELVTARRQLVDAVQQTGNQTEHLRDPGLRRLQARRIRQLERDVAQLDQLIADAIAASPTLSARHDLLCSMPGVGPVLAATLLALLPELGSLPNRSIAALVGVVPYDFDSGRMRGRRHIFGGRAAVRRVLFMATQVAGRFNPTLKAFKQRLLAAGKKPKVAIVAAMRKLIVTLNAMVRDNLPWRSVAA

SEQ ID NO: 199341 - protein, 342 aa, unidentified
MNDVMTIGLDLAKNTFYAVALNARGKRQWRKKLTRKRMWSHFARMPACRIAMEACGSAHYWARKLKAQGHEVLLLPPQHVKGYLRGQKNDYNDAEAIAEACLHGRIRPVRAKRVDEQELQSFHRLRQRLIEERTRMINQARGLLREFGLVMGMGPARYRRELPAILEDGENELPDGMRELLHRHQERFRALEQEIAWYDAQLKQRVAADEACQRLMEIPGYGPVVSSAFRSVLGDGKQFRRGRDASASLGLVPRQHSTGGKDRLLGISKRGDSHLRSLLVHAARSVVQQAQRKEDRFSRWIVKLLERRGYNKTVVAVANKLVRIGWVVLAREERYRIQEAVG

SEQ ID NO: 199342 - protein, 410 aa, unidentified
METIVKRAAALDVHKARLTACVRLPGRGRKRRQELAEFETTVRGLLRLRDWLQAHAVTEVAMEATGVYWKPVWAILEDEFDCLLCNARHVKQVPGRKTDVSDAAWLCQLLEAGLLRRSFVPPKPIRALRNLTRYRKAQIGERQREANRLHKILEDSGIKLDCVASDILGVSGRAMLDALVQGTTDPAVLSELARGKLRKKIPALKEALVGRFDGQHALIVSAILAHLDFLDGQIELLSAEIEAQLTPLHAAVELLSTIPGVKQRTAEVIIAEIGVDMSRFPSERHLASWAGQCPGNDQSAGKRRSGKTRHGSKWLDSALTEAANAAVRSNNAYLAAQYQRLRPRRGHGRAIGAVKHSILTSCWHMLQTGELYRDPGGDYFSRRDPERATRRLIAQLERLGHTVTLEAATA

SEQ ID NO: 199343 - protein, 356 aa, unidentified
MNKRSKLNFSGQPIYIGLDVHKKSWSVSIFSEQGEYKTFSQTPKVETLVQYLQHHFPGAQYRSVYEAGYCGFWVHDQLREQGIQNIVANPADIPTQDKERRNKRDRVDCRKLARGLRSGDIKGIYTPPRWKLEDRSLIRTRLSMGRKQGRCKNQIKSILLFYGVEIPEQREIGHWSRRFIQWIEGIQMERTSGNIALKIHLEELCHLRQIIAKLNRAIVALARTDQYRSWISLLKTIPGISTLGAMILLAELYEITRFRSIDELCSYVGLIPDTHGSGEKEHVGGITQRHHSYLRWLLIEASWVAVRKDPVLLESFQEYCKRMRKNKAIIKIARKLLNRIRYVLKNQAEYVAGVLE

SEQ ID NO: 199344 - protein, 408 aa, unidentified
MTKRRQSQARDKRNKKVSRHLTVLNPDAAGIDVGASVHYVAVPPERDKQAVRNFGAFTEDLHKLAQWLLQCGVRTVAMESTGVYWIPLYQILEDYGLEVKLVNARHVKHVPGRKSDVQDCQWLQQLESFGLLSGSFRPEAKICILRSYMRQRQMLISNASRHIQQMQKALTQMNLKLTQVLSDLSGQTGMRIVRAILQGERDRLKLAALKDPRVRSSLGTIAKSLEGDYRAEHLFALRQAVELYDYHQQKIAECDQEILKEMQSLESRAEPGSVAPTPLKRKGRSRHNLIPFDSRTELYRIMGVDLTRIDGLNEATVQLILSELGLDLCKKWPTEAQFASWLGLSPNNEISGGKVLRRGTRKVVNRVANALRMCAESLLNSKSALGAFARRMRAKRDVRFASTARAHR

SEQ ID NO: 199345 - protein, 321 aa, unidentified
MNKDHVIGIDISKQSFDVVDSHEKHQIYTQDLEGFKKFCKAIPKDSICVMEATGIYHLQLANYLFQNNIQVAVINPLRIKRFIQMRLRRNKTDKSDASMIRLYGINQDIDLYKPIDSNLQKSKDNYQTMEQFINIRASLKNKLKELQYKGSDTKLIQIVESQLVTLTESINELDAEITKLLNKNHGPLLSNLKSIVGIGPRTAAILIISSDAFKHFDSAKQLASYYGIAPSERSSGTSLRKKSHISKRGNPLVRKKLYMCSLQAARYNPACLELYQRLIAKGKPKKLALIAVANKLLRIAFAIAKSNIPYDREYRSYRKSA

SEQ ID NO: 199346 - protein, 379 aa, unidentified
MTTSPTATSSEQTLYAALELSKNSWLLAIQAPGRDNPSLHPIRGGDTAGLMAKLDAARERLTKNSGQVPKVILCYEAGYDGFWLARFLEQRGIECLVMEPASLQVNRKARRVKTDRIDVEKLLHTLIAWCRGERHVCSMVLIPSVEEEDLRRSHRERERLICERTAHINRIKGLLSTQGIRGINVKRHYKTLKPTDLVTGDGRPLPERLGREIAREIERLALVQEQLREIERERDLAPTPCLATERKRHQLLRLNGIGVVSAAILTREVYYRQFANRRQVASYIGMTPSAYDSGESRRSQGISKAGNRLARRVMIQTAWLWLRHQPESELSKWFHRRTEGQSRRIRCVMIVALARKLAIALWRYLETGLVPQGAALVAK

SEQ ID NO: 199347 - protein, 360 aa, unidentified
MISERTSVGLDLHARSTVAAAIDERSGELIQRRMGAGTEEIVAWVTSLPGPVAATYEAGPTGFGLARALTAAGVRAVVAAPSKLQRPVGDRVKTDMRDAVHLARLLRLGEIVEVTVPSVQAEAARDLVRAREDARGDLMSARHRVSKLLLRQGIQYAGGKAWTVAHDTWLRQQRFELTGLQAAFDAAYDAMIQAADRRDRLDTAIKEMAADSEFTAVVDRLCCLRGVSTLTGFALAVEVGDWTRLDGHRIGAYVGLTPSESSSGASRALGGITKTGNGHARRLLIEAAWHHRPAYRPSSPIMRARWDRTSAAARARGHAGNQRLHHRWQTFQARGKRTVVANAAIARELAGWCWSLAVMT

SEQ ID NO: 199348 - protein, 392 aa, unidentified
MRKPKQRKPLNDLSRSLTTLDADHTLIAVIEMGQKSWLVAGIVPGVERQPLKKLDTDENALLKLLERWRMEAEKAGHKINRITVAFEAGRDGFWLARWLRARGIEAHVIHASSVAVSREHRRAKTDRLDTELLKRAFLGWLRGERDHCKTVAIPTIKDEDAKRPNRERDSLVGEQSRIVNRMKAALARLGIRNFNPKLKKAAERLGGLRTPEDEPIPPNTLAELHRDMERRRLVIDQIRQIETARLQRLAQAPSHGPNAMVRLLARVIGISIETADMLVQEVLSRNLRDRRAVARYAGLTGSPDESGSKRREKGLARAGNARVRRGMIQLAWRFLLFQKESALAQWYRARTENARGSRKTMIVALARKLLIALWHFARDGVVPEGVILRPAQ

SEQ ID NO: 199349 - protein, 420 aa, unidentified
MPNIEIGVDSMVKENFIYVGIDLHKETHTAVMIDCYNQKLGEITFPNRPAAFPKLVTKVKKCNTDGKEVVYGLENAYGYGRALAVWLIDKGYFVKDVNTAISHRQAKHRGAMYRKSDSDDAKAIALATLNMLDKLPDACPNDAYWSLGQLVHRRDNIMKQRTRLVNQLHEQLCIAYPSYKQFFNDISRPTALYFWEHYPSRKYLKGKSVEDLRAELVPVSHNKCSTKTCEKILDAVASDKVKNNAYQDARDMVTLSIVSDLQHYDSQLTEVDKMLEQMYKMLGCTLTTIPGVNVITAVKILAEIGDIKRFSNANKLAQFAGIAPLHLSSSGKGKDVATKQGNRRLQATIYFLAIQMVQVSSKGTPRNSVVRAYYEKRKAEGKTSQQALICISRRLISIIYGMLKHGTEYRMPVVENAGEK

SEQ ID NO: 199350 - protein, 342 aa, unidentified
MKITTVGIDLAKNVLQIHGINTQGKKVFNKQLQRKKVLAYFTQLPPCLIGMEACGSSHFWARKLQEVGHTVKLMAPQFVKPYVKTNKNDAADAEAICEAVTRPTMRFVPIKNGEQQAVLSLHRARQGFVKARTAQANQIRGLLIEYGITIPQGIGHITKRIPEILEDGENELPGVFRQLLQRLGDHLKELDRQAIELDAQIQTWHRESEASKKLARIPGIGPLTASALIASIGDARSFKNGRQLAAWLGLVPRQHSSGGKHVLQGISKRGDTYLRTLLIHGARSVIRVATGKTTPTHCWAINLVERRNKNIAAVALANKNARIVWALLTQDREYQADFSLAV

SEQ ID NO: 199351 - protein, 343 aa, unidentified
MYYIGLDVHKKTISYCVKDAAGCVHGEGKIGSTRRELDAWVRTLAQPRMIAMEATIFTGWIYDHLLPHAEKVKVAHPLMLQAIAAAKRKNDRIDAAKIADCLRCDFLPECHMASTAIRDRRRILRYRNLVLRQAVQMKNRVSGLLMETGVSYNKLRLHRMGYFSDLMSSSEEIGDSIRPLLKICREHIDRSKKLDTALLRSLERDPLLADRLRRLRTIPGVGPITALTWALEVGDTSRFHSIKQAISYCGLCSAEKSSADKVMRTPISKQRNKHIQRILVEAARLAPRYSDELALLYERERQRGNSNRATLAVARKMVAHMLAVERRNTDFVPAGEFKPTAAA

SEQ ID NO: 199352 - protein, 385 aa, unidentified
MMLIGIDPHKSTHTATAITPDTNHEAASIRIDATLREYRRMLTWARQWPQRRWAVENAEGLGRHLTSWLLARGEDVVDVPTTATARVRQLSRGGGRKNDRIDAGAAACVAALQGDARPLEAESYVDAMAVLDERRVNLAQSRVRAVNQLHALLCALIAGGAPRDLSATTAAALLRTVRPNGAVEQARKAVAKDLVTEIRTLDTQLKANAQAIARLVAATGSTLTEVVGVGPIMAGRLISRTGRASRFLTASAFANYAGAAPVEIASAEKSRHRLSRHGDRQLNSALHTIAITQIRIPSSRGHRYYKSKIAEGKTPREAARCLKRRLADHLWRTMINDERRAVSPGGQLGTTLQSSVAGPTPTTNSSDKSLPGPATHDSTTAKPAA

SEQ ID NO: 199353 - protein, 343 aa, unidentified
MEAKRYIGIDLHRNCFTACLRLENGREYLKKWKLEDMEKFTGKLRPTDQVAVEVTGNTRLFHDAVAPHVERVVAVNPSQFKVITHSVKKTDPNDARNLALYLAKDLLPEVRMKDKTQAQIASLTQTRDTMVKLRTALKNKVNNLCSAHGVNLNKESLASEKGLRAVLEMHFEVLVNLELKIIIDQIRSLNQSIAELEETIGKEGQKLEGHKNLTSIKGIGGLSGGILLSIIGDIGDFADEGKLAAYFGIVPRVSNSNETERSGRITKRGTKLGRTTLIQCALIAQRYSPYLKTYYERMKSRRGTGKAIVALARKFLGIIYRTLKNKWVFEDFPNFVLAEEATV

SEQ ID NO: 199354 - protein, 430 aa, unidentified
MEPQANMKEVPFQEQFRAFAGFDWAGDHHDLVVLDAAGTILLELTFADDAAGWADLGKRLTEGLGLEPSGLAVAVETNNGPAVERLLALGCAVYPLNPKTAQRYRERKSNAGCKDDHLDALSFGDALRTDGHGWRPLKADDPITQELRLLCRDEIQLIAQRTALVNQLQAALREYYPAALEAFDDWVSEGPWAFVQAFPTPQDLVRAGKRKWEKFLHANKLYRPQTYAKRLEIFARADQFCGTAPVTRAKSQLAVTLAGQLRLLETQLTRYRQRIEALFAQHPDHDIFGSLPGVGPKIGPRLLGELGNDPNRFATHESLQCYGGSAPVTKQSGKNRWVGFRRACNKTLRTTLHHWANKSRDKCAWAQAYYRHKRDHGQSHAAALRCLAQRWTKILWKMWQTGTCYDEALHARNQIKHGSWVIQPCQGAPC

SEQ ID NO: 199355 - protein, 361 aa, unidentified
MTGMVTYVGLDVHARSTHAAAIDVSTGELLRARFGPGVEEPVEWLVGLPGPVRACYEAGPTGFGLYRAANAAGVAVEVIAPGKTPRGPSDRVKTDRKDTELLARLLLAGSLTTVVVPPVEVEAARELMRAHDACRRDLMTARHRVSKMLLRHGRVYPEPSTWTLAHRRWLSAQRFDEAVSDLVFADLIASVDGLSARKTAIAERLSRLAEDEVWWPTIARLRCFRGVDTLTAFALHLELGGDWQRFDRANALSAWLGLTPSLHQSGESSHQGSITKTGSGFARRLLVESAWHYGRPPRIGVTLRNRQQGQPEHVLQIANRAQQRLHRVYHRMRGRGKPHNVTVVACARELSCFLWAAATAD

SEQ ID NO: 199356 - protein, 340 aa, unidentified
MEEVSIVGVDLAKQVFQVHGATADGRVLFRKKLSRSQFPKFMAGLRPCVVAMEACGTAHYWGREFASMGHDVRLIPPVYVKAFVKRQKNDVADAEAVAEAAMRPTMRTVAVKTSEQQARAMLFRTRDLLVGQRTQMVNALRGHLAEHGIIVGRGLGNVERLATLIAADDLPDLVRTMGRLYLSQITQLHEEIDQIDRRIAAEAKQSDIVRRLQKVPGIGPICAMAITAFAPPMEAFRSGRDFAAWLGLVPRQHSSGGKQKLGRTSKMGQRDIRRLLIIGAMSVVHWKGRGGGRPGSWLSNMLGRKPRMLVAIAMANKLSRIVWAMLSRNQEYRDPSGAVC

SEQ ID NO: 199357 - protein, 348 aa, unidentified
MLADQVDYVVGVDPHRDSHALAIVHVLSGAVIFETTIAASSQGYAEALQLVDAHAPGRRAFAIEGSGSFGAGLTRFLTCRGEWVLEVSRLRRERRSGGKTDALDAVRAARSVLGQQRPATPRAGGERQALQALVAAREGAVNAKCAGLAQIRDLLITTPEPLRSELRPLTQAPLLRRLAATRPEGRRDPELRGSMLALRSVARRVLQLQAEERELGRQIEALTRKLAPQLLDQPGVGPHAAAQLVLSWSHHGRIRSEAAFARLAGAAPIPASSGQTVRHRLDRSGDRKLNRALHMILITRKRAHPPTIAYIERRMHEGKTRREANRCLKRYLARSLYRLLEQGPQPAT

SEQ ID NO: 199358 - protein, 375 aa, unidentified
MGSLWAGVDVGKTHHHVCVVDNDGTVVMSEKIPNDQQSISGIAGRLGKRRKPIRWAVDLRGGPASLLLAVLFDRGADVRYVSGTVTSRMAEAFHGERKTDAHDAYVIAQTLRMRGDLPALTVADGVQQQLKLLVSRRLDLVADRVRITARIQDLLTMISPALEKTLNLRSKGALRLLAQWQTPAGLRRAGEARILAYLRQHGIRAARTLAAKVLTAARTQTVAVAGEATTAVIVAQMATDLEAVNDRITAIEETIAGIVAEHKLGEIVTSLPGIGTTLAAEFLAHAGTLTTYPSAAALAAHAGLAPISRDSGRRQGHQVRPHRYHRGLRRVFSMSSFTALTHCPRSRAYYDKKRAEGKTHRQATAALSRQRLNVL

SEQ ID NO: 199359 - protein, 345 aa, unidentified
MQPMYYIGLDVHKRKISYCVKDSSGKIHTEGSIAATRVDLDHWMKKLPQPWSAAMEATMFTGWIYDHLKPHAATVKVAHPLMLRAIAAAKKKNDRIDAGKICDCLRCDFLPESYMASTAIRERRRTLRYRNLLVRQMVQMKIKTGALLMEAGVSYNKQRLHKAGYFRELLATNPDIDEGLCSLLRLCRETVVRLGKTESALVRSLERDSLLVERVERLMTIPAVGPITALTWAVEVGDVQRFSSIKKAVSYCGLCGAEKSSGNTVQRTPLSKQRNKHLQTTLIEAAKMAPRYSPQLAMLYDQEKQKGNANRATLAVARKLVAYLMAVDRGQRNFQLAETRSTIAA

SEQ ID NO: 199360 - protein, 360 aa, unidentified
MFTERTSVGLDVHARSIVGCGLDTVTGELSRRRVCPTLRGVTEWLAELPAPVAVAYEAGPTGFGLARQLTAAGIRCVVVAPSKLQRPPGDRVKTDARDARHLANLLRMDQFVEVRVPGVEREAARDLVRAREDVRGDLMRSRHRLSKLLLRHGIVYSGGHPWTGVHEVWLRGQHFDLPGLQLAYDTAFETVLLTTARRDRLDKAIAQMAANSEYTPVVRRLCCLRGVSTLTGFGLAVEIGDWQRFTGSTICSYLGLVPTESSTGSKRVQGSITKAGNTHARRLLVEAAWHHRKAYRPGLTMQARWNLAPAAARARGHQGNQRLHDRWEVFTERKKRPVIANVAIARELAGWCWSLAVMED

SEQ ID NO: 199361 - protein, 412 aa, unidentified
MGAVVIGMDPHKRTATIEVMDGEETILGGGRYATDVAGYQAMLAFGQQFVDRTWAIEGCNGIGKHIAGRLLADGEQVVDVPPKLSARTRVFATGQGRKTDATDAHPVALVGTRMSGLRPVVADEELAVLRLLADRRRSLGQDHTRMVAQLHRILLELIPGGAKKQLSAAQAKVLLGKVRPRDTAGKTRKRVCAELVADLERIHERTKAADKELKALLVATGTTLMTLHGIGPSGAARLLVEVGDITRFPTRAHFASWTGTAPIDASSGDHVRHRLSRGGNRQINRTLHIMAVAQLRNPTKGRAYYNRKKVDGKAPMEAMRCLKRRLSDVVYRQLLADAIRSTKTGPGGHSGATTSSSAVDSNPDIDASKKSRPGPANTHATRATNLRPDRSSTRSRRPATAPARSRRQAQSA

SEQ ID NO: 199362 - protein, 401 aa, unidentified
MVVQDEAGQTLARRRLPEGADGIARFHELVASHWGGDGEPDAAQVVAVIETDRGPWVKALAAAGYRVYPVNPRQAARHKEAVANSGKKDDFFDAACLADMGRTRRHQMRELAPGSDIAEAVKIAARGHQKLVWERTRHQLRMRSALREYFPSALDAYKDLGLTGKDTLELLAKAPDPESAARLTTAQLTAALKRAGRRGDLTERAREIRAALRAEHLGQPAVIAEAYAAAVQAGAAVINALNEQVKIMEAKVSELFRRHPDAGIYLSQPGIGDITGARTLGEYGDAPGRYASAKARKNYSGTSPLTVQSGKKKTVHARYIRNRHLIDAAHAQAFAALGTSPGARAYYDQLRDREIGHNDALRRVASRLQGILHGCLKTGSEYDEATAWAHHAGTPGTAEAA

SEQ ID NO: 199363 - protein, 357 aa, unidentified
MALPLAPSEPTLTVVTIGIDPHKSSHTAAALDDHQRVRAQLRVPATRAGYRELRRWAARWPQRRWASENAAGLGRTLTQWLLQDGEPVVAVPAKLSARGRLLSTGPGRKTDPADAVSTALAACGPTPLHSATLEAQATTLRLLSDRRDDLVARRTQVINRLHSLLASLAPGRVPPHLSVEQAATLLRRVRATSEPDQTRRLLAKELLREVRHLNGAIAASETRIAAAIKDSQTTLADLFGIGAILAAKILGRVGNIQRFPSAAHFASYCGVAPIEASSGDVVRHRLSRAGDRQLNYALHLMATCQARGHPAGRAYYLRKRAEGHSEKEALRCLKRRLADVVYRQLLHDARSQLAGLS

SEQ ID NO: 199364 - protein, 366 aa, unidentified
MSDDTATHLPVAGLDVHAASIRLAVVLRDELLDERTLPFDCHLVERELRRLGATRVCYEAGPTGFGLARHLRDAGFHCDVVAPGLVPWRSSDRVKTDARDARKLALLYQGGMLAPVWVPSFAQEAVRDLIRAREDARQDRARARQRLGKFVLRRDLRLPGKSWTLARRQWLGRQAFEHAAQQAAFDDYLLACDLLDRRIEALEREIDEWAAHSDFRELVGHLRCLRGVDTLTAIGLVAEIGDFSRFKTAPAFMAYLGLVPSESSSGERRRQGSITRAGNNHARRLLIEAAHNQRRRPARSAHLARRQAGQPAAVVARAQQAQLRLHKRWQRMGARGKHSNKIAASVARELAGFVWAIATEQPLRAA

SEQ ID NO: 199365 - protein, 397 aa, unidentified
MIAVGIDVSKSKSTVAILDSYGTVLATPFNMAHTQPEMNALVSRLKAFDEPVTILLEYTGHYHYPVLKKLQEEGFPVCVVNPYQMKKYGDVEIRKAKTDKKDALRIATFALEKSYKLVPYSSMEEKYEDLKFLSRQYQQRISFVSTLKVQLINMLDQTMPGITKILALKSRDPEKCALLLFIKRYKSFDEIQRIGKTRFLSTYATLMKKTPDRYAPKKGLEIYELARDSITTRGEDPYIWSAQDQCVDLLAAAQNAADEIITQMQNIAETIPEYKVLRAMNGVGDRLGPIILAEIGDIRRFHSAKALNSFAGNDAPPYQSGQFESRNRHISKRGSSALRKACFEVMQALKLTKPQDDPVYQFILKKEQEGKPYNVAKMAGVNKFLRIYYARAMELYR

SEQ ID NO: 199366 - protein, 355 aa, unidentified
MTSTKYIGMDVHKESISIAVRNAAGKIVMECVIETKASTILQFFDGLRGDVHVTLEEGTWAAWLYDLLKPHVREVVVCDPRRNALLQEGNQNDRVDARKLAELLHNNQLRSVYHGDHGLRTLKELVRSYLTITQDLSRVMTRVKAIYRSWAIPCTGKQVYAPRHRTEWLGKIMEPGVRRRAELYYQQLDALRCLRQEVRRDLLAESKKHQAWKQLCQIPSIGPIRAAVLLGILQTPHRFRTKRQLWSYGGVGIQASSSADHQVVKGQLERKKKPVEVRGLNRNYNHDLKNLFKGAAIVAATKPGPFAEFYAALLAKGMRPEMARLTLARKIATIILIVWKRGVCFDAQHLKPQTA

SEQ ID NO: 199367 - protein, 436 aa, unidentified
MRECRCSMIMGFTKPIEHFNLQRKKVITMNTLYVGIDVSSKSNVVYLMLPNGDKHSNFSVANSHEGSTQLVKRILSALTSHSLDTVLIGLEATSVYGDNLVYFLREDATLTPFNRKIHVLNPKQVKKFHDAYNDLPKNDYVDSFVIADCLRFGRINKEVYLGDYHYKALQNLTRARFFAVQNLVKEKQRFMNVLFKKYSTMTQEKVFSDTFSTTALAVYDEFDSAEALANMDLHELTEFIMEKGKNRFPDPDAVAKAIQKAARSSYRLPKTVKDSVNQVLSISITSMKALESQIKEFDKAIAAQMELLPNVLISIPGIGPVYSAGIMAEIGDINRFNSQAALAKYAGLAWKQHQSGGFESEVTRLIPSGNRFLKYYLCEAAFSLVRCDKEYSDFYHLKYKEVNRCQHKRALALTARKFVRLVFRLLKDNRLYCPSK

SEQ ID NO: 199368 - protein, 319 aa, unidentified
MKMANPTTLTAGIDTGKEKLDIAVHGRPGVLTVTNDARGWKKLTAHFAAVGVGRVGIEATGGYERGVVRHLQAAGLTVIVLQPLQVKAFAQLHLRRAKNDRLDAALIAACTSMMPDPKTAPDPRLQALTDQLTFIEQQEEDIARLKTRLEHVDEPRLARVIKADIKRIVARRAAELRRLLAAVRAEADLARRLELVISIPGIGERTALALILRMPELGRISREEAASLAGLAPFVHQSGKHKGETHIGGGRSRLRRSLFAAAVPASFRWNPALVALYVRLTQRGKPPVSALTACARKLLVFANTVLARGTPWRKDQVPA

SEQ ID NO: 199369 - protein, 415 aa, unidentified
MKVVFPTCCGVDVHKSFLVATIIKTPKDSLQPSYQKKRFSTFNSDLNQFADWLHEKDCLDVCMESTGKYWVPVFNILEKRGIRVVIANPKWVKAVKGNKDDTKDSKWIGDLFRIGLVKSSFIPAKDIRILRELTRYRYKLTSMKSSEKNRFQNAFTVCNVALDSVVSDMFGKSATAITDYLTSDEDFDPQHCVSLLHRSLKKKADDVLVSIEGYEITLEQKCRIGIVRDHLHYIEKLIERVDLCINAMVEKYDGAISLLCTIPGIDRSSAITVISEIGVDMAQFGSSKRLCCWAGLTPGNNESAGKKKSVRISRAGVYLKPALVQVAHAAVKDKLNPYYALKYERIAKRRGKKRAIIAIARMILTAIYSMLSTGEIWNPVDLFKVDIPEHLKEQQLQKAVKQAVRFLEAQGLKVS

SEQ ID NO: 199370 - protein, 445 aa, unidentified
MLPIMYKQVAGLDVHKKTVVATRMRVTDEDRVEWETETFGTTTPDLLRLHDWLEAWQLTHVAMESTGDYWKPVYNVLEDTFEILVVNARHVKHVPGRKTDVNDAEWLAELMMHGLLKASFIPPKPQRALRDMTRYRTTLVQERTRLVNRVQKLLEGANIKLSSVATDVMGLSARAMLAEIAAGQTDAVLMADLARGRMRKKISELEKALTGIVQPHHRFLLAQQLGHVDFLDEQIEKISAAIGQQLESMSWPDRPSGPGTSADAEEEAGVTDESELPLTWNAAVALLDTIPGVERRVAEVMLAEMGLNMCQFPTAEHLASWAGLAPGNHQSGGKRYSGRTTKGNRSLSCIMVQAAWSAVRTKDTFLKARYHRLAARRGKKRAIVAVAHSMLVSAWHMLTHQQPYRELGGDYSDERKKEAKVSYLVRRLEKLTGGSVAIEIQPAAA

SEQ ID NO: 199371 - protein, 349 aa, unidentified
MFAGVDTHKDTLAVAVIDHAGRVVRQLELPNQDSGYVRLLALLTSHNVVRVGIEGSGNFGWPAAIYLLKRDLNVVEVPPLMTSRERLSRPGQGKTDPVDAVAIARITAREPSLPPVRPMTGHAADLRVLTEYRDQLVNERTATANRVHTDLLWLRPGYQHQLPHLTNTAHLRAALELLSGDDSVRAAVTRSRLDRMLTLTDQLADLRIQIDALVKASGSTLPEVYGVGPVVAATIIGHVFDVRRYPTRHHFATANGTAPIPASSGRTVRHRLNRSGNRQLNRALYTIAITQIRADTEGRAYYQRKRTEGKTSREALRCLIGEVSVMRPGIGLDRGFSVVSGDGLVAEPL

SEQ ID NO: 199372 - protein, 339 aa, unidentified
MIIIGMDYHPSFQQIAFCNQETSECGEARLNHSDGEAERFYRDLKQRGISVRVGMEATGYSRWFERLLAELGFELWIGNAAEIKTKRVRKQKTDRRLLLRLMREGTFPRIWIPSLENRDLRQLLWHRHRLVQMRTRISNQLQALAMNEGQAWKKKLWSQQGRAELEKLALGPWASRRRQELLDLLDRLHPTIEELTSAVEKEARKRPEVLRLMTHPGVGALTALAYVLILGTPERFRCGKQIGSYVGMIPSEDSSAGKQRLGHISKQGNSLLRFLLVEAAQAATRVSSEWRRRYIHLAMRRHKSIAKVALGRKLAIRLYWMWRNGCEYSPSLEFGSYAG

SEQ ID NO: 199373 - protein, 327 aa, unidentified
MNSEKYIGLDVHQATIMVAVMDSSGKLVMESILEMKAATILQFFAGLRGTLWVTFEEGTCAAWLYDLLEAHVAQLVVCNPRKNALLKYGNKSDRIDARKLAELLRGNHLKAVYHGESGVRTLRELARSYITTIKDLTRVMSRLKALYRSWAIPCAGRDVYYTRHRAEWLGKIKHAGVRRRAEQLYQHLDVPYLGPIRSALLVALIQTPHRFRTKRQLWAYSGLALETRTSTEYRYVEGQLRRSKKLLSIRGLNKDHNHDLKALFKAASITASGHPGPFQDFYQALLGKGMKPTMARLTLARKIAAITLTLWKKGESFDAEKLKPQAA

SEQ ID NO: 199374 - protein, 365 aa, unidentified
MENHSIVWVGMDTDTKKNQIAVYRGWETAAEEFEAGMDRQGIKRLVQRLKREVGEVRCVYEAGPCGYQLYRKLREAGIHCDVIAPSLTPRRPGDRIKTNRRDARNLGRLYRAGELTVIAVPNQQQEAVRDLTRAREDVREDLTRRQHRLNRFLHRYGYHYSEGERWTKKYWLWIRQIRFEDTNLQVILEESIRAVEQSLEQLKTYDAKIEENARKPEFATKVARYQSLRGVQTVTAMTLATEVWDMRGYPTAPQFMKSTGLVPSENSTGEHERRGRITKAGNAHLRRVLVEAAWHYRHRPIAGPAIKKRRRQQPAAVVSIAERADQRLNRKFRRLVDRYNKKPSIAAVAVARELAGFIWAIGQED

SEQ ID NO: 199375 - protein, 351 aa, unidentified
MIIIGVDYHPSSQTIAFLDQETGECGERQLNHSDGEAEKFYRELKQRGVSVRVGMEATGHSRWFERLLAELGFELWIGDAAEIKTKRVRKQKTDREDARLMLKLLLENRFPRIWVPSPENRDLRQLLWHRHRLVQMRTRIMNQLQAVAMNEGYRWKKKLFSEKGRGLLEKLPLAPWASRRRKELLELLDQLDPKIAELTAAVEQEAKKRPEVLLLMTHPGVGPITGLVYVLVIGTPKRFPCGKQIGSYTGLIPCEDSSAGRQRLGHISKQGNTLLRFLLVEAAQAAARCNPDWRRKYLHLMIRREKRIAKVAMARKLAVRLYWMWRNHWQYSQLVEFGSNAGKLVLVHGVK

SEQ ID NO: 199376 - protein, 345 aa, unidentified
MQPMYYIGLDVHKRTISYCVKDSSGAIHAEGTIPATRFDLDRWMKTLPQPWSAAMEATVFTGWIYDHLRPHAAALKVAHPLMLRAIAAAKKKNDRIDAKKICDCLRCDFLPECYMASTAIRERRRTLRYRNLLVRQMVQMKNKIGMLLMEAGVSYNKQRLHKAGYFRELLATNQDIDEGLQSLLRLCRETVVRLQRTESTLVRSLERDSLLVERVERLMTIPAVGPITALTWALEVGDVQRFSSIKKAISYCGLCGAEKSSGNTVQRTPLSKQRNKHLQTTLIEAAKMAPRNSSELAMLYDKEKQKGNANRATLAVARKLVAYLMAVDRGQRNFQVVETSNGIAA

SEQ ID NO: 199377 - protein, 374 aa, unidentified
MRKMSLGVDLHKKQFTVYFLSEDHMVRELGVYETGQSGYERFLGVCADLEQRGFELHAAVETTGNARYFCSRLVGSGIEVTVVNTLKFKVIIQSVKKTDRHDARILAEFLEKNMLPESHLCSRESEEIRRLLKVRRSLVQTMVSVKNQIHGMLTSYGIESRGGQLQSKKDRQRILCGLADHEFGGNAAAAIASLFETIDQLDALVKRQTQLLQTLVAEDEDVALLTSIPGVGIITASTIRAYVDDIRRFGDAKQFASYMGLAPWVQNSAESVRHGHITRRGPMDMRTAMVQCVLGMVRMKAKTGSYRLMRQYQELKRRKGSGQAIIAIARKLSTIMYTMLKTREPFDPIRMAQKKKYLQMQAAALDAANSRQAI

SEQ ID NO: 199378 - protein, 403 aa, unidentified
MAAVMIGVDPHKGSHTAVVISPAEEPLGELRVRASAGQAGKLIGWAAAWPERTWAVEGAAGLGRLLAQQLVAAGERVLDVQPKLASRVRLLQAGDTNKNDPNDALSVAVAALRSTVCREVIADDYRVVLKVRAERHRDLARTRNQVACRLHSVLCDLVPGGHQKEISAAHAARILAQATPSGAVALARAELAAEFLADLRHLDGQLRDTRKKLAAAVRASGTTLTQVFGVGPVIAGTVIGDVGDVARFPGRDHFASYNGTAPVEVSSGNRKIHRLSLRGNRRINHAIHMAAITQLRHKHSEGRAYYDKKVAEGKTHKEALRSLKRKVSDAIFARLQADARQARESGPGGQPGNGSDSSAASSHPERQLFGPATPGPDTTIRPGTTAGTPSPSKPALKKTRPAT

SEQ ID NO: 199379 - protein, 425 aa, unidentified
MRFFGIDVHLEFCEVAVAEGGKVSQAGRIASTPEAIREFSRGLGGEDQVVLDASGSVMAIARILRESNVGRVIVSNAAQTRAISHARVKSDRFDAAMLAKLLSAGMLSEVWVPDEATLALRRRVARRSALVRARTRIKNEVHAVVMRCLLGRPPVSDLFGRKGRIWLAEQTLPEEEAETVAGCLRQIDFLDGEIALLDQKIAEQALAWPGLCRLLTIPGVDIGTAAAVIAAVGDISRFPSAGQLVAYLGLDPKVRQSGSEPARYGHISKRGNAQARSMLVEAAWIAIRSPGPLKAFGERVRARRGAQVAAVAVARKLVVLCWHLLTKDQDYAFARPSLTRQKTRRLELTAGASRRPRRHDGATVSPTAAQRAAERELQTQAELAYRRLVDDWRSTAAPKDGAGATPGRASQKPVKGKAARQATSP

SEQ ID NO: 199380 - protein, 482 aa, unidentified
MKPKPQEKNERATNPTQHHWDEMNRKQRREMMRRMQSEDLRLEVLHPDAAGIDIGNESHYASVPPSRDSQPVREFGCTTAELKAMADWLKQCRIRTVAMQSTGVYWVAVYDILEQAGLEVYLVNARDTKNLPGRKSDVQESQWLMKLHTYGLLRNSFRPTQEIRTMRTYWRQRNDLVQSAGRHILRMQKALTQMNIQLANVLTDISGATGQAIIKAILAGERDPHKLTEFRDPRVKASEEQIAQSLEGNWQEDLLFVLKQEHEGYEFCQQQMAECDRQLQQYLQQREDRSHGAPLPEEKRKGRLKKKRANKPQFNLREGLFRMTGTDLTRIDGIDVMTATTVISEAGYDMSKWKTENHFVSWLRLCPDNRISGNKVIGKGRLPTNNPISIALKMAASTLKESKTYLGAQFRRLRTRLGAPIAIKAMAAKLARLVYRMLRYGMKYADQGAAFYELRHRELQIKRLKAKAEKLGYRVAPIPVAA

SEQ ID NO: 199381 - protein, 456 aa, unidentified
MPKTTTDNRPEFKPVNFGAAAIDIGSKMHMAAVNPACTDVAVRSFGTFTQDLHDLADWFKACGVTSVAMESTGVYWIPVYEILEQRGFDVILVNARFAKNVPGRKTDVSDAAWLRQLHSYGLLRGSFRPDAEIATLRAYLRQRERLVEYAAAHIQHMQKALMEMNLQLHHVVSDITGATGMRIIRAIVAGERNPDVLATYRDVRCHSSAETIRAALVGNDRDEHVFALSQSLELYDVYQAKMLDCDRKLEVLIAALSSKGAKPVGKLSKPRIKTKQVNTPTFDVRTALYGVLGVDLTEIHGLGPSLALKLIGECGTDLRAWPSAKHFTSWLCLAPGNKISGGKVLSSRTRRSSSRAAALLRLAATTVGRSETALGAFYRRLATRAGKSKAVTATARKIAVLFYNTLRHGMSYKDPGADQYEQQYRSRVLSNLQRRAKSLGFVLQAIPGEDANPAVS

SEQ ID NO: 199382 - protein, 340 aa, unidentified
MKKLSVVGIDIAKQVFHLVGMDEHGTILVRKRLYRAQVMAFIAQLPPTLIGMEACGGAHYWARCFREHGHEVKLMAPQFVKPYVKANKNDMRDAEAIAEAVTRPTMRFVPTKDVGQQDLQALHRVRERLMGERTALVNEVHGLMHEYGIVIPKGVAKFRQAVVEKLESEQDKLTPLSQEMFWKLVEEFVALEKQLAYYQEKLEALATTHPECQRLMTIPGIGPLSATALVAAVSDASAFKNGRQFAAWLGLVPRQHSTGGKERLLGISKRGDSYVRKLLIHGARVTLRWVGLKTDRRSQWMRQLLERRGKNRTAVAVANKNARIVWALLTSHQDYQPVQG

SEQ ID NO: 199383 - protein, 430 aa, unidentified
MTDNKFNRIDHFRQIKKEIRGNSDFLIVGIDIAKDKHYAFFGDANGHTILKKLPFENNQNGFEKLITHTEEKKAKIPFEKVVFGLEPTADYHKSLVEFLIKKGYPLVFVGAAATVKNRELLDGRWDKNDMKDAANIADLISQGKCQYYDHASEQIRNLRSLLSLKRKIKKVEHSTSMRIRNHLVAQFFPELDSYFGSYSEGCLSIIKHCFDPSDIAQMPFDSFVSLVTSRQPTRLQWGKLKSIWEMAPSSIGCSMTTGVDFESSMLVDSLRKTRIDIVAVEREIKRICLTLPEYEYILSIPGFGDTISAITLAAIGDHTRFDNTRQLLKMAGLDLSSNRSGKFSDTQPAKISKKGKSELRYGLYQAAMVASTRNLDFMAYFTNLIKDRSKEKGIKTRMRVKLSAKLLIIAWTLMKKKTVFNPVFIKSKQV

SEQ ID NO: 199384 - protein, 420 aa, unidentified
MKVVYQICCGVDVHKSFLVATIIKTTSGVQPSYQKKRFSTFNNSILEFKKWLLDNSCRDICMESTGKYWVPVFNLLEDEINVTIANPKWVKAVKGNKDDTKDSKWIGDLFRLGLVPGSYIPCKEIRILREFTRYRYKLTSCRSSEKNRFQNALTVCNVALDSVVSDIFGKSATSVIDYLLEQSDNSINHEEISSRLLRSLKKKSESVIESIEGYQMTDSQKYRMRLVHAHMDYITSTISDIDSMINSLVEPYDNAVKLLCTIPGVDRNSAITIISEIGTDMTQFSNSKRLCCWAGLTPGNNESAGKKKSVRITRAGVYLKPALVQVAHAAVKSDKSPYYKAKYERIMKRRGKKRAIIAIARMILTAAYQMLSTGEVWNPTDLYKIDMPEPLKEKQKEKAIKQAKKLLITEGIIDESLLAS

SEQ ID NO: 199385 - protein, 343 aa, unidentified
MQIVRIGLDLAKYVFEVHGVDSEGNVVIRKTLRRGSVSTFFANLPPCLVGMEASNGAHYWARVLADFGHEVRLISPQFVAPYVKSNKNDRNDAEAICEAVGRPTMRFVPPKSPEQLAIQALHRIRQRLVRSRTRLVNQIRGILGEHGIVIARDIWKLRRALAEITGHETDDLNALVRVLIMEVQGELIELDRRIASCDRRIRELYRSSELCQRLGQIEGIGPVTATALVAAVGDRSCFKNGRQFAAWLGLVPKQRSSGGRNRLFGISKRGDRYLRTLMIHGARAVLGKAGGKQDPRSRWLGSLRQRRHPNVVAVALANKNARIAWAMLAGNVSYEPARSVQAA

SEQ ID NO: 199386 - protein, 311 aa, unidentified
MDEIIIDKGCGLDVHKETVVACVMGSGIKKEIRTFSTKTNDLLRLKTWLSGLGITHVAMESTGPYWKPVFNVLEDGFTVILANARHIKNVPGRKTDVKDSEWICRLLRSGLLSASFVPPQGIRELRDLTRYRRKLTQALSAEKNRIQKVLEDANVKISSVLSDTFGVSGSQMIEAIMEGKLSEAEMADLAKGKLKSKKEEIREALVGYFQEHHRFMIKASLEHIKYLEKLISDLDQETKKKLAQYQKEYELLQTIPGVKEQGAASIIAEIGVDMDIFPSEGHLSTWAGMCPGNNESAGKKKAERRPMAIRI

SEQ ID NO: 199387 - protein, 321 aa, unidentified
MSEVDCFAADVSKRELVIAIYPGGVGVKRIANQEAVINAWLDTLPAGSVIAMEATGIYHRRLADLAHTRGLVVYVVNPRDVYYDVRGMGARGKTDPSDAKLLARYVAHERMHLHPYLPPSALCERLVTLLEHRAVLVRTRQALTQSLAELPALGREKRNLFKAVAALLSGIDRELAALGCADPLTATLVTRLKTISGVGPLVASLLCALFKRFAFRHADALIAYLGLDPRPDESGQHSRPTPPVQARSPRVAPVADRSRHVRRAYPGLARLRQPPARQSPARHCSACHPPPQNAAHGLLLRTAFALFKNGQDFIPPSVQPT

SEQ ID NO: 199388 - protein, 340 aa, unidentified
MEKASMIGLDIAKNVFEVHGRNAAGEVVLRRSLRRGQVEKLFAKLAPAVIGLEACGSAHHWARLLGKLGHEVRLMPPAYVKPYVKRNKSDAIDAAACWEAVGRPDMRFVPVKTVEQQAALSLHRSRDLLVSQRTQLGNALRALLSEFGFVAGKGKAGLARLVDELRAGTLELPADAVVAAMALADQHAALEAAADALERRITAQAKADEKARLLKTAPGVGPLSAHATLATMPDPSLFKSGRDFAAWLGLTPRLNGTGGKTRTGRITKQGNQPLRRLLVLGATAWLRQVRARPEKASPWLRGMLARRPSKVVAVAQAARTARILWAMLTHNQPYRAPAIG

SEQ ID NO: 199389 - protein, 359 aa, unidentified
MASIALERTDVIVGVDTHKDEHVAVALDGLGGHLGELFVPADRDGYARLVEWAGTFGKVNSFGVEGCGSYGSGLYRFLRRGSHSVTEVNRPARKGERRLLGKSDVIDAEHAAREVLAGRATTIPKSSNGSIESIRLVRIARGTAVKAQTTAMIALKAALVTASDQLRAELEPLGDHKLLVACAALVAGGDLADPGPAMRYTLRALATRWLSIHEEVKTHTSHLKCLTQQVAPALVEAFGIGPEVAGELLVAAGDNTDRIRSEAAFAKLCGVSPIPASSGKTSGRYRLNRGGNRQANAALYRAVIVRMRWHEPTIAYVKKRTAEGLTKKDIIRCLKRYLVREVYRLLPPPTVPVHHERAA

SEQ ID NO: 199390 - protein, 430 aa, unidentified
MKSNTQNAKIEAITEKTLVLGIDVGSETHYARAFDYRGIEYSKKPFKFSNTEAGFVTFKEWILDLKDRHKKDKVVPGMEPTGHYWFNLGKFLQDNEMKPVLVNPHHVKKSKELDDNNPTKNDRKDPKVISGLVREGRYMIPYLPDGVYADLRTASNIRFQLQAELTRIQNRISRWFNIYFPEYKTVYGKPDAKSGMLILKAAPLPEDILTLGIDGVNQIWRDAKLRAVGKARAKTLIEAAEHSVGSKEGAVSARMEIRMLLEDYESRNTRLQEVMVLIEELVKGIPMAEKLLEIKGVGIRTVSGFLAEVGDISRFNNPKELQKLAGLALVENSSGKHKGETTISRRGRKRLRYLLFEVAMSLVSKNQEFRELHNYYTTRRLNPLKKMQSLMVIAAKLIRVFYAMLTKGADYDPKKMVSDIRRPAAYLQAA

SEQ ID NO: 199391 - protein, 348 aa, unidentified
MVAATLAHRWFVGIDLHKDTLTACVYCSCCGEIRFQKISCRCRKQIAEFFGNLPRPHVVAIETVGFYRWLWEMLEPLVEKLVLADASQARALAGRRMKTDREDARNIAELLACNRLPLAYAPSCEVQVLRDCSRQRNALSRQHAHVLHRVKSVMNANNRPGPARMDSAALIRYLKAFEHKLPERHGRYLWQCVDQLVLIERQLSHLERELERLLAQPIFAPTAAILNSFPGVGLVTCSTVLAEVGDFSRFTYRKSIARYAGFDPRTFDSAGKQRTGHISKSGPSNLRWVLGQAAWSAVRLDPQVKRIWLRISRKGGKKVAIVAIARRMLLWMWRAVRTGQPYRTPVVA

SEQ ID NO: 199392 - protein, 370 aa, unidentified
MLDTTTFVGLDVHARSIKAVSLDVMTGEVRCATFGYDAGAVAEWVRSVDPKARCVYESGVTGFDLQKRLSGLGVDCVVGAVSKMIKPSADRRRKNDRNDAEFLARMLSVGNVVEVWVPDDECEAARDLTRALEDARDDLSRAKQRLSKFLLRHGLAFDERTPTGRRKGNWTRAHWSWIESIRFAEGADNDVLAYYVDAVRRAAEEKARLEGLVEAEARKPRWRRRVDSLRCLKGVDTATAADLVFEAGEFSRFRNARSFAAWVGLTPSEHSSGESDRRGAITKAGNKHLRKALVEAAWHYLTCSGRPKDLARGQAPDRVARRHAAKGVRRLVERREALLARGVHNNKANVATARELACWVWAVGLMAEEA

SEQ ID NO: 199393 - protein, 468 aa, unidentified
MGLRNAIGIDPDSKGFVCATVKLSEAQVRTKGYLTTDSDLKAFLRWVKGQGETIVAIEGSNGLSRPLEKALREAELIFYSFKPADTDKFRKAVLGQNKDNRKDAESVARYAMALEAQGKLERYRRVWFAEAELQLLTRGYERKSQGMTAEVNRLWKLLRLACPDLYLALGGGHPEVELTEKVLKSQGILTLLSQKPDFGQWKHFSAEQLLKAMGGGKYKGREKLIEQLRTLAGSFPAVSPAMALLIRSSAQQIERFKAEQAEITRMLEVLTADNAAVQVLKQMRGIATRTAATMIAEIIDIRRFAKEDSLACYSGLGMKEHSTGNSLRMVPTQLFNHRLKDAFMTAARNFVLFNPDSHLAGYHRNLVKRGMSSMEATKRVARALVRVIYRELSAVVAQDTGRPAADQKKEGEGDMASGLTRGDQSHTSDISPSSLRSSKARATKGVKELAAPTARGGSRRKTISKKTA

SEQ ID NO: 199394 - protein, 338 aa, unidentified
MELYAGIDLHSNNSVVSVLDEQDRTVFAKRLPNDLASIVDVLKACAGTLRGVAVESTYNWYWLVDGLQDAGFIVQLVNTAAVKQYDGLKFSGDFSDAHHLAHLMRLGILPTGYIYPREERAVRDLLRKRGQLVRQRSTQILSMSNLVARNLGAQATGNEIKRWQLEEIDAMPLLAEQRLALKANLAVMRCLDAQVTAVERTVLAKAKLRKDYQALTTVSGIGEVLAMTIALETGDVTRFDGPGNFASYARTVHSRRESNGKKKGEGNAKCGNRHLAWAFIEAAHFAVRYDAAIKRWYQKKCASALAVVAIKAVAHKLARACYYIMKDGRPFEVSRAFG

SEQ ID NO: 199395 - protein, 345 aa, unidentified
MLAEQTDYVIGVDTHRDRHSAAILTGTGVLVVETSESADRHGYIALLEWARRFANERRLWAIEGSGSYGAGLTSVLVEHGERVVEIGRRVRRDGRSRAQSDPLDAIEAAREALARPRHAAPRAAGDREALRLLVNPRAGAVLARTAAINQLRALVVAAPEPLRTSLRRLAFAELVDRCAHLRPGVRDTTTRASALALRSTARRIQALSTEARLLRREITQLVDAVAPTLLAEPAVGPISAAPLLIAWSHRGRFRSEAAFAMLAGASPIPASSGRTVRHRLNRGGDRQLNRALHTIALSRRATHHPTRDYINRRTHKGKTSRETKRCLKRYLARQLYRLLERSAMT

SEQ ID NO: 199396 - protein, 345 aa, unidentified
MDTIGLDLHKRESQLCIGRDDGSVEERRVVTSRERFSAILGNRTPARVLVEASTESEWVARHLEQLGHDVIVADPNFAPMYATRSRRTKTDRRDARTLMEACRLGAYRPAYRLSDERRHVRAELAVREALVRTRTRYIALAKALVRRDGLRVASSEPHLVPKRIAALELSESLRAELVPLFHILAPINDQIAAADRRITVAAHADPAMALLATAPSIGPITACAMVATVDDIVRFRSAHQFEAFLGLVPGERSSGEKRRIGRITKAGNSRVRYLLVEAGWRILRSKGDDTTALRTWALGIAARRGKRIAVVALARRLAGIAYAMWRDGRPYDPAQLRMPRPRVVQ

SEQ ID NO: 199397 - protein, 320 aa, unidentified
MKHKVGKDNTVARFIGIDVSKQWLDVATLPERETRRFSNDGAGQEQLGAWLVQLAPELIVMEATGGFETRVATVLAAEGLALAVVNPRHVRDFARAFGILAKTDRIDASVLATFAEKVHPPVRPLPDEDRRELIDLVDRRRQLVTMRAEEKTRLSQATASARQDIKEHIEWLDERLRRLDIDLTAKLRSSSLWKAKEEILISVPGVGRVTVLTLLARLPELGALNRRAIAALTGVAPFARDSGQHRGRRMIWGGRADVRSVLYMAAVTAARINPVIKSFYLRLKQAGKPAKVALTACMRKLLTILNTMLRTNQSWHAPTT

SEQ ID NO: 199398 - protein, 455 aa, unidentified
MQQYYLGIDVSKGYADFVILDDKKKPMEKNFQLDDAFDGHCRLYERLGTFSNEHPDSIINAAVESTGGYEDNWLNTLIKFQGTLNLRSARLNPLGVNANSKADLKRNVTDKISAQNVAEYMIAHPEKVSYQQEDHLAGLRKQWGFIQMLTKQKTQLFNQLESLVYTANPDVLTYCKDGVPEWVLKLLARYPTADKLSKAKVSSMVKIPYISSAKAKELVANAKKSIASATDKITAQLIIAIVRQILHLKETIKAQTKIMAEECSLPGVDLLKTFVGISDFSAIGLMLEIQTEERFSSVKKLASFFGLHPVFKISGDGSSGFRMSKKGRKEPRHILFMVALCAIRSNPLIHEIYLEHVQKGMNKMAAIGACMHKILRIIYGMLKHKRAFDPEIDRQNREKTSRKEKPAFKDKNRRYQNFDPKAPISRRQKIKRKEQEQSHSDNNTKIGIVAPVPIT

SEQ ID NO: 199399 - protein, 343 aa, unidentified
MKIIRVGVDLAKNVFQVHGVDRCEKVVWRKKLGRAEWLATLLEKIEPGCEIGMEACGGAYHWARQLQKRGFTVKLIAPQFVKPYVKSNKNDANDAEAICEAMSRPNMRFVAIKSVEQQDLQAIHRIRSELCNQRRAKGNQIRGLCSEYGLVAPREMIQLRAAIPCWLEDIENGLTVRFRRMLRGLWLDLMNLELRVKELDQEIEIAAATDPVATRLQQLRGVGPIIATAIVASVGDAKQFSSGRQMAASLGLTPRQNSSGGKERLLGITKRGDTQLRTLLIHGARSVLRTAASKNDRMSRWVTHIAETRHHNIAAVALANKTARIAWAMMTRGTDYQPGPAAV

SEQ ID NO: 199400 - protein, 398 aa, unidentified
MISVGIDVSKGKSTVCFLEPYGKLLKKPFEVEHDKISLSTLVTMLKKLDGEIRIVMEATGVYHLPILLYLKEHDFFVSVINPYEMKTYCTCGLRRTKTDRQDAIKIADFGINNWYRLKNYNVSDDVYSELKLLVRRYNHYMRMHVESILELTHILDYTMPGIKKLLQGWNEATNKDKLSDFVETYWHYDNITKLSEEEFIEDYTKWAKNKGYQCKQSKAVKIYALANTSIPTITSNTSSVKMLVQEAVRVLREVNNTLKKILTQMQKLAKRLPEYSVVRKMGGVGDVLAVKLIAEIGDVKRFHNGKALIAYAGIDAPPYQSGQFIAKERKISKRGSASLRKIGYEVMRCLKSHAMPEDSAVYEFIIKKELEGKSKKAAKIAGLNKFLRIYYARINEIY

SEQ ID NO: 199401 - protein, 339 aa, unidentified
MNITTIGIDLAKTSFSLAGSDKHGKIVLRKTVNRGKLLSVIAQCPPCLIGLEACSGAHYWAREFEKLGHQVRIIAVKFIEPYRKGGKNDNNDAEAICEAVRRPNIWFVPVKSPDQQAALCVHRVRQGVVRDRTAWVNRLRGLLSEFGIVMPKGRYAVQSAVPAILGDLDNGLPELARQMIHDLWLCIQHANEQILSYDRALSRLSKEDETAKRLLTIPGVGEQIATGVVASVPDPRLFKNSRQFAAWLGLVPRQYTTGGKIRLGRITKRGDKYLRMCLVHGARAVIAKLGDKQDHVSCWVRDLIERRGYLRAVVALAARNARLIWTLMMKRENYRAIDI

SEQ ID NO: 199402 - protein, 340 aa, unidentified
MGQVVTIGLDIAKSVFQVHGVDAEGVVVMRQKLTRARLLPFFAKLESCLVGIEACGASHHWARELISQGHEARLMPPSYVKPYLKRQKNDMADAEAICEAVTRPTMRFVPVKSPEQQGVMVLHRTRLVLTRQRTQLSNAIRGHMAEFGLAAAIGREGLGKLIAVILDGADERVTREARVCLNMLVDQLRLVNVQILENDRLIRTNARATEVGRRLMEIPGVGPLLASAMVAAVADPAAFKTGRNLAAWIGLVPRQNSSGGKERLGGITKQGDRYLRQMLVVGALAVVRYAQRNGTRRPWLVQLLARRTPKIAAVALANKNARMIWAIMTSGERYREPQPA

SEQ ID NO: 199403 - protein, 316 aa, unidentified
MTVTPVFVGIDVSKERLDVARRPSGDGWAVANDDPGIAALVDRLRELPPALIVLEATGGLELAVTGALAAADLPVVVVNPRQVRDFAKATGRLAKTDTLDAAVLAQFAEAVRPARRPLRDADTQALGALLARRRQLVEMRTAEQNRLGSAARRVRVEIQAHITWLNRRLARVDADLDQAIRSSPLWRAKDDLLRSTPGVGPVLATTLLADLPELGTLTRQRIAALVGVAPLNRDSGTLRGRRTVWGGRAHVRAVLYMSTLVAVRYNPVLQAFYLRLREAGKAPKVALTACMRKLLTILNAMVKHRTPWEDRFAHSA

SEQ ID NO: 199404 - protein, 438 aa, unidentified
MSNKVIFNLDELFISVGIDVGADFSWMSIALPNQQFVGKPYKILHNSIDSLTTAVSKIKEAEELYSLESRIFLESTGIYHYPLFCYLRDKGFNCSVINPIITKNSTNINIRKVHNDRFDSKKAALVGLKPDLKVSLMPSDLALNCRNLCREYYDLMDNRSAYVNKLQGELRMAFPQYLGIFSKVTINTSLTLLETYTSPSAFLEADKQEIIDIIKSTARFGLTYAQNKYNAIIQAATDANQFGYIIDSNIKRIRLYISFIRKYDEEINSILESLHELVDANEDADFVKQIHLIETFKGAGFLSAVSIMGEIGDFSAFSKPKQLFAYFGLDPAVKQSGKFEGTKVQMSKRGSAIARRVIHTLTLQSISISRNGEAKNPVLREYYLKKCESKPKLVAMGAVSHKVCNMIFAILRDNKPFKIIAPQEHIKQYNAAKCDIAA

SEQ ID NO: 199405 - protein, 328 aa, unidentified
MRLNVGIDVSKETLDLCLLLNQAKSGSKFKCFKNRKIDYLAINDWILKLSKCQPNDIVITMESTGVYHEAIALYLYTMGFQIFISNPGKAKKFSQALGLIHKTDKSDAYMLARYGAAQNEQIHLWKPDDANARNIKALTRRLSALEKDRLRENNRLEASEISDAHNRVLLSITRIIRIIEDEIQEIENEIDTIISACPTMKKNHDLLMSVIGIGKVMSRELVYLFSAKNFSTAKQAAAYVGLIPKLNESGSFKGRTTLSKIGPSRIRSKIFLAAVSAGTHNPDIKAQKNRLLAAGKTKMQALGAAMRKLIQICFGVIKNQTKYKSELA

SEQ ID NO: 199406 - protein, 405 aa, unidentified
MARVFVGHDWAEDHHDVFVEDGQGRRLGGGRVPDGVEGVARFHELVGGLVEDPAEVVVATETDRGLFVGSLAAAGYTVLAVNPLSVSRYRERHSTSGAKSDPGDARVLAELARTDHHNHRPIAGDSDLVESIKVLTRAHQGLIWTRQRQLNQLRSTLREFYPAAIAAFPELGHSDALAVLALAPTPSLGRLLSISKIAAALRRGGRQRRIDERAAEIQIALRSDQLGAPDPLSESMGTVVGALVAVAGEITTQIAGLETTLADRFDQHPDAKIIRSLPGLGMILGARVLAEFGDDPNRYANAKSRKNYAGTSPITRASGRSHVVLARYARNRRLADASYRWAFAAITASPGARTFYDTRRATGDTHNRALRALANRLVGILHGCLRHRTLYDEHIAWAHRTQLAA

SEQ ID NO: 199407 - protein, 331 aa, unidentified
MEQHYIGVDLHKAFFQACAVQMSGERVWERRFPRSAEGLAMFRDRCDTTTRVAVEATGPTWSFVDAIQPTGATLCVVDPRKTRLKAGFAAKTDRLDARRLADALRRESIVSVYVPPPAIRELREVCRGRHQLVRMRSRLVQMIRALLLRSGVEDAPVSRLYGVRGAAWLAHVHLAPEAERTMRRLERLLRVVHGEIVEAESVVATHAAADPIARALDTLVGIGPVRALTLRAEIGDIARFRHGGRELASYAGLVTRVDRSADHGHYGRITREGSPWLRYVLVEAAVNAMKRSDAIGQWARRLARRKGAGIARVALARVLCGEIVRVWPRSV

SEQ ID NO: 199408 - protein, 337 aa, unidentified
MKFCGIDLHSNNSVVVITDEADRVLVSRRCPNDLTKIIQLLDPHRAELAGVVVESTYNWYWLVDGLKDAGFDVKLANTVAMKRYDGLKHSDDKDDAAFLAHLLRLGILPTGYVHPPQERALRDLARKRIQLVRSRTQHVLAVENIMARQLARRVSSAVVKRLSATSVDRLGLPPDVALAIKANVAVIEALNVQINCLEDRLLQGVRLRPEYALLKSMPGIGEVLATVIMLETGNIERFADVGNFASYARCVDSAHYSNGKKKGEGNTKNGNAYLVWAFIEAANFARRFSEEAKRFFDKKKAKTNNVVATKALAHKLARASYHILKEKQPFDVKRCFA

SEQ ID NO: 199409 - protein, 384 aa, unidentified
MDVHTSNYTLCSLDPGYGVEKDNYFAEVQFTNDFIKNVVNYVTNLKKKLKDCEFVCGYEAGCLGYSTYKDLTKVGIKCVLMAPSTMAVQKGGKKVKNDRRDARVIAQCLAYQTYKEVYVLSEHDEAVRGYLRMRDSHNKALKRIKQQIIAFCTGHGLFSPTKSNWTVAHLKWLKDLKFNDPVEQEILNEYLSSLTFLSDKIKAMDVRIEELASEKQYCENVKKLRCIKGIETNVALTLLAEIGDFNRFSKPTDFASYLGLIPGEQSSGDKVRGTGITKAGNSTLRRKLTESAKGYWRGRIGIKSATFKKLEKELPKEVTEYALKANTRLQRKFFNMTHVKGKNMNVAASACAREMACFVWGLITNHYEKAPAVPKTDEELLDLN

SEQ ID NO: 199410 - protein, 350 aa, unidentified
MNESQELSKQVVGIDIGKDMFYACYKALSNSHKIVIKGTKSFTNDLSGMQEFYTWCINRNTKPGCSLVFVMEATGVYYENLAYFLYERDCLVSVQLAQKIKYYAKSCNLKTKTDKVDSKMIAEFGIEKNLSGTDIWTPPSKSFKMIRDLSREHTSLKEACSTAQSQLHALQQAYSVHPRVITLKQQQIEFYKQQEEAVKQEMLLLVKEDEILFDKLENIISVKGLGFITVIKILAETNGFLLFRNIRQLVSYAGLDVIEKESGSFKGKTKISKKGNARIRAALYMPAMTASVYNPDLKTFYNRINEGRSVKKQGLIAVMRKLLILIYTLWKKNEAYIINYNDRNLSTVKA

SEQ ID NO: 199411 - protein, 349 aa, unidentified
MPDKPVAGIDISKDWLDLCVADAPGVERIANTREAVAAWLERVGPGLIAFEPTGGYERFLIAALRERGIRFLRVHPNDVIAFRKSRGIKAKTDAIDARLILAFLCDRLARRELRTSLIGDERLRALAARRRQLVAALQAESCRLGTALLPAVRTSLETVITVLRQSLDALERELADAIAAHPQTAKLAKLLQTICGIGPVVAMTLIADLPELGLLSAKQIAALVGLAPHTKRSGTIRYRETTGHGREGVRRALFNAARATLSHPSLFKDFYDRLVTDNRRPGKVALTAVMRKILITANAVARDRQPWRGRFAAGTPCRPHAEQPAHRAGRVKAAATRRVVARSASLDAA

SEQ ID NO: 199412 - protein, 354 aa, unidentified
MSQKFESAIAVIGIDIGKNSFHVVGHDARGAIVLRQKWSRGQVEARLANMPPCLIGMEACVGAHHLSRKLASLGHDARLMPAKYVRPYSKGQKNDFNDAEAIAEAVQRPTMKFVATKTAEQLDLQALHRVRERLVSQRTGIINQIRAFMLERGIAVRQGIGFLRTELPTILATRTDALSPRMLRVIEELAGDWRRLDQRIDDLSGEIEALARQDQACSRLMTVPGIGPIISSAIVAAIGTGDVFSKGRDFGAWLGLVPKQISTGDRTILGKISRRGNRYLRVLFVQAAWVMLVRIKNWQRYGLKSCIEAAKRRLHHNVLAIALANKLARIAWAVLAKGRAFELTRTDDAGVRPA

SEQ ID NO: 199413 - protein, 364 aa, unidentified
MNKTITGNGISQASLVNYVNRVLNLGLDVHYRQVTVAMQEGGGRIKSAGKMGHVDFLNWVQKKLQEGWQIYSCYEAGASGYWLHRELVKLGVKNLVVAPKAMGQGGKKQKTDKRDAGELCDCLDRYLRGQDKALSVVAVPTEEQEEKRALIRYHRQIMADRGRCEARGKGLLCAQGIEVQGRWWHGEGWLAVQSDPRLKDWMKEQLIGWRNKILSTDQEQGGLRERIAALAPAILPKGVGAYSAAVLEYEMRGFERFTNRRQVASMTGLCPGIHQSDGRGKEGSINRCGIGIVRWTLVEMVWRLMIWQPQYPPVRRLASGLVKGKRARKRLVVQAARRLAIDLWRLSTGQTTPEKLGLIMHRAK

SEQ ID NO: 199414 - protein, 345 aa, unidentified
MVMIGIDPHKRTHTAVAIDTAERVLDERLVRATSKQVPELLEWVKRLDGGDRIWAIESAGGLGYLLAQQLLAAGEQVVDIPATLASRVRLLGTGRSDKNDPNDARSVAIAALRAAELVPVRVEDHASVLRLVSRRHTQLGWSYNKTACRLHALVADLVPGGIGKEVVVCQVRSLLVDHPSIGAVAVERHALALDLVDELERLNRQRKALRKRIAVAVDASGTTLTEIFGVGDVGAAIILGQVGDVGRFRTADRFAAYNGTAPIEWSSGNRARPIHRLSRRGNRTLNHVIHIAAVTQLRHRHSPGRAYYDAKRTQGLTGRAALRSLKRRISDAIYRRLVADTARRH

SEQ ID NO: 199415 - protein, 340 aa, unidentified
MKLYGAIDLHSTNNVTVVIDEQDRVVYQKRLPNDLALILKELSVYQSELEGIVVESTYNWYWLVDGLMEQGYKVHLANTAAIQQYEGLKYTDDHSDARWLAHLLRLGVLPQGYIYPRAERPVRDLLRKRSQMVRQRTTNLLSIQNLMTRNTGSSLSANRVKGLDVQQVDELLPNRDLALAVKANLSVMGSADEQTEILERTVTERVKLRPQFSFLKTVPGIGQILALTIMLETGDIRRFSSVGNFASYCRCVGSQKISNGKKKGQGNTKNGNKYLSWAFVEAAHFAIRFNSKIKSFYQRKKAKTKVVVAIKAVAHKLCRACYYIMRDRVAFDVTKAFGQK

SEQ ID NO: 199416 - protein, 359 aa, unidentified
MEAQRKALSFKGQNIYIGIEVHLKSWSVTLMSEATQLKRFSQSPDPDALYAHLVRNYPEAEYHSVYEAGFCGFWIHYRLVGLGIHNIVVNPADVPTTTSEKLRKTDAVDSAKLARSLRAGELKGIYVPGSESLETRSLIRLRDSITKDQTRLKNRIKSHLRYLGIEIPEEFSGPGRCWNRRFVVWLKGAETGTAYGRQTLDFLVRQYEALRGQRLEMLRAVRALSRTERFEKPLENLMTVPGIGQLTGMSLLSEIDDIRRFKSADQLAAFIGMIPMCHSSGEREGVGDITVRRSARLRSVLVEASWVAVRQDPALSMAYGNYCKRMAPGKAIIKIARKLVNRIYFVMKRNQPYVKCVVA

SEQ ID NO: 199417 - protein, 391 aa, unidentified
MVCVGIDVAKDKHDCCILDSDGMVRADCFTIPNNMDGFKQLLQTIRNCTKKSGKIKVGLEATGHYSYNILGFLLDNDLAVYVMNPLHTNLYRKSLSLRKTKTDRVDARTIATMLLSDVDLKSYTDTAYHNEELKSLTRYRFDKVRERAKLKQSVSRLVTILFPELEKLVPSLHIASVYALLSEYPGAKQISEIHLTKLTNLLATASKGRYGKDKAIQIRDAARTSIGSVMPAKFLELKHTIKLIRELTSEIDEIEVSIQKIMDELNPPILSIPGVGIQSAAMILAEIGDFSNFESPDKILAYAGCSPSTYQSGKLTNCYAHMEKRGSRYLRYALYNATKYVCHWNPVFAEYLAKKRAEGKHYNVALSHATKKLVRLIYALQKSGKAYLVAA

SEQ ID NO: 199418 - protein, 422 aa, unidentified
MLAESNDEEQIIARVAALDIGKAELVCCVRVPAPTGGKRRLQDVWTHSTMTKALTELANRLVEMRIERVVMEAASSYWKPVFYLLEAHGLDPWLVNARDVKHLPGRPKTDVLDAVWLCKVAERQMLRPSFVPPWPIRRLRDLTRYRTDLVAARTAEKNRVEKLLEDACIKLSVVASDIFGVSGRAMLGALVAGERDPKVLAQLSRARMRGKIDRLEQAFDGHFADHHRFLLSRMLSRIEALDADIAAVDAQIEAQLAPFAEAAAHLDEIPGIGPVAAAAIIAEIGVDMSRFPTAGHLCSWAKFAPGINSSAGKSKGSASSGHGNPYLARVLGEAAVGTSKTNTFLAARYRRIARRRGQPRAVVAVGRSVLVIIWHLLHDPDARYQDLGADHYNRHVDPSAKKRSHIRQLEALGYTVTLTPAA

SEQ ID NO: 199419 - protein, 501 aa, unidentified
MKTKRRKAKLQAGIRSISVTSNEAEQKLEIMRPDAAGIDCGAQEHYVAVPVDRVSAGQPTVRSFSAFTEGLDAAVDWLKECRVTTVAMESTGVYWIPLHQKLEAAGIEVYLVNARPVRCVPGRKTDVKDSQWLRQLHRFGLLNASFRPEDITCRLRSLHRHRDNLVSSSASEIQHMQKALQQMNLHLHHVVSDITGLTGLRIIDAILSGQRDPQELIKLRDKRVSKSTPQQMQAALVGDYRAEHLFVLSQSLQAYRFHQARIEECDRQTEPLLEKLAQQVEAASARLKPLKGAPQEERLPVPRNELKTGTSASSPLNKAKRKHKPIANEPKIELAGLLERICGIDLTQVVGLNVLSVLLIVSEIGIDMSKWRSAKAFCSWLGLCPGNKISGGKVLDSRTRQVVNRVADALRLAAQSAGRTETCLGIFYRRKQAHLGAPKATTATARKLACLIYHLLKYKQPYQKLDPAIYQLRLQKSALRKLQNQAITLGYKLIPTANVPA

SEQ ID NO: 199420 - protein, 445 aa, unidentified
MQKRKNALRLTYPNAAGIDVGSESHFVAVPPDRDDEPVREFRSFTEDLHHMAEWLSSCGVDTVAMESTGVYWIPLFELLESKGFTVYLVNARHVKNVSGRKSDVLDCQWLQQLMSYGLLSGAFRPADEICALRAVSRQREMLITYQSRHVQHMQKALTQMNIQLANVIADIVGETGQKIVRAIIAGERDAQKLARMKNYRIKASEEEIVKSLQGNWRQEHLFALKQAVALFDAYSEQILQCDLQLEQMLGELKKYDSEPIKGRSRRKNDPQFDLRTYLVRMCGVDLTRIDGIEVTTALKVISEVGPNLSRFPSVKHFTSWLCLCPGTKISGGKKLSGKSRSGANRAAQALRLAAAALRKSKSALGAYYRRLCSRLDKAKAITAVAHKLARLIYTMLTRGTEYVDKGQHYYEERYRQRVVHNLSKKAAAMGFVLMPVQEKTMEMQS

SEQ ID NO: 199421 - protein, 426 aa, unidentified
MTRTMSRTGDRRAIRISGKQKFEVTRNYDCVAGIDTDVEVLVVCVLDRDSVVVETEEFQQTHDGHLALVDYLLDEGVEFVAIESTATYHIPAYNAMNKAGINCGVINPQLISALIRASGKTDAADAFTMAKLALQFRLNTSNMPTDEQIPIRVALREVDKKKRIRTQITNRAAQMFNLVNFMLFQHLRIGSPSGRAILLRLANGVSAHKAIAQGWRGKRHKEAKIAELCQIVMDEPIPDWLQELAKGWVKEIDYIAAAIQKLEDFAVKTAIETFPAQINLLTTIPQVSVMLAVRLVAEMGPDFHLRYHSPKAFARGLGVAPRHHITGGSVKEKQINRTGNSFAKRHLFLAVGAFYARSKNKENDRLNAFIQGYRDRGGAYRAAIMAGCNKLSRYMYAMMETGEFYRPFTKPSESEYDKNGQISQYG

SEQ ID NO: 199422 - protein, 324 aa, unidentified
MEKSTLDVLGIDVGKWDLHAVLLQGKRPASKSVPNSGAGIARLQTWLKNRKVERVHVCLEATGGWSEEVAIALSEAGHVVSLVNPARIKAFAQSEMLRTKTDRIDAALIARFCRLHQPEPWTPPAPEIRILQGLVRRQHSLIEMRVAEENRRDAPLVAPPVMASINAMLEQIDRELERVEREIEQLFKDYPTLRRQRELLISIPGIAETTAARILGEMPNITEFRDVKAVAAYAGLSPRHYQSGSIEYRSRLAKTGNAHLRRALYFPALTAIRHNRPIREFAKRLRARGKTKMIVVAAAMRKLLTLAYGVLKSGRAFDPAYGIA

SEQ ID NO: 199423 - protein, 345 aa, unidentified
MVYYAGIDLGKRPSQVRIIGADRKVVEDLRVDNDPKEFVRIFRKYKGDIRVACEACSNAFWVADTLEPLVRKVHVGDTKKIRWIAEARIQTDKIDAGILAELLRADLFPTIAIPPRRIRDLRELVRGIVRLRRQTVRYRNQVHGLLGRHGVAYKRSAVAGPKLSELVKEAELPAPAKLAAESVLRLIDHTAAEERRLDKAIRLELKDEPELNRAVDLVETVRGVGYFSALLFVMELWDVGRFADAGRLASYIGFVPSTHQTGETLRNGRMTKQGNVLARWILVQDAWSAARTHLFFGRLYERYRKRLGKGRAIVPVARTLLSKIFRVWSEGKTYEELFGEKALVG

SEQ ID NO: 199424 - protein, 402 aa, unidentified
MFYSVGIDVSMGKSTIAIISTEGEVISEPFEIEHTKSGFNLVLEKIKDIPKDNVRFVMESTGNYCKSLLKIIIDNGYFATVENPLTIKKYCDINIRKVKTDKKDALKIACYGSERWHRLIRYTPSDEIYSELKFLSRQYDEQMSLKVMKKIHLSGLIEVTFPGLKKIFNGDSLYMLMLDIYKKYYHPSLVLSKSKSSFIKDVEKISKKTGHRIGTRVAEEMYSLANECIPSSPCNESTQLAVSNCVLLLQNLEEITNNIIAKMDELARKLPEFEIVSNMSGVGNKIRARLIAEIGDVRRFKNSNCLIAYAGIDVPPFQSGQFIATNRRITKRGNKHLRKVGYEAMKSLKTVKPTKDNAVYLFIVKKENEGKGSITAKIAGLNKFLRIYYARVMEVYKNLENT

SEQ ID NO: 199425 - protein, 356 aa, unidentified
MRYYKDIKRFVKGKAVFVGIDVHVKSWSLCFFSDGEVLEKMNIHAKYPILLNLLRTRYGDSRVIHLVYEAGFSGFWLYRRLNQDGYDCIVTSPNRIPKFDNKVKTDKRDAEKLARFLASGHLKTIAVPSSKIESQRRLLRQRGRLVKKQTRQKNEIKSFLFLHDISKPSYIRNCWTKAYVGWLSELCFEFDSDTFLVAQMLEHLVLIRQELARLLLYLRELSKYTSYKDSYRRITNIKGVGLITAMTFLLELFDLERFKSTKCFSSYLGLTPSQHSSGEHVHLGRISREGNVHIRRVLIESAWTVIKHDPHLREKYNRIRAKGTNGNKAIVAVARSLAVRLRRCLLDEQVYVAGVC

SEQ ID NO: 199426 - protein, 422 aa, unidentified
MNENGTVAAGLDTHRDTHALCVIDRVGRVLRTGTYSADAAGYDEIASAIGEPGDCAVVGIEGTGSYGAGVARRLAELGYDVVEVVRPRREKRMAGRDKNDPADAERAARDALAGRASGAPKAGSGWVEALRFRMVARETAVGESTRAANSVHALVVTAPAPVRERLAGMRTPTLMKELSRRRRARDELERSLWDSLRSLALAWRAAKEAAAEQEAAMRSILEANAPALLDVSGCGAISAARLAIAAGDNPERVSGEAAFASLCGASPIEASSGKVKRYRLNRGGDRQANRALHTIARQRMRRDDRTKAYVEKRTKEGKSRREIERVLVRYIAREVYRAIMHPMSASRASSEGAARSARAARVRMGVTQSQAASALGVASARISELERCVLIDETLLQRYRGWLESIASDGRWKSIESTLDSK

SEQ ID NO: 199427 - protein, 386 aa, unidentified
MQASSMDTPTVGHYGTIFVAVELSQRSWLVTLHCPDKDKVSHHKLEGGDHAGLLALVDRMRERAARALGGMPAVRSCYEAGYDGFWLHRLLLANGITNYVFDPASIAVDQRARRVKTDRIDGEKMLRTLMAYLRGEPRVVRIVRVPTPEQEDARRASRERGRLTKEQTAHTNRIKALLRLLGMAVGNPRRRDWLSWLATQRDWQGQAVPPQIMAEIKREHARLMLVREQFEVLARPQAAADLTPAVAQMVQRSELLLRLKSLGPAFATTLTNEVFYKDFRNRREVASYFGLTPSPWQSGGIDRDQGISKAGNPRARCAAIEMAWLWVRHQPDSKLTQDYRRRTLDASKRIKRIAIVALARKLVVALWRYLTTGLVPEAAMLKAVEM

SEQ ID NO: 199428 - protein, 584 aa, unidentified
MLHHAPASPPLVDAKIVRIGVGIDTSRYGHYAVFLRDDLQPAAGELQFMEATDGYAQLRSRFEQIVAKLGSVHFLVRLDVASQYADNLLHFLHTLHARLANATFTISCGDPQRNKNYRAALFGSKKSDPIEAHAAAHYALCQKCLPVKILPAELRTLRQVAGRLQAVVRQRTRLINQFHLLLARAIPELALLVNDIASGWVLTLCERYPTAKRLAAASAHDIGQITYLPEKLIGPLLEHARNSVASLDDDTVAELVRDQVRQLRDVDARQVRLEKTLVDTYRLLPDANHLDSIPGIGAVTAAILTAFILDIDRFPTPTKLVAYFGVMPIKASSGVDRAGKPRAPKGYVMSSRGNDLVRRYLWMAALSAVRHNPAVRALYARVVAKHPDQKAIAIGHAMRKLLHLVFAIWKTKKPFDANFYLWDAPAHIAPQDGHEPTTAQDQAAGLKESAKPVCKEVTAACEASLPHDAEPGQHAFVDFAHVKAQLPIARVLEHLNLTRKLQGAGAQKRCACPIHCPHSHGRTFSVNLDDNVFQCFSPRCQKKGDVIDLWAALHHQDLRQAALDLVRTFVLEAAPTQPTEKRNG

SEQ ID NO: 199429 - protein, 360 aa, unidentified
MHATTVAVDLAKSVFQIAVADDQWRIVETQRLTRTQFERWFANRSVSLVIMEACGSAHHWARWLNGLGISVRLLPAQYVRAYVRRNKTDATDAAALLEAARAADIRPVRVKSVEQQALQGLHRIRSLWMGTRTSRINALRGFCREFGITIPQGARTGVEMIGRVLADPRSAVPDLIRHTAGMLLEEIRLLEARIAQVERELASVARHSPACTLLLSVPGIGLLTATALVAATSGDVTHFQDARHFSSWFGLTPREYSSGSSRYLGRISKKGDRYLRMLLTHGARSVLRAAKVAEGAGKDVCGIRRWALEVQDRSNHNKATCALANKLARICYATLRDHAPFDEAARLNKKQSRQSFALPA

SEQ ID NO: 199430 - protein, 341 aa, unidentified
MRRWIGVDLHKTQFTVCYLGKKGEHQLQVYKVTAKDVEAFKQTVSKSDEVAVESTGNTGYFVRQIQGSVKEVKIINPTQFKIISTSVKKTDDHDALVMAKYLSKGLIPEVRMRSKEELQIASLIGTRDKFVKLRSCLKNKIHNILNANGIVTKREVFGSDKGLERILSLDIEASYQFELKIIVEQIRSLNKSIDEIDEEITGRGKNLDGHKGLTSITGIGDISATILLNTIGNVTDFADDSKLAAYFGIVPRVAVSNETSQYGKITKMGNKIARTALVQSTLIAIRYNPYLRKFYLRLKAKKGSGKAIIATARKLLTIIYRTLKNNWVFEDFNQFKLVVSV

SEQ ID NO: 199431 - protein, 363 aa, unidentified
MTVTSLPQPTLPAQSEEPPAEDVILGVDTHKDVHVAAVVTVLGVLLAHQEFPVTAAGYRQLLAWARSFGALHRAGVECTGSFGAALARFLSRENICVVEVNQPDRALRRKHGKTDAVDAEAAARAVLSGRADVTPKTGDGPAADMRVLRLAKESAVKARTQAKNQLKAVLLGVDPVLREALSDLSNTALITMCADLPDTGDAAVFTLRLLARRIQQLTSEVKELACRITKAVRRCRPELLDIIGVGPDSAAALLIAAGDNPERLASEASFAALCGVSPVEQSSGKTQRRRLNRGGNRQANATLYRIVITRLRRDTRTRIYLERRTKQGMSKREIIRCLKRYVAREIYGQIQRTPALGASSAAA

SEQ ID NO: 199432 - protein, 389 aa, unidentified
MFYLGIDIGKNTHVASLIDDKKKIIFKAFSFSNSIEGVNLLLEKLSPFTDSLEIGMEATGHYWLSLYSFLFEKNFSVHVINPIQTDGWRNGIEIRKRKTDIIDSLLIADLLRYGDFLETSLSDEDYLSLRNLTRFRSYLISSVGDLKRKTIAVLDQVFPEYSDSFSDIFGKTSKEILISISTPQDFEDITADKLEKVLENITMKNFAKSKIDELSSKAENSFGVKFCLDSFSLQIKLLIEQISFIENQVFTVEKEISVLMEKINSPITSIPGIGLITGAVILGEIGHISRFSNPSKLVAYAGLDAIISQSGEFESTSNRMSKRGSPYLRKALFQSALRAEFCDPVFINYYQKKISQGKHHLVATNAVARKLCHTIFAILSKNESYVPQM

SEQ ID NO: 199433 - protein, 444 aa, unidentified
MSTVNQQPNPTPFAAWVGIDWADQEHAVCVVDASTGRSEVSVLAHQPGAIEDWAMELHHRWPGPIAVCLEQSKGALIYALMKYDFLVLYPINPKQLARYREALVPSGAKDDPADAQLLVEFVQRYHDRLRAWQPDDPTTRLIAILNEDRRDLIDLRTQLTNRLQARLKLYFPLVLELFRGRTKLYAPVVCELVLRWAALAELQYADPEEIDAFFKLHRLHQKSIDQNLAKIVQAKPLTDDEAIVRSGRLQAQSLARQLLDLQDAIARCEAELEKLMETHPDAPLFTQLPGAGDALAPRLLAAFGTDRDRIESASDMQTYSGIAPVTRRSGKSQSVTRRWACPNFLRQTFHEFARCSIAKSAWAAAYYRMQRDRGKKHHAAIRALAFKWIRVLYACWKNRTLYNEFHYLQQLQRQQSPLLAYVGTAPVARPSAQSTNPKTFSISP

SEQ ID NO: 199434 - protein, 439 aa, unidentified
MEMNQADRPSSPVDASSFQMVVGIDIGSQTCSMCTLTPDKRQVIKPTEFANAPAGFGVLQEQLEQLGVPPEQVLIGLEATSRYGENLSHFLESRGYQLCLLHPRQTHQFAQQRGLRAKTDHLDATTIARVLLSGEARRGYVPSDLIATYRELVRLHTQLSDEVARSKNEIQALLTVLFPEFSQVFADPCRATALALLKLYPSAQAIATAGGEAIAAKLHELAPRNYGHRTAEHLVQLAQHSVSRGFAVAARSTSLKILCHQLEHTQANMAQLEREIDTLLETDAGAKGLISVPEFGHKTVAVLRAELGDVTRFQRTDQVVAYAGLDIEVKESGKWKGQAKLSKRGSGRLRRILYMATVRCIRLPSSAFGAYYHRLVARGMKKCDAMMAVMRKMLIVAYRLLRTEETYDPTKVCAVVVTQPVELPPLHTPASTKVVAAKA

SEQ ID NO: 199435 - protein, 328 aa, unidentified
MQQKSIKSKSEYTETATHGTKYLGVDISSEHLDVYLYGKYKRFNNNHEGLKKLKALIDRQNEPVLVAYESTGWLSRILAMQLLSMGISQVCLNPSRVRNYARAIGVQAKTDKKDCEMIARFAEQTHAQANVTESPVLMRLKELQSSLNFFKRRMAHAKSSLSAQRDKFLIREIQRAITHDEKQIARIEKEMHKLIKTNQEMQERYDYYLSLQGIGPNTALALISQLPELGQMNRRQVASLVGLAPYNWDSGKMTGKRMTRMGRKGIKSLLYLSVTSLLRLHDHPITKMYERLKLKGKKTIVAMVACMRKLLIWLNAETKKWLSEKNYA

SEQ ID NO: 199436 - protein, 393 aa, unidentified
MICVGIDVAKDKHDCFILSSEGEVLADVFTIQNNAEGFDMLLQTIRRCTRPEDKIKVGLEATGHYSYNILGFLLDKGLSTYVINPLHTNLYRKSLSLRKTKTDRVDARTIAAMLMSDVDLKSYTDTAYHNEELKSLTRYRFDKVRERAKLKQSISRLVTILFPELEKLVPTLHMESVYALLSEFPGAKQVAEAHLTHLKAVLYGASKGRYGRDMATTLRDAARCSVGSVMPAKSLELQHTIRLIRELDAEIEDIETAIQSMMDEIQSPITTIPGIGVRMGAMILAEIGDFSRFGSPDKILAYAGMSPSTYQSGQLSLSGAYSHMEKRGSRYLRYALYNATKYVCLWDPTFAAYLAKKRGEGKHYNVAISHAAKKLVRLIYAMEKSKQSYRNAA

SEQ ID NO: 199437 - protein, 410 aa, unidentified
MNPLYVGIDVSSKSNVAYLMKPDGSKHSNFSVPNTRDGSRQLVKRILSAITSESLTDVVIGLESTSVYGDNLVCFLREDGSLTPYNKKIHVLNPKQVNKFKLSYNDLPKNDYVDSFVIADCLRFGRINKEVYLDDYRYAALKNLTRARFFAVQNLTREKQRFMNHLFKKYSTMAQEKVFSDTFSTTALAVYESFESAEALANMDLHQLTEFIIEKGKKRFPDPDSVAKAIQKAARSSYRLPKTVNDSVNQVLSISINSMRAMESQIKAFDKAIAEQMALIPNTLTSVKGIGPVYSAGIIAEIGDINRFPTQASLAKYAGLVWSQHQSGDFEAQNTRMIHSGNRYLKYYLCEAALSLVRCDAEYRSFYHRKYKEVNKYQHKRALALTARKLVRLVFRLLKDNCLYRAPESK

SEQ ID NO: 199438 - protein, 316 aa, unidentified
MAKQVTEITLGIDVSKAELVICDWDTGEIIKLENNDSTIKAWLEALYGPVRMAIEPTSNYHLEFVEQAHALGFAVYLINPRQLAHYRQAVDIRNKTDPLDAWLLARYLARESDSLRAFKPQCAKAKQLWSLLKRRATAVRARTQLKQSFAEIKLPIKALFSEIQRVLDRIDQSILALIRQLGWWPDYQRCLSMPGIGKLNAAALVVVFHRGAFAGADAFISFIGLDVCVRESGKFKGKSKLSKRGEAEIRRLLYCATQAARSYRLFDDYYQKQLDKERSKIGAKCSLARKLARIAFALMNNQQSFKKQEIAYSYSP

SEQ ID NO: 199439 - protein, 345 aa, unidentified
MPIVGGLDIHRKQLTFDYLDTVTGEVKRGQIAPADRAHLRAWLARFAGRGDAGFAVEGCTGWRYVAEELAAAGVAAHVGEPADTAAARGRKRHAKTDKTDSRHLRVLLAEGRLPECWIPPAHILEYRALLETYHDLRAEHTAWVQRIHAVFFHQGAPALGEGALRTAQGLAALRAAAAAHLSPAGQLQVATALEVLAAVEARMEVLRVQLRSAARHLTGARVLAARLYGVGPVTALALTCWLAGAGRFSSSRKAVRFTGLDVTVWSSDRKGPPGRLSRQGPPMLRWAVYEAGKTHARASAPDHAYYAAVKDRKNSKRAALSEARKIVRQACHILTELGDDALTIA

SEQ ID NO: 199440 - protein, 382 aa, unidentified
MRWHTTRQRRPVMNRLFIGMDVHKEKIVVIGLPEEGSHSVVREEFGGGDLRRLTKRIQALSRSWEVDSCYEAGPSGYGLARIFLEAGIPCRVVAPSLIPRRPGNRVKTDSRDAKELALALRADTLTFVRIPALEEEEARGLIRCREDVARQVRLFKTTVSHWLLNRGQRVPSGTKRWTPAYWKWVRALPLSPMDRTTLDHYLDVVSLLENRRKQVEEQICALAKEDPYRERVKRLIVLRGFSPLAAMRLIAEVIEFKRFRSASSFMKFTGLTPSEHSSGDRTRRGRITKAGNSHLRHVLVEAVQKAHFSANPGRLLLRRWQDVSGPLRQIAVDCLKRLHHKFWALTQRGVPAGKTRVAMARELAGFVWALMTHPEIETPLAV

SEQ ID NO: 199441 - protein, 344 aa, unidentified
MVTIGIDAHKRSHTAVVVDEHGLKLAQRTSGTTSPEHLELVAWAATHARERVWAVEDCRHLSRRLERDLIASGERILRVPPKLMANARDGARTYGKSDPIDALAVARAALREPLLPVARLDGADRELRLLVDHRDDLVCERTRMINRLRWHLHELDPACEPAPGSLKRVRTLERLAAALEGMEGLVARLARELVERCEKLTLEIRALEHEITARVSTLAPSLLAICGCGPLTAAKIVGETAGVERFRSAAAYARHNGTAPLLVSSANRSRHRLSRTGNRQLNAAIYRIALTQSHWHPEAKVMMARRKAQGDSGREALRVLKRRLSDVVYRALKADAAAQLPLAA

SEQ ID NO: 199442 - protein, 452 aa, unidentified
MPRARKTKVQRVQPVINPHAAGADIGAREIYAAIPVELDEHPVRRFDTFTEDLQKLVAWLKERGITTLAMEATSVYWIPLAELLEAAGIEVCLVNPRHVKNVPGRKTDVVDCQWLQYLHAVGLLRAAFRPPAHVRAVRALWRHRDALVRHSAWHIQHMHKALDQMNLQIHHVIADITGKSGTAIIESILDGRRDPASLAELGDKRLRASKVTLRAALTGDYRAEHLFCLRQAYAGYQFVVQQITEVDTQLETKLAALAAAPQPATTQSTTKPRPSASNRGQPAYDAGKLIARTLGVDLTTIPGINVITAQTLWAELGSDLSAFKSGKHFASWLSLCPDNRVSGGKVLSTHTKPSANRAARALRLAAQGLHHAKNELGDFYRRMRAKLGGAAALVATAHKLARIVYAVITSHQPYKPELHAQAEQRRLARSLKQLRSKAKMLGFELTSIQQTA

SEQ ID NO: 199443 - protein, 377 aa, unidentified
MQKPSTIDIDPVIYLAIELSASTWLVASKIPTSEKTGLHRMEAGDSQALLALIADLRKKVAAKLGVEASVMSCFEAGRDGFWLHRLLSEHGVINHVVEPTSILVNRRARRAKTDRLDAQGLLRILAAHAKGDHDVCSVVRVPTIEEEDAKRQHREREHLVQERVRIENRIAALLTTQGIRKRPSLRSWEKDMEEMRTGDGRPIPSLLRAEVNRLRRRLVMTLEMIRELEAEREQALQTQDDMASRMIRALCRIRGIGDNFAAVLTREVFYRPFQNRRQIASYLGLTPTPFQSGGMDRDRRISRAGNARARKTLIQLAWLWLRYQPDSSLACWFRERVGNLQGRTRRIAIVAMARKLLIAIWRYATHGIVPEGAQISI

SEQ ID NO: 199444 - protein, 340 aa, unidentified
MKEFSRIAVDLGKGSFQVHAINERGDCVRRKLSRTKFREFVADAKPCLVAMEACGSAHYWAREVAAMGHEARLIPPVYVKPYVKRGKNDAADAAAICEAASRPDMRFVPVKSAEQQATLMLHGSRELLVKQRTMLVNALRGHLSEFGIVAAKGIGRVDELIERAKQDATLPATAKGCVDIFAAQIASLNTSIEAVEDEIEQALAQDETARLLDAIPGVGPIIATAVRSIVPDGRIFAAGRDFSAWMGLTPRQNSTGGKEKLGSITKQGNRYLRKLLVVGSTSLIRVAKKYKGELADWINALRARKPERFVSVALANKLGRIIWAVMTTGEAFRKEKFAKA

SEQ ID NO: 199445 - protein, 411 aa, unidentified
MEVVHERCCGLDVHKKTVVACVITPEVWGKARLVRTFGTMTKGLLELVAWLESQGVSQVAMESTGVYWKPVFNLLEAAGLNAILVNAREVKQVPGRKTDVKDAEWIAELLRHGLLRPSFVPPRDQRELRELVRYRRRQIQERAEEAERIQKVLEGANIKLSDVATDVLGASGRAMLRAMIEGESDPRVLAGLAKGQLRKKQAMLEEALRGSVGLNQRYLLARQLEHIEFLDRQIAELDARIEEQTRPFEVQAALVDEIWGIGRRTAEDLLAELGTDMSRWPTAKHIASWAKVCPGNNESAGRQFSGATGQGNPWLRATLIEAAENVKRNPESYYSALYHRIARRRGKNKALVAVAHSLLIAIYYMLRDGVHHHDLGSAFFDGLGQTQERMVAIHCRKLERLGYEVKLVKVA

SEQ ID NO: 199446 - protein, 393 aa, unidentified
MRKPEQQHKPLNDLSRSLTPFDPNRTLIGVIELSKKSWLVAGMIPGVERQPLKKLAADENELLELLERWRAEAEKAGHKINRIAVAFETGRDGFWLARWLRARGIEAHVIHAASVAVSREHRRAKTDRLDTQQLMRAFLGWLRGERQHCKMAAIPTLEDEDAKRPHRERETLVGERTTIINRLKATLTRLGIRNFNPKLVKAPERLEHVRTPEGEPIPPNTQAELLRDMQRLRLVREQIGQIEKARLEHLKRNPNTGPNLMVSILARVIGVGIETADMLVQEVLSRNLRDRRAVARYGGVTGSPDESGSRSREKGLARSGNARVRRGMIQLAWRFLEFQKDSALAKWFRARTENAPRSRKKMIVALARKLLIALWHLVRDGVVPEGVVLRPAH

SEQ ID NO: 199447 - protein, 450 aa, unidentified
MTIEMSFVDSALRGWKSNVERADKLFGALSPEQLEKEVAPGKNRLIYLWGHLAAVNDGLLALLGIGERLHPEFDGMFISNPDKSVQLTVSGQSLKGAWEEINHIGMDVHQATISAAVRDSTGNLVMEAIFETKAETILQFIRGLRGNLSVTFEEGTWAAWLCDLLQPHVARVTACDPRKNALLKAGNKGNRIDARKLSELLYLNKLNPVYHGEAGIRTLKELARSYITMTRDLTRVMSRLKAIYRSWGIPCAGQQVYAPRYRAEWLAKISEAGVRRRGELYYQQFDALAVLRQGLRRELLAEGRKHLNTRLLQQIPSIGPIRAVLPLALMQTPNRFRTKRQLWAYCGSALRTYGSGEYRIVGGQFKRAKKVLVVRGLNLNHDLKNIFKGAATRAASTAGPFQDVYQACVARGVKPHLARLTLARKIAAITLLVWNKGARFDAEHLKQQAA

SEQ ID NO: 199448 - protein, 402 aa, unidentified
MKTCLAIDVSKGSSHFQSFKAMNEPISKVFYIEHTSDGFCTLINEIKRIKNEYNEIPMILFESTGIYHFPLKSLLDEYNLNYVIISPLLSAKVRKSDIRGVKTDVKDCASIASVYYVKKLIVHRKYENLYDILREKSRFYDYLSNNLKKWKVEFRRLLDIVFPRLDEEFENIYTDYMLNILLKYSHPDLIKNTSSDELLKYITEKTNHRTSFCIKQIERLKRYSLNYKSGCEQNSFYVKQLKKIVFILQKEIQDKDEAMFELVKDASKHPNYECIRSIPGISDNLGSRILAEIGDISRFSNYKKIIAYAGIDPMIYQSGERKGEHLNISKKGNKKLRYLLFIAVASMVKTNRDTSIVSYFYKKRNQGLKNKEALVASMNKLLRLIYCLCKNGLIYKKILFEI

SEQ ID NO: 199449 - protein, 590 aa, unidentified
MKLGPLRSWARCGPQRAGVVAGSGGHGGREGCKAGLACRLPSPLGFGPFEAVEKYGAGTPCWVPPAAAACACASFLLILGFCGRRAFPIRWGIPLQEVDRRMRVLYERVAGIDVHKDMIKVGIRSPGDKAWTRRSEVLEYRTFYGVLQQMAADLSKRGVTHVVMEASGVCTEPVYYALAERDFDEVAVISQAHARALKGHKTDARDCLRVAELFGCGLLRGSCIPAAGLKEVRDLTRYRTRTVQARTSEIQRLARALESAGIKLGSVASELTGKSATAMIEALIGGERRGRVLAGLAIGRMRTAGKLSDLSRALTGRFTDHHALLCRLHPGRIAVFDTAVAGLEDTIALRAARWQREQDLLRTVPGFGDAVACAWLAEIGPAPHAWFGSHEKLASWVTLCPGSHISAGKRKHGRTGDAGTYIKPMLVNAAWAAVRTPGRLQAKYGRLVRRFGGEKNPAAKKKAITAIARTLLKIACQVLRSGKPYEDLGADFYTRRESPEQRQAYLMRQLQKLHPGCTVTWPGQSCGLRSSLSDLLRRLPARTPSARLPDGAGPARGVQGCRPPGAPAPERVAAPPDRPGPLPAGRPAAS

SEQ ID NO: 199450 - protein, 373 aa, unidentified
MNHDSGAYVGIDTSKLRNAVAVAEEGRGGEVRYFGEIDPTEAATRKLVTKLAAKYCQLTFCYEAGPTGYGLYRLIRKLGHDCIVAAPSLIPKKPGDRVKTNRRDAVGLAKVLRAGELTAVWVPDERHEAMRDLSRAREAARKDLKGKRQQVSSFMLRLGRHFPGKKTWGPAHMNWLMLQKIEHREQRIVLEELLGAVRQESERVERLEQAIRDAVPEWSLAEVVIALQAMRGIDLVSAVTVMAEIGDLSRFQNPRELMGYLGLVPSESSTGDTVKRGGITKAGNGRARRILVEAAWSYRYPPRVSREKQMRVEAAPRAAREIAWKAQMRLCGRFRSLTRKGKRPTVVATAIARELAAFIWAINREVMAHATAS

SEQ ID NO: 199451 - protein, 425 aa, unidentified
MPYRIAGIDVHKKMLAVVVADVEVDGDFHFARQKVGTTPADLRGLAEWLLEQEVEEVVMESTAQYWRPVWEALEQHWRPCRRTRDGASRLAGTLHLAQAQSNRGPGGRKKDFPDAERLVKRLVAQELTLSFVPDTEQRLWRTVMRRKYQITRNRVQLHNRLESLLEEAHIKLSSLVSDLLGISARRMLQALADGETDPAALAALAASRLRATPEQLCDAFQACPTLHPVYRRLLKLTREELHVIEDHLGQLDQQMADLLAEHHDAVQRLAEVPGLGVDSAQQIIAEVGATAATFPSPKHLASWMGACPGNEESAGVNYSHRCPKGNRQMRRVLNQAANAAVKARGTIFAVVYRRLVPRLGHAQAIGAITHRLCRLIWKILHERVRYEERGPAVSAEAKKVRARKMIRELRSLGYCVELVAPSPTV

SEQ ID NO: 199452 - protein, 391 aa, unidentified
MIYVGIDVAKDKHDCFITNSDGEVLFKAFTITNNLDGFNDLYQKIETVMKDITKVKVGLEATGHYSYNLLGYLIDKGLPTYVINPLHTNLYRKSLSLRQTKTDKVDARTIASMLMSDVNLKSYSDISYHNEELKSLTRYRFDKVKERAKLKTSVSRLVCILFPELEKLVPTLHITSVYALLSEFPGAKHIATAHLTRLTNLLSEASKGRYGKDTAITFRDAARASIGSNMPAKSLELKHTIKLIQELDSEIDEIENEIKIIMDEINSPILSIPGINYRMGAMIIAEIGDFNRFDSPDKILAYAGFSPSTYQSGQLDGAYAHMEKRGSRYLRYALYNATKYVCHWDPTFAAYLAKKRAEGKHYNVAISHAVKKLVRVIYHLEKTKQQYIKAA

SEQ ID NO: 199453 - protein, 339 aa, unidentified
MEPKYVGIDLHSTNNYIGIIDQEDKRIYGKRHRNNLDEVLAALGRFKDDITGVVIESTYNWYWLVDGLMDNDYKVHLANPSAIKPYEGLKFTDDKWDSFNLAHLLRLNILPEGYIYPKEDRPIRDLLRRRLLFVRQRTAQILSLKGMISRVTGNNVSSAQLKKKKHIDVKDLFLDDVSIITATHHFSIIEQLNNTIKQIETDVLSLLGLRKDFRLLNTIPGVGLILALTIMLEVGDIRRFKKVGNYSSYARCVSSDCFSNGKKKKENNRKNGNKYLAWAYVEAANFIIKYSIDAQKFYQRKMAKTSRVVATKALANKVARASYYIMRDQVEFDSSKLFS

SEQ ID NO: 199454 - protein, 370 aa, unidentified
MKETITSFVGLDIHKDSIAIAVAEAGRSAPRFVGTTVPTLASLYKALSRCAQPKRALVVYEAGPCGYGWARHLHAHGWRCEIIAPTSIVRSAAEKRIKTDRRDALLLARESRSGDLIKVVMPDEGDEAIRDLSRAREDAGAARLRARQQMKAMLLRHGRDYHGKSSWTQAHERHLATIRFQHPAQEIAFNEYRQAIKDADERLERLTQALREQCTEWRMNPLVKALMCMRGFEFVAAVTFIAELGDLSRFAHPRALMAYLGLVPSEHSSGNTRHQGSITKTGNKHARRILVESAWTYRFKPQVSRVLQVRQQNQPKTLRDIAWKAQLRLAKRYRTLSMGRRLPQNKVCIAIARELAGFIWDLARHTKLAA

SEQ ID NO: 199455 - protein, 358 aa, unidentified
MKQYVGLDVSQKETSVCVVDEVGQILFEGKAKSAPGALAALLRKRARQAERIGFETGAMASWLWHELRRVDLLVVCIDARHAHAALSVRMNKSDQNDARGLAELVRVGWYREVKVKSEESQKIRAILVARSRLVSMRRDIENQVRSLIKEYGLLFPRAIGQQFRNLVSELLGDNHPLLSVISPLLLIHEHICQQQNKFDDEVRQLAKADETTRRLMTVPGVGVVTALTFRHTIDDPLSALTVGAYLGLTPRRNQSGETDINGKISRWGDRLLRTYLFEAATVLLYRTKKWSSLKAWGMKLAKRIGMRKAKVAVARKIAVILHCIMAHPSTGGSRSQSDICSQVPGPVCRTGDVPLGRC

SEQ ID NO: 199456 - protein, 344 aa, unidentified
MDSYVGLDVSLREVSACVVDEAGTIQFERTLAADPDVIAAWVHAQAPTVRRVGLESGPTSAWLWRELAKRGLPVICIDARHAKAALSMQINKSDRNDAAGIARIMQTGWYREVQVKSPHSHAIRGLLNSRSLLVKVQRDLENQVRGLLKSAGLIVGRAKDGVFSARTKQLLAAHIDLAAIALPLLEAREAIHQQLVQLERRVRQLAKEHRQTSAFMTVPGIGPMTALAFLATVDDPTRFRRARAVGAYVGLTPRRYASGEVDWTGRISKCGDTMLRTYLFEAAGVLLTRVQKWCALKAWGLRLAKRSGMKKARTAVARKLAVILLRMWRDGTQFHWTAAPPAAS

SEQ ID NO: 199457 - protein, 410 aa, unidentified
MRYHLGVDWADQTHAVWVVDERGTKITARTVPHTAEGLSEWGRELDEWRAHGIELWAAIERPEGRVVDFLLDHGIVVYPVNPKALDRARDRFRQSGAKDDPFDARVLADFLRTDHAHLRPLRPSSEAAQELKLLTEDYQRQVRQQTRLVNQLTITLKAYYPRALEVAELTTGLAQAFLQAYPTPAAVAALTERQWQRWARAHRLSATRTRELWEVLQRPQLPVPAHVVRAKARLLRSLVAQLTPVVAAVGEYREAIEDFFARMSTAQWIRTLPIGDHGITAPTLWARLGDAPGRWEAFRHLQAQAGAVPVTKRSGKQQRVVHFRVACDKALRYVVDQVAFLSLRSCEWARAYYDQQRGRGHSHRRALRALGAKWLKIIFVMWQRHASYDEPYHLATMARQQLRQPQTKIA

SEQ ID NO: 199458 - protein, 411 aa, unidentified
MDVLIERCAGLDVHRDTVVATVRRPGPGGARRSETRTFTTMTGQLEALAEWLTAQDVSLVGMESTGIYWRPVYYVLEDSFPVWVINAEHLRNVPGRKTDVADSMWIAQLIEHGLVSPSFVPPRNVRLLRDVTRHGRRLTEERTRAIQRLEKVLQDAGIKLTSVASTILGKTGRAILAALLAGEEDPAVLAELAKGRLRPKIPALREALTHRFRLEHHGALIAQMLAHIDFLESAILETHQRTEVLLRPVADIVELVMTIPGVGRRTAEVLIAEVGLDMTVFPTAGHLASWAGICPGNNSSGGKHRPGRTRHGSMWLRIALTEAAQVAARGKNTYLAAHHAQIRGRRGTQKAIGATRHDILIAYYHIVRDRVPYQDLGPDWNDRRRSTEQQTRRLVRQLERLGVTVTINSGA

SEQ ID NO: 199459 - protein, 348 aa, unidentified
MSPTNMHQYVGLDVSLKETSIRVIDEAGKIVWRGRRDSTPEAIAEAIEKHARHAVRIGLESGQLSTWLYHGLKERGLPVICIDARHARAALSLKVNKTDDNDAEGIAQIMRVGWYREVTVKGLDCQAVRALLVARAQLVSQITTLKNCVRGILKTFGLIVRKRLRSQFSQHVREAIRANPVLAAIVEPMLRVLETTRDQLRIYDRAVIRRARGHETARQLMSVPGVGAVVVLAYMTGVEDPVRFRRSSSVAAYFGMTPARYQSGEVDRAGRVSKCGDSMVRGLLFEAAKVLLSRLARPCALQTWGRALAERIGGKKATMAVARKLAVLLHRMWSSNTTFRWPTGALAP

SEQ ID NO: 199460 - protein, 337 aa, unidentified
MNYSGIDLHSNNSVITVIDEADRVVAERRLPNDLTKILAFLTPWQAQLAGVVVESTFNWYWLVDGLQAAGFLVHLANTTAIKKYDGLKHSDDETDARYLAHLLRLGILPTGTIVPPEERTVRDLARKRMQLVRSRTSHILAVENITARHCGTRLSSAQVSRLTAEAIDQMGLPTDVGLAIQANVAVIATLSAQIELLEERLQEKVKPRADYALLTTVPGIGQILASVILLETGPIERFASAGNFASYARCVDSQHLSNGKKKGEGNTKNGNKYLSWAFVEAANFAMRFCAEAKRLYERKKAKTNPIVARKALAHKLARACFHILKDRKPFDVTRCFA

SEQ ID NO: 199461 - protein, 349 aa, unidentified
MPCQAHHIGVDVSTAHLDTHGLPGRGVRRRLPNTPESHTELAAMLSALRQGGGDVLVVMEASGGCERGLHHALVEAGVPTAIVNPKRVRDFARSNGWLAKTDRVDAKVLKVFGETNRPRPTPVPEPIRAELMELLDYRTQVLAEVLARSQQLEHYRSEAMREHAGAALAALKAQVDSLAVDIEMTVHGDAELSRRAELLRSFKGVGPLISADLVAFLPELGTLTEKRIASLAGLAPFACDSGTLRGVRRIHGGRAKVRRALFHAARVGLRWNPALKALYDRLSARGKPGKVALVACVRKALVILNAILKTGEPWDPDFEAKRTEARKAAKAALRQTGPALADPACATAA

SEQ ID NO: 199462 - protein, 414 aa, unidentified
MASEVMRWFAGVDWGSERHQACLLDAAGKVLGERAFAHGGAGLAALCDWLVSMAGDPSSVAVAIEVPHGPVVDTLLDRGFAVHAINPKQLERLRDRFSVAGAKDDRRDARVAAAGLRTDPHLFRLVQVSDPSVIALREWSRLSEELQQERVRLSNRVRQQLWRYYPQLLELASDDIAAEWVLELWTMAPTPAQAARLREATLARLLRRHRIRRLDAATALGVLRQPAITVAAGVTEAAVLHLRSLITRLRLANQEFCQAEGKLEELCTTLTESVPAAAASGPSDAAILRSLPGVGTVTLATLLTEAAGPLARRDYAALRTLSGVAPVTKRSGKSCVVVMRYAAQLRLRQAVFHWARVAVQHDPKSRARYAALRARGHSYGRALRAVADRLLGVACVLLQRQTLFDPDHGAPAAP

SEQ ID NO: 199463 - protein, 389 aa, unidentified
MKKNTTTNKRIETEANTQSERITEMSATQKLTVGLDLGDRSSRYCILDEAGKVVSTGAIPTTRAGLEGQFGKMAGSRIAMEAGTHSAWVSRLLGTKGHEAIVANAHEVKLITRSKKKNDRVDAEELARLARVDPELLSPIRHRGKEAQADLAVIRARDQLVESRTALINSARGLVKPFGERLKGCDADGMGETKAEGLSAEAREAIGPLLKAVEEISRQIGEYDRRIGEIAKRYPEMKLLTAVYGVGQLVGLTFILTIDDPKRFTHSRDVGPYLGLTRRQKDSGDSEPDLRITKAGDGLTRKLLVQAAHCILRKGAPVSDLRAWGEEKIDNGAKGGKKRKKRAVVAIARKLAVLLHHLWVTGEVYDPLYNRKAEAAATRKRERAGKVAA

SEQ ID NO: 199464 - protein, 356 aa, unidentified
MTIVAHSRSFVIGVDTHAKTHTYAVIQTASGQLLGCQQFPTTPQGIARAIAWVGRLTGGVAETLWVIEGVATYGAKLARAAAESGYEVAEAPRMNAKARHGIGKSDPLDAHAIATAVLPLEEDRLRRPRADDGTRQALRVLVTARDQLAQEKTMNVNALTALLRTNDLGIDARKPLTAAQIGQASRWQHRTEPLALATARSEAVRLARRILELEDALTVNHARLSELITASPAAPLLEETGIGAYTAAVVITAWSHPGRVRNDAAFAALAGVNPIPASSGNTTRHRLNRGGDRRLNKALHYIAITRMSRHPGTKAYLEKRLAEGRSRREIRRCIKRYLARHLYRTLNTLYAAPETS

SEQ ID NO: 199465 - protein, 360 aa, unidentified
MEQIKSIKEDCLLEAPLIFVGIDVSKAQLDVAIRPSAQSLSVTNDRAGIKSLIKHLKKLRPQLVVLEATGGLQRQVLSALIAGEIPVVMANPRHIRDFAKSIGQLAKTDRIDASVIAHYAEAVRPKPRPLPDEASLELRALSARRRQVVDMIVAEKNRLATASKVVKKRITAHIAYLEQELNDADQDLDRFIEKNAAWKQNQQILCSTPSIGPVSSRTLLVELPELGALDRKKISALVGVAPFPRDSATLKGRRTIWGGRASVRSALFMATVVATRFNPVIRDFYKRLKAKGKPSKVCLVACMHKLLTILNAMIKNKIRWSENLLTRPLDMKHSCYISGLRLRLARSCTGEFIPSADCGF

SEQ ID NO: 199466 - protein, 378 aa, unidentified
MNRIIKIGMDVHTTNYTLCIFEPSFENKGTVHFVTQVKPNVKNIVRVIDTFKRKNENDELRITCGYEAGCLGYSLYRELKDKGIDCVILAPTTMKTEKGGRKIKNDYRDAKMIAECLAYGGYSAVHIPNELDNSVKEYIRMRDDIHENLKKIKQQIISLMTRNGKQFDGKSYWTKKHLDWIKATAFQEEFLNETLDEYMIEYHHLIDRVEAHDKRIEEISTKEEYVEKVQQLQCLIGIKTHTALSLIVETSDFTRFTKGNVFAAYLGLIPGEDSSGEKENRLSITKAGNRHLRKLVVESAQGYTRGQIGFKSKDLKARQSKCSNEVIAYADRCNERLRRKYYRMIARGKSYNVAKVAVARELACFVWGIMTDRMELSK

SEQ ID NO: 199467 - protein, 342 aa, unidentified
MNKVYVGLDLGSSSFQQAAINQDGVTIMNRSYPTSEANLRIAFTGLRGEIHVHLEAGELAPWAAAVIAPLVKRVVCSHPRDNAWIAKDNDKCDRVDAYKLAGLSYLNRFKQVHYAPDQPRRNFKQLVQHYDELTAHQARWKTKLKARLRMQGVIVTGERLFSGGGRTAVLARVESRDVRTAIKQLYEVLDQSVAAQEQARLLMLRAAQAFPEIKLLRTVPGVGPIGACRFSAYIHTPQRFSSKRKLWKYCRLSVSHRSSNGKPLRRPKLDYSGCGRLKDVSRKAFEVALRSRTDNGFKRTYQRALETTHDKTHARLTVQRKILSTLRAIWLTRTPYREELSR

SEQ ID NO: 199468 - protein, 404 aa, unidentified
MFYAGIDWADQKHDGLVIDETGRKLSAIRVAHTPEGLEKLDTWLSQILGEHSREQMACIIETTHGLLIAFLLEHGWPVYPVNPRTVDRKRSASGAKTDLIDAYLLAKTGRSDFADLHRLTPDSEKVAELKALTRDQDSLIQMQTRLVNQLTACLKDYYPVALHLFSKLQQKSTLLFLQTYPTPQKAMGASVQQMTQTLKQAGHTRAETTAIKIFETLHQPHLYATAVTTRTKSRLMLALVAQLLPLIEQIAAYDEEIEHLFLSHEDNEVFNSLPGAGKRLAPRLLAEIGDDPHRYGGAASLQALGGTSPVLFQSGNYSKPHRRLGCIKPLRNAVHQFAWQSTQQEAWAKAYYERKRAEGKSHSVAVRALSNIWARIIFALLQSHKPYVSATFEQARQLHAPKVA

SEQ ID NO: 199469 - protein, 347 aa, unidentified
MGNASPVGQWVGVDLHARRSVICRIDDAGKELSCKQVDNDPKVLVREVRRAGRGVPVAIEATYGWYWAVDALQAAGCQVHLAHPYGMTAMRKRKRVKTDAKDAYELANLLRLGSLPEAYIARPELRELRELVRHRQRLTQANTAVKAGIRGVLAKHNIHLPVSDLESALGTRLLDQVSLMPAYAHRLDSQRRQMLLLEAEIGATEVELDKRLKHQPGYRNLQKIKGIGPVLAAVLFAEIGDVTRFDGPDQLACWAGLTPRHYASDRTTRRGHISKEGSALVRWAVVEAVQRPCEPSVRALRERILARRGPGGRNIAKVAAAHRMLDIVSYTLRDGTSRAFQDTRNAA

SEQ ID NO: 199470 - protein, 346 aa, unidentified
MYRDKDIILAVDYHAENTEVRWLNCASGEERTLRIPTTRGGILRLVETAVGEAGRVGGQVTWIMESTTGWARVKELIGSRVQFILANVLQMPLPPKAYRRKSDKIDTGRILREFLNGSLPQSHQPTAWWREVRRLVDSRQDLVERQTAVKNWVTHFLHHETWYDREGLWTQKGMKRLRALRLSASDRTVLDLKLQELDQLAQRRGQMEAAMQKVYDQWPEAQWVDEVRGIGMVTAVSILSHIGPIDRFPSAEDLISYAGLAPGHRQSDQTAHNGKIGGGGTDSQLRYLLIESMQWVCQIPRYRPAFERAQARRGTNIARIIVARMLLRSLFKVLRDRVRFNQVQAA

SEQ ID NO: 199471 - protein, 403 aa, unidentified
MNMNAVGIDVSKGKSMVAILRPYGEIISKPFEVKHTVSGIRSLIEHIKAIDGESRIVMEHTGRYYEPLVRELSQADLFVSAVNPKLIKDFGDNSLRKVKSDKADAVKIARYTLDSWSELRQYSLMDEIRNQLKTMNRQFDFYMKHKTAMKNNLIGVLDQTYPGANTYFDSPAREDGSQKWVDFATTYWHVDCVRKLSLNAFINHYQKWCKRRKYNFSQSKAVEIYEASKEIVSVLPKDDLTELIIKQAVEQLNMASRTVEQLRTMMNDAASKLPEYPVVMAMKGVGKSLGPQLMAEIGDVSRFTHKGAITAFAGVDPGVNESGSYEQKSVPASKRGSGTLRKTLFQVMDALIKTKPQDDPVYLFMDKKRSQGKPYYVYMTAGANKFLRIYYGRVKEYLSSLPK

SEQ ID NO: 199472 - protein, 344 aa, unidentified
MQISILGVDIGKNSFSIVGVDGQGAVILRRTMRRQTLIDFVEKLPRCVIAMEACCGAHHLGRLFAAAGHEVRLMSPEYVRPYVKAQKNDDRDAEGIAEAASRPTMRFVDLKSQEQLDIQTLHRVRSRLVAERTTLINQLRAILLERGVVFPAGRVKFESALDDLIAGGNDVLSPRIRSLILELRDEWRRLDQKIETLNTEFVALAKQNSAMRRLTSIPGIGVLNATALVAAIGDASSFQHARDLGAWLGLVPRQFTTGGKARLLGITKRGNTYLRTLLVHGARAAMHTLSQSDTPIGQWLRAMLSRGVARNVVIVALANKLARIAWAVLRKGLPYERSYGVAVN

SEQ ID NO: 199473 - protein, 377 aa, unidentified
MKKTKTTTQLEIDMPHNPNKLFVAFEMGNEKWVLCFCDGKRLRHRQVDAGAQSAVLKEIGLAKEKLGFEKDCEVHSCYEAGRDGFWPHRFLEQQGVKNRVFDPASIEVDRRQRRKKTDRVDAEKLVRLLMRIVLCGEKKVCAEVRIPTPEQEAVMRVHRERERLVKERTAHRGRLRSLLCLHGIKLKSVDRLVPGALRDWQGQTLPAEMVQELEREVQRLQQIQEQVEAVEKEQRQRLKEPQAKETQKAAQLMVFKGVGLQCGWLMAHEFFWRQFNNRREVGACAGLTGSPYDSGESERELGIGKAGNRRVRTLCIEMAWNWLRFQPQSQLSQWFLKKFAQSKRSKRVGIVALARKLLVALWKYLHFGLVPEGALLK

SEQ ID NO: 199474 - protein, 402 aa, unidentified
MNAVGIDVSKGKSMVAIMRPFGEIVSAPFEIKHTASGINSLVELINSVEGESRIVMEHTGRYYEVLAHQLSKANLFVSAINPKLIKDFDNDSLRKVKSDKADAVKIARYTLDKWQNLKQYNVMDELRNQLKTMNRQFGFYMKHKTAMKNNLIGILDQTYPGVNTYFDSPARSDGSQKWVDFASTYWHVDCVRKMSLNAFIDHYQNWCKRKKYNFSQSKAEEIYGKAKELVPVLPKDAITKLIIKQAVDQLNSASTTVESLRTLMNETASKLPEYPVVMAMKGVGTSLGSQLMAEIGDVSRFTHKSAITAFAGVDPGVNESGSYEQKSVPTSKRGSSDLRKTLFQVMDVLIKTHPQDDPVYQFLDKKRAQGKPYYVYMTAGANKFLRIYYGRVKEYLSSLPES

SEQ ID NO: 199475 - protein, 409 aa, unidentified
MLFIGDDWAEAHHDIEIQDEAGRRLVRRRLPEGVAGIAALHAAVADHLGEGEPADVVVGIETDRGPWVQALIAAGYQVYAINPLSVSRYRERHVTSGAKSDPGDAKVLADLVRTDRHQHRPVAGDSELAEAVKVLARTHQNLIWSRQRQANLLRSTLREFYPAALSAFDDLHGRDALAVLDLAPTPARGRALSRAKIASALQRAGRQRNIPALAEAIRTALRTEQLAALPAVEVAFGHTVTALVRVLAELTRQIEVLEGELTAHFDRHPDSEILRSQPGLGTVLAARVLAEFGDDPHRYADAKARRNYAATSPITRASGTRRVVLARIAANKRLRDALYLQAFAALRASPGARAYYDAHRARGATHHQALRALANRLVGILHGCLRHHTDYNEATAWPTTALQDLPAAA

SEQ ID NO: 199476 - protein, 322 aa, unidentified
MSVWVLGIDIAKQKFDVALLIDGKTKHKVCKNSAEGFEILRLWLEKQKTQKVHACMEATGNYGEDLAIYLHDAGHIVSIVNPARIKGFAQSELIRTKTDKLDAALIARFCLAMKPGPWSPPSPEIRSLRALVRRVDSLIDMRSQEKNRIGTAHKSVVLLIKKHIAYLDKEIERIRKQIADLIDQNPDLKRKRDLLDSIPAIGKATIPHILAEIDDLGKFDHVRQLVAFIGLAPKETLSGSSIKGKPRLCKIGHARLRKALYMPALVSIQCNPVMIMFYNRLKDKGKNGKVIVCAIMRKLVHVIFGVLKSGKMYDPNYKPISA

SEQ ID NO: 199477 - protein, 369 aa, unidentified
MKKDSTLYVGLDLHKDSIVAAYASSEGGDPVHLGAIGTRQCDIDALVRKLQSKGARLVFVYEAGPCGYWLYRYLTGKGLACLVVAPSLIPRKPGDRVKTDKRDALTLARLARSGDLTPVYVPQVADEAIRDLARAREDALGDLNDARFRLKALLLRHDIRYTGRANWGDEHRRWLARFVFPTPAQQIVFQEYVRTVTERTELLGRLEAALLEQAKTWRMYPVVEALQALRGVQFTVAIITVAELGDLTRFEHPPELMKYLGLTPSEYTSANRRRLGGITKAGNGHARRALVEAAKAYRHRAKVSEQIQARQQHLPRAICDIAWRAQVRLCGRYRKMLARGKHPNTIAAAVARELIAFMWAIAKEQPVAA

SEQ ID NO: 199478 - protein, 388 aa, unidentified
MIYVGIDIAKLNHFASAISSDGEELIKPFKFTNDNDGFQLLISKLDPLDKDSLIIGLESTAHYGDNLVRYLVAKNYKVCVLNPIKTSTMRKNNIRKTKTDKVDTYIICKTLMMQESLRFVTFYDLDLMDLKALGRFRQKTIKQRTRLNIQLTSYVDEIFPELQYFFKSGLHQKSVYALLKEAPTPETIASMHMTHLAHLLKVNSHGRFDKEMAQQLRVLAQKSVGASDSSLSIQVTHTIQQIELLDSQLERVEAEMTEIMKFNDSVIMTIPGIGYINGGMILGEIGDIYRFSSPNKLLAYAGLDPSVYQSGNFQAKKTRMSKRGSKVLRYALVNAAHNVVKNNATFKAYYDAKMAEGRTHYNALGHCAGKLVRIIWKMMTDNLEFNLD

SEQ ID NO: 199479 - protein, 327 aa, unidentified
MKYYTSTTEFNCGIDLHARQMYVCVMDRQGKKLVHTNIKGNDFEFFLGRIEAYRHNLTVCCECMFGWYWLADACQAAGLTFVLAHALYLKAIHGGKNKNDRIDPEKLAHLLRSNLIPPAYVYPAEKRPLRQRICYVWRRTELLNRIQSHQLAHNRPSVRCTTRYNRDPWEKLILESETHPLRQLALQTDMAMIRHYDAQIQTLETKLVGLAKEQAPREFALLLSVPGIGENLGLTLLNEIGGIERFPTVKDFLSYCRLVKGTVASAGKIKGLGGARLGNPYLRWAFGSAEKRSIIQAARKAGSPYTDWARSVLLSAARRVASPAAKK

SEQ ID NO: 199480 - protein, 424 aa, unidentified
MFVLEETQDEQEIIQRVAALDIGKAELVCCVRLPDSTGGSRRVQEVTTYSTMTRSLQLMADRLLDLGVTRVVMEATSSYWKPPFYLLEAHGFQTWLVNAKDVKHLPGRPKTDRLDAVWLCKVAERQMLRPSFVPPVPIRRLRDLTRYRIALVSDQGREKNRVEKLLEDAQIKLSVVASDIFGVSGRDMMAALIAGERNPQVLAQMARTRMRTKIPQLEEAFVGYFTEHHRFLLAKMLARIDALDADIADVEAEIDAQIAPFAAAVARLDEIPGVGATVAAVIIAEVGVDMTRFPTPAHLCSWARFAPGVKESAGRKKGTGSTGHGDRYLARVLGEAAVGTSKTNTFLGERYRRIARRRGKKKAVVAVGRSILVIVWYLLRDDAVHFHDLGPGYYDSRINPERKKRNHIRELEALGYRVTLQPAA

SEQ ID NO: 199481 - protein, 367 aa, unidentified
MNNTIVHHEGATSLEAVGKRIKLNAAVIKIGLDVHACVYVAVVQYDHLLPKAARRLKPNEFVPWVETLLGQGHRVHVVYEACGFGFTLYRQLIAAGAHCYVIAPRKLDDEGTRVKTDPRDATTLCQRLSRYLEGNTRELAVIRVPTEEQEQARHVTRQREQLVHHRQKLEAQGRSLLVNHALPAPAHWWKEQTWSRLSKHLPQWITLRLEVARPALLSLQEQINTLTSELETAAPLNIPRGLGKLTSVVLTREICDWHRFNNRRAISSYTGLCPGERSSGSKRVPGSVTKRGNPRVRAALVECAWRMVRFQPLYPPVQKRLAILAKGSRALGAVRKKAIVAVARRLAVDLWRVHTGRKTAAQLGLTI

SEQ ID NO: 199482 - protein, 454 aa, unidentified
MAKQKKAKVSDKMISMPVVNPDAAGIDMGSRSHFVCVSQDNVKEYPVFTADLHEIARHLQAHGKKTVALESTGYYWRPLYVLLQDYGFEVILVNARHLKNVKGHKTDVVDSRWLQLLHSIGLLSNSFQPDVFTHQLRTYARHRKSLIEDASKYITKMNKTLVLMNIQLKVVLRDIAGASGMRVIEAILDGEREASNLEKLVSIRCESDRKDILKALTGDWREEYLFELKDCYDLYHYYWEKIRNIDKEIERLLIENSKNKPHEVSKSDYKRDKKKGHQKNDPKFNVEGFAYEMTGGVDLLQITGVGINTVLTMMTEVGFDMSKFKSAKHFAAWLGFAPNRKITGGKLLSSKTRKKTNPLAKVIRDAANSAGNSKSRLGDFFRRLSYRKGRSVAITATARKISVFIYTMLTKKQSFDYELSQEETEKIKAIKIKNIVKSMKGHAISKHELEMAWA

SEQ ID NO: 199483 - protein, 330 aa, unidentified
MGTAANAVVGIDVSKGTLDACLLTPDGKARDRAFPNDPGGFAALLTWADGHAPGAAARFGMEATGGYEDALACHLHAAGRVVSVINPTRVKYAGVMRGRRNKTDKADARLIAAYTRDEAPPAWSPPAPEVRELQALVRRRDDLRQLAAHEKARLDAPLLTPAARKSVARVVKLLGKEADAMQAAADALIAATPALAADAGLLASIPGVGTQTASTVLAELPALDRVPSAQAAAAYCGLSPREFKSGSSVRGRTRLSKSGNARLRKALYLPTLTAVRFNPVLKGFFDRLVAAGKPKMQAVGACMRKLVMLCYGVLKNRAPFDPAWASRITR

SEQ ID NO: 199484 - protein, 368 aa, unidentified
MFIERTAIGLDVHARSVRAAAIDSLTGEVIEAKLPAVNAEIGGWVAGIVDRHGAVHVAYEAGPTGFGLARALAAAGVACTVAAPSKMLRPAGDRVKTDARDALLLARLLRMDELVPVRVPTVAEESARDLVRARDDARVELMAARHRLSKLLLRHGLVYAGSVTWNRSHDAWLRRVRKDGLDHAGTGTLAAFDAAFDAVTLTLARRDRLDRQIADAAADSEFTAVTRRLCCLRGINTLTGFALAVEIGDWDRFTGRTIASYLGLVPSEHSSGGTRSLGGITKTGNTHARRLLIEAAWHHKPRYAPGKTMTDRWARASTHAAARGDAGNRRLHHRWTVLAAHKKKHTIACTAIARELAGWCWSLAVMDA

SEQ ID NO: 199485 - protein, 338 aa, unidentified
MIHVGVDLHQRFCYMTALEARGKILQAGTVTNEKLALRRYFRQFRGKEVQVAVEACGFWPAFREVVEPEVKRLVLVHPQRVKAIASAKLKNDRVDSATLAHLLRCDLLPESWKADRGTQARRQQVRLRATLVRHRTRLKNQVHAVLHQQGLRSPVTDLFGKRGRLWLAEVKLPVQARESVNVCLRLLDGYSEEIQKQNLQLSEKAKQDKRAEWLMTIPGIGECSAMMLLAEIGDIGRFQDKEALCSYAGLVPRVRESAGKAARGGITRQGSPWMRWIMVEAAQTATRCSPAAKRYYERLARKKHKHVARVALARKLLIAVYALLRDGLMFDEQKFAAV

SEQ ID NO: 199486 - protein, 330 aa, unidentified
MDSTAIDTHKESVQVHRINENTNNPVLRERYPTTHQGLEKLLTGVRGSVCVLEACSTSYPIYDFLTSNGVEVKVAHPLLLKSISGLKKTDKVDAERMALMLKAGIIPLAHIPSQQVRADRDLVRQHISLVEQRTREKNRVHALLLRYRVKAGEKNLFKKKRKWLDNGVPVEVKPVLEQCLEHIDYLNRLLYQVDKQIEKKAAAIPDCVLLASMPGVAYFSALLIVSFIDGVERFGSSEQLVSYAGLAPRIHQSGERTILGSISKQGMKEMRWALTQCAWVAIQRSKKFRKFYLKKKRKIGKKKTIIAVARKMLTAMYFMLKRREQFIDAC

SEQ ID NO: 199487 - protein, 373 aa, unidentified
MGTRVAGRRRVGKELRLLPEEVAFVGVDVHKKSYQVSVWTAGREWVAEWTQPADAAALCHRLEAVRGQVAHVVYEAGPTGFGLARLLRERGFAADVVAPSKTPVARSRSNKCDRRDSAHLARLDGKGLLSAVYVLTRQEEADRQVLRCREQLVHEVSRTQHQVRSLLLQYGVEEPAGLRHWGRAAVAELRGLELLAEVRFCLDLLLDDLEQGRGRLAAAGRKVRELAAGERHGAAVRCLRSVPGVGLITAMTFAVELPQPGRFETPEAIGAITGLAPRVSRSGESVKGGPILKCGNPRLRRVLVQASWQWVRLDPTAKGLYSHLVSESGCAQKAVVGVARHLAILLWHLVTTGSAYTPGEPASQAPEAAEAEA

SEQ ID NO: 199488 - protein, 411 aa, unidentified
MLEVKVEKCAGIDVGKKFLAVCILIGLAKQKPVGEVRRFGTSVKELERLRTWLLESGCTEVVMESTGSYWKPVFNILEGSLKVILANPEQVKALRGKKSDPNDSRWLASLLRHGLVQGSFIAPRDIRELRDLTRRRRRLVGDGAAEKNRVQKILEDANVKIGNVLSDVFGSPGQAMLEALLENKQGPAEIAQLGHWSLAPKIPLIVEALEGHRMSDHHRFMIRQCLGHMRHIEEMIEELDKEIGVRLKPYPQQVKLACTVPGIKPTAAASILAETGMDMSPEGPFPDCHHLASWATVCPGNNESAGKRKNGRTRPGNRWLRATLTPTGWAGAADKKSLFQFRYQRLKLRRGGQCAVMAIAHAQLIAIYWALRNGTPYPEQLQKLEQDRREAQIRYHLQKLNKLGYAPDMHG

SEQ ID NO: 199489 - protein, 349 aa, unidentified
MRHIGVDLHKTNFVVCFLNADDTARTETFPLTADGLSRFTRQLDREDEVAVEATQNIYHFYDRVRPRVARVAVVDTYRFQIIARSKKKTDKADAAALARFLKLGWLPEVTVPSEQTRALRQLLEARETLVSARTKLKNMGHAAFSRNGVALTRAAFASRVSRARLLEREDLPAHDLVILRACLRQIEELGQEIGALEAEIIARGKGLKGVRRLLQVHGLNLLSAISLLAEIGDIAQFETSKQLVSYAGLATSTRQSNETTRHGKITKQGRKRLRTTVIQAVLAMVNRTQTPLMEFYQKKKREKGAGKAICATARKLLTVIFVVLKKELDYWYLEDRLYNRKLRALNAAA

SEQ ID NO: 199490 - protein, 362 aa, unidentified
MSVYGIDLHSDKFTVAKIVVKNEQFHEVISTHSFKAESYERFLGSLREDDYVLVENSTNAFWFHDQVAGRVKRCFVYDTNDIRASGNKTDKIDARHLLRKLSFYLVMGEREKDLATVYVPDAEIRELRGLFTTYRLYNKMKVQLKNRVHSILKQNGICIDRGSIDRKGFETRIADFEISEVWKLQICSAYRELQSVTAEQKHIMEMIYLRGNKRFGREIELLMGIRGFSAFTAIALMSDVVDVARFPNAKSFCSYLRATPKIRSSNQTTHVGQVNRQSRPLTCTLLTQSVYQLSQAGEHMAEFYARVKVGKSAGKSRIALIRKVLVSAYHMLKKNQHYAWLEQELYTGKLKTFRRALERIAA

SEQ ID NO: 199491 - protein, 309 aa, unidentified
MEVLIPNCAGMDVHQESIVVCAMHTKDDGSVESEIRTFGTLTKNLFELLEWLESKSISHVAMESTGIYWKPVYNILEGYFDVTLANAQRIKNVPGRKTDVCDAEWIAKLLRVGLIERSFVPSEDLRELRDLCRLRKKRVGNLTAEKNRIQKYLEASNVKLGTVISDVFGVSGRNLLQRLIKQGYIDAPDIDDCVKGTIRNKKQLVADSLVGTITTHQMELIRDCWEHIAFLEKSIASLEAKIESHLQPYHEEYELLQTIPGVSEATAASIIAEIGVDMNQFPSAEQLSSWAGVAPGNHESAGKKKVQRA

SEQ ID NO: 199492 - protein, 423 aa, unidentified
MKPLAAPPFTAFVGIDWADTKHDICLQAGIDAPREFACIPHKVPDIHQWAQSLHQRFGGPIAVALELAKGPIVYALQRYDFLVLHPINPLTLAKYREAFKPSRAKDDPTDAELALDLLIRHPDRFAPLKVQSEGLRILLSLTEHRRELVDDKTRFTNRLTNALKQYYPQALDWFEQRDTLLYCDFLTRWPTLAQVKKARQTSLRTFFHAHNSRYPAVIEGRLDAIKAATPLTEDKGVITPCRLQVLALVEQLRTTLLAIDGFDRQIAELAPTLPDYAFFQALPGAGPHLAPRLLVAFGEQRERFESAASLQNYAGIAPVTERSGKKSWVHWRWQCPTFVRQTFVEWAAQTIDKSFWAGAYYRQQRAKGSSYPAAVRALAFKWIRILYRCWQTRTSYDESKYLNALRKRGSPLITNLPLNAENA

SEQ ID NO: 199493 - protein, 363 aa, unidentified
MFTERTSVGLDVHARSVAAAAIDGVTGELIQTRLTPSHEHILSWLGDLPGPVAVAYEAGPTGFGLYRALTEAGIRCEVVAPSKLQRPAGDRIKTDAKDAVHLARLLRLDEVTSVAVPSADQESARDLVRAREDCRGDLMRARHRLSKLLLRQGLVYNGGQAWTGAHHTWLVHEARPRLTQRPTLMAFESDYETVMATLARRDRLDAAIGAMAADSEFTDVVRWLGCLRGVSTLTGFGLAVEIGDWHRFTGNTIGSFVGLVPSEHSSGASRAQGPITKAGNTHARRLLVEAAWHHRPQYRIGKTMQDRWNLAPAQARLRGDAGNRRLHQRWVRFLQRNKRGTVANVAIARELAGGCWSLAVMQE

SEQ ID NO: 199494 - protein, 338 aa, unidentified
MTVVTIGIDLAKNVFAVHGVNAAGKAILVKPLVRRAKLLELIATLPSCLIGMEACTGAHYWAREFQKMGHTVRIMAPQLVSPYRMGGRHGKNDAADAAAICEAVARPNMRFVPVKSIEQQGQLFVHRAHQGYVSERTALINRIRGLLCELGIVLPQAFKAFLSGVAQVLEDLPGYCNQVIGDLLNELFHIEEKIKNSEKLIQQLARDNSAAQMLMQFRGIGPMTATEIVASIGNGHDFRNGRQFSAWLGLTPRQKSSGGKARLGRITKAGDSYLRTLLVLGAKSVMSEAAKNDDPVSKWALQLKERRGYGRALVAIAAKNARMCWAMLHLKDEFRFPA

SEQ ID NO: 199495 - protein, 412 aa, unidentified
MQDILECCMGLDIHRDTIVACLLRGPVDAKPEYEIRTFGTLAPEMDKLREWVLASECHTVAMESTGIYWQPVYELLEPCFDGEIHLMVVNARHMKNVPGKKTDIRDAEWMATLLRAGLLKGSFIPDKAFRELRHLTRYRKKVIADITAQKNRIDKFLQSTGFRMSMFLSDIFGASGRNIMRHLVAHGSINREGLDACLKTQTRNRIDDILISVNGSLSVHQRDFLSMMLAYLEQIELHKKQVETAIDNEIVKQSEALALLCSIPGIDVTSASAIIAEIGTDLSAFPSAEHLCSWAGLAPGNNESAGKRKSAHIGKGNNYLKSMLCEISWVICGKRKLYLSGWYWRIKQRKGAKRAVVALARKLLSIIYTMLKTKQPYNEDRFEERRKQCEQKRASRMIHELAKLGYRIEPIT

SEQ ID NO: 199496 - protein, 319 aa, unidentified
MIIVGCDFHPGWQQVAVFDSATGEIREEKLENGNGEAKRFYVSLPSPARVGFEACGNTQWFEDLLDSLGHEVWIGDAAEIRASYVRKQKTDRRDAAHILKLLIEDRFPRLWRPSQVERDLRQLLIHRHRLVGIRTRVKNGLQHLLNRGVQLKQKLWSEAGQKVLRELPLEGWAAQRRQDLLKLLSGLNPQITQLDQAVERAAHEHPRACLLMTQPGIGPITTLAYVITMGDVTRFQRGKQVASYLGLIPSERSSSNRRRLGSISKQGSPFLRMLLVESVQTTSRRASGPPAYAEGWSLWHPDNLALTRVRTAIVREPER

SEQ ID NO: 199497 - protein, 400 aa, unidentified
MNPVVGLDVAKGESQVQAFLDKSKPFGKSYSMKHTKEELDRFIGFLKEMEGMTGQMPMVILESTGHYHSPVIQYLEDHEVLYILLNPIISYQAKRSSLRKVKTDAIDAYQLCVLYYKEDFEPHKNRGIQLLNLRNLSRQQEIVTNMYVEAKLQFHTILDQVFPEYRKVFGDLYSKVSLLLLKKYPTSEDVLAAGESKLAECVMEFCPRRSSLWALDKAKKLMDSASRNPFQKVVYHSHLINLQMYIEMLFQYQGHLSELEIRIVTLANELEDYEIVQSIPGIGEKIAATIISEVGEIDRFSHPKKLVAFAGVDPSVHSSGKFTATTNRITKRGSSRLRHALYLAVLCGIRSSRNKKLKEFYDKKKSEGKPSKVAIVACINKLLHWVYALLNRKESFQDIA

SEQ ID NO: 199498 - protein, 375 aa, unidentified
MEHHSEAFVALDTAKLRNAVAIADAGRNGEIRYLGEFDNTEVGTRKLVAQLASKHARLTFCYEAGPTGYGLHRLIKSLGHDCMVVAPSLIPSKPGDRVKTNRRDAVNLAKLLRAGELTAVWVPDERHEAMRDLVRARDAAAKDYRIKRQNVSSLLLRVGRHYPGKKTWGRAHTNWLTSLKLEHREQRIAFEEMLLAVRQVRERIERLEQAMREAVADWSLAPVVEAVQALRGIDMVGAVAFLAELGDLSRFENPRQLMAYLGLTPSERSTGESVKRGGITKAGNTRARRLLIEAAWSYRFPPRVSKDMQTRIGAAPRTAREIAWKAQMRLCGRFRILTRKGKRPTIVVTAIARELSAFIWAIGREVVGSHATANQ

SEQ ID NO: 199499 - protein, 343 aa, unidentified
MEYYVGLDVSLKQTSICVVDQSGSVVREGVVDSDPESISVYVRSKAPGAVRIGLETGPTSTWLWTELKRLGLPVICIDARHAKAVLKMQINKSDRNDAIGIARIMQTGWFKEVHVKDIDSHTVRALLASRALLVKIKRDLENHVRGLLKNLGLVIGRAKFNVFAVRAEELIEGRPELIAAIRPLLEARTAVEQQVSELDRKVMKLARHDAQVRRFMTVPGVGPITALAFKATIDDPARFARSRSVGAYVGLTCRRHASGEVDWSGRISKCGDAMLRSYLFEAAGVLLTRVPKWSAVKAWGVKLVKRNGLRKAKVAVARKLAVILHRMWIDGTEFNWSKKEIAA

SEQ ID NO: 199500 - protein, 359 aa, unidentified
MASKVKKNKVNFKGKMVSIGIDMHKISWRVTALVEGDVVLAITLARPNYEAFTKVISRFEGNHVRIVYEAGPGGFDLYDKLTEDGIECIVTPPSLIPTESGSRVKTDKKDSYKLARFLESGMLKEVWVLSPEERAHRQLTRTRRQIVNHRSDVMRQIKSLLLFNSIDVPFKSTQHWRGPFMNWLLKLDLGYETLNRSLKALVDLFNYLSAEKKRITEDVLELAKKEKYAKRVALLESIPGIGTLSAMEILVEIQDITRFKTADELAAYLGLTPSQYSSGEHIRMGHITHAGNTRARTTLVESSWTLIGKDPEMKGKYQRIKEKRGGKRAIVAVARNLSGRIRRMLLDHVPYELNFQKAA

SEQ ID NO: 199501 - protein, 442 aa, unidentified
MSNAVYSSQSEFAAFVGIDWADRKHVWAVQVADSLLIEQGELDHTPEAVEQWAAALAQRFPGHPVAIAVEQSRGALCFMLSKYEHLVLYPVHPNSLASYRKSFRPSGAKDDPDDASLLLDMLVRHRDRLRRLNPDTVETRTLQFLVEDRRKLVDERTRISNRLTNYLKLYFPQMLDWFDQVRSPLVVDLLERWPTLEELQRAKASSLRQFLTRHNCRSQSKIQERLERIRRAAPATRDAAVVTAGRLAVTALVQLLRQLNGAIRAYDEQIQQRAQSHPDFAIFDSLPGAGPALVPRLMVALGTQRDRYQSAYQIQCYSGIAPVVESSGQQLWVHWRWCCPKFVRQSFHEWALHSIGFSDWARAYYDQQRSHGKSHHTAVRALAFKWIRVLFRCWQDRTPYDEIKYSRALQQRCRKPALPQPVPVELQLKKVAGFWKLSANPS

SEQ ID NO: 199502 - protein, 367 aa, unidentified
MKKVSTVAVKQSRNISQQKLTIGLDLGDRNSWYCVVDETGKIQLEQRVRTTAKALQEVFGAMPRSRIALEIGTHSPWISRLLSELGHEVIVANARKVRLIGESRKKDDRLDAQTLARLARIDPELLYPVKHRSAEAQADLMTIRARAGLVRARTGLVNAARGLAKSYGERLRGCNVRNLNPEKAESLSPELQAALEPLLNAIESLSERIVEYNDRIEALAQTHYPQVELLKQIKGVGTLIALTFLLTLEDPHRFRKSRDVGGYLGLQPGRRNSGQSEPQMHISKEGDPYLRTLLVQGAQHILGPFGIDCDLRRWGLKLAKRGGRNGKKRAIVATARKLAVLLHHLWVSGEVYQPLHNSSRATVAAAA

SEQ ID NO: 199503 - protein, 343 aa, unidentified
MDANNIQFFVGIDLSSTFFTVSFFDKKTKKVVSFENFENLDNGFKSLLSKFQSVGIKSDNAMICMEATGVYGEYLSYFLLAKDYLVVIENPLKVKRAFKIKGGNNDKISSVSIAEYAYRFKDQLERWEPKSQIIQQIQGFLTQREMFMEHKTANMNAKKALEKKHYCPRKAIELHEKAIESLEKNIKEIEEEMSKIIENDSEYKQMIANITSVNGVGKMLAYNLMVVTNGFKEKLDAKKLASYLGIAPEPYQSGTSVYRRPKSSGIGPGIFRRVLYMVSMSCIVHNKVLSDYYNQKVKQGKSKRLVINNVANKLIKILVAMIKSKKPFIEKFVSINPNFIKKS

SEQ ID NO: 199504 - protein, 318 aa, unidentified
MSSEIFVGLDVAKDHLDVALRPSGEGWRVANEEAGAAELVTRLRALHPALVVAEATGGFERAAIAALAAAGIPVVVANPRQVRDFARATGELAKTDQLDAAILALFAERVRPAPRPLPDATTQLLDALLTRRRQLLEMLVAEKNRLGFAPKPLHRSIGQHIRWLERQLDDVTTELTHQVEQSPVWRAKDDLLQSVPGIGPVVSCTLLGELPELGTLSHKQIAKLVGVAPLARDSGTLRGKRMIWGGRASVRTALFQAALSARRWNPAVRAFYDRLRAAGKPAKVALIACARKLLVILNAMVRSNTRWQALTPSAQHSC

SEQ ID NO: 199505 - protein, 402 aa, unidentified
MREHEPAPELWAGIDAGKGHHWITVVDGTGGRRWSRKVENDESAILDALGLILPMARTVHWAVDISGTSCALLLALLAAHGQQAVYVPGRTVNRMSGAYRGEAKTDERDAYVIAESARQRRDFTAIDVPAQLAADLAVLVGHRKDLVADRVRMINRLRDTLTGIFPALERAFDYSSQRGALVLLTGYQTPAALRRVGQARLERWLAKRNVRGAEQVAATAVHAARAQHTTLPGQQVAAEIVADLATQLLALDERIGRIDKQVTAAFRTHPQAAIIESMPGIGPILGAELLAAAGDFASSTDDGHLASAAGLVPVPRDSGRRTGNLHRPKRYNRALRRVFYLSAQTSIIRDGPNRDFYLKKRAEGLKHVQAVIALARRRISVLSALLRDNRCFTPHAPATQTA

SEQ ID NO: 199506 - protein, 352 aa, unidentified
MAMLAAQIDAVIGVDTHTDSHTACLVNHLGSQLAVVTVDADPEGYKTLLAWALERSPGPRLVWAVEGCRSHGAGLLRALQQAGQLVVEAGQPQRASRRSGGKSDPVDAGRAAREVLAAQAHAQPRTDGDREALRILLVTRGHATTARTAAVNTLKALLLTAPDQLRQPLRGLTTAAQVRSCAGLRVSTRQPAAERVLCHSLRQLARHISILDRELAANARQLRGLVAAVMPALLNEPGVGPMSAAQLLVSWSHPGRFRSEAAFAALGGVSPLPASSGRVVRHRLNRFGDRQLNRALHTITTWRMLHGHQPTSAYLARRRAEQKSDAEIRRCLKRYTARRLFRLIEAEALDRP

SEQ ID NO: 199507 - protein, 286 aa, unidentified
MSVYVGIDVHRKRSQVAVVAEDGQVQLNKNVVNGSEPMLRLIGDLPSGTPVAFEAAFGWGWLARLLEDYGFEAHLVHPLRCKAIASARLKNDKVDAAILAQLLRADLLPEAWIAPAEVRQLRALLRHRTSLVRLGTSLRNRIHAVAADHGYDRSASYWTGPGRGWLAELDLPAASREIVTDCLAVIDGLAPLIDRIDGELHVHAKADPRVKVLRTLPGVGEFTALVMLAEIGDITRFGSARKLASWAGLTPTVRGSDLTVRHGHISKQGSAWLRWVLNQAAQTAKR

SEQ ID NO: 199508 - protein, 391 aa, unidentified
MYIIGIDIGKNHHESSIVSPEGKQIGHSLRFATTHKGADSLMSFIFNNIGNSSCIFGMEATGHYWYPIYSFLKARGYTIYVINPIQSDFLRKMYIRQTKNDSIDSFLIAEVIRFGQFTTTSMADENILAMRQLCRYRDSVISSRTEIKLQIGTIMEQIFPEYEKQFSSLWVSTSMGILEKYLTPENIENAPMDELFEVIKDKSHNKLTMKKAISIREAAADTFGIKIAQDAFFQLKQLIDRMNFLDKQIEALDCQILEYYEKFDCYLHTIPGIGMIAAATIFAEIGDINRFKSSPALVAFAGIDPTVRQSGEFSSTHNHMSKRGSPYLRHAIFLAATTCSFHNSPLNAYYKKKREQGKHHLTATGAVARKLTTVIYAVLRDGKPYEPKKFC

SEQ ID NO: 199509 - protein, 388 aa, unidentified
MIYVGIDIAKLNHFAAVISSDGEILIEPFKFTNDYDGFYLLLSKLAPLDQNSIIIGLESTAHYGDNLVRFLISKDFKVCVLNPIQTSSMRKNNVRKTKTDKVDTFVIAKTLMMQDSLRFMTLDDLDYIELKELGRFRQKLVKQRTRLKIQLTSYVDQVFPELQYFFKSGLHQNSVYALLKEAPTPTAIASMHMTHLAHLLEVASHGHFGKEKARELRVLAQKSVGVNDSSLSIQITHTIEQIELLDSQLFHTELKMANLVTCLYSVIMTIPGIGFINGGMILGEIGDIHRFSEPKKLLAFAGLDPSVHQSGNFQAQRTRMSKRGSRVLRYALINAAHNVVKNNATFKAYYDAKRAEGRTHYNALGHCADKLVRVIWKMLTDEVEFNLE

SEQ ID NO: 199510 - protein, 327 aa, unidentified
MRYLGMDVAKAKLDCLLLNEDGDKGKSKSVANSKPGITDFLAWIGKHHISPAELHVIMDATGVYHEQAALALADAGVTVSIVNPAQVKDFERGLAVRTKTDGMDSFVLARYGALLKPAAWIPPAPEARMLQALLARRDAIAQDLQRERNRQEKADATDTPMLIRQSLSDSIEFLSRQLAQLQQDIDQHIDRHPGLKDDLALLQSIPAVGPQVGNNMLAVMHSHDFGSAEQLAAYLGLVPIERQSGSSVLGRAKLSKAGPARIRAVLYMAAVVATRCNPHVKAVYDRLLARGKSKMSALGAAMRKLVHLCFGVLKTRQPYQHDYAKIG

SEQ ID NO: 199511 - protein, 438 aa, unidentified
MSNKVIFNLDELFISVGIDVGADFSWMSIALPNQQFVGKPYKILHNSMHSLTTAVSKIKEAEELYSLESRIFLESTGIYHYPLFCYLRDKGFNCSVINPIITKNSTNINIRKVHNDRFDSKKAALVGLKPDLKVSLMPSDLALNCRNLCREYYDLMDNRSAYVNKLLGELRMAFPQYLGIFSKVTINTSLTLLETYTSPSAFLEADKQEIIDVIKSTARFGLTYAENKYHAIIQAANDANEFGYIIDSNIIRIRLYIGFIRKYDEEIAGIIEALHELVDSNQDTDFAKQIHLIETFKGAGFLSAVSLMGEIGDFSAFSKPKQLFAYFGLDPAVKQSGKFEGTKVQMSKRGSAIARRVIHTLTLQSISTSRNGEPKNPVLRDYYLKKCESKPKLVAMGAVSHKVCNMIFAILRDNKPFEIITPQEHIKQHNAAKCDIAA

SEQ ID NO: 199512 - protein, 444 aa, unidentified
MAMRKRDDEVFPNAAGIDVGASSHWVAVPRHLAEQAGCEPVREFGAMTDDLNALADWLLACGVDTVALESTGVYWIPVYEVLEQRGLKVWLVDARQMKYVPGRKSDVQDCQWLQKLMSLGLLRAAWRPDGEVCVIRAVARQREVLLTEQASWVQRMQKALVQMNIQLMEVLTDVMGATGQAIIRAIVAGERDPKVLARYRHSRVKASAAEVTKALTGNWREEHLFVLSQALAMYDDIARHLGECDARLQMLLGELGQHQLDLGKAPKAGSKARLEFDAQQTLANWAGVDLTRINGLGVTAVMKILSETGPDLSRFANVKHFCSWLGLCPGTKISGGKVLSASTKHSANRVRQALKMAAMSLSHSNSALGAFYRRLRSRMDKPRANTAAAHKLARMVYFMLTRGEAFIDQGQQRYEEQQRERSIIALKRRAAALGFQINPLATTA

SEQ ID NO: 199513 - protein, 345 aa, unidentified
MNYYAAIDVSLELSSVCIVEATGKVVKEVKVETRPEALVKFFKNFGLPLTRIGLEAGPLSQWLHAGLTEAGFETVLMETRHVKAALSAMTVKTDRRDARGMAQLLRMGWFRPAHVKSPELQEVRALLVARKQLQHKLTDIELSIRGILRGFGLKVGKVTDKGFEARIRKLASGHAMLEQIAEAMLAARATLLEQFNKLHKAVLDIVRHDEVCRRFMTTPSVGAIVAITYKSALDDPNRIKKSRNAGPLFGLTPKRYQSGETDVTGGISRVGDAMVRTALYEAANVLLSRVTRFSALKRWGLQVAKRRGLKRAKVAVARKLAVILHRMWLDGTTFRWTKTKVVAHA

SEQ ID NO: 199514 - protein, 326 aa, unidentified
MGLDSTGRVLIRKRCSRAQLLTFTANLQVQLIGMEACSGAHFLGRALREQGHEVRLMPAQYVKPYVQTNKSDYLDAEAIAEAVQRPRMRFVPIKTEEQLDLQALHRVRERWVMRRTAVVNQMRSLLLERGLTLPKGRSHLDEQLPRILEDAELNLSGSFRVLLAQLKLELEQLAARIEEMDRVIQKTARENEACQRLTEIPGVGPVTATALIAAVGNASAFGKGRRLSAWMGIVPGECSSGGKQKLLGISKRGNKYLRRLFIQGARSVLQQRYKQAPGLSSWLAQLLGRTHQNVVVVALANKLVRMAWAVLCKNERYRPPVFAGTT

SEQ ID NO: 199515 - protein, 327 aa, unidentified
MNKQAELPYLGIDVSKKKLDCALLLGSKTRNKVVENSSAGITLLMTWLARQGANELRVCMEATNTYWELCAETLADAGHAVSVVNPALVKAHAQSNGLRTKTDAVDARTLADFCREKQPEPWIAPSPSERALRALVLRHQALVAMQTQEKNRILTAREAVHDSVQIHLQWLAEELKRIEQAIQKHIDDDPDMRRRRDLLKSIPGLGKRTIALLLAYLGTQCRFLSARQFVAYAGLNPKLHESGSSVQRRARLSKIGHAEIRRALYMPAMVALYKTDWGKRFHERLEGNGKPPMLIIGAMMRKLAQVAYGVLLSGKPFDPTLHGACHR

SEQ ID NO: 199516 - protein, 381 aa, unidentified
MITIGMDVHVRNSYLHVTDDAGVPLRHGRCHNTMSDLAKFLGPLEPDARQQSEPIQVVLESTTNSRAIQRLLTQYAEEAGVDLTAEVLDARKIRIIAESVCKCDRLDAKVLCELARSNLKLPTCYMPDDEEFALREHLRARTDLVRMRTMFKNRVHAVLHRRGILAPTATLFTKTGRAYLAQLDLETEGREILDRFLALMDETDRTITNSTASLRELMRRPRWAKQAALLMTMPGIGLITAMTILAELGNLDRFRSRAAVANYAGLVPICRSSNDKRYSGGITHRGSKHLRAMLVEAAWMAVPRVPVYRAMFDRIAQKKNKLVAVTAIARRMLEDAFTMLKRDEAFRYVGVSLADAPQQVGSVTPTPTSSSNRKVASSVAG

SEQ ID NO: 199517 - protein, 345 aa, unidentified
MESMYYIGLDVHKKTISYCVKDGSGRIHAEGKIPATRFDLDLWMKTLPRPWTVAMEATIFTGWIYDHLRPHSAAVKVAHPLMLRAIAAAKKKNDRIDANKIADVLRCDFLPECYMAPTAIRERRRTLRYRNLLVRQTVQLKNRISGLLMEAGVSYNKQKLHKVGYFRELLKTNPDIDESLRPLLQLCRETLVRLQKTESALIRSLARDRFLVERVERLMTIPAVGPITALTWALEVGEVSRFSSIKKAISYCGLCGAEKSSGEHIQRTPLSKQRNKHLQCVLVEAAHMAPRLSPELALLYDREKQKGNANRATLAVARKLVAYLVAIDRRQRDFLVVEKENQAAA

SEQ ID NO: 199518 - protein, 328 aa, unidentified
MFIIGIDVSKSKLDCALIDNSNHEKFKFKVVSNSEEGFVTLIAWLAKHTKSTVSEHHFFMEATGVYHEKCAYWLFDSGAKVSVVNPARVKYYGQSLGVRSKNDKKDSVVLARYGLTQKPIAWQPEAPEIRILKALSSRLDAIEKDILREKNRYEKSSINTCSDLVLISIETLLVALNNEKVHLEKLIDNHISRHEYLKNNYALLQTIPGVGPVVSRYMVIVLGSRTFQSASQCAAYIGLVPIQNESGSSLRGRSRISKAGNPIIRAKLYMAAISALQYNPDIKKQNERLLKNGKSKMSALCAAMRKLVQICFGVIKHQQPYQVQADLL

SEQ ID NO: 199519 - protein, 328 aa, unidentified
MECLSVGIDVSKRELVIAVHPTGDQWTTATTPAGIATVVKRLQTLGPGIIVVEATGGYERALVAALAVAELPVAVVNPRQVRAFAQAIGRTAKTDAMDADVLALFGGRLDPAPRPVTDVATQALAALVARRRQLLEMIGMERGRLEHAPPTGHLTRELRRHIRWLERRVTDVDDEIGTCIAAHPTWRVQEELLRSVPGVGPTTARTLLGELPELGQLDRRAIAALVGVAPFNCDSGQQRGQRHIWGGRASVRATIYMAALSAARYNPVLRVFYRRLRDAGKPAKVALVATMRKLLTILNAMLKHQSPWTTQVASTPASLSGPARAATV

SEQ ID NO: 199520 - protein, 377 aa, unidentified
MTKLQFVGLDVHAETIAVAVAETGGEVRSLGVIPNRLESVRKLVHKLGPIQHLRVCYEAGPTGYVLYWQLTQRGVECQVIAPSLVPTKAGDRVKTDRRDAEKLARCYRAGELTAVWVPDAAHEALRDLVRAREAARKDQMKARHRLGKFLLRHGRRPPEGTKAWTQKHREWIKSHVRFEQPALETTLADYLEEVDHMAARIVKLEKAIDEAVSQAPAEIRAVIEALQALRGVAQTTAASIVCELGSLSRFPSPRELMGYSGLVPCEYSSGSRVQRGGITKTGNGHLRRVLVEAAWAYQHRPNVIGFLLRRQKTLAISEEAKKIAWKAQQRLHKRYQAMAARGKNKNQIVTAVGRELLGFIWAIAVAAEKQHQLAQAA

SEQ ID NO: 199521 - protein, 312 aa, unidentified
MTKIICGVDISKKHLDARIAPGEAFVRLANDAAGIAKLAAFCAEHKAELVVMEATGGFERLAFTLLWEAGVACAIANPRSVRQYAEAMGFLEKTDRIDAFIIARFAQSKGLKPTPPISKNQCRLKGLVVRLRQLTDDLTVNKQRRYQVTDAEIRATFDESIALIKRQSRRLEGEIASLIDDDPLWAVLDKTFRTMKGVADRTVARLMAELPEIGTYDNKAIAKLVGLAPLANDSGKKNGKRSIRGGRAGVRSILVLVAGIARRYDDGLADFHRRLVAAGKPKMVVRVALAHKLLVRLNAKARDARVQFANAT

SEQ ID NO: 199522 - protein, 411 aa, unidentified
MQNALFVGIDVSLKSNAVCVLNAEGKKLDRFSVHNDRLGSAVIVSRVCSWLSKVSDVSSVHFGVEATSNYGHPLLYFLKQDHSLTNVDTRFFILNPRQVRNFKKAYSDLPKTDPMDAFVIADCLRFGRIGSREAYMDDFFAALQRLTRSRLHVAEQLAAEKNRYTNALFLKFSGMAQEQFFSNNFGATAMALIEHFDTVDDIAYTSVEELAAFLNKHGKGKFADPDELARTIQAAARASYRLPSTVLGSVNQVLAVSTRTIRFYETQLKDFDKAIADLIATVPNPLTSIPGIGAVYSAGIIAEVGNINRFSGQAALAKFAGLAWSRNQSGEFDSDHTAMIHSGNRYLRYYLIEAANKVRQHDPDYAAFYAGKLSEAKTTPHKRALVLTARKLVRLVYALLRDNKLYTPPSS

SEQ ID NO: 199523 - protein, 422 aa, unidentified
MLPENPSVVAWIGLDWADRQHEVRLQAVDSSPVESFSVPQTPEALDAWVCQLRRRFPLGFLAVALEQSRGALIYALMKYDFLLLYPVPPKMVADYRKAFSGSGAKSDPQDANLLLELLRLHRDHLRVWRPDDAQTRKLSLLVEHRRDFVDQRTRLTNQLTSLLKQSYPQALEWAGELGRPAAARFLQQWPSLAAAQQADRFDLRRFYQANGRWDATALEERLDQVRAATPPTTDTAVPESSTLMITLLAQQLLVLLSAIAQVEKAIAELFPPHPDHALWDSFPGAGAALAPRLLAAFGADRQRFASAVEVQQFAGIAPVTESSGKSRRVHWRWACPRFLRQTLHEFAGCSIPQSAWAKAYYQQQRDRGKGHHAAVRALAFKWIRILYRCWKEHTPYDEHRYLEALARRGSPLLARVAATTQA

SEQ ID NO: 199524 - protein, 321 aa, unidentified
MVDARGAVRWRGVCATDPEAVAAALTRHAAGVERVVLETGALSAFLYHGLSERAVPVVCICARHANGVLSARVNKSDVHDAEGLAQLARTGWFKAVHIKESATHLDRAELKVREQLIKAHGAMLGQLRGLLKLFGLRLGKVTTPGKRGAQLAALFAQKPELKPVLAPLVASLCAIEAQIAASIRNLKRRAVADPVVARMMSVPGVGPITALTFKSSIEDPTRFVRSQDAGAYAGLVPRRFQSGERDTKGHISKAGDPMLRSALYEAANNLLARVKRPSPLQAWGKALAVTKGAKRARVAVARKLAILLHKLWQTGTDFQWA

SEQ ID NO: 199525 - protein, 413 aa, unidentified
MRLCVGDDWAEDHHDIEVMDEAGRVLARKRLPEGVAGIGQLHELTGRFVPAGGDAEVQVGIETDRGPWVAALIAAGYQVFPVNPLQASRYRGRYGVSGAKSDGGDAHMLADVVRTEAHQLRPAAGDSAAAEAVKVLARTHKTLIWERSAVVLRLRAQLREYFPAAVAAFEDLDAPDALELLGKAPDPARAARLTRAQVSAALKRAGRYKIAERTDAILAALRSPQLGQPPELTAAYAATARSLTAVIATLNEQVASLQGQVEAHFGRHPDAEIYRSQPGLGAITGARVLGEFGEFGDDPHRYASGKARRNYAGTSPITRASGKKKIVAARFVRNDRLIDALMIQAFAARRVSPGARAFYDAQRAKGLEHNDALRRLASRLVGILHGCLKTRTCYNEAIAWGHRENIPQSDAAA

SEQ ID NO: 199526 - protein, 409 aa, unidentified
MNTGTITAVGIDVSKHKSTVAARRPGGEVVLLPFDVEHTAEGLKKLITKLRELDGEIRIVMEHTGMYWRPIAMTLKEAGFYVSVVNAILIHNFSDNSIRKVKTDRADAMKIANYGLTFWIDLQEYAGEDENRQLLKIQSRLYERTATTAGMLRNGLISLLDQTFPGANKLFRDESRNSKGHVKWIDFVLRFWHKECVAALSLAAFTDTFQKWCKRTGYKFSASDAERIHAIARNAVATLPKNDSTKLLITQATNSLNAIYDSLQAIRTEMDRLASMLPEYELVMGMEGIGKVTGPQLMAEVGDVRRFSHKGALVAYAGVDASPYQSGSFDSKSRHVSKRGSPHLRRVLFVIMSMTLIRANTANPVFCFMDKKRAEGKHFYVYTVAGSAKFLRIYYAKVKEYLNALEETA

SEQ ID NO: 199527 - protein, 378 aa, unidentified
MVRFNIGVDLHKTQFTTCCLQDGKVLWEGYHITDPKGYSEFKGVILSLFGKGNQVEVHLAVESTGNTKFFKNIVETWGCKVVVVNTLKFKVINESVKKTDKHDARTLAEFLGKDMLPEAHLCSWASEELRRLLHVRRTLTRAVVTVKNQIHGMLTAHGLESLKGGLQSKKGRQEILDALTGPDMGPVTGLVAQQLFETINLLVSQIKELEKILIEKVAEDETVKRLQTIPGCGIITASTIRAALDDISRFPGPKQFAAYAGLVPWVQCSNLSAHYGKITKRGPEELRTALVQLVLGMYRSRLTGEYRIMKSYRFMKSVKGSGKSIIATARKLSVVIWKMLSEKKDFDPQEMVDPKLEKKADSMRNTELNQRIPTLSGR

SEQ ID NO: 199528 - protein, 366 aa, unidentified
MSKAENNRLCVGIDLHKTQFTVCALNEDGEYLVEKMHRTTEEGYNDFIKEMHSQEERGYSIELAVETTGNARFFKNRMEKEGFVVKVVNTNRFKVITMSTKKTDANDAATLSYYLMKEMLPEAHLCSQTSEEIRRLLKTRSVLVQSMVKIKNQIHGMMMGYGIETTAAQFQSKRKRQELINDLADHKYSDFTASSLKVMLKILDDLSAEIKEIEKHLEEMVKRNEDVALLMTVPGIGINTATTIAAYTENLERFEGDYKRFAAYVGIVPSVHNSNETTHYGRITKHGPQELRTAFVQAAMGMLRLTKETSEWRIIKEYQRRKAEKGSGRAIIALARKITRIVFVMLSKRENFNPDLMRCNDVQQTA

SEQ ID NO: 199529 - protein, 337 aa, unidentified
MVYGAIDLHARMSQIRVVDGAGQVLREVRVPTSAEALIGAFRDVGAVRILLESSTESEWVAQALEAAGFAVIVADPNFAPMYGERHRKVKTDRRDAAVLADANRRECYHAAYRRSATQRTMQQRLKARRLLVGARTGVISETRAILRQLGLRLGAGGSADIARRLTRLSLPPAVERMLAPLARVVTMLTQEIAVLDAACATAAAGDPVVPRLQTVPGVGPVVAWTFRAFIDDVFRFGHAGQVSAAIGLVPREDSSGERRHRGHITKAGPSELRSLLVQAAWACSHSRRSGPLRRWREAVAHRRGPRVAIVALARRLSRILYAVWRDGTDFSVASLAA

SEQ ID NO: 199530 - protein, 350 aa, unidentified
MTVKHYIGFDVHKKSISYCVRLADGTIVEEGKLKATHGSLRQWAGQRREAWHGAMEATLFSGWIYDTLQPFAAKLEMGHPAMMKAIGASKKKTDRLDARKISNMVRCDLLPACWVAPPEIRELRRMLRYRNLVVEQAVQMKNKISGLLMETGVEYNKQRLHGEKYFGELLENLEEAPESVKQLLRLSRGALESFQATQQQLVIQLRQHPKLAERVKRLKSIPGVGDVTALTWALEMGDPRRFPSIDDAVSYCGLTAALVSSADKQQRGPISKQRNVHVQTVLIEAAKLAPRWNRQLAAVYEAELQHGHRNRATLEVARKLVAYLLAVDKSGQPFVVRMPSTPEAEVQTAA

SEQ ID NO: 199531 - protein, 417 aa, unidentified
MNSSPKTIPIERFIAIDSHKHYVMVGGMNQQRQWTLRPRKVQMHRFRDWAARNLKPGDAVVLETTSNVWDIYDIVAPLVSKTVVANAYKVRQIAEARVKTDKEDVRRLITLLIADIVPEVWVPPMHVRELRSLISFRWRLGKQITMSKNRLHSVIQRFNLHPPEGKLLADKNQPWWEEQEFSELTGFQVELDLEIIAHLENQKLKIDQKLAELSDTEPWASDIVYLMQIPGFGILYSMIVLAAVGDISRFSHAKKLVGYAGLGAGVHDSGEKHQDKSITKEGRRELRWALVEAAWGAVRSDPYWKAQYKRLTKTKHPNKAIVAIARRLLVAVWHLLTKREPYRHFDDQTIAYKMLIWSQRMDEKALNGLTRQQFAKYGLLRLGVGQDLTRIVRNGVPRRIAPAEEIVALRPDLKPPG

SEQ ID NO: 199532 - protein, 348 aa, unidentified
MDRYIGMDVHATSCTLCTVGPSGRKLKNDVVETNGQALVQYLKTIPRPRHLCFEEGTQSGWLHEILSPHVDELVVVGISESRGAKSDAKDALGLAQAVRLGAVDTVVFKAPSQFARLRSLATGYDQITTDVTRTQLRIKSLFRARGISTPGQSIYSPQARSDWLKKLTEPSRPSAELLWRELDMQRQLKRESERQLVAESHRHPISKILETCPGFGPIRTALSVPVVITPHRFRTSRQLWSYAGLGLVMRSSSDWVKASSGWVRAETAKTRGLNRCFNRTLKYVFKGAATTVITKRRDSPLGQRYLKLLEGGTKPNLAKLTLARSIAALFLSMWKHEETYDPARHRAR

SEQ ID NO: 199533 - protein, 410 aa, unidentified
MLFVGDDWAEDHHDVEVMDASGRRLARARLPEGMAGMARLHAMIGQGLGDDVDAEDVAARVKIGIETDRGPWVQALVAAGYTVYPVNPLQAARYRERLALSGAKSDAADAHMLADMVRTDSHQLRPIAGDSVEAEAVKVVTRMHKTLIWERTRAVQRLRHALREYFPAALAAFEDLDAGDTLELLAKAPDPAAAARLSISQISTALKRARRRDIPTKAAAIQAALRVEQLGQPAVVTAAYAASVRALVALLVTLNEQVKALQGQVEAHFGRHPDAEIILSQPGLGVILGARVLAEFGDDHDRYTTAKARKNYAATSPITRASGKKRTVMARFVHNDRLIDALMTQAFTSLGNSPGARAYYDRQRARGLSYNAALRQLANRLVGILHGCLKTGTLYDEATAWSHHLNEAAA

SEQ ID NO: 199534 - protein, 338 aa, unidentified
MFVIGIDPHKGSHSAAVLNDAEQLVGELRVRAGRRQREELVAFAARFEPRCWAIEGASGTGALLAQQLVAVGETVLNVPPTLSARARLLDAGRVDKTDAHDARSAAVVALRHSKLRTVVREDHTAVLRLLAKRHHDLVAHRTRAVCRLHAVLCHLVAGGLPRRLSATRAAAELRRIRPADAVGIERRGLAVELLAEVRDADRDLVALKARIAAAVVSSSTTITDVFGVGPVLAAYLIGYSGDARRFPTAGHYARYNGTAPIEASSGPRVRHRLNPRGNRQLNHAIHIAAVTQVAHDTPGRAYYLRKQAEGKTRKEALRALKRRISDAVYRQLLADTTP

SEQ ID NO: 199535 - protein, 343 aa, unidentified
MQVSTIGVDLAKNVFQVHGVDSVGNVVITRQLRRKQIIEFFGKIPACLVGMEACGTAHHWAREISKLGHTVRLMPPSYVKGYVKRSKNDAADAAAICEAVTRPSMRFVPIKSADQQALLMLHRTLDLLIRQRTQLINALRAHLAEFGLVAETGREGLAQLAEIVTDEGNCEALPAAMKQALQAIIDQLAALDLQIGKLDRAIHAHHRANDMSCRLETIPGIGVIGATAIASTVTDPSNFKSGRDFAAWIGLVPRQHSTGGKERLGGISKQGDRYLRRLLVNGATSVVRNARQHPQKHPWIMRLLAKKPAKLVAIAVANKMARIAWAIMAKGGYYRAPELAAAA

SEQ ID NO: 199536 - protein, 359 aa, unidentified
MRTQGSKLDFKGQNIYVGIDVHLKSWSVEVLSQSSVLKKFRQDPQPEALHKFLTTHYPGASYYSVYEAGFCGFWIDRRLKELGINNIVVNAADVPTMSREKLRKTDAVDCGKLARGLRNGDLRGIYVPDTTTLELRSLIRLRNSIVKDTTREKNRIKSLLRFHGIEIPEQFTGHSSNWSKRFIQWLREAGLATEYGRKTLDLHIEQFLRLRAMLLQETRAIRNMARSEKFAESMRLITSVPGLGMITGASFVIEIDDISRFKNAYHLASYVGLIPMCHSSGEKDGTGDITIRKHATLRGNIIEAAWVAIRTDPAMTLAYEGYRKRMNANKAIVKIARKLVNRIYFVLKRQQEYVSCVVR

SEQ ID NO: 199537 - protein, 346 aa, unidentified
MKILALDLSKFKSVGCVYEAASGAHGYRRVNTRPQALHDLLVEVEPDRVVLEVSSVSGWISDLVRALEIELQVVNTNGEAWRWRNVKQKHDQADALKLARLSAMNQLELVHVPAPDIRQWRAVIKYRQHLVGRRTDIKNHVRELLVREGVILPRGRKCWSQAGCGWLEEQARSWEEVGISELWRGELQSELQQLQVIQERIREVEAKLETLAQADDRVGLLQTIPGVGPRLAEAMVALIDDPHRFKRARDVGAYLGLVPRQYQSGELNRLCRITKRGSKLLRSLLVEVSWVSLRYNPWLRSLYERMNRGSKTRKKIAIVAVARHLAIYCWAMLRDGTTWRPPCTSQ

SEQ ID NO: 199538 - protein, 458 aa, unidentified
MQVVYERCSGLDVHKKVVVACLITVTAHGQRHKEIRTFGTMTRDLLALLDWLRAAGCTHVAFESTGVYWKPIFNLLEAEMTVLLVNAAHIKAVPGRKTDVKDAEWIADLLQHGLLHPSFIPPAPQRELRELTRYRSSLVADRTRVINRFQKVLEDTNMKLSSVVTDVTGVSARAILQAYLSGEETDPWELANLARGSLRGKQIQLAQALVGTIKDHHRFLLLQQMALIEVLEQHIAELDQEIAQRIAQDDQEPDEASVMEETPQFVSSADSHLCPSEEQKPLPPQDVSQGLVGYAKALEHLDGIPGINRRLAEIILAEIGINMDQFPSDGHLASWSGLCPGSNVSAGKRLSGKTTKGSPWLRSALVEAAHGAARSKNTYLGEQYRRLARRIGKKKALIAVAHSILVIIYHLLKEGKTYQELGSMYFEERERDALKRRALRNLERLGYDVSLQEKGDAA

SEQ ID NO: 199539 - protein, 372 aa, unidentified
MYKRQELSKLAKQLKSLDGETRVVMEATGNYHASVAKLLHNAGLYVSVINAKLVHGYGNNELRRVKTDRKDAVKLANYGLDRWLTLPRYIPEEDTRLLLKNCYRQYRQYSKVQTVLKNNLISLLDTVFPNANRLFSSPIRGDGSEKWVDFVAEFWHCRCASEKSERAFTSKYLRWCRKHGYNFREAKAHTIYAEASGHIGVMPKSETTKLLVKQAVSQLRATSTALAALKQEMQSLASVLPEYPVVMDLFDVGPTLGPQLIAEIGDVRRFYSKKALVAYAGLDAPPNDSGDVTGRHKSMSKIGASSLRRTLFLVMSVYLQTAPLDEPVCQFMDRKRAEGKLYRVYMMASANKFLRIYYATVKAYLESLEHTA

SEQ ID NO: 199540 - protein, 354 aa, unidentified
MSQNLNSAVAVIGIDIGKNSFHIIGLDERGAITLRQKWSRGQVEARFANMPPCLIGMEACVGAHHLSRRLKVLGHDARLMPAKYVRPYSKGQKNDFRDAEAIAEAVQRPTMKFVATKTADQLDLQALHRVRERLVSQRTGIINQIRAFLLERGVAVRQGQRFLRVELPRILATPPDVLSPRMVRVIEDLAGDWRRLDERVEGLSSEIEAVARQDAGCERLMSVPGIGPIISSAMVAAIGSGEVFSKGRDFGAWLGLVPKQTSTGDRTILGKISKRGNRYLRVLFVQAAWVVLIKPKSWERHGLKPWIEAAKKRLHRNVLAIALANKLARIAWSVLARGRNFEARTNTNATAQAA

SEQ ID NO: 199541 - protein, 356 aa, unidentified
MQKSISMASTSAVGLDVGDRFTYLCAVDERGEIVHERRLQTTPQDVSIYFTARSRCVVVLEVGTHSPWMSRLIEQLGHEVIVANARRLRLIADSDQKTDRIDARMLAELGRTRSKLLKCVKHRSEQAQVDLTLLRSREVLIRTRTKLINRLRGALKSFGVQPPRCDASCFHRRVRAAIPPMLMEALKPIVDLASFVETQIRTIDRKLVQVAKTRYPMTVLLQQVDRVGPVTSLAFALSIDDPKRFKKSRAVGAYCGLTPKQRDSGNTRSQLGITKAGSRLLRSCLVQCAQQILSKRGKDCDLRRFGLTICERGGGNAKKRAVTAIARKLAVLLHRLWVTGEVYDPLRQAKRLAAAA

SEQ ID NO: 199542 - protein, 372 aa, unidentified
MQGDDEVYVGLDVSKLKVSVALAEAGRDGEVRFLGEVENTPGGIGRLVAKLAKRHRRLAFCYEAGPTGYGLHRQVTALGHDCAVVAPSLIPRRPGERVKTNRRDALTLARLHRAGELTRVWIPDPGHEAVRELVRAREAAMEELRRARQHLQSFLLRHGRVFGGRAPWTKAHARWLGEQGFDHPAQQLVLAEHRQAVEDAGTRLERLTRQVAEAAAAWSMAPVVEAYQALRGVAFLSAVTFVAEIGDVRRFDSPRQLMAYLGLVPSESSTGERVRRGGITKAGNGRARRVLVEGAWTYRFPARVSRLLQERQEGLPKVVREIAWKAQVRLCGRYRKLMARGKRQTVVVTAVAREMAAFLWAIGRQVEPRPAS

SEQ ID NO: 199543 - protein, 410 aa, unidentified
MDMDVVFSRVCGLDVHKKNVVCCIITPDHKEIQTFSTMTDDLLTMIDWINSHRCTHAAMESTGSYWKPIYNLLESENIQPIVVNAKHIKNVPGRKTDVKDAEWIATLLRHGLLQGSYIPNREQRELRELVRYRRSLIDERAREIQRIQKVLEGANIKLASVASDVLGKSGRAMLEAIIQGETDPHILSELAQRRLKNKKELLKKALKGLIGHHQRLMLKTQLQHIDHLDQLIKELDEEIKQRMLPFEQDLERLDTIPGVGRRGAEQILAEIGTDMNQFPTSAHLCSWAGIAPGNNESAGKRKSGKTKKGNKKLRSALVEAARSAARTKNTYLSSLYRRIAARRGANRAAVAVAHRILVIIYHLLKRKQTYNELGPHYYEERKHHHVARQAIKKLETLGYTVTVEKQDQTA

SEQ ID NO: 199544 - protein, 430 aa, unidentified
MKNSVANKLKQVPVGYLVIGIDPHKKKHAAVIMTQDFTTHSKFKFNNSKEGFEMALERIRIEMVRTGSRGAIFAIETGGHYWRNLAYFLDERGIPFRFINQFTLKRRREGKDLNRRKNDYRDSEVAAQLLCTGEFTDTKLSHGVYAELRAAHNAYRRLVKERTRIINLVKGLLDGLFPEFTQVFKDPCGLTALSVLSISPVPEGIAAMTEDEFVNTIRTGHRGLLMRKKLCALHYAAQTSIGVKADAQSVSYELSFLVEKLQLIKRHICCIDETLVRLVNETEEGKYLLSIIGLNYISVAGILAELGSFRSYRSAKQLIKMAGSNPTESESAGKRSGHTPMSKKGRPVLRYCAWTAVIPMLRFNPDFRAWAKKLRERPVHANPLSGREIVGAALNRLLRLAFVLVKNQTFYQVPEIELIPELELLPVARR

SEQ ID NO: 199545 - protein, 346 aa, unidentified
MAYYVGLDVSVKETSICIMDDKGVVAARTDVSTDPDLIAQFISKHASEVERVVHESGILAIWLTRELEKRGVAIICIDARLAHKALSGRINKSDQGDAEGLAQLARTGWFTQVHIRSEASERMRVLIGARERLIRMRKDLEGHVRGVLKVFGICMTSVATGKLRKGFRDQLAVAADTDPAIKMMSETFIPLHKTLCIARDALDEEVRFIARESDLARRLMTVPGVGPIVALAYIATLDDEKRFRRSIDVGAFLGLTPKRHQSGEMDWSGKISKCGDGDMRRLLYSAASTLISCTRKPSRLKEWATKLAERKGHKKAAVAASRKIAVILHCLWRNETVFEPGMEGAR

SEQ ID NO: 199546 - protein, 282 aa, unidentified
MQSTTIAVDTAKLVFEVVVSDGHRVIENHRLNRAEFQAFIVHHPPSRFVMEACGGSHHWARLMLAHGHSVRLLPVPYVRAYRRRNKTDRADCMAMLEADRNPEILSVPVKGVDAQAIQGLHRARSAWMGCRTARINTLRGLLREFGVILPLGAHAALKQMATAIDDPAVPDLLKINLLELLAEVHDLDDKIARVERQLATIARQTPAVRLLQDIPGIGLLTSTALYASAGDAKHFRSGRHLASWLGLTPKEHSSGSRRHLGGISKRGDKYVRALLIHGARTV

SEQ ID NO: 199547 - protein, 347 aa, unidentified
MEHYAGIDVSLESSHICIVDATGRVIRESKVASEPRDLIAWFQSLGFTIARIGLEAGPLSQWLYAGMKNAGLSVELLETRHVRDAFKAMPVKTDRKDARGIAQLMRLGWFRPVHCKSVPAQEVRAVLTARKLVQSKLYDVEMSLRGILRGFGLKVGATTQRSFEGRIKELVAGHPTLKVVATALLSVHSVLVREFQAFDKRVRAIARSDTRARLLMTAPGVGTIVALTYVFAIDDPSRFTSSRMVGAHFGLAPRKYQSGETDVTGRISKIGDAAVRTALFEAAHIILTRPVKGSALKSWAAKLAKRAGMKKAKVALARKLAVVLHRMWINGTAFVAEKASSAVRAAA

SEQ ID NO: 199548 - protein, 406 aa, unidentified
MEAVHKRVAGIDVHRMKHVVTILIEHDGAVSSQTREFGGFKRDMRALVGWLQEHRIQQVVMESTGVYWKSVFSHLEAAGIAALVVNAYHVKNVPGRKTDVSDSEWLAQLARFGLLRGSFIPPKDLRELRIVSRYRRKLSAVAAGEKNRLHKLLDDAGIKLGGVVADIDGVYARKMVEGLIEGRAPEQLSALGRGRLKSGREVLQAAMDGDLSARHRLVLTMVLNHLRYLEQQLDELDRTLVAAMKPYAGAWRLLQTIPGIDQISAAMIIIEISDDLTRFGSASRLASWAALCPGNNESAGKRKTGKVRHGNPIVRYLLCEAANAARKTKTLFRAKYESLVIRRGYKKTIIAIAHKLIRTIYIVLARRKPYRDSTFDYEAASVAKNAPRWIRALKKYGYWPQPAPAT

SEQ ID NO: 199549 - protein, 371 aa, unidentified
MNHVTSIGLDVHARSVTAVALDSITGEVRSQKFGYSPAEIAGWILQLDSPKAVYESGVTGFHLVRELREMGVDCIVGAVSKMHKPASDRRKKNDRNDAEFLARQLMAHNIVEVFVPDVETEGARNLSRALEDVRDDLTRAKHRLTHLLIRWGYVWNEFNEDGKRRGSWTHAHWEWIRGIELPDAAARESLDYYISEVRHIESQKKAIEKRVAQCASRPRWRDRVEALRCMKGIETVTAFALTVEAGVFSRFDSARAFASWLGLVPSERSSGERASRGGITKAGNSHLRKLLVEASWHYTRATKERKRSLYDESVPASISNHAAVGVKRLVERRRHLSCELRKRPVVANVATARELACWIWALGRMSEGALA

SEQ ID NO: 199550 - protein, 385 aa, unidentified
MQKDDLSRSLVAFDQNSTLVAVVELSLKTWLVAGLVPGLARQPLKKQGADPDALVALLDRWRNEAIKAGCKITRTVVAFEAGRDGFWLARWLLARGIEAYVIHPTSIPVSREHRRAKTDRLDTQLLMRAVLGWLRGEAKHCSMAAIPTVAEEDARRPNRAHEMLVGERSRVVNRMKAILIRFGIRNFNVKLKKAAQRLQTLRGPEGELPPNTLAELRREMARLAFIKEQIKEIEKARLAALKQAPREGTHPMLLMLARVMGIGVETADMLVHEVLSRNLRDQRAVARYGGITGAADESGSKRREKGLARAGNARVRRGMVQLAWRWLLFQKESALTRWFQARTEGAKAGVRKTMIVALARKLLIALWRFVTTGEVPAGAVLRPAT

SEQ ID NO: 199551 - protein, 380 aa, unidentified
MNNHITYVGMDAHKKSIQVAMLLPEENVPTQWELPNEPRTIKRTAKKLLKEAPGEVKCCYEAGPCGYALQRELKKHHVDCIVIAPSLTPRKPGDRIKTDRKDAKALATLYRGGLLTEVHPPTEKDEAVRDLCRCREDAREDLNRHRHQMTKFLLRRAYIYPGKTNWTHLHRRWLLSLRFEDAADQKIFNDYLLAIEQADERLLTLNTYLSEVAEEEPYREPVAWLRCFRGIDTVTAMTTVAELHDFRRFHSPRQLMAYLGLVPSEHSSSDRERRGRITRAGNKHVRRILVEAAWHYQHRPTISVPLRRRREGQPGWVIAVAEKAQRRLHRRYWRLVLAGKPKSKAVVAITRELVGFIWATLYLGDQSNWESKEAVKAAKV

SEQ ID NO: 199552 - protein, 375 aa, unidentified
MSKIRFVGLDVHADTIAVAVAEPDGEVRSLGIIANRLESVRKTIAKLGPVNQLKVCYEAGPTGYVLYWQLSSLGVSCEVIAPSLVPVKAGDRVKTDRRDAAKLARSYRAGDLTAVWVPDAAHEALRDLVRAREDAREDQHRARHRLGKFLLRHGWQRPAEVKENWTQKHMTWIKSQVKFDQPAAQAAFLDYVHEVEHAADRLERVEKAIDEAIAAAPPEIQNVVQALQALRGVGKIVAVSVVAEVGSLSRFDNPRQLMSYSGLVSSEYSSGSKIQRGGITKTGNSHLRRVIVEAAWAYQHKPWIGGWLAKRQQGLDEETKAIAWKAQWRLCTRYKKLSARGKNKPQIVTAIGRELLGFIWAIAVRAEAAVAGRAA

SEQ ID NO: 199553 - protein, 426 aa, unidentified
MWDEKRRVLKMTSLKQGIIQDKEVNIMRTVFGIDVSKASSEVAILVNGERVYGYTMPNDIIGFSRLLEDLKTVSNPEIIFEATGVYSRRLQAFLEENSYDYTRLNPLEAKKQLDSLRVRKTDKIDAEKLASSQFVLNRKPTYVQEEVYQNLHDLSRFYQNLTEDIVRTKNRLHKVLQVAFPEIENLLSTPTGEQYWNLVSIFPTKHWVLELSEVELKETIRQSTSKRISENRVGNLAEKLVGLAKQSYSAISKTSPMIEEVKYNAQELIRLTNRREQVLQQLIALAEPLPEYEILLSIPGIAETTATSIIGELGDIRRFKSANQINAFIGIDLKHYESGDFLGQEHITKRGNPYARKIMYKCIHNIASASHTNPCHIADFYEKRKRQSQITSTKPHTIASIHRLIRTMYYLIMHNKLYDYTLAKSH

SEQ ID NO: 199554 - protein, 360 aa, unidentified
MFTERTSVGLDVHARSVAAAAIDGVTGELLQTKLPPGNDRILEWVRGLPGSVAVAYEAGPTGFGLYRALTSAGVRCVVVAPSKLQRPSGDRVKTDARDAVHLARLLRLDEITAVAVPTAEQEAARDLVRAREDCRGDLMRARHRLSKLLLRHGIVYDDGAAWTTKHDRWLSQQRLSGVASQAAFDAEYETVLQIKARRDRLDRAIEQLAADSEFTPLVRRLGCLRGVSTLTGFALAVEVGDWTRFTGNSIGSFMGLVPSEFSSGQSRVQGPITKTGNGHARRLLVEAAWHHRPRYHVGAVIRGRWEQAPAAARERGDLGNRRLHERWARFLERRKRPTIANIAIARELAGWCWSLAVMDT

SEQ ID NO: 199555 - protein, 408 aa, unidentified
MNPLYVGIDVSSKSNVVYLMLPNGDKHSNFSVANSHEGSTLLVKKIYSALTSHSLDTVLIGLEATSVYGDNLVYFLREDATLAPFNRKIHVLNPKQVKKFHDTYNDLPKNDYVDSFVIADCLRFGRINKEVYMGEYRYKALQNLTRARFFAVQNLVKEKQRFMNVLFKKYSTMTQEKVFSDAFSTTALAVYDEFESAEALANMDLHELTDFIIEKGKNRFPDPDAVAKAIQKAARSSYRLPKTVNDSVNQVLSISITSMKALESQIKEFDKAIKALMELLPNVLISIPGIGPVYSAGIMAEIGDINRFDNQASLAKYAGLAWKQHQSGGFEAEVTRLIPSGNRFLKYYLCEAAFSLVRCDKEYSDFYHLKYKEVNRCQHKRALALTARKFVRLVFRLLKDNRLYCPAK

SEQ ID NO: 199556 - protein, 475 aa, unidentified
MNLKGKKTKNQVVTANIFEQQELLKKAEVIREKLTASTWHELETNGKFDKNAKLSFISDDMLILGGDVGSETHYLRAIDPRGRELSKSAYSFRNNCEGFQSAKEWAVELAAKNEKKQIVLGLEPTGHYWFCLATWMIANGISVVQVNPYAVKQTKEVEDNSQLKDDTKDPKLIANLVKDGNFGMPYLPEKVYAELRRLSMFREQLNEDRIRAINRMHREMKIYFPEYKEALGRVEGAFSLELLKQTPFPEEIQTLGEEGIRQIWHDAKLRGRGYSRVREIVGYAKTSVGMKDGAEASAMAVKWFVKEIRELDEKLAEIEKLMREKYQEIPYAKNILEISGIGENTLSGILAEMGDISRFDDVKEIQKLSGLGLVACSSGKHKGETKISHRGRKRLRYWLFQAAKSAVAHAEEFKELHVYYTTRADNPLKKMQSLIVIACKLLRIIYGILKNGTVYDPKKMLRDIRRPEKKEVIAA

SEQ ID NO: 199557 - protein, 349 aa, unidentified
MRTAQAVRGKDVYVGIDVHKENWHVTIRSDGEERFNGRIPGKYQSLKSILHRYRECRVTVAYEAGPFGFWLLDRLVQDGIKAMVVPPSLIPVESGNKVKTDKRDSRKLATLLESNMLKHVYVLTPEEREHRDLLRTRRQIVDHRNDVARQIKSKLMFYGISAPFTSATRWGLQYIEWLKSITFETSYLKESFDLLIELYEYLTRQIARINRTIVRLCRDKRYRHKIKLLCTVPGIGKLTAIELLVELQDMSRFTSAEGLASYIGLTPAEYSTGERTRQGRITRCGNKRARTYLVESTWVLITKDPYLRAKYLRLKSLRGGKRAVIAIARKLLIRLRRMLLDTVPYRMAA

SEQ ID NO: 199558 - protein, 353 aa, unidentified
MSKVKELSFKGETIFCGIDVHKKNWKINCMMGAVDLVGFSQDSDPAQFKKHMDKNYPGAEIKAVYEAGFCGFGVQRSLSNFGVNCMVVNAADVPTSDKERKRKDDKRDARKLSRELKDGSLKALYVPTVEMEHCRSLVRQRHHLVKDQTRSKNRIKSLLMFSGLKLTGKERWSMKMIKELKELKCETTELRLTLNLVIEEYLQIRKLIKDATLLIRSLSKQESFTGVQEYLQSIPGIGLINGMVIQTEIQDLSRFKTLDNLCGYAGFVPDISSSNDITRVRGITHRSNEYLREAIIESSWTMISKDPAMLMKYKEYIKRMDSNKAIVRICKHMLSRIRYVWKKQKKYEIGIVK

SEQ ID NO: 199559 - protein, 379 aa, unidentified
MESKKGDPPSLRHRCARVEMSSNHSQDRGSEMQVTMYGVDLAKQVLQVHWVEPDTGEVKRKVLARGEFAAFFAPRASGLVAMEACGSAHHWGRQLRALGHEVRLISTQFVRPFVKGNKTDAADARAIWEAAQRPEMRFVALKSELQQAVLGLHRMRAQLVKMRTMQANQVRGLLYEFGVVLPRSWRALLLQAAAILADDTRGEVPELIRGQLLQQLQGLRELTRRIDELERSIGTYRKQDEQCRRIQAIPGVGALSLTAVLASIGDARTFRSGREFAAFLGLVPRQSGTGGRVRLLGISKRGDPYLRTLLIHGARTILNHSTRPGRLPPPRLQGLLSRRPKNVIIVALANKIARTIWALLAHGRDFDPRWRQALPASVL

SEQ ID NO: 199560 - protein, 332 aa, unidentified
MMAQNDVLVAGIDVAKDKVDVCIRSLSQRQTFASSPEGRRALIRWLRKHKVGKAAMEASGGYEREWAKVLRQDGIEGLVVDPKRVRNFAKSAGQLAKNDPIDAEMIAWFAETFIEARGQAYDAAREKLAQIVSARQALIDVQTSLRNRTEHSTPDVVQKMQNRLLKRLAAEIAKLEAAIAALIKTTPRFAELAEIIESVPGLAGGTSAGLIGAMPELGQIGNKVAAALLGAAPYDDDSGKRRGVRHIQGGRRKVRNVFYMASMGAATRHNPVLKAFYDRLIAKGKEPKVALTACMRKLIVILNVMIARGEKWDAGRYEVSNSARLPPSACTP

SEQ ID NO: 199561 - protein, 324 aa, unidentified
MTHSQAVVGIDVSSGKLDAHVHGHDQSRQVTNDASGHRELVAWARAKRATTAVMEASGGYERDLARALRRAEFAVYVVDPKRVRHYAKAVGQLAKTDRIDARIIAEYGTTVLAAGRLALPRPDDPQRDRLSALLGARAALIEHRDALQQQSAAMPAGLARQALKDAHASMKLRIKQLERQIGALIAEHAAFAALARRLDTVPGLGPVAIAALIAWLPELGYAGRARISALVGVAPVADDSGDREGKRHIAGGRKKLRNVLYMPVVAAIRCNPVLAAYYKRLLACGKEPKVALVACMRKLLVIVTAMIINQQDWAPHSGAQTAAA

SEQ ID NO: 199562 - protein, 375 aa, unidentified
MRQEKTGEVVTSYYGIDLHKDQITWHCIHKTGNGETARESGKICTDRILEELVPMLTVNDSYLIVEASGSSFFFYSLVEAHCKKAFVVNPVAFRELYMTGKKTDRIDAKKLAERLKYHIECDDDESGFPEVFVPDADIVKIRKMVTAYELIVKQGTQIKNQAKSVFRSKLMSVAVDIMEKGLEDALKDKRIDEADRSILIMLKRIYDTLMEEKEEIKKQILLLGSFRFREEVKLLMSIPGISLMSATVFMADICTVERFRSEKKMTSYLASVGTVDSSGGITRNGGLSRRGRRTSYRYILQGLEHIVNGNKDFQKFKERHALTRSNKVRAAIVRKTFVSMYFMLKNKEAYRYLNEAIYARKIRDLKKYGIDFKCA

SEQ ID NO: 199563 - protein, 336 aa, unidentified
MFFAGIDAHLKYVQVAVLDRLGKLTLKTRLSTREPQQLLEALAPFRPLDVVVETCPFWPWIHELLVPAGIRFHLAHAKELRAIAAAPQKNDAVDAELLARMLLSGLIPEAYPRPVHQREQLRLLRHRAGLVRQRTRLASRIHSQLHQQRLSLPREKLLRQATREWLHTTAWPQLTDEQRALVTTHLELIDQLTPMIRALDRRIGAAAAEDSTATRLATIPGIGPYRSLLLAAELSPIQRFPRPEHLVSYAGLAPVTRSSGGHTRHGSIPRGANRWVRGALVSAIPSHVQHAPESTITATYEQLKARLGWRVARVATARKLARIIYHMLQRAENWRG

SEQ ID NO: 199564 - protein, 313 aa, unidentified
MSTSVVYVGLDIAKAHLDLCALTAPQPQFRRFANHARDHRCLLQWLRQWPAVHVVCEATGGYEREVVAALQQAAMAVSVVNPRQARDFARAQGRLAKTDRLDAAILALFGQRCQPPLSAGRSSAQQQLAELVSRRHQLLSLHCAEQNRLEHVGLAGLRRQIQTHLRSLDRQIARVEHWIKELLCAEPALQHHVQRLSSVTGVGWITAVILLASMPELGTLNRRQAAALAGVAPMNRDSGTWRGKRSITAGRAPARAALYMAALSAAFHNPRLRTFYVRLISAGKAPKVALTAVMRKLIILLNQLLKNPNFQPI

SEQ ID NO: 199565 - protein, 424 aa, unidentified
MLGVGVDWAESFHDVALGVPGRGVIEQFRIDHGPAGVQRLVARCLEPEPDPAEVRVVLETRHGLLVEALADAGFTVLPVNPDLVARRRGPAKKKDDSEDARICCLMALDAYLDLRKLIPHGDAGTELRAIARDDERAARDERRIGNRLRADLLAVFPAAVDIAGGDLGAPVFLKLLERWPSADALAAASREEVEAVARSARHGWPGRFAGRVTEAMAVPRLAPRPALARAKEGSIRLAAAQLLAIRAQRRAWERRMGELLLGAPRYGRSKTPKDPDPGKAFPGGEIYLSMPGLGDRLAARVAGEIGEHYEQFSTPNALQCYAGRAPVTRRSGRSEFTVARRLAYNRPLGEAVQQWAFCSLSRSAWAREFYDEKTAAGDSHNGALRKLGNRWLEVLWHCLHKGVCYDEAVHAANRKRSKPPAAAA

SEQ ID NO: 199566 - protein, 454 aa, unidentified
MAKLLKQTQGPVQQLAVLRHDTAGIDVGSMLMMVSYTDTCGNQCLAESTGFTSDIIALAKTLKESGVKHVAMEATGVYWMSFYEVLENHGLEVILTNPRHFKNVAAQKTDVKDCQWIHQLHAHGLLRASHIATEVYRELKSYLHERTILQKQKSDTLNRIHRVLTLMNIKVQHLISDIEGVAGMQLLRAIAGGIQDAKQLLGMINIKALKATAEDLELSLQGFYKEQFVSILGHQLAAYDFYKAEMKAYETLIEKVLIKLLGEEQDALKPVARKTKYVRKNQYSINLKEYLQRILGTDVTQVDGLDEISVLEIMSVTGKEMQKWPTAEHFVSWLNLDPRPKKSGGKMLGHQKRFTSNVATQAFRMAAQTMWSNKGALGQLYRRLAAKKGAKIAIKAVARKLAVIYYHMVKNKSTFDKQRLQMDPRQDERRKIAKIRKMAERYGFGLQPITVTSL

SEQ ID NO: 199567 - protein, 352 aa, unidentified
MIIGCDFHPSFQQIAYVEQETGEYEERRLSHRGEAEAFYRSLAGRSVRIGVEATGNDRWFHKLMSELGHELLVGDASAIHASAPREQRTDKRDARHILRLLMENRFPAIWQPSAGNEEQRQLLLHRCRLVRMRTRIKNQLDSIAKSEGLTGSRVWKAKRRQQIEALPLTGWYAERRKDLLALLDEMDKLIEPLDKAVQAAAEQNAEAQLLMTHPGVGPVVSLAYVLVLGDWRRFPRGKQVGSYLGLIPSEASSGKHQQRMGHITKQGNTLLRWLLVEAATKAQSKDPSWHRQYVRLSMNKHHGVAKVAIAHKLAVRLYWMLRSGQNYTKIVERGSHAGQSELAGGCGLRPIN

SEQ ID NO: 199568 - protein, 337 aa, unidentified
MIIVGCDFHPSYQQVAVLDSETGEVKELVLQHLAGEAELFYRKLSVPALIGMEAVGNSQWFLHMLQRLGHEVWVGDAAQIRASYVRKQKTDKRDAGHILTLLAEGRFPRIWVPDAEIRDLRQLLIHRHKLVQIRTRIKNELQHLMMNQGVQKKRKLWTAEGRRALAALDLSPWTACRREDLLHLLTMLDGQLDRLSDAVEQAARESTEARLLMTQPGVGPVTALAFVLTIGDVRRFQRSKQVASYLGLIPSEHSSGGRQRMGAISKQGNRLLRLLLVEAANSAVRFDPGWRKEYQHRCHQKHHAVAKVAAARKLAVRLYWMLRTRKPYPQVLTPRAA

SEQ ID NO: 199569 - protein, 410 aa, unidentified
MRYYLGVDWADQTHAIWVVDEHGTKVAGRTVPHTAAGFSEWGRELDEWRAQGIELWAAIERPEGRVVDFLLDHGVVVYPVNPKALDRARDRFRPSAAKSDPFDARVLADFLRTDHGHLQALQPSSEVAQELKYLTEDYRRHVRQQTRLVNQLTATLKAYYPRALEVSELTTALARQFLLAYPTPAAVVALTEKQWQRWARAHRLSEARTQELWAVLQRPQLPVPDHVVRAKARLMLTLVEELTPVVAAVDQYREAIDAFFAGLPEGQWIRTLPIGKHGVTAPTLWALLGDTAGRWESFQHLQGHAGAVPVTIRSGQQRVVRFRFACNKAMRDIIDQVAFLSLRKCEWARAYYDQQRARGHDHHPALRALGAKWLKIIFVMWDRHIPYDEPHHLATMARHQLRQGAQKKIA

SEQ ID NO: 199570 - protein, 326 aa, unidentified
MTAPKLGIDISKKTFDVALIRDPETMKVKQRQFSNTPDGFRALQTWLAKQGVGRVHAVMEATGAYGLDLAECLHGAGHPVSIVNPAQIKAFGQSELQRNKTDRADAALIARFGWLHNPAPWTPPEPEQQELQSLVRHLDDLIEQRTQVSNRLSEGRLTKLVRESWEEILQALNERIAEVKRQINQHFDDHPRLKRQRELLDSIPGIGPETAARLLAEMPQLGEFDSARAAAAHTGLTPKRHESGTSIKAPARISKIGNPRVRYALYMPAMAALRSSKEFKELAARLTERGKKKMQVIAAAMHKLVRIAYGVLKSQRPYDPSYATAA

SEQ ID NO: 199571 - protein, 401 aa, unidentified
MPAVWAGIDSGKRAHHCVVIDQTGEMLLSQRIDNDETVLLEIIATVTEIADGHEVVWATDLNSGGAALLISLLVDHGQQLLYIPGRIIHHAAATYRGDGKTDAKDARIIADQARMRTDLQPVRDGDQISVDLKLLTARRLDIIHDRVRAINRLRATMLEYFPALERAFDYSKSKAALTLLSTYQTPGALRRMGVTRLAAWLKARGCRNSATVAQKAIDAAREQETTLPTETVGATLVARLAAVITAIDADLVDLDKTITARFNEHENAEILESMPGFGPILAATFLANIGGDLRNFENADRLASVAGVAPAPRDSGRISGNHHRPRRFNRRLLRTCYLAALSSLKNSPASRAYYDRKRREGKSHKQALLALARRRINVLWAMLRDHTPYQEPAEIPMLTTA

SEQ ID NO: 199572 - protein, 316 aa, unidentified
MEGITSFVGIDVSKARLDVHLLADAQSFAVPNHPEGHEQLLPRLPASGSCLIVVEATGGYHRAIVLTLLDEGHLVSVVNPKRVRDFARASGAQAKTDRIDARMLAIFGQAMRPRIVDKPSEKQQELAALVLRRRQLVALRAVERNHREAAPSRAVYKNIQNLIDVLTKHVREVEAAIQKLVESDDELTAKFDIIGSVPGVGKVLASTLVTEMSGLGGNLNRKKATALAGLAPYNHDSGKFAGKRRIAGGRANVRKVLYMAARTAVRCNPPIKALYERLLKAGKPNKVAIVACMRKLLTTINHLLKINQRWNLEHAR

SEQ ID NO: 199573 - protein, 472 aa, unidentified
MGEAAMKHNQQRARSGKKSRGSISLLERIQPDAAGIDCGQNSHFVAVPSDRDPQPVREFRTFTAELHRLADWLAQCGVKTVALESTGVYWIPLYEILEQRGFEVLLVNARDVHNVRGRKSDVKDCEWLRELHSVGLLRASFRPAATIVPLRSLMRQRQTLVEEAATRIQRMQKALTEMNLKLHTVLSDLTGQTGLKIVRSILNGQRDPEQLATHRDHHCHASHQEIVAALTGNYRAEHLFALRQNFAAYEFHLQQIAECDTAIEKLLAKLAEQQPPPSGPLSTPRRKRGSKHAPTFDIRTSLHRLTGGADLSQIHSIGPHAALQIVAEIGTDMRRWPTEKHFTSWLTLAPNNKVSGGRLLTSRTPPSANRAAVILRRCAMSLGRTSTALGAFYRRLAARTGKAKAITATARKLAVLVYRVLSGDLIYNDPGAAAYHQLNRARELKSLRKRAKLLGYQLVNHSTGEVLSIPVS

SEQ ID NO: 199574 - protein, 435 aa, unidentified
MRCERESVGVVLPACLPSVEGGVHTKLLGLDVHREFTYVVMLERERLTHLGRIPTTPEALRSLAARLGPEDHVVLEATVNTYAIVQLLRQHAGRVVVSNPVQTRAIADAKIKSDKVDAEVLVRLLAGGWLPEVWVPDEKTQALRQQVAHRADLVQQQTRLKNRIQSVLHRNLVPGCPRSDLFGKAGRAWLMQHALPQLPTHEQAMIHATLRELAVVQGERGQAERTLAEIALAQPAVRRLMTIPGIDAVTALAVLAAIGHVHRFHAPSKLVGYLGLDPRVRQSGTRLATTGHISKRGRAHARGLLVEAAWAAVKTPGPLRAFYHRLRSRRGAQIAAVATARKIAVLAWHLLTRDEDYTFARPSLMTRKWRALELHAGRPARRGQLGMAHAYNVKAARRQELELCTQAERAYVALTHQWQHKRTQQDAGATNGKRL

SEQ ID NO: 199575 - protein, 386 aa, unidentified
MQASTLCTPTKDHIGTIFVAIELSQRSWLVTIHAPDRDRMSRHKLAGGDHIGLLALIGKVRMRAEQKLGAAPAVVSCYEAGYDGFWLHRCLTAAGITNFVFDPASIAVDQRARRAKTDRIDGELAIRTLMAHWRGEPRVVRSVHVPSAEQEDARRQTRERQRLITEQTAHTNRMKALLRLIGMPVGNPRRRDWLIWLERQRDWQGQPVPPQLMAELKHEHARLMLLRDQIEVLSEAAAGVELSAAAAQMTQRCALLRRLKGVGPVFAATLTNEVFYKDFRNRREVAGYIGLAPSPWRSGGTDREQGISKSGNPRARHKAIELAWLWLQHQPESALSRWFLERTLNASKRFRRIAIVALARKLIVALWRYLTAGLVPQGAMFNMCNG

SEQ ID NO: 199576 - protein, 328 aa, unidentified
MAKHTMICAGIDAAKLKLDAALECCSERLRVDNTPAGHKALLDWLRRHRVTRVGIEASGGYEQAVVAELRRNGFVVIVFQPGRVRAYAMFHLRRAKNDNIDADLIAICTAAVKKIHAPPDPRLAPFAEHLTMIDQIVDDIARHKNRLETCRDARIRQVWKEEIARLEKHRKIELKSLVAAIRRHQDLAVRLDLINSVDGIGLPTAVAILVRVPEIGRLTREQVAALVGLAPYDDDSGGRSGTRHIAGGRKRPRSALYAAALPASMRWNAQLIALYQRLIAAGKLHKVALVACARKLLIFVNTVVARGTPWQRHQNPRPSAIPHAATAR

SEQ ID NO: 199577 - protein, 385 aa, unidentified
MKKNNIPEQGPREQANKVGGKDEKAGQKARKRSGQHTIGLDLGDKSSRYCVLNEEGEVVLERSVGSTKKAMTQVFGAMPRCRIAMEVGTHSPWLSRLLEKLGHEVIVANARQVKLISQSSRKNDRLDAQMLARLARVDPQLLRPIRHRSEQAQGHLTVIRVRAALVDTRTGLVNAARGLAKAMGERLPKCDTDQMGQERLKMLPAGLREALRPLLQEVESLTEKIKECDVKIEQIGRTEYPETCLLRQVSGVGTLIALTFVLTVEDRERFAKSRDVGCFLGLRPKQSDSGESQPQLRITKEGDMYLRKLLVQGAHCILSHRGPDTDLKRWGLRLSDRGGKNDKKRAVVAVARKLGILLHRLWVTGEVYEPLRNSQATSKQKTVAA

SEQ ID NO: 199578 - protein, 350 aa, unidentified
MNYVGVDIHKRYSFVSATDEQGHRLREARIEGNAPSAFAQFFAGLDGSSKVVLEACWNWGLLHDVLDELEPVEEVVLAHPFKTRLIADAQIKTDRLDARALATLLRGNLVARVHIPSPQVRQRKNLLRQRLYWARLRTMLRNRIHALLDRQRGLALPQCSDIFGVKGLNFLRSLQLPEPDGTLLAEQLALHDLIAQQMRAQEKRIVAETRTDPIVQRLQSIPGVGKVLAVVLAAEIDVITRFPSAERLCAYAGVVPTTHASGGKVHHGRLLPWCNKWLQWALVEAAWIAVGCSGYFGGFYRQHRERGKPANKAITIVARRMCRIVWTLLREERDYEESANMISPAAPAKD

SEQ ID NO: 199579 - protein, 341 aa, unidentified
MQISVLGIDLGKNSCSIVGLDEAGKVVVRRRMRRETVIAFAAKLSGCVVAMEACCGAHHMGRVLAGQGHKVRLMSPEYVRPYVKAQKNDDRDAEAIAEAATRPTMRFVELKSEEQLDMQTLHRVRDRLVRERTSLMNQIRSLLLERGHIVPQGRAKLAVRLNELLDTEEQILRPRIRILIADMRERWEALDRRIASLDTEFVEHARSDDRARRLLTIPGIGALNATALVAAVGDANTFGRGRDLAAWLGLVPRQATTGGKPRLLGITKRGSRYLRKMLIQGARAAMPTLSKSKTQLGAWLRGLLARSHPNVAVVALAAKLARIVWALLRYGRTYQPVALAT

SEQ ID NO: 199580 - protein, 424 aa, unidentified
MKVTYQTCCGVDVHKSFLVATIVKTTGGIEPSYQKKRFSTFNNSILEFKQWLLDNDCHDVCMESTGKYWVPVFNLLEDKINVVIANPKWVKAVKGNKDDTKDSKWIGDLFRLGLVKGSYIPCKKVRILREYTRYRYKLVSCRSSEKNRYQNALTVCNVALDSIVSDIFGKSSTSIIDYLLEQSGTSINHEEIASKLLRSLKSKEDAVIESVEGYQMTDAQKYRMRLVRAHMDYITAEINDVDIMIENMISSNPDFENAVQFLCTIPGVKRDSAITIISETGTDMSQFSSSKRLCCWAGLTPGSNESAGKKKSVRITRAGVYLKPALVQCAHAAVKSDKSPYYKKKYESLVKRRGKKRAIIAIARMILTAIYQMLSTGEQWNPSDLYKIDMPVALVEKQKAKAIKQAKKLLQREGLLPPDEPLAS

SEQ ID NO: 199581 - protein, 342 aa, unidentified
MHDTMIGVDLAKNVFQLHGASPEGHVKFRKKLTRSQFRKFMSDHPPALVVMEACGSAHYWTREMTALGHEVKLIAPQYVKPFIKRQKNDAADAEAIVIAARQPEMRFVEPRSEAQQARAVLFRSRERLVHQRTELTNALRSVLYEYGHVVPKGVAHQKRLKEIVEAEDNRLPALVREECLDLLAQIAEKTVRIEARTKRANKLASETGFARRVQTMPGAGPMTALAVEAFAPDMSTFECGRDFAAWLGLVPMQRSSGGKQRLGRVSKAGQADIRRLLIIGAMSRLSRIGRQGIREGSWLAKMLERKPRMLVAIALANKMARQIWAMMTKGEDYRDPALTVAS

SEQ ID NO: 199582 - protein, 343 aa, unidentified
MEHYIGLDVSLKQTSICVVNQAGSVVREGVVDSEPEAIATFVRSKAPGAVRIGLETGPTATWLWTELKQLGLPVICIDARHARAVLKMQINKSDRNDAAGIARIMQTGWFKQVRVKDLDSHSVRALLASRALLVKIKRDLENQIRGLLKNVGLVIGRAKFNVFAVRAEELIEDRPELIAVVGPLLKARKAIEQQTDDLDRKVLKLARCDAQVRRFMTVPGVGPITALCFKATIDDPTRFKRSRSVGAYVGLTTRRHASGETEWTGRISKCGDAMLRSYLFEAAGVLLTRVPKWSALKVWGMRLAKRNGLQKAKVAVARKLAVIMHRMWIDLTEFNWSKKEVAA

SEQ ID NO: 199583 - protein, 309 aa, unidentified
MNLTTIKYIGVDVAKPHLDFDLPVPADHIANTAEAITPALQALPAGAHLVCESTGGYEAVLLAAAHAAGVPISVIPPQRVRLHARSAGRLAKTDRLDAVLLSDYGRKHTPAAQLAPQPQRAALRELVRARAQLIELQKIEASWREHPPAAALLRAQARKRATLLDGQIAAVERAIRTLVQGLAARAELERLQQVQGVGEVTAWTVWAEMPELGHLAPGQPAAAVGLAPYARDSGQQHGKRFIQQGRPQVRRVLYMAAVTACRHNPVLKEFYQRLRARGKPPKVAIIAVARRLIELLNLLLKNPNFVLAG

SEQ ID NO: 199584 - protein, 405 aa, unidentified
MNAVGIDVSKGKSTVTIRKPGDVVLMSPCDIPHTQSAINDLIKQIKSLEGETKVCMEHTGRYYEPVATWLSDAGIFVSAVNPILIRDFGDDSLRTPKTDKADSKKIARYTLDRWAKLKQYGIMDKTRNQLKTMNRQFGFYMAQKTAMKNNLIALIDQTYPGANDFFDSPARNDCSQKWVDFIHTYWHVDCVRSKSLNAFTEHYQNWCKRKNYNFSAEKAAKIYQISSDLIAVFPKNDITKMLIWQAVALLNTASKTVESLRSKMNELASTLPEYPVVMDMNGVGATLGPQLIAEIGDVSRFTHREALTAFAGVDPGKNDSGKHIQNSVRTSKKGSPYLRKTLFQIMDSLIKRSPVDDPVYAFMDKKRSEGKPYYVYMTAGANKFLRIYYGRVREYLSNLSNNETI

SEQ ID NO: 199585 - protein, 370 aa, unidentified
MSNATTFVRLDVHARPVKACAFVPETGETIRKSFGYEPGEIASWVSSLPQSARCVYESGVTGFHLCRELNAMGAACVIGAVSKMHKPAADRGRKTDRRDAQFLAVQLALGVVTEVHVPDAECEGARDLARALADARDDAVRAKQRLSKFLLRHGLVYDERNAAGQRRNRWTGDFWAWVGRIDLGDAAAMATLDHYCERVREADAAKAALEAKVKSLAQQPRWKPTCDALKCLKGIDAVTAASIACEADGFARFATASGFAAWVGLVPSEHSSGESRFRGGITKAGNKHLRKLLVEAAWHYKGASRSPKDLAKGQVVDAATRRHANAGVRRLVDRRRSMDDAGKQSSVANVAVARELACWCWAVGRMAEGA

SEQ ID NO: 199586 - protein, 316 aa, unidentified
MAELFAGIDVSKDQLDVAVRGHETRQWTVKYNEAGVQSLVQELKQLAPTLLVLEATGGLETHVVAALATAGIPLVVINPRQVRDFARATGELAKTDAIDARLIALFADRIRPELRPLKSEDTRDLDALLTRRRQLIDIRVGERNRLHQAAPVVRISIEEHLAWLDARIAAVDEELQERIKKSSVWAEKDRVLRSTPGVGPTVSLSLLAGVPELGTLNRQKVSKLVGIAPLNCDSGTLRGQRRIWGGRADVRSVLYMATLSAICHNPVIREFYQRLVARGKLKKVALVACMRKLLTILNRMLKENTTWDPAFALNCD

SEQ ID NO: 199587 - protein, 406 aa, unidentified
MSVYMGIDWSTKKHDIVLLNEAGAIIARLTIPHQAAGFEKLDGMRRQLGVLPRQCLVGMETAHNVLIDFLWGRGYEHVYVIPPSVVKSSRGRYGSSGARSDQRDAHLLADILRTDRARLQRWRPDSLLTQQIRAKVSFLRYLTQSVQRTRQRLRAVLTRYYPAALNLFGSLTAQVTLRFLSQYPTPQAMSQLSYVQFSDFATEHGYQRRWWPKQYARMQQSYPTACPAVVQAYHEEMGLLAQQLLFLVQTRLAQKRALTKLFKQHPDQEIFASLPGAGPLLAPALLAKFGDDRERFPSPRSVQALAGTCPVTMASGKRRVVKFRKACDKEFRQIAQQWARASLVNSVWANAYWEQVRTRVDHNNDAFRRLANRWLAIAWKLWQTRQPYDEAYHLQQRAQRSKPLAF

SEQ ID NO: 199588 - protein, 411 aa, unidentified
MEVVHARCAGMDISKKDAKVCVRVAGAGRRKTVETVTTWSSMTGQILALREHLIDQQVTCVVMEATSDYWKPFYYLLEDAGFEVMLVNARHVKTLPGRKSDVADATWLAQLGAHGLVRGSFVPPEPIRQLRDLTRARTAITRERGREVQRLEKLLEDAGIKLSAVASDILGVSGRLMLEALIAGDRDPAALADLAKRRLRSKIPQLTEALRGRFTEHHAFLARVHLDLIDRHTDALDQLTARIEVMMEPFQGFRDLICTIPGIGVATADVIVAETGADMSRFPTAKHLASWAGTTPGNNESAGKVKSSRTRPGNPYLQGALGAAAMACSQNRNTYLGARYRRIASRRGPMKANVAIQHSMLIAIWHMGTTGTLYEDPGAEFFTRLHPDRAKKRAIGQLEAMGYQVTLDHAS

SEQ ID NO: 199589 - protein, 393 aa, unidentified
MNFFVGLDVSKEKFDVCCIGEKGGKVFTLVCSMDREGFEKLIVRLPKDKTSFLLGMESTASYHIPLFTYLVAQDYRVVLINPLLINNFSKRSLRKTKTDKKDALTIAQFLMQEKETLSVKVPDDLITELKDLARRREKLADHLTSLKGDMKRILSVTFPELENITGVFTKATLRLLAEYPSAHAIRGANSLAIASVFNKGRGNRPHATIKALMDAATSSVGVTSLAKELTLRQEASLLMYVEEQMKETTKVLMNTLNARMKQDTDILCSMKGIGENTAMNFLIEMGGAVEIYENDKKLIAASGLDPSTYESGKYAGKSRISKRGNRHLRRVIWLMTTRVIINNDLFKTYFKKRKQDGLPYKKAVLATAHKLIRTIFVMLSRKIFFVEGGIKYS

SEQ ID NO: 199590 - protein, 321 aa, unidentified
MSVVLGIDIAKKKFDVALLRDGKFRTKVFDNSPAGFAALKNWLLFLGVDKVHACMEATGILFEGLATFLADEGHDVSVTNPLQIKAFGESLLSRTKTDKADARLIARFCDTMKPMFWQPDAPEIRQLKALGRRRDALIAMRTQETNRDLSAHNRVQESIRTVVSVLDQEIDDISRQIKDHINNHPDLKNKSDLLRSIPGVGDVSIEAILSETNGFANFSKVEQVVAYMGLSPKEKSSGSSVRGKASVCKTGNRRLRKILYMPALVAMQHNPMVKELAQRLKQKAKHGRLIACACMKKLIHIMFGVIKNSLPFNPGYNLKFG

SEQ ID NO: 199591 - protein, 448 aa, unidentified
MAQNIVTQSAGTALPWQLQRSWRKAFQERTQGMALERWRCVGIDIGKYEHVAVLQDGQGRILAGPLRFGISQAEMERFHTWLSPWVSGKDVELFIGMEPTGHYYESCAHALAQRYGVKQIYLIQARDTAHQRGEWNQGSFKNDEVDACIIAELLRRGHGRPYQAAQGPYLALYHLERHRLAQEKACTRLKNQIIGHVDRLYPGLVIQHRELAERYKPLFRGLWTQETPRRLLELYANPYSLHQQTAEDLVRTFHAANYWMSRPYAQTILTAVKQLCLPDPSLAAIRSTLLYQDLQRLARMEQELADTEAVMVSHLDETWGRWLRSTGVDPARLACLVATIGDLNQYPSARQLFGRSGLHSRCTDSGTRQQHGQGEHMVKAGDRHLRRQLMRFAVCMIARYPSLRSYTVQLQKRGKNATTAQVAVARKLTSIIYAIGTRQAPFDPAFLA

SEQ ID NO: 199592 - protein, 344 aa, unidentified
MSITILGVDLGKNSCSVVGVDVTGAVVVRRTMRRQTLIDYVAKLPACVVAMEACCGAHHLGRLFVAQGHEIRLMSPEYVRPYIKAQKNDDRDAEGIAEAASRPTMRFVQLKNQEQLDIQTLHRVRSRLVAERTNLINQLRAILLERGEIFPAGRRKFELGVDGMLVDGDQTLSPRIRQLAGDLRTEWKELDAKIAALNGEFVKLVRNDPAACRLTSIPGVGVLNATALVAAVGDASSFAKARDLGAWLGLVPKQSSTGGKARLLGISKRGNVYLRTLLIHGARAALPSLSLSNTPLGRWLKAMIERGVHRNAVVVALANKLARIAWAILRKEARFERSYPVAVV

SEQ ID NO: 199593 - protein, 355 aa, unidentified
MNSEKYIGLDVHQATIVVAVMDSTGKLIMESILETEAATILQFFAGLRGTLSVTFEEGTWSAWLYDLLHPHVDQLVVCNPRKNALLKDGNKSDRIDARKLADLLRGSQLKPVYHGETGVRMLRELSRSYLTIVKDLSRVMNRLKAVYRSWAIPCAGRDVYYTRNRAQWLAKIREAGVRRRAERLYEQLDMLQHLRQQARRELLAESRKHAITAKLRQIPYLGPIRSALAVALIQTPHRFRTKRQLWAYSGLALETRISAEYRYVEGQVRRSKKLLSIRGLNKDHNHDLKGLFKGAATMASVRPGPFQDFYQAALAKGIKPTMARLTLARKIAAITLTLWKKGENFDAEKLKSQAA

SEQ ID NO: 199594 - protein, 319 aa, unidentified
MEKEKVYVGIDVSKARLDVSLYPENDCRTFSYDEKGMAAITEYLRKVRPAIVVLEATGGYEMLIAASLGTAGIAVALTNPRQIRDFAKATGKLAKTDSIDARVIAHFAAAIKPLPKPVSDDLAQEFKDMLLRRRQVIDMITAEKNRLGKARGTVKKHIEAHIRWLQEELDDISQRLSEMVKNSPIWREKDSKLQSIPGVGPVLSLTLLADLPELGALNRRQISALVGVAPFNRDSGKMRGKRTVWGGRSKVRAALYMSTLVATRYNPVIKEFYLRLCLAGKAKKVALTACMRKFLTIINAIIRTGTTWRIPVSLTNQVG

SEQ ID NO: 199595 - protein, 422 aa, unidentified
MLGIGIDWAEDFHDIALGTQEKGVIEQFRIDHGPAGVTALIERASRLEPDPAEVRVVLETRHGLLVEALLDAGFTVVPVNPDVVARRRGPARKKDDAEDARICCLLALDRHAALKTLIPHGEIGGELRAIGRDDERAARDQRRLLNRLRADLQITYPAALALAGKDLGAPTVLRLLERWPTQPELAAAAREELVEFARLGRHGWPERFAARVEAALAAPSLPTRDYLVRAKAAGIRLAAVQLRALHEARRGWAARMAELLLGGPRTGRGHTVKDPDPGKALPGGEIYLSMPGLGDLLAGRVAGEIGEHVDQFDSPAGLQCYAGSAPVTRRSGKSDFVVARRLAHNHYLGAAVHQWAFCSLIQSGWAREFYDGKIAAGKSHHAALRALSNRWLEVLWHCLTKGVLYDEAVHVANRNRALARAA

SEQ ID NO: 199596 - protein, 407 aa, unidentified
MIFAGVDWAEAHHDVLLVNAEGKRLAGGRLPEGVEGIARFHELAARHADDPGQVVIGIETDRGLFVAALVAAGYQVFAVNPLSTSRYRDRHSVSGAKSDPGDAKILADMVRTDRHNHRPVAADTDLAGAVKVLARAHQSMIWSRRRQANMLRSALREFYPAALAAFDDLTSGDAVEVLRAAPAPVLGAALSRPKIAAALRRGGRQRGIDARAGQIQAALRAPQPQPPGVIAAAMGAPVSASVAVIAGMTTQIAALERQLAADFEAHPDAVVVRSLPGPGTVPGARVPGEFGDAPDRYAGVKSRRNYAGTSPITRASGTRRVVLARHARNKRLADAIYLWAFAALSASPGARAFYDTRRAAGDTHHQALRALGNRLVGILHGCLASHAPYSETTAWAHRPDAAKLAAA

SEQ ID NO: 199597 - protein, 402 aa, unidentified
MNSVGIDISKGRSTIAVMRPFGEIVISPFEVRHTDSELSELARQLKSLDGETRVVMEATGNYHAPVAKLLHDAGLYVSVVNAKLVHGYGNNDLRRVKTDRKDAVKLANYGLDRWLTLPRYVPEENTRLLLKNCYRQYRQYSKVQTVLKNNLISLLDMTFPNANRLFVSPARADGSEKWVDFVAEFWHCECVSERSLKSFVNKYWRWCRKHGYNFSEEKAHAIYDEASGHIGVMPKSETTKLLVEQAVSQLSATSAALAALKQEMQSLSSQLPEYPVVMGMFGVGPILGPQLIAEIGDVRRFYSKKALVAYAGIDAPPNDSGDVIGRHKSMSKVGASSLRRTLFLIMSAYLQNSPPNEPVYQFMDRKRSEGKPYRVYMMASANKFLRIYYATVKAYLETLEQF

SEQ ID NO: 199598 - protein, 360 aa, unidentified
MNNVTLLAIDLAKNVFQLYGTDARGKTVFERRIRRDKFLDFVKTVNRCNIYMEGCGSANYWGREFIKLGHQVKLINPKYVKPFVKRNKNDRNDSYAIASAARDPKMTFGEVKTEAQQDVQNTHRIRSLLIGQRTALANQVRGFLAEYGIIIPKGVAHVRKQVPVILGNNETNLSRLTLNNLLELYQSLVQVDKKIERYNEIIENLFDGNEVCERLEKIPGVGKLGATILASVLGNGSGFKNGRHFAAFLGLTPKQHSSGEKESLLGISKGGDTYIRTLLIHGARSVLLYSNKKTDALSMWLKRIKERSGINVAAVALANKMARMALAMVKGNCDYDPKHKPRLQNSLIGALPQTPEYLEA

SEQ ID NO: 199599 - protein, 456 aa, unidentified
MKIPQSTIRLLTGRLVKILLNKEVSTMKFNTQNKKIEAITETTLVLGIDVGSDTHFARAFDFRGIEYSKKPFKFTNDEAGFIDFAEWIQNLKELHGKDHVVPGMEPTGHYWFNLGKFLQKNGMKPVLVNPHHVKKSKELDDNNPTKNDRKDPKVIAGLVREGRYMIPYLPEGVYAELRTASNIRFQLQSELTRIQNRICRWFSIYFPEYRTVYGKPDAVSGMLILKEAPLPEDIMTLGVDGINQIWRNAKIRAVGIKRAQTLLTAAEHSIGCKEGVVTARLEIKMLFEDYESRKARLQEVMTLIEDLVMQIPMAEKLLAIKGVGMKTVSGFLAEVGDISRFSSPKELQKLAGLAVVENSSGKHKGKTTISRRGRKRLRYLLFEVAMSLVAKNKEFRDLHSYYTTRSCNPLRKMQSLMAISAKLIRVFYAMLTKGVTYDASKMVSDIKRPVEYMLAA

SEQ ID NO: 199600 - protein, 476 aa, unidentified
MHDLGAARGTSSRGDQSMSRTRKTNRCEHSTSNDKPQPLPILQPNTAGLDIGATEIYAAVAGDRDQKPVRCFGTFTVELLALAAWLRQCGIETVAMEATGVYWIPVFQILEARGFEVCLVNPRYFQNVPGRRTDVSDCQWLQRLHSVGLLQGSFRPPQQVFALRSLTRHRDNLIQLASTHILHMQKALDQMNVQLHHVLSDITGLSGLAIIDAILDGERDPAVLAELRNGRVQASAETIVQALTGDYRAEHLFTLKQSLECYRHYRKMVASCDREIEQLLKKFEARVDATTKPLGTPKVRRKPVRNQPKFDLRKHLYRIFGVDLTEIPGISVLTAHTILSEIGPDLSKFPNEAAFASWLGLCPHNDITGGRVVSCKTRRVKNRAALAFRLAANALWRSQSALGDYFRRMRAKLGAPEAITAAAHKLARIVFHMLSTREPYDESLVRNHEQQFRARAEARLRAQAKALGYSVIAATA

SEQ ID NO: 199601 - protein, 392 aa, unidentified
MIYVGIDVAKDKHDCFITNSDGEGLFKVFTISNNREGFETLFQRIESVSDDFSKVKVGLEATGHYSYNLLGFLLDKGLTTFVINPLHTNLYRKSLSLRKTKTDKVDSRTIATMMMSDMNLKSYSDTSYHNEELKSLTRYRFDKVKERAKLKSSISRLATILFPELEKLVPTLHMASVYAMLSEFPGASHVASAHLTKLTNLLSGSSKGHYGKATAILFRETAGNSIGSVMPAKSLELKHTIKLIQELTAEIDEIEAAIKQIMDDEIKSPILTIPGISYRMGAMIIAEIGDFSRFDSADKILAYAGMSPSTYQSGQLDNCYSHMEKRGSRYLRYALYNATKYVCHWDESFGTYLEKKRSEGKHYNVALSHATKKLVRLIFAMEKSGQAYIPVG

SEQ ID NO: 199602 - protein, 411 aa, unidentified
MGAGGEGCGTIAGCDELQQMETAPMQRNDLNRSLVAFDQNSTLVAVVELSLQSWLVAGIVPGVKREPLKKLSADRERLLALLERWRNEAIKAGHAISRIAVAFEAGRDGFWLARWLRARGIEAYVIHASSIPMPREHRRAKTDRLDTASLKRAFLGWLRGEAHHCRMAQIPTLEAEDAKRPTREHESLVGERTRVVNRMKATLVRLGITGFNVKLRKAAEKLAALRTPEGAPIPPNTLAELCRGLERLAMINAQIAAIERARLLRLKAAPQHGTHPMILMLAKILGLGIETADMLVHEVLARGLRDHRAVGRYGGLTGSADESGSQRREQGLAKAGNGRVRRGMLQLAWRWLMHQKGSALTHWYRERTANGRGDTRKTMIVALARKLLIALWRYVTTGELPAGVVLKAKAI

SEQ ID NO: 199603 - protein, 330 aa, unidentified
MFYLGIDVSNATLDCCLLYQGVDGKRKNIKTTNTANGFNKIMAWVEKHQCALSQTLVAIEATSIYHESLAMALADAGLQVSVVNPARVRSFAQGLSILHKTDQVDSVVLAKFVALARPEKWTPPSHDARQLNGLLARRETLAADLRREQNRMEKMLSIATPVEIRASIERMTTFIEQEIAQLDQQINDHIDQHPKLKNDQKLLTSIPAIGKRTSLMMLNLLQMHHFDCASQMAAYVGLVPIQRQSGTSLKGQAHLSKAGSSKVRSGLYMAAVVAIQYNPHIKATYQRLLLRGKTKMSALGAAMRKLVHLCFGVIKNQTAYQADYFPKLAI

SEQ ID NO: 199604 - protein, 403 aa, unidentified
MIKYHVGVDVGKDRHHVSVLDLSQGNYCKAFSFTNDHDGFSELIAVLEKLSPEKSDFLIGVEACSYALNLTYFLLAMGFRLVEVNPFRAGQFRKAQGKKAKTDKIDARTIAAILTLGDHKPLSIPEPILDNLRELTRFRVDLVDERATMIIHLQEALSVLFPEYGKVFRQLDSTGSLALLMAYPGPEHVIAAGEETVGKTLSLASPRRMSRGMARRIIEAAKHTVGVVQKQPALGIKISILAKRISGLQSTIRDLDRQITALYNGLPCKPCGFPVGRAPSLATIVSEVGDIRRYPTLKKFLSHLGWCPQSFQTGNYRMEHPKMSHAGNKYVRRVIWMLSILAVQRVARYREYFQRRVIEGKTKMHIVVAVGRKLLSALYAMLKNGTVYDPDWEENRRLAPARP

SEQ ID NO: 199605 - protein, 285 aa, unidentified
MTITTVGIDLAKNVFAVHCVDQHGKTVLVKPKVSRAALPELIASLPPCVIGMEACSGAHYWARLFRQYGHEPRLMAAKFVSPYRMAGKSGKNDAADAQAICEAVRRPHMRFVPVKDESQQAMQCLHRIRQGFIEEKTATYNRLRGLISEFGVIAPQSTDALRHMVSEQKSSLPLQVQQCVNDLLEHIDRIEDNITEYDRILSRMAKTDHRSQRLMELKGIGPTTACALVASIGNAHDFKNGRQLAAWLGLTPSQYSSGGKSKLGRITKAGDSYLRTLLVQGLVRF

SEQ ID NO: 199606 - protein, 369 aa, unidentified
MMGWTPPDGIDVPKWSCQAPLKEASVSEVSIIGLDIAKHVFHAHGVDEQGRAIFSKRISRRKLLDFFAAQPSCTVALEACGGAHHWARQLSQLGHDVRLIPPAYVKPFVKRQKNDANDAEAICEAAQRPNMRFVAVKSEQQQAAGLVFRARDLLVRQRTQLINAIRGHLTEYGWIAPKGPAHVAMLGDLLEQEEMASSLPEAARAMFRLMLDLLAGLDGKIADLDTEIARRAREDEVSRRLMTVPGIGPISATAIAALAPPAETFAKGRDFAAWLGLTPLQRSTGGKHKLGSTSKMGERTLRRLLIIGSSAVVQQASKRGAPKGSWLEQMLARKPRMLVTVALANKMARIVWALLVKQENYRAPVAAKA

SEQ ID NO: 199607 - protein, 382 aa, unidentified
MTEIQMTPGPDNIRNDRMYIALELSNTKWKIAFGNGFKIRLKTIGAREREQFELEVQRSRRHFGMAEEVPVYCCYEAGRDGFWIHRYLCTLGIHNLVVDSSSIEVNRRSRRAKTDRLDASKLLTMLIRYINGETKLWSVLRVPQKDHEDARRLHREIERLKKERTAHTNRIKSLLALHGVVMEVGIGKTFPEYIEKVVLWNGEHLPSRVKEEMIREYCRYDLIQQQLQASEQEKKEALKRESESSKKVLTLQNLKGIGPVSSWVLVYEFFGWRLFKNVKEVGAAAGLAPTPYDSGGSQSEQGISKSGNRRVRALMIEVGWYWLMHQPKSKLSQWFMERYGQGGKRMRRIGIVALARKLLIALWKYLEQGIMPEGATVKAYFD

SEQ ID NO: 199608 - protein, 353 aa, unidentified
MEYGAIDLHKKESQVRILTESGEVIDQRIRTTRDRLTALFWGRPHARILIEASTESEWVAQHLETLGHEVIVADPNYGLMYGHRSRRVKTDRRDVAALAEACRHGIYRCAHRRSSRQRLVQWHLNVRRELLDARTRLISVVRAITRSQGYRIAGGATDTFLTRLAALDLPVSVSESLVPVRSVMELLNHELADADQRFEALVAEDPIVKRLTTCPSVGPITATAFVAALDNVHRFAGRRGAAQVTSYLGLVPRECSSGEQQQRGRVMRSAHPYVRVLLVQAAWRICRSSDARAAALRTWAQAIARRRGKNIAIVALARRLTRILYAMWRDEIDYQPDRIRSDRRDTAAAKPAA

SEQ ID NO: 199609 - protein, 344 aa, unidentified
MLYVGLDLSRKRLDFDARLVGGELFERGAVPPDGDGLAGLVRRLGDAEVLAVIESMNGARFVHDRLELHGWDVRIADAVKAKGLAPLACKTDKIDAWVLAELARLDLVPEIWLPDPEVRAERERARFRLHLVKHRSALKNRVHSILIAHGVPNPSSDLFGVGGRRLLERLPLPEPWRSTTTASLALIDTLDEEIDHCERELRRLGADHRYVPLLMTCPGIAWILAFTIASEIGDIGRFATPVKLVGYSGLTPKVNQSGENDRRGPLRKNGPNHLRWALVEAAHTAARHPSFQPILERKRAQFGHKRGTKIAAIEIARRLLRAIWHMLTRGQPFAPAGATRPLAA

SEQ ID NO: 199610 - protein, 494 aa, unidentified
MDRYIGLDAHTSSCTVAVVGPSGRRLTSQVVETNARSLVSAIEAIPKSRHLCLEEGALAGWLYEMLAPHVQEIVVTAVPQSRGPKSDKRDAFGLAEMLRIGAIPRKVYKQRGRFTQLAYLARAYQMLVSDDVRVQNRIKSLLRSRGVQVAGSAVYTTAGRSAYVDRLPVEPKTMADLLYQQHDHLAHLRKQAQKEMIAEARKHPEYRCVKSCPGLGDVRAALLLPVVVTPYRFANKRQFWAYCGLAVISRSSSDWVRTRTGEWMKAPVQQTRGLNKNFNHTLKTVYKGAATTVVGLAKLAESDPETRCTWVTRRSDSGTQAGPIPQFAGDPLPDRDALAQRANMLAVDAASCVEHLPATFVEAVEWNDEAQNFSVELSGRHAGYHTFDRVVANVGFTPDLDLCGPLQVFYSPTTEGPAPLAQLLEKQTQTGSVAATAELAQALLSPEPDFYVLGSKSYGRRSDFTIADGHAQIRALFTIIGDRETLDLYKTHPA

SEQ ID NO: 199611 - protein, 400 aa, unidentified
MRAVFGIDVSKASSEVAILVNSEKVHDYSMPNDAIGFSRLLKDLNTVSNPEIIFEATGVYSRRLQAFLEENGYAYTRLNPLEAKKQLDSLRVRKTDKIDAEKLAESQFILNRKPTYGQEEVYQNLRDLSRFYQNLTEDMVRTKNRLHKTLQVTFPELEQLLSAPTGEQYWNLVSSFPSKDFVLELSPSELAEAIRQSTSKRISEKRVTLLSDKLTELAKQSYCAVKKTSPMIEEVKYYAQELLRLTKRRQVILDEMVRLAQPLPEYEILLSIPGIAETTATSIIGELGDVRRFQSANQINAFIGIDLRHYESGNFLAQEHITKRGNPYARKILFKCIHNIAAASHTNPCHIADFYEKRKRQSQTTSTKPHTIAAVHRLIRTMYYLITHNKLYDYTATQSH

SEQ ID NO: 199612 - protein, 387 aa, unidentified
MKSVKNVYESVAGGGMDVHYKFSSVTMRDAQGRVVRRERLDHRDKSALREKLSRWPKEAPMVMEASFGWGWLTDLMKEVGLQPMLSNCYKLEQMRKARGWVKTNQKDSDLLSLLPGETSDWWKVWMAPPEVRDLRERMRHRMCMVVVQTETKNRIWALFHRHGIFQDSSDLFGVAGRKFLAALCREGRTAEVALRPGALDVLRSLVELLEHVRAQLGKIARELRGRLQRDGLARRLDGIPGIALILAYTLIAEIGRIDRFASHRSLALYALLAPRSNDTGEDDGRPPVGRHLGHRGNRTLQWAFIEAARGAVRRGGKWRRIFDRATDGGERDCNRGYIKVARELAKVVYVMWKNGSSYMDNPPSRPGSPRERMDRFFSSARSGRGQP

SEQ ID NO: 199613 - protein, 337 aa, unidentified
MKRYLGVDLHRTQMTVCTRLESGEESVREWAIKDLPEFAEQLRAEDEIAVEATGTTGRFYDAVVGRVARLVVVNPHKFKIISESVSKTDGKDCRELALFLSKDLLPEVRMKPKKQRELTHMTETRDLLVKQRSALKGKINNLLAMQGINLKREARSSKVALERGMGLEVSAMVKLELRVLVEQIRALSASIGELEELIAEEGEQLAGHRNLTSIKGIGSLSATVLLTTIGSVGDFADENKLAAYLGLVPRVQNSNATERNGAITKMGNKLARTALVQCGLVAKRYSPYLNRFYQRIKERRGGGKAKIALARKMVKIVYDTLKNNWVFDDFPSFTLAA

SEQ ID NO: 199614 - protein, 484 aa, unidentified
MEEAQVKSKQQPRAARHRHPGDRHPRWTPLLERIQLDAAGIDCGAEHHYVAVPPDRDPQAVCAFRTFTADLNHLADWLVRCGIKTVAMESTGVYWIPIFEILEARGIEVVLVNARHLRNVRGRKSDVCDCEWLRELHSVGLLNPSFRPAAEIVALRAYLRQRASLVEEAASHIRRMQKALTQMNLMLHLVLSDITGATGLKIVRSILDGERDPVRLAAHRDRRCHASPTEIIAALTGNYRAEHLFTLKQNFAAYEFDCQQIAECDTAIQTLIDTLAAQQPPPASELPPARRAATPKRHEPRFDIRTSLHRLTGGADLSQIDGIGPHAALQLVGEIGTDMSRWPTAHHFSSWLSLAPNNKISGGRLLSSRTQPSANRAAAILRRCAMSLMRTSTALGAFYRRLAARTAKPTAITATARKLALLVYRLLRGDIIYSDPGAAAYAQLHRARVIKGLRKRAQQLGLALFDPNTGAILTVNSLSPNPVS

SEQ ID NO: 199615 - protein, 354 aa, unidentified
MSRKTTNLEAVATIGIDIGKNTFHLIGLDEKGAIVLRQKLLRGQVVTRLANMPLCLIGMEACVGAHHLGRQLKALGHDARLMPARYVRPYSKGQKNDFRDAEAIAEAVLRPTMKFVAIKTVEQLDLQALHRVRERLVSQRTSVINQIRAFLLERGIAVRQGLRALRTEIPIVLAMTDKLSPRMIRMIEDLCTDWHYLDERIETVSDEIATLSEQDEGAKRLMTVPGIGPIISTATVAAIGRGDVFSKGRDFGAWLGLVPRQMSTGGRTVLGPISKRGNRYLRMLFVQAANAVLLHPQSWEKHGLKSWIEAAARRLNRFKLAIALANKLARIAWGVLQGGRNFEVRSMKSAAQAA

SEQ ID NO: 199616 - protein, 366 aa, unidentified
MTDRQGNVVGVDPHKHTLSATVLDERGGIIGTSHYRVSGDGHRALETWALSFGAVTRWGIEGASGLGRHTSVYLCRQGHDVRDVCPTRTAERARGRHQGKSDVLDSERIARETLAHPELPVAFKRAGEDTGPDETVELMALWHKERRSVLKTRQHLLNEAEPLLNELPEELRGRLPDTKAVRPRLAALRQRRGAWPAATALRLRLLEDRRRTILELDRRDKEITKELAKLVRSVGSTLDELCGLNIRSTAEILVEVGDPRRFTEGGFARFSGTAPLPASSGEGPGQPVRHRLNRGGNRQVNAVLHRMAVTQLRCDERAQRIRDDAKRRGHTRKEAMRILRRHLAAVVYRRMIRDLKAGEAPLHLVA

SEQ ID NO: 199617 - protein, 401 aa, unidentified
MVSDFKKGRYNLMKIFVGIDIAKLNHFAAAISSDGEILLEPFKFTNDADGFQLLVSKLESFDKNSIIIGLESTAHYGDNLVRYLVAEFYQVCVLNPIKTCQMRKNNVRKTKTDKVDTFVIAKTLMMQDDLRFITFFDLDMMDLKALGRFRQKTIKQRTRLKIQLTTYVDQVFPEIQYFFKSGLHQNAVYALLKEAPSPKEIASMHMTHLANLLKVNSHGHFTKEQAKELRVLAQKSVGANDSAISIQITQTIQQIELLDSQLEKTEAEMTDIMKFNDSVIMTIPGIGYINGGMILGEIGDIHRFSNPNKLLAFAGLDPSVYQSGNFQAKTTRMSKRGSRVLRYALVNAAWNVVRNNATFKAYYDAKRAEGRSHYNALGHCAGKLVRVIWKMLTDEVKFNLE

SEQ ID NO: 199618 - protein, 343 aa, unidentified
MDHFAGLDVSVKETSVCIVDDTGKIVREMKVASEPEALLAVLKNPTYHFKRIGLEAGPLSQWLYSALAEAGLPVICVETRHMRAVLKAQINKTDRNDARGIAQMMRVGLYRPVHVKTLRSQKLRMLLTHRKLLQSKAIALENDLRGTLRNFGLKVGIAGKIKFEARIKELLENLPDLADLVEPLLVVRRVLREQLGILQRRLLAIVRDDEVCRRLMTTPGVGPVVALTYRATVDVPARFRKSKSVGAVFGLTCAKYQSGEIDQSGRISRCGDEMMRVMLYEAAQSMLLRSTRWSWLKAWAMQIARRRGMKKAIVALARRLAVIMHRIWVDRTEFRWTREVAAV

SEQ ID NO: 199619 - protein, 362 aa, unidentified
MSDITTTTARSKLTVGLDMGDRFTQVCVLDEDGTVMEEGRVTTTPKAFQQRFAAMPPTRLVLEAGTHSLWASRLLEEVGHEVIVANPRMLRFIYGNDSKNDRADANYLARVGKLDPGLLHPIVHRSEEVMAHRALLRSREALVGSRARLIIHARSLVKPFGFKLPHCSTTAFVKKAQEHIPEILVPALGPVFGIISALNDQIRELDSKVEALAQKTYQETALLTQVPGVGTLTTLAFMLTIEDPNRFPRARAVGSYLGLRPRQDESGTLKPQLHITKAGDKFLRHLLVECAQYMLSSRGADSDLKRWGLKLAERGGKAAKKRAVVAVARKLSVLLLRLWVTGEVYEPLRNAKRRGELLPTSS

SEQ ID NO: 199620 - protein, 454 aa, unidentified
MTVPKPARLRIENLPTVFPNAAGLDIGASEIVAALPPDRDVTVVRTFNTFTADLQQLVTWLLDHHIDTVAMESTGVYWIPIYEMLEAAAIRVYLVNARHFKIVPGRKSDYNDAQWLQKLHALGLLTGSFRPDDEMCILRSLLRHRAQLIEHRSPHVLHMQKALKLMNIQLPEVLSDVTGVTGMAILRAIVAGERRGAVLAKLRRPGCRRTEEDIVHALTGTWRDEHLFVLAQSLDLYDHYTAKVTECDRRLDQQFSSMRPRFDIEGEPPAAPTSRTKKNSNSKNQPAYNVRAHLVRILGIDLVDIIGISESLAQTIISEIGTDLSRFPTSKHFCSWLGLAPHNDISGGKVLRSRVMKVHNRAGQALRQAAQSCSRSHSIFGAFYRARSARSSSEEAVVATAHKIARVIYHMLTCHEAFKPESIRAFDQKRQQREVKHLQKRAKALGFTLQPVSA

SEQ ID NO: 199621 - protein, 325 aa, unidentified
MDDDGLVHWGQIRPATRKTLRDWLTQHCPDGDGEFALEGCTGWRYVSEELAAAGLGVHLGDPAEIAGSRGRKKRAKTDRADARLLRTLLVEGRFPESWIPPAHVVEVRTLGRLYCTLMDERRAWQQRIHAQLFHQGCPPIRALLTRAGRAALAGAELSAAGRQYVDTALRRIDELSAEIDPLRSQLIGFARRQPGCRALQRHYGVGGLCAVIIWAEIGDARRFTSSDQLVRFAGLDVTVYSSDAKRAPGHLSRQGAPELRWAAFEAAKSAARRGSPDHGYYHTLAAKHDGHNGKNPTLAVERKILRRCYHTLRELGDAALATPSA

SEQ ID NO: 199622 - protein, 334 aa, unidentified
MEKVTTVGIDLAKNVFSLHGVDGAGRVVLRRTVRRDQLLEVVAALSPCLIGMEACSGAHEWGRRFQEHGHTVKLMAPKFVAPYRKSGKNDGNDAEAICEAVSRPSMRFVPVKSAEQQALLTLHRVRQGFVVERTATINRLRGLLSEFGVVLPLRSVTVRRQAAAVAENLPELARRAIGDLLEQLRVLDERIGGYDREIEAQARLSEPAQRLMKIRGIGPTTALAIVATVGNAREFRNGRQFAAWIGLTPSQYSTGGKPRLGHISKRGDAYLRNLLVQGARSVLNSAGMHQDRMSRWALELQPRRGYYRTLVAIANKNARIAWALLAKNETLRTA

SEQ ID NO: 199623 - protein, 345 aa, unidentified
MESLLVGIDVGCRRHRVAVGMPDGRLFDQFDVDHQPSAFNAFFTRIEKQAAKHGLSVSVGMEGYGGWARPLDEMVQAKGWMLLNVNRLKLARYKEIFPSPAKTDAIDARKILELMRLRPLLPQAKDILNEVIFAPQVNHDMKLLTRRRRQLVNERVMVVNRMYSDLQAIAPGLLEITGSVDNQWFLRFLTARDTFDQLTRLRQSGILKIKGIGQKYAGLIRAWEKTAQLSSDVPMVGDMVMEDARRVLALADPITRIEVQLRSLMPESSLACTIQSITGFGLVCASELAGEIGAIECFSSESALARYIDMAPLDNSSGVYVGAKGGKQVNRLAKAAMMIAVACII

SEQ ID NO: 199624 - protein, 418 aa, unidentified
MRIVDPTLPRDGTDVMKQAPPSVSAKLTDQSRSVAQDMRLKGGAMNTIYIGVDFHARQQTICYLKIETGELVTCELKHQDKEQVRAFYKQFQGHVIIGLEASGYSPWFEAMLEQLGCEVWLGHATEIRRRARWRQKNDRRDAELILDLMLHNEFPRLHRPTVQSREVLRMLRYRQKLIKVRTMSKNSLQAIALQAGLAKGSRLFTTAGQQELRTAEMSAVLQWQRDHWFELLKPLNQQLLETMVWCKAQSKGDAAITRLRTHPGIGLLTSLCLLHTLQPVSRFRNARKVTAYAGFDPVERSSAERQHFLGISKAGSRLLRYLLVEATHTAVRHDEDLKRFYKRLAERRGRPKAKVAAARKLLIRAYIMLRDEIDYAEFRRRAVAARLARRGQRPEVPEVLIGQPASAGCQEQTHASEK

SEQ ID NO: 199625 - protein, 411 aa, unidentified
MKQQTTNTMDILPQLDKACRLDIHKDKIVGFIACKDGSGQELKEFGTFTCELQKVKEWLQANHVEHCLMESTGIYWMSLYTILTDCGISVIVANPTHIKQIPKRKTDRKDARWLCMLLMHGLVRASFMPTSEQRVLRDYCRSRLFYSRQQNKIQNRLWKILESNNIKLRSVISSICTKTAMSIIRLLSQGVTDREQLANCSLGRAKKNKDNMLLALEGTLAPHHLTQLQMLLQDFDHIEQQIKTLNSLIDESIANHYSVAFESLDTITGIAQRSAEIILSEAGNDMSRFPTADHFTAWCGLAPGNNESAGRQGNTSIKKGNTYLKTAIVSAAWAAVRVKNSYWHALFERMRKRMKAQKAIVAIARRMMKVVYNTLETLTHYKEKGVAYYQEMQEKAAAYRQAGKLWPSTNA

SEQ ID NO: 199626 - protein, 416 aa, unidentified
MKNQETLFFAGIDWSRNFHQVCVIDHQGSIIGEASFEHSGRGLFEMTQWIREISGSEVCNISVAIEVNHGPVVESLIEQNFRVCSINPKQLDRFRDRFSPSGAKDDRKDALVLASALRTDSHHFHLIESQDTEVMFIRELNRKRAELVEQRTRLINQFRELIWRYYPQFAALLGDRVRIWHLELWKLVPCPDSVKGKRISTVQNLLKRHRVRRIDAEEVLHILRAEKINVSVATRNACVNRLGSIVELLELLERQIKETEASVNKEIETLDSKLRTDSEEPTDIEILQSVPGAGPVVLTTIIGEAWELLLRRDFEALRCFGGTAPITRQSGRTKQVVRRKAVCRSLCDAFHVLGGSAARSDPVSMTKYKALRAKGHGHFRSARTVCDRILSVVRVLLKKRELFDKEFKKPWHDAAA

SEQ ID NO: 199627 - protein, 459 aa, unidentified
MDSTGTKKKNRGSVLGRLPVIQANVAGIDLASTEHWVAGPINNESAANVRKFGTRTHELIAIAEWLKEQGVVSVAMESTGVYWIPLYEVLESRGFEVILVNARQLSHVPGRKTDMLDCQWLQLLHSCGLLQASFRPKESICRLRSLQRQMACFVAARTRAIQWMQKALDQMNIQVHRAVTEINGKTGLAIVRAIVSGQRDAMVLAELRDKRCKKNATEIASYLRGNWRDDHLFNLKMALQNYDHIEEMIARYEKELQIQIDALQPPERREQSAPTTPNNQKKHYFTARGYEEDRTRLWRLSGADLTRIDGISTDAARIVLSEVGPDVTAFPTEKHFVSWLRLSPRSSVSGGKQLPKKRNGTGSTRIASVLRMSALSVGRTNTALGALYRRLARRRGADLAIFATARRLATLIYRTLRFGQEYTDEGADAYDARFQAQRLRNLQANAAQIGYQIVPLPSS

SEQ ID NO: 199628 - protein, 393 aa, unidentified
MICVGIDVAKDKHDCFILSSEGEVLADVFTIPNNAEGFDTLLQTIRRCARPEDKIKVGLEATGHYSYNILGFLLDKGLPTYVINPLHTNLYRKSLSLRKTKTDRVDARTIAAMLMSDVDLKSYTDTAYHNEELKSLTRYRFDKVRERAKLKQSVSRLVTILFPELEKLVSTLHMASVYALLSEFPGAKQVSEAHLTHLKAVLYDASKGRYGSDMATTLRDAARCSVGSVMPAKSLELRHTIRLIHELDAEIEDIEAAIQSMMDEIQSPITTIPGMGVRTGAMILAEIGDFSRFDSPDKILAYAGMSPSTYQSGQLSLSGTYSHMEKRGSRYLRYALYNATKYVCLWNPTFAAYLAKKRAEGKHYNVALSHATKKLVRLIYALEKSKRPYSTAA

SEQ ID NO: 199629 - protein, 406 aa, unidentified
MELAALHKHVIGLDIHQAQITACAIIEEPDGTTRIEQRQFGAFKRDRRALAEWAASLVPDEVVMESTGIYWKSPYAALEAVGIRGQVVNARHVKNVPGRKTDVGDAQWLATLARAGLLRGSFVPPAKLRELRLISRQRQKLIGQLSSEKNRLHKVLTDGGIRLGVVVSDLHGQSARAMVKAIVDGRPPHEVLKLASRRLKASREELFDALQGELTDSHRFVLDELMRHIEEIEARIARFDARLLEGLASEKNALTLLQTLPGVDLIGAAMLLVEIGSDMEAFGSADRLASWVGICPGNNESAGKRKSGRVRKGNLYVRRLLCEFAHAASRTKSVFQSKFQSLIVRRGHKRSIVALAHKLLRTIFFMLKRGEHYRDSAVDYEALSVQRNAPRWIKALTRFGFMPAAS

SEQ ID NO: 199630 - protein, 478 aa, unidentified
MAKRKLSTFERLRNGEKLARRERRQLQRQIEKCDPSLQIVHPDAAGIDVGNESHFVSVPAGRDARPIREFGSWTADCHAMAGWLKGCGIRTVVLQSTGVYWIGLMEILEGEGLEVYLVNAQGTKNLPGRKSDVQECEWLMKLHTYGLLRNSFRPPEEIRELRTLWRQRNRLVEDAGQMVQRMQKALTTMNVQLANVISDISGVTGMQIIRAILKGERDPRVLAKLRDQRIQASEEEIASGLEGNWKPAVVFELRQVVEAYDFYQKQIAACDLEVRVRMEALPSQGAGEEKAAEEAERVTKKGFQKARKNQPQFDLREELRRIYGVDLTRIDGIDVLTAQVILTELGPDLRAFPDEDQFSSWLELAPRNGITGGKVIWQKARRSKNRVANALRMAAQALSHSDSYLGAQYRQFRARQDGKQAVKTMAHKLACLVYRILTRGEEYVDRGAAYCEKKRADRELAALQRKAAARGLQLVPVQ

SEQ ID NO: 199631 - protein, 337 aa, unidentified
MNVTLIGIDLAKTVFQVCGVNRSGNPAFNHQVRRNRLIEKLLQYPEATIAMEACSGSNYWGRELKKLGFEVLLIPPQHVKPFVKGNKNDRNDAFAITEAARRPRMRFVEPRSLEQTDILVLHKLINRKVQARTALINQIRGFLNEYGVIVAPGKERLLKELPELLEDAENPLTCAAREALQSLLEEWREANRQIQMHEAKLKQTAKQLEPARRLMGVKGVAEKTATAVVAYAGDGKAFKSGRHFAANLGLVPNEHSSGGKQKLGCITRRGNNYLRRLLVQGAWSVIRYTDKATDRLSRWAAGVIERRGKHKAVIAVANKLARILWAMLYHQTEYRAA

SEQ ID NO: 199632 - protein, 339 aa, unidentified
MKYYAGIDVSLEQSSVCVVDGDGKIVREGKIASDPSQLIAWFVGLGFELDRIGLEAGPMSQWLYAAMKQAGLAVELLETRHVHAAFQTMPVKTDRGDARGIAQLVRLGWFKSVHCKTLSAQEVRAQLTARKLVKSKLCDVEMSLRGILRGFGLRVGKTTTAKFEGRIRELVAGQPTLAFIADSLLSVHAVLARELKGFERRVLGMARDDHRTRLLMSTPGVGPIVALTYVSAIDDPSRFSSSKMVGPHFGLTPTRYQSGETDVSGRISKVGDKEVRTALYEAANIILTRPVKASALKSWGMKLARRAGMKKAKVALARKLAVVLHRMWVDGKPFRAQPA

SEQ ID NO: 199633 - protein, 420 aa, unidentified
MKFNTQNAKIEAITEKTLVLGIDVGSEMHYARAFDYRVIEYSKKPFKFSNTEVGFATFKEWILDLKERHEKDKVVPGMEPTGHYWFNLGKFLQDNEMKPVLVNPHHVKKSKELDDNNPTKNDRKDPKVIAGLVREGRYMIPYLPDGVYADLRTASNIRFQLQAELTRIQNRISRWFNIYFPEYKTVYGKPDAKSGMLILKAAPLPEDILTLGIDGVNQIWRDAKLRAVGKARAKTLIEAAVSARMEIRMLLEDYESKNMRLQEVMVLIEELVRKIPMAEKLLEIKGVGIRTVSGFLAEVGDISHFNNPKELQKLAGLALVENSSGKHKGETTISRRGRKRLRYLLFEVAMSLVAKNPEFRELHNYYTTIRQNPLKKMQSLMAIAAKQIRVFYAMLTKGVDYDPKKMVSDIKRPAVYLQAA

SEQ ID NO: 199634 - protein, 319 aa, unidentified
MTPLSTPPTRFIGCDVGKKFVTIFDSASGQIRDVPNRKPDLVRLARVLDVGCLVVCEATGGYEAKLLSAMVAAGVPTHRADARKVKAFIRSFGTLGKSDAIDAQALARYGAERHKSLTRWVQPDPVREELQTLVLARVDLVRLRQAQKNRLAAPGSEVVATMLKAIVREVEKQLRALETRIAQCLRQHPTLIRDQDVLRSMRGIGEVTAAALLALMPELGMISNAQAAALAGVAPHPHESGQRIGYRKTRGGRPDVKRTLFMAALVASRGEGTLAETYRRLVARGKKPIVAITALMRKIIVIANAKLRDARLVAAVQVS

SEQ ID NO: 199635 - protein, 410 aa, unidentified
MEVLYPHCAGLDVHKDTVVACVRHMVNGSVRREVRSFKTTTKELLALSDWLAGEGCTHVAMEATGVYWKPVWHVLSDGDFTLVLANAAHVKNVPGRKTDVNDATWLADLLAHGLIRSSFVPDGQTQEMRTLLRTRKQLVRECSRHVQRLQKTLEDANIKLDSVISDIVGLSGRRMIEALIAGETEPGALAAMAHRRIKATPDELEAALRGRVTRHHRFLLQLHLQQIDAVNAAIDQIDQEVDAYVEPFRATVRLLTTIPGIDELSACVILAEIGRDMSRSPTAGHLISWAGLCPKNDESAGKRRSTRMRKGAPWLKTTLVQCAAAAARKKASYLQAQFHRLRARRGAKKALGALAASILTSVYHMLISGELYRDLGPHHFDQRAKAVNTRRLVVRLQNLGYAVQITPLAA

SEQ ID NO: 199636 - protein, 411 aa, unidentified
METTYQVVGIDVHKSMLAVVVADAAAEGEFQFERRKFGTTESELRRLAQWLTERNAREAVMESTALYWRPVWQQLEGQCDLYLAQAQSNRAPRGRKRDFADAERLLRRHVAGELILSFVPGPEQRLWRTMTRAKHQLTRDRVRIHNQLESLLEDGRIKLSGCVSDLLGLSSRRMLKALAEGERDAARLASLADPKLRATPEQLQDALYAAPTLSTLHRQILGLFLSRLELIEHQIEVLDKSVGQALLAHQDAVLRLAEVPGYGVDSAQQVIAEVGPAAATFPSPEQLSSWVGTCPGREESAEISKNNRSPKGNRMMRRVLNQVAHAAVKTKGSVFQALYRRLVIRLGHNKAIWAIAHRLCRLTWKILHQGVRYVELGTRSNSRTIKARANKLIRELRSLGYQVQLSQMPTP

SEQ ID NO: 199637 - protein, 377 aa, unidentified
MHSENIAAYVGLDVHKETLAVAIAAPERLGEVRYYGTINNEAQAVRRLFQKLQGLYGNILSCYEAGPCGFRLYHQLTAMNIKCQVIALSRIPKSPTDRIKNDHRDAISLARLLRAGELTPVWIPDLTHEAMRDLIRARAAAKRDSRVARQRILSMLLRTDKHYAGKHWTGKHRTWLANQSFSQPSQQIAFQHYCQSLEQIEDRILQLDQEISRLLPEWSLCNLVCQLQALKGVGQLIAITLVAELGDFSRFSNPKQLMAFLGLVPGEYSSGNSIRPRGITKVGNSELRRLLYEAAWSYRTPAKVGAWLIYYRPDSVTQYSKDIAWKAQQRLCSRYRSLTAKGKKSQVAITAVARELTGFMWDIALAAQSSFSQQKQN

SEQ ID NO: 199638 - protein, 314 aa, unidentified
MEAAVVVGIDVSKRTLEVALSSGGGFSVANDENGISELLARLRQSGAALVVLEASGGYESPAYLALWEAGVPTALINPRDAYHFAQANRQLAKTDQLDARGLCEFGLRMQPEPLPPPEAADEELKALAVRRRQVVKMLAAERTRVQQAPRSVRPSVKRMIRVLERELGAVDHQIEQRLRDNPGLAQRCAQLEQVPGLGAVTCAILVSRLPELGRLGPKQVAALVGVAPYDHQSGEWRGRSPIFGGRAEVRSALYMATLSAIRCNPVLRSFYRRLRAAGKPAKVAIIAAMRKLLVILNAMLKTNSPWRPPCAVVA

SEQ ID NO: 199639 - protein, 341 aa, unidentified
MGELTRVAVDTSKAVFAVHGEDAAGRVVVRRELRRAAFEAFMAGLAPVEVVLEACGASHHWGRRLGAMGHRVRLIPPQYVRPFVRRGKTDRADAAAICAAAGRPDMREVPLKSAGQQAALMVLRLRELLVKQRTALVNALRGHAAEFGLVAPQGIGRAEELLARIAADPEVPELARESFALLGQQIAAVGAQLAEADARLGALHKGHEVSRRLAAVPGIGPVAAISLALAVEPGRFESGRHLAAWLGLTPREHSTGGRQRLGGISRAGHERLRSLLVLGATAVIRHARPGSRLATPWLTALLARKPRKLAAVALANKMARVVWAMMARGEAYRARPLAGAA

SEQ ID NO: 199640 - protein, 366 aa, unidentified
MQRERTSVGLDVHARSVVACGIDASTGEMFRARLGPQPEEVLGWLRELPGPVAVVYEAGPTGYGLARFLTDHNIRCVVAAPSKLQRPSGDRVKTDAKDAQHLARLLRLDEITPVVVPTVAQEAARDLVRAREDVRGDLMRARHRTSKLLLRQGTVWSGGTAWTVAHHDWLRPQTFSQSALTIAYDSALETVLLSAERRDRLDKAIVKMAADPAWSAIVTRLGCLRGVSTLTAFGLTVEVGDWSRFTGSSIGAFLGLVPTEHSSGGSRSQGSITKTGNTHARRLLVEAAWQHRRPYRTPSATLRSRWNQAPAAARARGHAGNQRLHQRWQVFTDRKKRPVVANVAVARELAGWCWSLATLDDTGAAC

SEQ ID NO: 199641 - protein, 350 aa, unidentified
MDIVGGFDVHRKQITFDYIEMDSGEVHRGKIRPATRQSLSEWLDEFTQRFSGKQIAIAVEATTGWRYVVEEIKRAGIEPHLAEPAETKSLQGRKKRAKTDRLDAGHLRDLMVIDRLPESWIPPDHIQEIRTLMRLRHSLIEERTTHKQRIHAQLFHNGYPRQSNLDSIEGRTHLEDIELPAAARKVVDLSLAMIEHINGELEPVEKELRAYARSQAGCKALMMSHYGVGELTSVALLSELGDTRRFSSSRKAVRYAGMDITVHSSDDKRAAGKLSRQGPPTLRWAAFEVAKRAWRKSSPDHKYYLQNKERIGANRAALSIARKLIRRAHHTLRELGEEAISEPVLTSGSA

SEQ ID NO: 199642 - protein, 355 aa, unidentified
MNDAKYIGLDVHQATISAAVRDSSGNLVMEATIETKAETILEFVHGLRGSLRVSFEEGTCASWLHDLLKPHVTEVLVCDSRKNALLKVGNKNDREDARKLSELLFLNKLHAVYHGETGIRTLKELARSYLTITRDLTRVMNRLKAIYRGWGITCSGQQVYAPRYRAEWLAKITEAGVRRRAEIYYQQFDVLVALRQEVRRELLAESRKHPAMRLLQQIPAIGPIRAALLIALLQTPHRFRTKRQLWAYCGLALRTYDSGEYRFVGGQLKRSKKAVTIRGLNKNHNHDLKNIFKGAATRAAATAGPFQNFYEARMASGMKPPMARLTLARKIAAITLVVWKKGVRFDAEQLKQQAA

SEQ ID NO: 199643 - protein, 384 aa, unidentified
MNKHSMIFIGLDTHKEFHEVAYCEEQRGATPVHYGRIPSSKVSVKKLLRQFESKYPGATLHVVYEAGPCGYWIYRLITSLGHCCYVVAPSLIPKKPGERIKTDRRDALKLVRSLKSEDLTPIYVPEPEDEAVRDLSRAREAAMKDLKEAKYQLKALLLRNNIRYEGTANWSKKHLRWLTELILPHPAQQIVLQEQLQTIEERIRRLERLDNELTHHVHQWRYYPVVKAIQAMRGVRLLVAVGVVAELGDLHRFDHPRKLMAYLGLVPSEQSSGGKRHLGAITKAGNGRARRLLIEGAHSYRYPANVSTDLQLRQEGLPKDIVDIAWKAQLRLCKRYQRMSKKGKHYNLIITAIAREMAAYIWAIAKEVVLTPVNPKLRLSRVPA

SEQ ID NO: 199644 - protein, 377 aa, unidentified
MKKVRCIGLDVHADTIAVAVAEPDGEVRSLGMIPNRAESIRKLMKKLGPPASLRVCYEAGPTGYVIYWQLTALGVHCEVVAPTLVPTKAGDRVKTDRRDAAKLARSFRAGDLTAVWVPDAAHEALRDLVRAREAAKKDQLRARHRLGKFLLRHGRRPSTAMTAWTQRHLTWIRQVQFEHPAQEATRLDYLHEVDHAVGRIERLERAIDEAVKTAPTAMRAVIDALQALRGIALVSAVTIVAEVGELSRFTRAPQLMGYSGMGAREDSSGTRTRRGGITKTGNAHLRRIAIEAAWAYRHRPAVGGTLRKRQATLSEEVKAIGWKAQLRLHARYRKLLGRGKCQQHVVTAVGRELLGFIWAIGVTVERQQRKTSSSIAA

SEQ ID NO: 199645 - protein, 340 aa, unidentified
MDRLIERCCGLDVHKTSIAACVRIPGPEGERVQHVRTFGTTTVQLLALRDWLEAHGVTHVAMESTGVYWKPVYYLLEDRFECLLVNAAHLKHVPGRKTDVQDCVWIAQVLEHGLLRGSFVPPPLIRDLRDLTRYRASLGEERSRQANRLHKFLQDAGLKLSSVASDILGVSGRAMLEALVHGTTDPAVLADLARGTLRRKLPALREALAGHFRAHHGFLVGQLLAHLDFLDESLETLNGRIDEMLAPFAETLDRLDGIPGFSRHTAEDVVAEIGLDMAVFPSDGHLASWAGLCPGQNESAGKRRSGRTRKGNRWLRRTLVHAAHAASLLLNPRTTPKESS

SEQ ID NO: 199646 - protein, 351 aa, unidentified
MVRRGIVAGLRGNGIIRSGRVHDRTECVMSGNQSTVSYSLFVGVDIAAATATVAWMRPGEKACRPVTIEQTPEGYASLERKLRATGKAPAEVLVVMEATGAYWITLATQLVHTGFQVSVMNPAQAHHFAKALLQRAKTDAIDAQTLAQLATLLEPAPWTPPPRIYYELQQRLAQRDTLLDLQQQVRNQLHALDQLPEVVETVRQRFEHVLATFATQLAAVEAEIMEVWQQDTAWATAGQRLQSIKGIGWVTAAWTLVSTLNFTTCDTVEALTAYAGLAPMPRQSGTSVWHRPSIGHTGHGRLRTALYMATLSAAQHNPMIKASTFFNACKLSGNSTISVSLTGATGTGAKT

SEQ ID NO: 199647 - protein, 407 aa, unidentified
MGITCGVDWAEDHHDVVVMDEVGKVLEGRRIDTGVDGYADLIALIADHGGSAAETPVALETDKNLLVLALRAAGFTVYPINPRAVARYRERHYQAGKKSDHGDASVLADILRTDRHQHRSLPAVSDHALTIKALARQHQEAIWALHQTASRLRSMLLEFYPQALKAFPNLNHKAALTILGAVPTPTLAQRLTSRRVVALLHRCGRRNDRDLVERILTELKAPALRQPPPVEEAMGLAAKSLIDILGQMHAAVTLLNDALTKEFSQHQLAPVLTSAPGLGTVLAARILGEVGDDLARFESPANLRAFAGTAPVTRASGRSSYVKARKVRNKRLGDACHWWAFSMLTKSPGARAHYDHRRSLGDTHNAALRNLANKLLGRLWWCIQNQQPWDEAAAWPSEGTGPQVAAA

SEQ ID NO: 199648 - protein, 311 aa, unidentified
MKLSYVGVDLAKNVYQLHGVDRYGKVAWKRRLRRGQWLQALLDNAEPGCEIGMEACTGAHHWARELQSRGYTVRLIAPQFVKPYVKSNKNDANDAEAICEAMSRPHMRFVTVKSIEQQDIQATHRVRTEIKDHRNAKANQIRGLVAEYGLVAPKTLLALRRAIPEWLEDAQNGLTDYFRSLLHGLWDDLLTLEDRLKKLDKEIETLARSNEVAKRLQQLRGVGPIVATALVATVGDGAQYSKGRQMAAALGLTPRQNSSGDRYRQATSSQRRGGCTGKQDCAHGLGHATQRHRLRSKPQHMLSWKYEGEPQ

SEQ ID NO: 199649 - protein, 429 aa, unidentified
MNYTQNEKIEQVTDSTIVVGVDIGSQIHYARAFDNRGRELTKRVFSFHNDLEGFNSFNLWAETLKSENKKTAVLIGCEPTGHYWFAFAKYVKDHQKRLVMVNPFSVKKIKELDDNSPKKTDSKDPKTIAKLVVDGRYSIPYVPEGIYAEIRDLVYSRDRIMKQHNISANRIQRWLAIHFPEYLGLYTRFDAASGLAVLEKAPTPKDVIALGVNGIRKIWHDKKMRGRGVTEDRAKTLVGAAHNSVGLDGGIGTKSELYMLLEEHRLWTSQLEAVNKVLEEMILKVPHVEKLLAIKGVGSITIAGFIAEVGDIRRFDSPKQIQKYAGLELVENSSGKHKGRTRISKRGRRKLRKILYQVMVPLLARNREFREIYDYYVTRVKNPLKRRQAMVAVSCKFIRVFYAVLTKDVEYDRFKMMSDIQQKSGVIAA

SEQ ID NO: 199650 - protein, 342 aa, unidentified
MKTFVGLDVSQKKTSICVIDHNGNKIRMVNVDTHPGVIADYLFSEGFDKSKVGLETGPLCVWLYHSLRNFGLDVDCIHARHVHAALSMQLNKTDQNDAFGIARLVLSGWYKPVHVKSLQCHQQRLILTSREKLVQLRVAVTNQIRGLLKTFGVVLPPGKNSVFERAVLESSPSLETVKPAVIMLLDTWEHLSGQIRKFNYMLEKLARKDPVCQILQSIPGVGVLTALSFKTSIDDPSRFRRVSDAGAFLGLTPKKYQSGEVDRNGGISKQGNRMTRTLIYEAASCLLTRYGTDTSLAIWANGLRRRMGYKKVIVALARKLTTLMLSMWKSETFYNERLKAVN

SEQ ID NO: 199651 - protein, 387 aa, unidentified
MNAKWTHSIRPSDYDIFGGLDVDKTSIAVTFVNPEGFIKSMRIPYNCENLVSYCARHFPGKRIAFAYEAGPTGYGLYDQLTTLGYRCLIASASMIPTAPGQRVKTNRLDSKKIAEALRGGQIRSIHIPTDSYRKLRHLTGLRDTFVRQAAANKCRIKALLLFEGIPFPEAPPNSQWSRAVINQLRALVLEDCVRFKLDSLLANLEFAEGKVLETTKEIRRFCRQDPELCHQIAYLMSIPGIGWIVASHLLARIGDWRQIENVRQLGAFLGLVPTEHSTGDATNRGSITRMGAGRLRNKLIQSAWTAVRRDPELHDFYQRVYQKHPLDRAARKAIVAVARKLTTRIFAVLHEQRPYDIRYTSPLATKEQKCPRGRLDASQKLEALIGL

SEQ ID NO: 199652 - protein, 338 aa, unidentified
MYYTGIDLHKETCFLTTLDEEGKTVHKAHLENTKDSILSYFGALESESKIVIESMASWYWLYDLLTEQGFRVVISNPIKTKAIASAKIKNDKVDSHMLSQLLRVGLISTVYVSTVKTRQLKELLRHRQRLVRDITRMKNRIHILLMKNNYQVPCSDLFGVQGLKYLQKISLPDYQREQVEIYLSLYGQIREKVEPLTKKIQEMAQEHPIAKLLMTIPGIGPIVAMFIVAEIEDLGRFRSYRNLASYAGLVPSLDASGGKERRGRITKQGSPYLRTALIEAAQAIARMKNRRLNLFFRKRIVKSGYQKAIVATAHKLLQYVFYVWKNQTAYREENPVWA

SEQ ID NO: 199653 - protein, 350 aa, unidentified
MQIIGVDLHTRQQTIAMLNVETGEVIEKTLRHEGESVREFYSTLPRPTRVGIEATGSMQWFLELMEELGIDCQVGHPAKIRAAEPRKQKHDRRDAALVLQLLVENRFPSIWMPSREQRDVRSLILYRHQWVRIRTRVQNALQAIALSHGLRRGSSLWSKAGQHAIAALSLTRYTAERRTALQSLYQHLEEQIKDLDGKVEELAWKRPQARRLMTHPGVGPITALATETFLGEPKRFVDGKAVASYVGLIPSEHSSGGRQRLGGLSKQGNPLLRFLWCEAVGHAVRKDAELQRFYQHKLVQKGLGKAKVAAARKLGIRLWILLRDQIDYQEFCRRGQLRQKHGGAHAGMPA

SEQ ID NO: 199654 - protein, 343 aa, unidentified
MPITTIGLDIAKHVFQVHGVDDRGRTVIQRRLRRADVRTYFAQIETCLIGIEACHSSHYWARTLAALGHEVRLIPPQYVRPYVRGGKNDARDAEAICEAVSRPTMRVVSIKTADQLALQALHRMRARLIHDRTATANQMRSFLSEEGFVFPQGLAGFRTRLIALLDAPQPGVTPLLRELASRFLEQLRALDEWIDGLNAQLRQAFSADETCQRLAEVVGIGPVIATAVVGTVGNARAFKNGRQFAAWIGLTPRQHSSGERTQLLGITKRGDAYLRMLFVQGARAVLRTVARRRDRLGQWLQQLLTRRHKHVVAIALANKIARITWAVLAKGIVFQPHLMSAPA

SEQ ID NO: 199655 - protein, 359 aa, unidentified
MDKCNTEIVIGMDLSDKKSEICEMNYSNGEIRTRTEVANDGESLSAFFSEYLDPKKVMIAMEAGTHSPWISALLGDMGFNVLIGNPRKLKFIWKSDKKSDRRDAEMLARIARFDTKLFYPISHRSRESQSVLAIIKARDALVKTRTLLINSVRGMLKSMGYRPPSCSAPAFAKKIMKEMPEEYCYALKETLEIVGQITQSIKGYDKKLTKLCKEKYPETEILQQVNGVGPITSLAFILTIEEPERFKKSRYVGCYLGLVPRRDQSGEIDKQLGITKAGNAYLRSLLVQCSQYILGPFGNDCELRRFGEKLTARGGKAAKKIALIAVARKLSILLHRLWADDATYEPFYLKNKNSVKKSA

SEQ ID NO: 199656 - protein, 329 aa, unidentified
MKTAGVDVAHKTLAVAIRKAGKTGKVREFANDPVGHRAVLKALKSAGVERVCLEATGTYHLDLSVALDDGAVALMVVNPKTSKRFAEAMSKRTKNDAVDAAVLAEFAERMEFEPWQRPDDQALGIRACARRLAALSKTRTEAKNQLHALEQTQTTPRIILEDVKQSIAQSDIQIARLRTWALGVIDDEAVLKETFALLISIKGVAEASAIQLMGELLVLPEEMKAKQWVAMAGLDPRHNESGTSVNKKPRISKAGNRYLRMALYMPALSAARHDRHVHGYYRHLLEQRGLKKIQAICAVMRKLLHAIHGMLKHRQPFDGRRFYALQEAA

SEQ ID NO: 199657 - protein, 341 aa, unidentified
MSIVGAFDVHRRQLTFEYLDTSSGELKRGRVVPADRQHLRQWLARFAGQDDVHFALEGCTGWRYVAEELAAAGVTPHLAEPADTAALRGKKRHAKTDKTDTRHLRVHLMAGDLPECWIPPGHVLEARAVVRLYKDLLDERGAWHQRIAATLFHQGVPVIGSMATAEGRAAVEQVDLSPAGRQAVQAGLRQIDRLTGELDVLRRQLGILSRRQPGCAALRATWFGVGPVTAVAIWAELGDVRRFGNSDDVVRHTGLDITVWSSDDKGPPGRLSRQGPPLLRWALYESAKCAARAAAPDHGYYAAVRDKRTAGLATLSVARKLARRCYHTLRELGEEALAPAA

SEQ ID NO: 199658 - protein, 387 aa, unidentified
MNRSKSRIVGLDVHPDSFAGAILQGMDPWKARVVSTSTRVALPLLEKWALRHTREEDILVMEASGNAFCVAERLRALKRKVVILESHRAGKVGKTYCATDRVDAIKIARIYLSALSPVVWQPDAKTRERREVFSAYQAVVKEAMRLKQQIKSMLNEHCVRLEKGFRLSHPTALGRLLLRRKWSEAQKMLLSQLHAGLVGARVRRQRLRHYMAQEILAEKELLRLTRLCGINLITLYGLIAAIGEIKRFASARKLSAYFGLNPTVEQSGNYEGSGALKRHGRGAIRALLVQSAKKLLQVNNPLQKWGLAVAARRGRNKAAVAVARKLCVAVWHVMQGHVIGAIERMDTLHTKLHKLATELGVPTIKQLGFETKEAFVQKKLYVLRSYP

SEQ ID NO: 199659 - protein, 348 aa, unidentified
MLAEVVDAVVGGDTHRDTHALELTAPSGATIATLMIGNDERGFAEAIAWVAEHAPGPRVVVGLEGTRSYGIGLARVLQAAGLTVVEIERPRRGERRRGKSDPIDAHLAALHALRPDADRLPTPRADGDREALRILLGARRELTTAKTRTINRLRALLLTGSDADRALSRGALSSDRLAAITRRRGGQHETREYAVRRAQARRLALAISGIDRELADNKWHLADLVTHLAPQLLAKRGVGPVSAAQAIVSWSHPGRCRNDAAYAALAGASPIPASSGRIVRHRLNRGGDRHLNRTLHDILLTRWRTCPRTRAYIARRRAEGKTDPEIRRCLKRYIARELYRSLNTAMAA

SEQ ID NO: 199660 - protein, 417 aa, unidentified
MESTAQTTLPDVPPNGVTCGIDWARDDHAVSIVDARGREVRRATVEHNAAGMRELLDLLSRTGAREVAIERPDGPVVDNLLQAGITVVVISPNQLKNLRGRYGSAGNKDDRFDAFVLADTLRTDRTRLRPLLPDTPATATLRRTCRARKDLVGHRVALANQLRAHLRVVFPGVVGLFAEIDSPISLAFLTRFDCQDRADWLSVKRLAAWLAAASYCGRVDPAVLHGRLTRAPRGAAGDQGAANAHVTRALATALTSVATQIRTLDAQIAEQLALHADAHIFTSLPRSGTVRAARLLAEIGDCRARFPTPESLACLAGVAPSTRQSGKVKHVGFRWAADKQLRDAVCDFAGDSRRANPWAADLYNRAIARGHDHPHAVRILARAWLYVIWHCWQDNTTYDPDQHQALQRLIHLKTAAA

SEQ ID NO: 199661 - protein, 384 aa, unidentified
MPTMTTRSPLVSAAVPTLHLALDLGNLRWDLAFTTTAGNPPRRRICPARDLATLDRELARAKEHFHLPPNAPVVACYEAGRDGFWLHRALTARGIDTTIIDSASIEVNRRRRRDKSDRLDAAALLTLQLRAAVGDRRSWHPVRVPTEAAEDWRQLHRELALLTRERTRSRSRIKGLLATQGLHLTTLRYLPAQLPRLHRWDGTPIPPRLHARLEREWQRLTLVLAQQRTLVAERRVLLVRSNDPAVQQVRQLLALRGIGEVSAWLYTLEFFAWRGFRNRRQVGALAGLTNARQSSGRVTRDLGISKAGNVHVRSLAIELAWSWLRHQPESALSQWYTERFAAGGSRVRRIGIVALARKLLIALWRYLEMGLLPTGARLKPGVAT

SEQ ID NO: 199662 - protein, 372 aa, unidentified
MGHHTEVFVGIDTSKSRNAIAIADGGRGGEVRYLGEFSATEAAIRKLVAKLAAKCCHLTFCYEAGPTGYGLYRLLKSLGHDCLVVAPSLVPKKACDRVKTNRRDAVSLAKLLRAGELTAVWVPDERHEAMRDLSRARQAVKKDLQGKRQQISSLMLRLGRIYPGKTTWGPAHMRWLMSQKLEHREQRIAFEELLEGIRQESERMERLEDAIREVVPEWSLAEVVAALQAMRGIDLIAAVGVLAEIGDLSRFQNPRELMGYLGLVPTESSTGDKVKRGGITKAGNGRARRILVEAAWSYRYPPRVSRDKQPKVEAAPRRAREIAWKAQTRLCGRFRSLERKGKRRTVIVPAIARELSAFIWAINRELMPPRQA

SEQ ID NO: 199663 - protein, 371 aa, unidentified
MKSILSVGMDVHKNSFSLCAYDGYTGEIVSESTFVSDVKLVIKFIETLKSRYENDVEIKCGYEAGCLGYSLYKSLTARGVDCVILAPTTMQVSAKNKMVKNDRMDALNIAKNLASGSYKSVYVPDEEDVEIKEYIRMIHDFKKELKRVKQEICAFVLRHGYQYDGKSKWTIRYMNWIRELEMSEIQRETLNEYIAEMENLNDKINRFMNRIDEMYQSERYHEKVSKLRCFKGIETFAAMTIQVETADFERFPSAKAYASYTGLTTGEHSSGDKNNRIGITKQGNTVIRKTLVECAQSLVKGNVYAKKSQGLKSRQKGMDVNIIAYADKATERLKKKYQKLIERNVPRNKAIVAVARELACFIWGMETGNIH

SEQ ID NO: 199664 - protein, 317 aa, unidentified
MSFVGIDVSKTQLDIAERPGNKRWSAVNAEADIGKVVETVGALSPQVIVIEATGGMEVPLVAALSQARLPVVVVNPRQVRDFAKAVGRLAKTDRIDAEILAHFGEAVKPEVRALKDEDTQMLTALVMQRRQVIEMLTAEKNRLGISPKVVHKDIQQHITWLQARLEDIDRHLESAIRKSPVWREKDDLLRSVPGVGQVLSVSLITGLPELGTLSRRQIAALVGVAPLSCDSGLFRGKRTVWGGRSHLRSVLYMATLSASRFNPAISRFYRHLVEAGKKPKVALTACMRKLLVILNAIMKNRIPWQADYSTCHLPQIP

SEQ ID NO: 199665 - protein, 313 aa, unidentified
MVEDGLVVGIDVAKGWLDVAVLQTGESFRVDNDAAGWAELVKRLKRRQVRAVGLEPSGGYERGPKQALQKAGLPVRNVNPHKLRHFARALGRLAKNDRLDAAVIARYTADMPTREMRVDPLREQLAELVGARRQLSDDKVSLKNQLDQVRDPVVRRIFTRRLRSIEANILLLEKRLAELVASDAGLAEKDRLIQSFKGAGPVLSHTLLALAPELGQASRREIAALVGLAPYDHDTGVFRGRRSIWGGRAEVRGVLYMAALTACRANPLLKAFHQRLLAAGKKPKVALIAIARKILTILGAMLRNGQSWQPTLS

SEQ ID NO: 199666 - protein, 310 aa, unidentified
MERLFVGIDVSKDRLAVYVRPTGERLAVASDEAGITQLLGRLQALQPRVIVLEATGGYEARVAAALAHAGLPVAVVNPRQIRDFARATGQLAKSDGLDAAVLAHFGEAVSPPVRPLPDAQALALAELVTRRRQLVEMLTAELNRQQQARQRLVQTRLQRHVTWLRAAIAELEEDITRLIRSSPVWREKENVLTSAPGIGDVTAHALIAELPELGRLSRRRIASLAGLAPFIRESGRWKGRRMIRGGRAHVRRALYMATVVAIRYNPPIGDFYRRLIGAGRPKKLALIAAMRKLLTVLNAMLRDGRQWQTA

SEQ ID NO: 199667 - protein, 414 aa, unidentified
MNTLVSNTSLSGTLIALDIAKKHHDAKIRHPDGRTSYLRIENTLEGFNRLLALTASPHDDIIAAFEPTADYHRNIAWWLHKQGVKCHLVSSVRCARAREMLFKTWDKNDRKDASVIMYLLEQGLSSPFYDPLANGIIDIQEISNTYHQVTLARTRCLNSLVNHYLTLYFPEAEQFLHMSRAEWFCQFLLQFPTPSCITSLNRDLFVKQSWDVVGRKQYKKQFLEHLYDVAADSIALPLSEDSLAVTTFRLQLHRYVGLSAQRLQLEKQAENYLQERSDYRHLRTIPGIGAIIALMIIAERGDLTRFAHYRQYLNFCGFNLSASQSGQKHSGYRLSKRGNARLRYAFWLAATVAVRTRENSFRYKYERYIRENGDKPDQKRKAMTAVATKVARVAHAIVKQDIDYKGYYEISYRT

SEQ ID NO: 199668 - protein, 392 aa, unidentified
MSAFALLLGDKRTSSAPANFLIYDGVDAPPTASMCQSGGVEHHLREASVSKVITIGLDIAKHVFHAHGADGRGRAIFSKRISRGKLLDFFAAQPSCTVALEACGGAHHWARQLTQLGHVVRLIPPAYVKPFVKRQKNDAIDAEAICEAAQRPSMRFVAVKSEEQQAAGLVFRTRDLLVRQRTQLINAIRGHLTEYGWVAPKGPSHVAMLSDLIEEEEMASSLPEAAHAMFRLMLDLFAGLNGKIADLDKEIARRAREDEVSRRLMTVPGIGPISATAIAALAPPVETFAKGRDFAAWLGLTPLQRSTGGKQKLGATSKMGERTLRRLLIIGSSAVVQQAIKRGAPKGSWLEQMLTRKPRMLVTVALANKMARIVWALLVKRENYRAPVAATA

SEQ ID NO: 199669 - protein, 339 aa, unidentified
MKLYTSFDLHSNNSFLGIKDENGKPVFRKKLPNEPERILNALRPYKNDIAGIVVESTYNWYWLVDLLKKEGYNVHLANTSAIQKYSGMKHTDDQDDAFWLCEMLRLNILPEGYIYPSEDRPIRDLLRKRMHLVHLRTSLIVSLQNILTRNNGFRLKTSDVKALKEDRVAPYLSDNEDLALAGSVSKKTIDFLTEQINEIERVVLAKVKLKASFTRLLTVFGIGKILALTIMLETGPITRFAKVGNYVSYCRKVASKWLSNEKIKGKGNKKSGNKYLAWAYSEAANCAVRSYTPARAYYQRKLQKSNMMVAYNAIAHKLARAAYYVIRDDVNFKPEKIFS

SEQ ID NO: 199670 - protein, 312 aa, unidentified
MKIICGVDVSKAKLDACIEPGAAFASFDNTPAGITELAAFCRQHQAELAVMEATEGYERPAFLLLWEAGMPCAMTNPRSVRLYAEAMGVLEKTDRIDASVIARFADAKNLQPTPAPTSAQQRMKALVARLRQVTDDLIVQKQRRSSLLDNAEILASLDEVITLLKRQSRTLEGEIASMIDDDPLWAHLSDTFRSIKGVADRTVAWLAADLPEIGTYSNKAIAKLVGVAPIANDSGKRRGKRPVRGGRAGVRSILFLVAATAARYDKSLGDFRDRLLAAGKEKMVVRIALARKLLVRLNAKARDARAQYANAT

SEQ ID NO: 199671 - protein, 397 aa, unidentified
MSAVVGIDVGAYKHAAAVCRPGEREAERGVFRLSADRTGFDELDRWLKRQGPVERVVLESSGHYYWPLASHLHRRGYRVAVVNPLQAKYFAKSRLQRSKSDPADARTLAALGMSEEPRVKDPLLGAEAKEAARFWGGLVKEQAQIRNKLLRLVEIGFPELKECFEDPLCETALAVLREAPTARAASHKRVSTLAETSRPGGRRRLGAGKASRLHELAKQTIAPPELDAQMSFEVGMLIQQFDLLDKQIEIAEQRVAEVLDSELARRLQTIPGVGPALAATFIGEIGDIWRFEDFDQLASYAGVHPKELSSGTKGQNPDTSWHMAKTGNAYLRSAAYKMAVVGTQHNTVIRAHYLRKRAQGKSAMNAIGHCMSKALAIVWGVWRSGLEFDPTLGGPRG

SEQ ID NO: 199672 - protein, 362 aa, unidentified
MNKITRVGVDLAKNVMQLHAVDEAERVVVRKAISRDKFLDWFANREPCLVAMEACNASHFWARRLQALGHDVRLLAPQFAALYRKGGTRVKNDALDAEAICEAASRPHMRFVTVKTPEQQSVLVLHRIRTGFVEQRTSLVNRMRGLLIEFGVFLPQGIDRFREQFVEALEDGANELTGIARAALMRMWEQHKTLDEEISWLDAQIVQHVKSDADAQRAMAIVGVGTITASAAVATIGDPRQFKNGRQFAAWLGLVPKQASSGGKTRLGRITRQGNDYLRTLLVQGARSAVVTAARRNDRVSRWIVQLQQRVGYYKTLVAVANKHARILWAILARGERFDPSRMPTRHEQPGVLLGTHVTQCP

SEQ ID NO: 199673 - protein, 389 aa, unidentified
MKIFVGIDIAKLNHFAAAISSDGEILIEPFKFTNDADGFQLLVSKLESFDKNSIIIGLESTAHYGDNLVRYLVAEFYQVCVLNPIKTCQMRKNNVRKTKTDKVDTFVIAKTLMMQDDLRFITFFDLDMMDLKALGRFRQKTIKQRTRLKIQLTTYVDQVFPEIQYFFKSGLHQNAVYALLKEAPSPKEIASMHMTHLANLLKVNSHGHFTKELAKELRVLAQKSVGANDSAISIQITQTIQQIELLDSQLEKIEAEMTDIMKFNDSVIMTIPGIGYINGGMILGEIGDIHRFSNPNKLLAFAGLDPSVYQSGNFQAKTTRMSKRGSRVLRYALVNAAWNVVRNNATFKAYYDAKRSEGRSHYNALGHCAGKLVRVIWKMLTDEVEFNLE

SEQ ID NO: 199674 - protein, 311 aa, unidentified
MQDAIGVDISKDTLDAFHEGTSGYRQFANSATGLRAFCRWASGCDGAAIVFEASGAYHRDLERALSRHGLTYSKVNPRQARRFAEAIGRVAKTDKVDSRVLARMGAALQLAPTVALPEHVANLQEFLVFRRALIKDRTAARTRLKTVRQPLLRRILNQRLAQIERQVTAVDNAMQDIIAADPGLRERLEILVSIPGISTVSATAVLADMPELGQMTGKQAAALAGLAPMSRQSGRWQGQERIQGGRSSVRQSLFMPALSAIQHNCSAKAKFEQLVQAGKPRKVALTAIMRKLVVLANALLRDRRKWSEVRA

SEQ ID NO: 199675 - protein, 466 aa, unidentified
MSAGGLEMNRKRSKSKAERTLPVMHPNAAAIDVGATMHMAAVRADRATEPVRSFGTFTADLHRLVDWFTECGVETVVMESTSVYWIPIFELLDARGFAVFLVNARDAKHVPGRKTDVSDAQWLQRLHSHGLLRASFRPKGQIAELRAYVRQRERLLEYAASHIQHMQKALTEMNLQLHHVVADITGTTGLRIIRAIIAGERDPEVLARLRHYSCHSSAETIAKALTGSYRTEHLFALEQALALYDVYHEKASACDGRIEAVLKGLSIDRARSGSKELPTPRRHRTDQPNALAFDVRAALFRLLGKDITMIDGLGPYLSLKLIAECGDDLSSWPSAKHFTSWLGLAPSNKISGGKILSSRTRRSGGRAAALLRLAAVTVGRTDTALGAFYRRLSARIGKAKAVTATARKVAVLFYNAVRHGMEYVDPGASAYETRYRARIVNNLHRRAKASGFVLQPMEPTPNIVVS

SEQ ID NO: 199676 - protein, 406 aa, unidentified
MVLKQYQIISNEVLPMILVGIDVAKDKHDCFIMNSDGEILAKAFTFSNTLEGFNFLYEKICSVSSHQDKIKVGLEATGHYSYNILGFLLDKGLPTFVINPLHTNLYRKSLSLRKTKTDKVDSRTIAMMLLSDVDLKPYSETSYHNEQLKSLSRYRFTKVKERAKLKTSVSRLVQILFPELGQLVSTLHMASVYRLLEEYPGSSYIASAHLSRLTNIIFESSKGKYNRDTAITFREVARKSIGSVIPAKSLELKHTIKLIRELSSEIDEIDAEIKIMMEEIASPITTIPGIGYNMGAMIISEIGDFSRFSSPDKILAYAGVSPSTYQSGKIDNCYSHMEKRGSRYLRYALFIAAQKVCHWDNTFSEYLSKKRSEGKHYYVAISHAVKKLVRVIFHLERTRQPYLKAA

SEQ ID NO: 199677 - protein, 405 aa, unidentified
MNAVGIDVSKGKSTVTIRRPGDVVVMSPRDIPHTQSAINDLIGLIRGLDGETKACMEHTGRYYEPVATWLSDAGIFVSAVNPVLIKDFGDDSLRTPKTDKADSQKIARYTLDRWAKLKQYGIMDKARNQLKTMNRQFGFYMNQKTAMKNNLIALLDQTYPGANDFFGSPARSNGSQKWVDFVHTYWHVDCVRSRSLDAFTEHYQNWCRRKGYNFSASKAEDIYRLSSDIIAVFPKDDSTKLLIRQAVAMLNSDSETVESLRLKMDEAASTLPEYPVVMAMNGVGPTLGPQLMAEIGDVTRFTHRGALTAFAGVDPGKDESGQHIRKSVPTTKKGSPYLRKTLFQIMDSLIKRSPVDDPVYAFMDKKRAQGKPYYVYMTAGANKFLRIYYGRVREYLSALAEAENI

SEQ ID NO: 199678 - protein, 271 aa, unidentified
MINHTIGIDISKDTLDVHIHPSGEDRRFTNDAEGFRALREWIGERSVERLVFEATGAYHRAFEQAMGQTGLPICKVNPRQAKRFGEALGVLVKTDRIDARMLARFGVLIEPPIRSAPPEILLQLKDLQVARTALIKDRTAAKNRERSLQSPLLKRQSCQRLAQIERHLAAIEAEMVSLVGGDPDLARKFEIITSIPGLAERSALALITSMPELGTLDGQAAAALSGTAPMTRQSGKRIGKACITGGRSQVRQSLYMPALVAAHHNPDFATK

SEQ ID NO: 199679 - protein, 341 aa, unidentified
MEQKLSVRGIDLAKQVFHLVGMDAHGTMLVRKRLYRAQMMAFIAQLPPTLIGMEACGGAHYWARRFREHGHEVRLMAPQFVTPYRKANKNDMRDAEAIAEAMTRPTMRFVPVKSVAQQALQALHRVRERLMKARTALINETRGLLHEYGIIVPQGAATFRQHVLEKLTTEDAKLTPHSLALFRQLLEELAALDARVATYDAQLAQVAQTHPVCQRLMTIPGLGELTATALVAAVSDATQFKNGRQFAAWLGLVPRQHSTGGKSRLLGISKHGDSYLRKLLVHGARSCLRWVGRKRDRRSQWAQSLMERRGWNKAAVALANKNARVAWALMSSEQVYQTAAA

SEQ ID NO: 199680 - protein, 470 aa, unidentified
MQVRLGVDIACRAAHRAACADQTGMIVWSGHQFRTRAEELEALWARLPGDATEVLVVMEPTRNAWVPLAAWFRRRGATVVLVPSEQSADLRAYYAKHTKTDRLDAELLARLPLLHPDGLHPETTNGPGDPLKRAVKIRSGLVHRRTACMQRLDALLEILGPDWVAALGSDMTQTAFKFLAGWANPHQVKRLGRARLARWFQRQTRKAWGERRADAVVMAAEATLALWGPTGLDYEALAADIATEASLALELSRQIARLDERLFDLYCDADPDHILLSVPGVGKILAAQIRGRLGDPRRFTSLAAARSFSGLIPHQHSSGLTDATGGPTKHGDACLREALFLAADHARKTDPTLAARYQRLMCQTGRHHTSALCTIATVLLTRIVACLRNGTPYQVRDVDGSPITPEQGRAIVAARYQIPPEVRAARRVVSNLRSRQRGWDERIEQGVAKRSTMTPVPPASLTPAASLDNH

SEQ ID NO: 199681 - protein, 351 aa, unidentified
MDATTVGVDLAKNIFVACVADCAGRIVERREFNRAGFLTWLGTLPAGTVIGMEACGSAHHWGRTAQRLGLAPRLMAAEFVRPYRKRQSVKNDRADAEAILIALRSPGMRFVPVKTEAQQQRLAWHSLRIGWVEERTALFNRVRGLLAEFGLIVDPGPKHLRTLLAEREFDTDLSPALRGVIQSVRDQLEALDTRIGECDRQITAQQADDPLAKRARDLPGVGLITADAVTASVGDASMFKNGRQFAAWLGLTPSQSGSGGKTKLGRITRRGDDYLRTLLVQGARSVLAATLRKQRRESPDQLTRLQQWIVALNGRIGYHKTLIAIANKHARQLWAVLAKGEAYNAQAWQRA

SEQ ID NO: 199682 - protein, 404 aa, unidentified
MISIGIDVAKGKSTVCAIKQYGEVLLTPKDYKHTTDDLGKLHEKLSTFNGEIHVIMEATGNYHLPIFYFLRSKNYKISIINPLEMKRYRCQGIRNPKTDKIDALIIAQYGIDFWYRFKDEAKKDAKRTELRLLGKQYEQYMKFRVMRCQALSDILDRTMPGVYKILNDFDRNNGSDKLADFAYDFCHRDQITKCSEKVFIKKYCNWLKKKGYRKSEDEARQLYSLSLTSIPTLDDTPLPRMLVREAVKVLREVDSSLFHILNEMKVLAKQMPEYETVLSMGGVGETLAPRLIAEIGDPRLFHSGKALVAYAGLDAPPYQSGQFTGTKRHISKRGSATLRKIGYELMDSMNKHQKLLGEDPVCQFFMKKREEGKPYRVSMMAAYNKFLRIYHSRVSSALNKAEEQ

SEQ ID NO: 199683 - protein, 606 aa, unidentified
MSTTSCLDRIGVGIDTARYGHRVSFLRPDRKPAAKPLTVMESRAGYQSLQQRLTQLHEQHPDARFHVRIDAAGQYAVNLEHFLRGLSLPMTISVGEPKRNKDYQKAHFPKRTTDDTESQAMARFAVVEQPDATPAPSQPMILLREVGGRLQAQVKQTTRAINRLHNLLARVFPELATLTDDISAGWVLKLIDKYPSAGRIAAAHRSSLEKIPHLSAEQADALHQAAGQSVASLRGDVAETLVRDLVEQVRLSQRAEQKLRDMLTAAFADLPASPHVQVVTITGIGDATAAVLVAKIVDIDRFATPNHLVNYFGVFPEENSSGVDKHGKPLPPGTMCMSRKGNDLVRSYLWNAARSAIQHNPAIRALYRRLKAKGKRGDVAMGHCMRKLLHLVYAVWKTNQPFDVNHFPWEEPSDTPSATPAPLSGNAGTTPTANEKAVGHKRGLPAEEVVTTANSTVAPAPPVVNPAPPRISGERPKVDFACLREQVTMQQILDHLGFLASLGGQGQQRRGPCPVHSQPTAPERTFSVHLGKNVFQCFHADCALKGNVLDLWAAIHRLPLYEAALHLAESFQLALNREEEPVRGTSSCPTARARRPASAAATEGSN

SEQ ID NO: 199684 - protein, 385 aa, unidentified
MGFRYFLGVDVAKAKLDCLLLDSVEQRRRSKVVANTPEGFEQLVKWLTKQGVGCQQVHAVLEPTGVYHERALFALSQAGIAVSLVNPAQLRRFAQGLGIHTKTDACDSAVLARFGEMIKPAHWQPAPSKARALRALLARRDVVAQDLQRERNRCEALVIEDTPERVRQSLTDTITFLEQELQALQKSIDEHIDDDPDLKRIWDLLQSIPGVGQRVADHFTALLAGRDFKSAEQLAAYLGLVPIEWQSGTSIKGRPRMSKAGPASLRQLLYMPAVVATRHNPHIKALYQRLLAKGKAKMSALGAAMHKLAQLCFGVVRYNPFSDAGGDQSFAIALLDAEGNGLVVSSLHSRTETRVFAKPVRAGRSTYSLSDEEQQAVKKALEPSA

SEQ ID NO: 199685 - protein, 533 aa, unidentified
MAAKKSTQRKHIRSEGTYSSEELKCLTLDDGTRVVTSADGDIKRPVCASIDVHKKILMAAVCRTDPETLKAVFFVRQFQSTNKDIRGMAQWFKDQGVQDVCMESTGKYWIPVFNILEQCGLRPVLTHPKYVKQAKGQKTDFRDAIHIASLFRMDLVVASFIPPADIRDLRDLCRYRLKLTYMRTSEKNRFQNSMTVSKVRLDCVFSDPFGKSASAIMEYLIGTDPDQVSDEEILHLVDRRVQASSEDILESIHGYEFLGAQRDKLNIIQLHLGQLNECIRLIDEKLEYYRQKYSRIIRHLVTMVGITDMSALYILGEVGTDMSVWKNDAALSCWAGLSPANNASAGKKKSTRTGDGGHYLKPLLVQCALAATKSTKKDPYFHYKYETLKKRRGHKKAIIAIARKMLVAIYHMIRDDADFLPADHEDTIQNTKKTKGLNLNNVIAFLKEQGADEGTIRLVETQCCGKEAETIDTCCKPPVVQDAKEKQSISGSADVSQPIQESVNGSPVLISGSQQGHALNHHSKEPAVATATA

SEQ ID NO: 199686 - protein, 339 aa, unidentified
MAILFVGIDLAKNVFAVHGVDERGKAVLVRPTVQRAKLHELVASLPECTIGMEACSGAHHWARLFKQHGHAVRLMAPKFVSPYRISGMRGKNDAADAAAICEAVQRPNMHFVPVKSEDEQARLCLHRVRQGFVEQRTATINRLRGLLSEFGIVLPQKAATVRREATAHLEDLPGWANTAVGDSLSEVHRLDERLAEYDRHVSQMAADDERSRRLMQLQGVGCTTASALVSTIGDAHDFKNGRQLAAWLGLVPGQYSSGGKARLGSITKAGDRYLRTLLVLGAKSVLAAAKNKDDRLSRWAMALQARRGYWRAVVAIAAKNARTAWAVLAKGESFRPIQT

SEQ ID NO: 199687 - protein, 433 aa, unidentified
MLKLNYMSTLFVGIDVSSKTNAVYAMDFEENKYISSSFGNNQPGADKLVNMIAECMHKHKNLDTVLIVLESTSVYSVHISNFLSASEVLMPYRPYVFCVNPKAASNYRKSYIGMEKTDPTDAYLIADFGRVGRTKKLEPWRGGQFISLKRLTRHRMHLSECITREKTYMVSNLYLKFSELQLLEGDDKPFGSLYGATSSAVLTEFLSPQEIIDMPEEDLLTFLAGKSRNRISDLSKTSELLRKAARDSYRLDKCMYEPLSISLASSFNCIHAYQKEIKLIEQAIEKCINGMNPNALLILQSIPGIGPIWASGILSEIGDITVFHSSDALAKYAGLYWPKGDSGDFTSEDNKMSKAGNPYLRCYLGEAANSVRKHIPEYADFYARKYAEVTKHQHKRALALTSRKLVRLVFGLLVKNQLYTGEKLDTEYNIESN

SEQ ID NO: 199688 - protein, 324 aa, unidentified
MSDCSVGIDIGKYKFDVAVLSPQGASKYKNFPNTSDGFKELIKWLGSAVKLAPHFCMEATGRYGEQLAFFLHDAGYSVSVVNPVCIKNYGKSKLRRTKNDKVDSMLIAIYCQNESPKLWQPLPKASRELQALTREMYRAKDLLAQEKTRLKAGQHCRAVLSSIESRLFFLEAQVEELETLINAHIDSCPQLKKQKRLLVTIPGVAETTANALLGEIPDVHRFAGVRQLVAYAGLAPSERSSGTLRGQTRLSKVGSSRLRKILYMPAVCGKRYNPAIIAFCNRIEAGGKSKMVALGGAMRKLLHIVYGILKSETPFDARIHLQKA

SEQ ID NO: 199689 - protein, 405 aa, unidentified
MYNAVGIDVSKGKSTVTVLQPGGTVVRKPFDITHSSCELKNLTDYILTLDGETKAVMECTGRYHEPILRALSDAGIFVSAVNPHLIKNFSNNTIRKVKSDPADSKKIARYTLDNWAELREYSSMDTTRSQLKTLNAQMAFFTKQKVAAKTNLISLLDMTYPGVNDLFDTTTRDDGSEKWVDYAASFWHVDCVRKIGLSAFTERYRAFCKRHGYNYQSSKPEELFNASKELVAVFPKEKEYKDMIQMSIKQLNIISANVEHTRQEMNRLAATLPEYNTVMAMRGVGATFGPQLIAEIGDISRFNHREALTAFAGVDPGVDESGKFKSKSNNASKCGPSRLRKTLFLIMSSLLQTKPIDDPVYRFLDKKRSEGKPYHVYMTAGANKFLRIYYGKVKECLRIQSETEN

SEQ ID NO: 199690 - protein, 443 aa, unidentified
MSTPSRLVCPRKPSPSAVTSGQLVVVIREGRLMETLIARCCGLDVHKAHVTACVRLLIDGVVSEIVQTFGTTTPDLLALRDWLTAQGVTHVAMESTGVYWKPVYYTLEDEFKVVLVNAQHVKHVPGRKTDTIDAAWIAKLLAHGLLRGSFVPPKPIRRLRDLTRFRKALIEERTRAVNRLHKLLEDAGVKLSCVATDVMGVSGRAMMRALIEGEAEPEALAELAKGRLRRKLPELREALTHRFSGHHAFLLERMLAHVEELEDDIDALSVRIAEEIRPFAPAVELLRSIPGVERRAAEVLVAELGTDMTVFPTAGHLASWAGVCPGQNESAGKRKSAKTRKGSKWLRKTLIESARAAARTRETYLSERYRRLAARRGDKKAVIAICHEILCAAWHMLQTGELYREQGADQFRQRDQDRIRKRAINQLEKLGHKVILEELQQAA

SEQ ID NO: 199691 - protein, 404 aa, unidentified
MDLAPLYRCVAALDVHQAKLTVCILQERSDGELRVELREFGGFKRDRRAMAAWVASFAPESVVMESTGIYWKSPYAALEQVGLRALVVNARHVKQVPGRKTDLADAQWLAILARGGLLRGGFVPAERFRRLRLIARQMQKLTGILAGEKNRVHKVLTDGGIRLAVVLSDVHGKSGRAMVRALVAGEPAQALLGYADPRLKASEEDLLDALDGDLSAEHRLVAGQLLDHIGYLERQIEALRQALLLGLAPQQGLLRALQTIPCLDETGAAMLVVEIGDDMQAFGSPERLASWAGVCPGNHESAGKRKSGRQRKGNPYVRRLLCEAAHAASRTRCALAEKFKGLLVRRGRKRAIFALAHKLLKTVFVLIDRGDYYRDASVDYEAMSVERNAPRWMKMLRKYGYLPA

SEQ ID NO: 199692 - protein, 422 aa, unidentified
MLEQTQDEQEIIERVAALDIGKAELVCCVRVPDPKGGSRRVQEVKSYSTMTRSLQVMAERLLDLGVTRVVMEATSDYWKPPFYLLEAHGFEVWLVNARDVKNLPGRPKTDRLDAVWLCKVAERQMLRPSFIPPIPIRRLRDLTRYRIGLVSDQTREKNRVEKLLEDSQIKLSVVASDIFGVSGREMMAALIAGERNPQVLAQMARTAMRTKIPQLEEAFVGNFNEHHSFLLTKMLARIDALDADIADLDTKIEAHLAPFAEAVARLDEIPGIGATAAAVIIAEVGLDMTRFPTPAHLSSWARFAPGVKESAGRKKGTGATGHGDRYLARALGEAAVGASRTNTFLGERYRRIARRRGKKKAIVAVGRSILVIVWYLLQDDTVHFHDLGPGYYDSRINPERKKRNHIRELEALGYKVTLEPAA

SEQ ID NO: 199693 - protein, 333 aa, unidentified
MKNYLFYVGIDISKLKLDITILDASSLKSEHFVVENNIKSISLFVKNLNKKIDIHQTLFCCENTGVYTNHLSSVSVDLKLDLWIVPAIEIKRSKGISRGKTDKSDAKDIAYYSYRNIDKLKLFTLTAIDVQKLKILYTEREKMLKSLLLLETTKENKDFTSKEVFKEVLTINQSLTKTIRNAIRKIETKMKEIIKANAQLNKQTQLIRTIPGIGEQTSIYLIIATKGFTAFKKWRQFACYSGVAPFEYSSGSSIKGRTKVNHMADKKIKSLLQMCAMTTLKYDPQLKEYYNKKKAEGKNSMLVLNNIRCKLISRVFAVINRKTPYINTYKFAS

SEQ ID NO: 199694 - protein, 346 aa, unidentified
MGKSITDLSSVTIVGLDLAKHVFQVHGVDASGRVVVAKAMRRNKLLEFFASLPACLVGLEASGSAHHWARELIRLGHEARMMPPAYVQPYGRGQKNDAADAAAICEAVTRPSMRFVGVRSLENQAALMRHKAREMLVSQRTQLLNGLRGHLTEVGVIAAQGPRHARELAELIEACDETIPFEVCEAVAPLVVQLRNLDEAIARLERTIAKLAQKDETARRLMSIPGFGPITASAMAATIQDTSSFAGPREFAAFLGLTPKQNSSGGKQKLGRISKMGNRNLRKLLVVGAHAVLFHRKSHTDPLRMWAKKLIEKKPFKLVAVALANKMARIAFAIMRGETTYREIPA

SEQ ID NO: 199695 - protein, 349 aa, unidentified
MNFYTNTHPYYCGIDLHTRLLYVCIIDNENNILVHEKIDDSPDKLLALLKPYLGNIVVGVECMHCWYWVSDSCEEHNIDFILGHALYMKAIHAGKTKNDKIDALKIAKLMRGGNFPLAHAYSKEHRSIRDALRRRTHIMRMSAQLKAHVSSTISQYNLPALESRLNLQNSSDREKMHHFFPDEAVQKSMDLNLNIIETMVSELYKIEHYVKTQAQTHRATDLHILKSFPGIGKILALTILYEVGDIKRFPSVQKFASYSRLVKCKAESAGKTHGTQGNKIGNAHLKWAFSEAAVLYLKGNDNAKRYLAKLQKRMSKAKALSALAHKIGRCTYFMLKNQQVFDEERFLNG

SEQ ID NO: 199696 - protein, 347 aa, unidentified
MKRILKQSVGIDVAQKELVVQLGRLYEDLSTELYAHKCFANTVKGMNALEQWVLKLTEPTASIRYVMEATGVYHELLACYLVDHGYCVSIILPNKISNYFRTLSVKTITDKSASEAITLFGLERNLEDWKRPKPVFKYLRQLTRERDQLVQERTMIKNQLHAEKTESDPNPSTLRRIKQRIDLLNKQEKNIKEEIETLIKRERELKAELALLRTIPGIGTLTAATILSETNGFELVRNKRQLASYAGFDVQEKQSGTSVKGKTRISKKGNKHLRKAMHLPALTAIRHDERFKAIFARIVAKHGIKMKAAVAIQRKLLELSYTIFKTQIPYNKNHFQETQTAAQKKEM

SEQ ID NO: 199697 - protein, 324 aa, unidentified
MTDATLGIDVSKKTLDANCVKGQRRQSRAFANSPEGWKTMLDWLKAMGSRQAHVCLEATGRHSLGPALALHDAGHVVSVVNPAQIRDFGRTKLGRNKTDKVDAALIREYAELFQPAPWTPPSPAMRQLCELQTVRAGIVASRTEWRNRIGSGLGDSTATKLATATIDHLIAQLEAIDKAIGETIDGDAELRGRRDLLLSVPGVGETLAAVLLTEMPEPGILRRSGELVAYAGLNPSHHRSGTSIDRPTRISKIGNAALRSSLYMPALSAMRYNPAIAALVARLKSAGRLKPKQIVVAAMRKLLVTCFGVLKTGQRFDPAIAMPA

SEQ ID NO: 199698 - protein, 422 aa, unidentified
MLEETQETEEIIGRVAALDIGKAELTCCVRVPSPGKRGRRAQEVRTYPTMTRSLLVLADRLAELGVTRVVMEATSDYWKPPFYLLEAAGFEVWLVNAKDVKHLPGRPKTDRLDAVWLCKVAERQMLRPSFVPPPAIRRLRDVARYRADLVATRTAEKQRVEKLLEDAQIKLSVVASDIFGVSGRAMLAALIAGERDPKALAQLARGRMRAKRSVLEEAFTGFFTDHHGFLLAKMVARVDALDADIAELDGKLEELIVPFAQVVDRLDEIAGVGRVAAQLILAEVGVDMARFPTAGHLASWAKFTPGVKQSAGKTKGKSSTGHGNRYLARVLGEAAVAAGRTDTFLGERYRRIARRRGTKRAIVAVGRSILVIVWHLLADPTARYHDLGPGFYDTRSNAERTKRNHIRQLEALGYTVTLQPAA

SEQ ID NO: 199699 - protein, 345 aa, unidentified
MEYIGIDVHKRDSQVCILGEGGEVVLEQRVRTQRERLWELLSMRSKARVLLEASTESEWVARYLEEMGHEVVVADPNFAPMYATRSRRVKTDKRDARSLAEACKLGAYRPAHRTSDASRHMKAQLAVREALVRTRTRYISLVSALVRYEGWRIADGEAETFVKRVAALPMPGRLMAQVAPLLSLMQHLNEQIAFMNGVLERVAQKDEQVARLCTVPQVGPVTACAFVSAVDEPKRFGGPHQVEAYLGLVPGEKSSGEKQHRGPITKTGSSRVRWLLIQAALSLLRVKKPETAHLREWAEKIAARRGKKIAVVALARRLAGILFAMMRDGTQYRPPQAQEEEKEAA

SEQ ID NO: 199700 - protein, 365 aa, unidentified
MWEAPVKFQRTSVGLDVHARSVLGCALDGDTGEVFQRRLTPDYGEIVAWLGDLPGPVAVTYEAGPTGFGLARALAAAGISCEVAAPSKLIRPAGDRVKTDARDAAHLARLLHLGQITAVTIPTASQEAARDLVRAREDCRGDLMTARHRVSKLLLRQGIVYYGGNAWTTRHEAWLRTQRFDNPALQLSYEAAFDATLACLDRRNRLDDAITLLAGDSEFTPVVHRLGCIRGVATLTAFGLAVEIGDWQRLTGRSIGAYVGLVPCEYSSGDSRSQGGVTKTGNGHVRRLLVEAAWHHRNHYRPGAELRRRWDLASPAARARGQAANRRLHARWSAFDARKKRPVIANVAIARELAGWCWSLAVMPD

SEQ ID NO: 199701 - protein, 360 aa, unidentified
MKKSSKLSQQTKLAKPDRSVGLDLGDRFIHYCILNQEGEVIEEGRMQNSESALRKHFGNEAVMRIAMEAGTHSPWVSRLLKRLGHQVLVANPRKIRAITGSESKNDRNDAEQLARFAAYDPKLLSPIEHRSEQRQQDLNLIHARATLVRARTMIINVVRGLVKSAGGRLPSCSTESFAERTPAAIPAPLTEVATPLVRQIGMLTAQIELMDKQIDQLVKKYPEISVFRTTPGVGPLVAACYVLTLDSPDVLGDNRQAGAFLGLRPRQSQSGESDPQRRISKTGNTYLRSLLVQSAQYILGRFGPDSALRRWGLKLAASGGKRGKKRAIVAVARKLAVILHSMWRSRKPFQAFPQPATAVA

SEQ ID NO: 199702 - protein, 387 aa, unidentified
MTAQSQVSAFIPSEYDIFGGLDVDKRSIAMTFSDHRTLIKSLRLPYSSEQLINYVRKHFPGQRVAFVYEAGPTGFGLYDDLVAHNHPCLVVAPSMVPTAPGKRVKTNRLDSQKLSIQLRGGELRSIHVPSRSYRELRHLVQLRDTQVRQLTATKCRIKALLLFEGIAFPDAPPSGQWSGRVVAELRALPCTEEVRFKLDHLIGTLYFHFNSAAAVQKRIRRFCQNDPELRQSISLVKSLPGVGWITAAHAVARLGDWREITNVRQIAGFLGLVSSEHSTGDHENRGPITRTGDSRLRNKLIQCAWVAINKDPELRAFYRRIYERQPKKVAARKAIVAVARKLTTRMYAVLRQQRPFVVRPDSSIAPLTAEETVGPRVRLDAAQNEQP

SEQ ID NO: 199703 - protein, 423 aa, unidentified
MEVMHERVAGLDVHKEAVVCCVRIVAGGKASRECRTFETTTAGLEALLSWLTQSGCTHVAMEATGVYWKPVWNILSDGKFELILANAAHIKNVPGRKTDVNDAMWIADLAAFGLIKASFVPEEKIQELRSLMRARKQLVREQTRHIQRIQKTLEAANIKLDSVISDIMGLSGRRMIEAMVAGVRSPQKLAQLADRRIKASPKALYDALHGRLTDHHRFMLQLHLGQYDALGSSIAQIDAQVDAAIARIDEEAAAGRGSFRDLTALLDGIPGIASLAATSILAEIGTDMSRFASDGHLVSWAGLSPGQNESAGKRKSSRLRKGAPWLKTLLVQCAWAAVKKKDSYYKAQFNRLKSRRGPKKAICAVAASMLTAIYHMLKNGVEHNDLGASHFDRRPAAIKANRLVAQLAKLGFRAELQPLAQAA

SEQ ID NO: 199704 - protein, 494 aa, unidentified
MVTFSFSKEKVTPADFEILHKRKPIKHLLSLSKCEIIYLSAEGAVSILEVLASSERIAPLLYGLIRMSWIAFSAESLTRLYFRKEQRITYAANLITEVDFMFYCGIDIAKHKHEMSVIDSDGKALFDSISFANSKDGCAKVLALFERLGITPETVVIGLEATGHYWLSVYEHFTELGYDVKVINPIQSEAFRKMYIRQTKTDSKDSFIIAQIMRFGQYSSTTLADENIIALRQLSRYRLALVDSCGDCKRRIIALLDQVFPEYAKQFTDTFGVASTELLLNCPTPEDMLAVSTKKLTALLKKSSKGHFGESKAKELKSIAKNTFGVSFAKDAFSFQIKQLMEQLVFIENQVSELEKEISALLHQTNQVITTIPGIGETLGAIIVSEIGDIHRFDAPNKLVAFAGLDVKVNQSGEFVGTKNKISKRGSPYLRRAIWLAASVAAFHDPILSEYYQSLRARGKHHLTAVGAVSRKMCNIIFVILSENRPYEITPPKS

SEQ ID NO: 199705 - protein, 420 aa, unidentified
MSNRHRITKATRRTTKRVSVEGSLPLLRPNAAGIDVGAEEHYVSVPADRDSESVQRFGCYTSELRRMAEWLKACRIETVAMESTGVYWVPVFEVLEEYGFEVYLVDARQTKNVSGRKTDVVDCQWIRQLHSYGLLSAAFRPAQEIAAMRAYWRHRQGLVESCTRQIQLMQKALEQMNVQLHKAVSDVTGVTGLSILRRIVAGDRDPKALATMRQRGIRRSEEEIAEALNGNYRDEHVFALAQAVEGYDFLQGQIERCDREIQQCMTGIATKISPPLESKRSSRQRAKNQPHFDLRGELHRIAGVDLTRIEGIDALTAQTVISECGVDMTRFPSDKNLASWLGLCPNNKKTGGRIRSRRTKRIKNRAADALRRAAQTLHHSKSALGAEYRRLRARLGAPKAITAMAHKLARLIYATGEVVS

SEQ ID NO: 199706 - protein, 408 aa, unidentified
MDVVYQTCCGIDVHKMKLVACLCKGHKQEIKEFSAKTKDIKAMVDWLEGNKCEMVAMESTSVYWKPLVNIFEMRGLKYMVVNAKDFKAVPGRKTDVLDSAWLADLLRHGLLKSSFIPSREQRELREATRYRKAITEERARALNRLQKLLEGANIKISSVLSTMTGKTTMNLLDYVLNNDEMMDEKTAETLIISRISASVKEVTEAMEGIMTPFQKTMMKQVLTHLNELSERIEEMDIIIDTYMAEYWEAIKKLEQIPGIGKKSAEIILAEIGLDMNQFPSAGHLASWAGVAPGNNESAGKRKSGRTRKGNKILKSTLAQAAKSAAKNKNSFFHAQYQRIAIRRGKNRATLAVAHSILIAIYHMLKDNQEFIDLGSDYYNQFNTEKKINSYLKKLAALGYRVDEHSTVK

SEQ ID NO: 199707 - protein, 403 aa, unidentified
MFHLGIDVSKKAARYFILDEAGSKLKAFTLDNDKESLESLPGRFEALSISAENLLIGIEATGSFWENIFSFLKNKGFNIVLLNPYYTNKFREALAKKAKTDDIDALVIAQLLRTGEYIQSQVAEEDIQALRELTTLRYEFVKERKNLQRQVCSLLSVVFPEYEKTVITKPFSRASMAILQKFPTAKHLADVKPKKIEKIVRKIVGNNFNIDEIQSLIAAAKNSIYSGRAKEARATTLRMLLGHIDNLANSIEELEAQMKAILSPSGDDDSFPGQNLLSIKGVGDKTLAALISYLGSDGSNFPDSNSVIGYVGFYPRIYESGQTRRANKISKRGPKVLRWAIYMAAVASLKHNKEMRSLYHKKVSQGKSSKQALVCVSKKLLQIALSLLKSGDAYDPTRVFVSR

SEQ ID NO: 199708 - protein, 347 aa, unidentified
MDHIAIDLGSRESQVCVRRADGEIVEERRVGTRSLGKYLKGRAKSRVVLEACAEAFSVADAALETGHETVVVPASLAPSMGVGDRGVKSDVRDARNLSEASCRMSKLPRVHVPTKASRDRKAMCGMREGMVQARTKLINTVRGWTRPQGLGVVRSGAPTTFPKRLIEHVAQRGGTIPRYVEEVLRAIEALSVEIDKADQAMEEAAASDPTCELLMTAPGVGPTTAVRFAAAIDSVGRFANAHKVEGYLGLTPGEHSSGQRKRRTGVTKAGPSKLRWVLVQAAWAARRYYKDHPMVLWSQEVEKRRGKQVAVMALARKLAGVLYAMWRDGRPYNKEHNQSPRAASVAV

SEQ ID NO: 199709 - protein, 309 aa, unidentified
MNTQYKNIVAIDIAKSSLQIQTEKKAFCVTNDSTGLKRLHLLIKKLDHPYVVCEASGGYERLLVRTLHQWAVPVSVVNPAMVRAFAKSEGIKAKTDPIDARILLKFGQTKELRQTPCPDPHIEELAALMDRRTQLSDSLAREKNRLDKEPIYTRKWIEQTIEFISQQIQELELRIEEILTMNERLSKRVTRMTELKGVGKTTAYTILAYLPDLETMTRGQLVSLVGLAPYNKESGKTKSKAHIHGGRAKIRKCLFMAAQSAAQHNEVIHQYVSNLMKAGQPKKSALVAAMRKILICLRSLLKNPNFSLA

SEQ ID NO: 199710 - protein, 384 aa, unidentified
MDEIESKLIVGTSSRMSRCHTPILSQSGVPITRRVQPEQLSGPTSRRARIKTRTGSRDTRLEGTRMSVVGIDVAKDTLVVATAPGVEPWTVANDEPGVQALVTRLAELRPERIVLEATGGYEVLCVAALASAGLPVIVVNPRQIRDFARSTGQLAKTDQIDAGMLALFAERIQPAVRFLPDDELRALGALITRRRQLLEMRQAERNRLQQVWGQGQRQVKTSLKKHIAFLERELGIADRELESMVRQSPVWRERDDLLQSVPGIGPVVARTLLAELPELGLLDRRAIAKLVGVAPMNRDSGTWRGHRSVQGGRATVRTAMYMATLTATRYNSVIRTFYRRLLATGKPKKVALVACMRKLLTILNYLLRTRQPWAPLAATPLLTS

SEQ ID NO: 199711 - protein, 352 aa, unidentified
MLNDTVWFPKITIGLDLGDRKSHTCEVDQGSRVIRTAAVPTTRSALEAYFGGRERCRVVMEAGTHSPWISRQIAELGHEVVVANPTELYGGRRRKKRNDRTDAESLARQGRADVKLLHPVQHRSAKAQAHLELIRARDQLVRVRTKLINHVRGAVKAIGGRVTICSAEVFAGRAADQIPSELRIVLEPMLAVITDVTQRIKAMDRQVEQIALEYPATMRLQQPKGVGALTALAFVLLIEDPKRFKQSRDVGPYFGLVPRLDESSDSTPQLGITKAGDELGRRLLVSAAQYMLGPFGPECDLRRFGSAIAARGGKNAKKRAVVAVARKLAVLLHRLWVTEAAYDPDRQSKRAA

SEQ ID NO: 199712 - protein, 476 aa, unidentified
MAKQTGPASGRRKTARNAERRKRAKKEVRAVLGLPVLHADTAGIDIGATEIYVAVPADRDEEPVRCFEAYTGDLRGIAEWLGKCEVKRVAMESTGVYWIPLWQILADAGFEVCLVNARHFKNVPGKKTDVEDCQWLQFLHSVGLLRGSYRPEQAICGVRTLLRYRLELIRFAAEHIQHMQKALEQMNVKLSHVISDLMGVSGLAIVDAILSGERDLRKLAQLRDPRVQASEETIMKSLEGDYRPEHLITLQHSLDLYRHYQKKIGELDQKMETFMSELPDRIDIRKYPMPPRRKKSRAHKAHNTPAFDLRTHCYRILGVDLTAIDGIDEITAHTVVTEVGPDLSAFPSEAEFAAWLRLCPNHGISGGKILSRATRKGKSRLAVALRNAAATLYSSQSPLGEYFRRRKARMGPAQAITAAAHKLARIIYHTITTGEAFDPEILARQDEKQQQKKEAKLRRQAKECGFELVRMQAAQA

SEQ ID NO: 199713 - protein, 347 aa, unidentified
MNHYAGIDVSLEFSSVCVVDGSGKIVREGKVASEPEALIAWLGSLGLSLDRIGLEAGPLSQWLYAKLKQAGFAVELLETRHVRDAFKAMPVKSDRNDARGIAQLLRLGWFRPVHCKSMEAQEVRAVLTARKLVQRKLRDVENNLRGILRGFGLKVGKTTAITFAQRIKELVVGQTSLERITDALLAVRAVLRRELSAFDRQVRSMARADTKARLLMSTPAVGPIVALTYGSAIDDPARFTSSKQAGPHFGLTPKKYQSGETDWSGRISKIGDASVREALYESAHLILTRPIKGCPELKSWAMRIAKRAGMAKAKVALARKLAVILHRMLADNVPFNPNAKAAKLATI

SEQ ID NO: 199714 - protein, 419 aa, unidentified
MSFKIIKNNCCGLDVHKTWIYACIGITDSHNRTEYKQARFSSFTKGLNELCDWLAKYNCKDVCMESTGKYWIPVFNILEKHDLWVTLSHPKYTKPMKGNKTDRKDAKWICDLYMCGMVKPSFIPPADIRQLRDLVRYRFKLTCMITGEKNRAHNCLTVSNLKLDDVFSDIFGKSSRSITEQILQHPGETFDVAPFVDGRCKTPIEEIQTAVDGAISEEQAVKLRQCLNHIDELENHKAEIEREIYHLSEKYEAALDLIRTIPGFDKNPLTAIQVLSEIGGDMSVFPTAKHLVSWAGCCPRNDQSNNKIKSTRISRAGSYFKPVLVQVANALIRSKKHPEFTNRYKRIKARRGHKKAIIAICRMILTAIWHILTDLKPYTAEGYSEPRPAKESKVLSTSQALNLLKQRGYIIKDEPAIAS

SEQ ID NO: 199715 - protein, 315 aa, unidentified
MHAPKTFMVGIDVSKAHLDVAIEGKAAVVRFDNDAAGCAALAAAVIGAELVVVEATGGYEMAIVRTLMAAGIAVAVVNPRQIRDFARASGRLAKTDQVDARVILHFARAMRPAQIPHIDDGRIALAALVTRRRQLVDMAVAEKNRLEHAPQAVAVLIGETLAALKAQLARVDAAIALAIDAEPDMTARRDLLLTIPGIGEVGAAVLIAELPELGAIDDKKLAALVGVAPMAHDSGTWRGQRHIAGGRATVRCALYMATLSAIRCSPAIKAFYTRLRDAGKPPKVAIVAAMRKFIIMINTILKRNTPWNEPQQHGC

SEQ ID NO: 199716 - protein, 388 aa, unidentified
MIYVGIDIAKLNHFASAISSDGEELIKPFKFTNDNDGFHLLISKLDHLDKDSLIIGLESTAHYGDNLVRYLVAKNYKVCVLNPIKTSTMRKNNIRKTKTDKVDTYIICKTLMMQESLRFVAFYDLDLMDLKALGRFRQKTIKQRTRLKIQLTSYVDEIFPELQYFFKSGLHQKSVYALLKEAPTPEAIASMHMTHLAHLLKVNSHGRFYKEMAQQLRVLAQKSVGASDSSLSIQVTHTIQQIELLDSQLERVEAEMTEIIKFNDSVIMTIPGIGYINGGMILGEIGDIHRFSSPNKLLAYAGLDPSVYQSGNFQAKKTRMSKRGSKVLRYALVNAAHNVVKNNTTFKAYYDAKMAEGRTHYNALGHCAGKLVRIIWKMMTDNLEFNLD

SEQ ID NO: 199717 - protein, 462 aa, unidentified
MPGREDSETGESSRRQLQGLPVIRRNVAGIDLGSERHWVCAPTRDGSGREIASFGATTAELLRLAGWLKARQVESVAMESTGVYWIAPHEVLEAQALQVLLVDTRQLARVPGRDKKSDPSDCEWIQRLHSCGLLRGSFRPEEAVCMLRTLVRDKANLVAESGDWLRRMQKSLDQMNVRVHRAVSDIDGVTGMAMLRAIAAGERDAQKLAQLRDRRCSKTQQEIAEQLTGHWREDHLFSLQQALKMYDAVQQRIAAYEQEILRQLGEMEEPGQQGQTAPPLHNTNKTKAIKKRGQESKRQALYRMSGVDITQIDALGVETVEVVLSEYGPDLSRFPTEKEFVAHVTLAPRVPSSGGKPLKKKKRNSASTRVAAALRMAALSLRHSQTALGAYYRKLAQRLGGDVAVFATARKLATLIYRLLRWGQPYVDEGAAAYENRYLQQRIKSLTAKAKQLGYELTAVNA

SEQ ID NO: 199718 - protein, 341 aa, unidentified
MELELHTIGIDLGKTVDLHGEVVVRKKFSRVQLLRFTANVHVGLIGMEACGGSHFLGRALREQRHEVRLIPAQYVKPYVKTNKSDYIDAEATAEAVARPTMRFVPVKTDEQLDTQSLHRVRERWVMRRTAVINQIRGLLLERGITLRKGRHHVHAALPLILEDADANLSGAVRLLLTQLKLDLDQLSVRIDEADAVIQKTAHENEACRRLVAIPGIGPVTATALIAAIGNGRAFHKGREFAAWMGVVPREHSTGGQQKLLGISKRGNSYLRRLFVQGARAVLLQRTKQSSGLSAWLAQITSRTHRNVAAVALANKLARIAWAVLAKNEQYRPSVVADVAAA

SEQ ID NO: 199719 - protein, 343 aa, unidentified
MTIKVLGIDIAKNTFQLHGADDAGKAVLKKRLPRNRLSPYVANLHPCTIVMESCGGANYWARVFQRSGHTVKLISPQFVKPFVKTNKNDANDAEAIVEAASRPSMHFVPIKRPEQQDVQSIHRVRSRLVKNRTALINEIRGLCLEYGVIIAPGAARVKKSLCEVVADSGNGLTPSSRDCMQDLYEELVDVEARLKKLDARNRQLCRQNDSCRRILSIPGVGELTATAIVAAVGDAQEFKNGRHMSAWLGLVPRQSSSGDKRVLLGISKRGDRYLRTLLIHGARAALSHYKTTDNDYGLWLDRKKATLSFNKAAVALANKNARIIWSLLNSGEEFNYGVQTAAA

SEQ ID NO: 199720 - protein, 423 aa, unidentified
MMKLKYSICCGLDVHKNVIVATIVTTNKDGISEYLQKSFSTINSDIQRFHNWLIENNCYHVCMESTGKYWIPIFNYLESDIDVCLTHPKYVKAIKGKKTDKKDSKWIADLYKFDLVRCSFIPPKDFRQLRELSRYRFKLVCMKSSEKNRIQNCMTVSNVGIASVLSDPFGKTATEIISYLLEHTADSMDEKAVRKLIKKGAKSKSDEIIEAIKGYTIETDQAKKLELARGHLEYLDDMITQTEVELYVRIKSYYEFVEFVSTMPGMTELSSTIVLAETGVDMDIFDDAKHLCSWCGLSPANNESAGKKKSVRIAKAGDYLKPMMVQCALAAIKSKKQPYFAIKYGRIKKRRGHKKAIIAIARMMMVCIYHMVSEKKPFTPTDYEELMDPQNHVERVVLNENNVFAYLESLGYDSSKLVKRNDN

SEQ ID NO: 199721 - protein, 357 aa, unidentified
MEAYVLKQALGIDVAKDSLSLCLGTLKPDLEKEFIVSKDVANNATGFQKITDWLGKLNIQKEKLVVVMEATGVYHEALAMYLHQQGYTISVMQSGRVKRYAQSLDQRSKTDALDSRMLAMLGCERKLTSWSAPDKTLRQLKALSRERSCLLKEKNVEKNRLHAVETAAYSNKKEVKRYAKRLKLLEDQLAEIEQEMKELVAGDVTLAQKMEYLESIPGVSFLSAATVVGETYGFNEITSAKQLTSYAGYDVVLKESGNFRGSTKISKKGNKHIRSMLHMPSMTAVRVNLTLKQFYQRLKPNKAKPIVALVAVQRKLVLLMYSLYKNNKYYDAEFEQKSSKSKALAAQDSTNCLLNAS

SEQ ID NO: 199722 - protein, 443 aa, unidentified
MAMRTKKNELSVCYPNAAGIDVGGGSHFVAVPPDRSELSVREFGCFTEDLYAMASWLAECGVTDVALESTGVYWIPVFEVLESCGLRVLLVNARSVKNVSGRKSDVLDCQWLQQLMSFGLLSAAFRPPADVCALRAISRQRDTLLQEQGRCIQRMQKALTQMNVQLANVITDITGQTGLAIIRAIVAGERDPAVLAKHRNYRIRASEETIAKSLQGTWKEEHLFCLGQSLALFDTYRTMVAEVDAQLKTMIAPLRLHAAAPLQGKPKRRGKNAPDFDVREALQQWAGVDLTRIGGIDVGTALKVLVELGPDLSRFKTAKHFASWLGLCPGTRISGGKRLSGASKRIPNRVARALKLAAQGLSRSQCGLGAYYRRMAARMGAGKAITATAHKLARLVYAMLTQGTEYVEQSQAQYEERFVDRTFKYLQQKAKAMGYILVEEAAV

SEQ ID NO: 199723 - protein, 409 aa, unidentified
MRLFVGLDVSSFDIKICILNGEGKKLDSFSVNNDLPGATTLKERLLQHISNQEIETLKIGLESTSVYSFHPSMFLHYDEDLQRFGAKVFLMNPKQIANFKKSYSDMDKTDEIDAFVIADYLRFGRNQMSIVKESQYVALQQLTRSRYHLVRMLTKEKQHFLQHLSYKCNTFSQEVDSSIFGNAMMELFLEKFSLEELADMPLEELAEFLQTKGKNRFGDPKCVASTIQKAVRSSYRLDKVVEDSIDVLLGTSIAVIRTYQQQIKELEKSIKRIMAGLSQTLESIPGIGPVFAAGIIAEIGQIERFDDETKIAKYAGLYWRTHQSGRFTAENTSLSRNGNHYLRYYLVEAANSVRRHVSDYQEYYVKKYNEVPKHQHKRALVLTARKLVRLVDALLRSHQLFAPERCVKV

SEQ ID NO: 199724 - protein, 350 aa, unidentified
MKDHITIGMDLGDRDHIAVVLDTDGHEIECVKLTNTKVSMKRYFQRYGGATVAIEAGTHSPWISRLLEQLGCQVYVGNPHKLRVIWDSTDKSDERDARMLAMIARLEPKLLWPIRHRDLGAHSDLEMIKARDTLVQSRTKLINHVRSVVKGIGERLPSCSAASFATRVVDLIPASLQPALMPLMDIIAQMTEGIRAFDKQIATLSTERYPQVRWLQQVQGVGPVTALTFILTIEDPGRFAKSRMVGPYLGLTPRRDQSGAVNKQLRITKAGNGYLRKLLVGCAHYIIGPFGADSDLRRHGLAIAARGGKNARKRAAVAVARKLAVLLHRLWVSEQDYIPLKAKARVKKAA

SEQ ID NO: 199725 - protein, 341 aa, unidentified
MNEYDGRQFVGIDLHRRRSVIVRQSESGEQLSAVRIINDPVALGLEIERAGPNPEVVLEATYGWYWAVDTLQAQGAQVHLAHPLGVKGFRYRRVKNDVRDAADLADLLRMNRLPEAWIAPPATRELRELVRYRAKIVALRSGLKAQVHAVLAKAGVLIPVSDLFGVGGRQRLAKVPLGAAYVQRVISLLELIDTLDAHETRFTVMVADQLGGHVGYQAIQELPGVGPILGAVFVAEIGDVHRFADPARLCSWAGLTPRHHESDTVVRRGHITKQGSKLVRWAAVEAIQRYPTTPKIALDRTRIESRRGKNIAKVAAARKLLTLVYYGLRDGHIRALARRAG

SEQ ID NO: 199726 - protein, 374 aa, unidentified
MVTQDYITYVGMDAHAKTINVAVILPGSSEIDAQWQVAYEDRSIRRLAKKLLEMGPRGVMATYEAGPCGYDLKRRLDGLGVPCDLAAPSLVPAKPGDRVKTDKRDARKLAKLLKADLLTFVHPPNEREEALRDLMRARADAKKDLMAARHRISKMLLRYGLRFTETKNWTKRHRQWLTRIRFEQAHAQMVFENYLLAMEQVEERLVRLDARIDEAAQDEAYAERVGWLCCFRGIDTVTAMTILAELHGFERFTHPRGLMAYLGLTPSEHSSGTRVRRGSITKTGNGHVRRGLVEAAKHCRHRPRVSAALRKRRAGQPAAVLAIADRAQHRLYKRYHLLTNGHGKPKNVAAIAVARELIGFLWAALNHQGGMKAA

SEQ ID NO: 199727 - protein, 305 aa, unidentified
MTQAQIYIYGIDLGKNWFHLVAMDRMGHVLAKQKLTRSQLKQFISTTPPCRVAFEACPGSQYWGRLFQQAGFEPKIIPAQFVKPYLKSNKNDFNDATAIAEAGSRGTMRCVPLKSHEQLALQATHRVRQRFIVERTATVNQMRALLLEYGLTVPVGRKVFERSLPTILEDAENGLPDFIRALVLRLRERWQQLDIQIDDMSLMLGQASSASGLCQKISTVPGIGPIVSTALIAAIGNGSQFKKARDLSAWLGLVPRQYSTGGKSSLGGISKRGNSYLRQMVIQGAKALKIHMKRDKSSLGEWVAK

SEQ ID NO: 199728 - protein, 409 aa, unidentified
MRIIGMDIHRVFAEAVVLEDGEIKRFGRIGMTRDHLEDFARTLLPTDHVVVEATGNATAVTEILAPHVARVAVANPLQVHLIAKAKIKTDAIDARVLAQLYAAGFLPEVWIPDAATLARRRQVTRRTQLVRQRVRLKSIAQSILHANLIPPCPFADLFGGKGRTWLRAQYLPDDEREAVERHVEEYDRLSEALKGVERDIARAALADSNVTRLMTIPGIDMVVAVGLMAAIGRIERFDSPDKLVAYIGLNPSVHQSGDGPAHHGRITKRGRSNARHLLVEAAWQTARSPGPLHAFYERVRGKRGNHIAAVAVARKLAVIIWHLLTKGEDYSWVRPSLHAKKIRDLELRAGHPPRRGQKGASYDYNIAHRRRDERNRAQLAEGVYRRMTTGWRKRGPRSEPTGATNEERQ

SEQ ID NO: 199729 - protein, 422 aa, unidentified
MNTIAKFEARAMEVIYRCCAGLDVHKQTVECAVRRMQPDGRAQVEIRQFGTMTDDLLEMVEWLKGQGVTHVAMESTGVFWKPIYNILEGHFTVLLVNARSVKQVPGRKTDARDCQWLAQLLQYGLLKGSFIPARWQRDLRDLTRERTQLAEEQTRVANRIHKVLEDANIKLGSVATDILGVSGRDILERLIAGEQDTEKLAERARGRLRRKIPELRRALRGHLSEHHRFALRLQLDHLQRLEQLIERLDQRIAELCKPYDEQIEQLDQVPGVDRTGAQSIVAEVGVDMQVFPSDGHLCSWAGICSGNNESAGKRRSGRIPKGNRWLRRTLVLAAQAAGHAKDTYLASRFRRWAARRGNKRACVAVAHSILKIVYHLLKYGCPYRDLGVSYFDRLDPVRLTRYLVRRLERLGHKVTLEPVPTA

SEQ ID NO: 199730 - protein, 356 aa, unidentified
MINHNKLHFSGQPIYIGLDVHKKSWSVSIFSKYGEYKTFNQPPEVEKLLHYLDHHFPGAVYYAAYEAGYCGFWVHDQLREKGIQCLVVNPADIPTKNKERRTKRDRIDCRKLGRSLRNGEVEGIYVPCRSKLEDRSLIRTRQSMVRKQTRCKNQIKGMLLFYGVVIPEEREMGHWTRRFIQWIEGIRMERASGDIALKAHLEELSHLRQLIASLNRAILRLARTEEYRPLVRLLKTVPGISTLTAMILLAELGEITRFPSLDELSCYVGLIPDTQGSGEKEYVGGVTQRRHAQLRWLLIEASWVAIRKDPALLMAFEQYCKRMRRTKAIVKIARKLLNRVRYVLKNQAEYVPCVIE

SEQ ID NO: 199731 - protein, 319 aa, unidentified
MELCIGIDVSKNYLDVYINNIEDKEHKVENSEFGIEKLIKIFQNLQKNHDIQLIIFEATGGYERLLSIMLRNLNFPVHVAHPNKIRNFAKATGNFAKTDKIDARILSEFARVFRPSSKAISLKPEIESLRALFIRRQQLLEDKIRESNRLDKHILDILRHSIETHVKWLSSQIKEVEKLIDQQIESHEAIKNPILLLSSVPGIGTLTSVALLVGLPELGCIEGKQLAALVGVAPLNQDSGNKKGKRYIKGGRGSIRKSLYMSAIVSIRLNSDMKKFYQRLRAKGKAAKVALTAVIRKLLILLNSVVRRQTPWVDREQIA

SEQ ID NO: 199732 - protein, 365 aa, unidentified
MTNKLRYIGLDVHKDTIVIAVAEQGTASAKFFKTIPYDLARLVKEIRRLAGAGYVVVCYEAGPTGFGVQRALEKAGFDCRVVAPSLIPVQSGNRVKTDRRDAVKLAHFLRSGDLTPITIPDEEREALRDLERSRDDAKKAERVARSQLGKFLLRHDLRYDATGAWTKKHLDWIRRLDVGPLQVVLDDYLKAVEDATERVERLSTALEEQVLASSLAPLAKGLMTLRGVAMVTAATIAAEVGDFHRFPTAKQFMAFVGLTPSEDSSGGRVRRGGITKCGNRHVRRLLVEATHHYRRKPGVSRELRARQADQPELLQALSWKAQRRLHKRLTSLKARGKPYNQAIIATARELAGFVWAIGRQIPVTG

SEQ ID NO: 199733 - protein, 411 aa, unidentified
MEAAVITAVGIDVSKSKSTVAVRRPGGEIVLRPFEVHHTNSDLKKLTSTLKKLGGDIRIVMEHTSTYWRPIALTLKEAGFFVSVVNAMLIHDFSDNTIRKLKTDRADALKIANYALTFWDTLPPFNNEEETRLLLKMQSRANERITATATALRNGLIALADQTFPGVNIAFDPNTKNANGHEKWVDFFLRYWHKDCVCQYSMEAFTESYRGWCKRKNYKFRTDTAHKIYLLAQEGVATLPKCESTKMLITQACKSLNAVCEAKQSTQLEMQRLAAMLPEYEVVMQMEGAGPITGPALMAEIGDVRRFKNKKALVAFAGIDAPPFQSGAFESKSRHVSKRGSPHLRRTIFIISNIILTRSNPENAVYCFMDKKRSEGKHYYVYTVAGSAKFLRVYYARVTEFLRSQPSSDAC

SEQ ID NO: 199734 - protein, 409 aa, unidentified
MQSMITRCAGIDVHQGTIVVTVRVPDESGGRRHETQTFGTMTADLLVARAWLQAYGVTHVAMESTGVYWRPLYYLLEEDLTLLLVNMQHLKQVPGRKSDVRDSEWLAQLLDWGLLSSSLVPPAPIRDLRELTRYRKRQIEDRAQEVNRLYRVLEDAGLKLASVMTDVMGRSGRAMLEAILGGTTDATALAELARGRLRQKLPALRLALVSQFRANHAFLVTQILSKVDFLEEQIATLTEEIDRQLAPFEAVIANLTTIPAVGRRNAVTIFVETGGDMARFATAAHLCSWGAMCPGQNESAGKRRSGKTREGNRYLRGALIESGLAATRAKGTALQTRYYRIKRHRGHKKAIVAVGHHILEIAYFIMRDGLTYRELGADYFDRRDRERTTRRHVKQLEALGYRVTLDTAA

SEQ ID NO: 199735 - protein, 354 aa, unidentified
MDKYIGFDIDCKKIVACVVQGGKKDFYATIGSDIESMRKLLSQQKHDSGKIHLVFEISGQAGFIYDSLAGYADTITVANPSKMTWIYRTAKKNDRIDARKMAVLLSIGEIPEVYMPSREVRQWRQMILHRRKIVCKVVQVKNRIRATLKSQGYSKPAERGGWWKKANKLWMRNICQQSIGVYDLWHMHVCNLLDEFELLESQLKRITVYLDGYLARNPGGKLLMSIPGVGPRTAEAVLAYTDDVHRFGNYKQYCSYFGLTPKLDESGLCRRLGHISKRGPSVVRWVICESSWIAIRKSKGLRAFYERVRCGQDGRKKLAIVAVARKLLSIMRAMLLTGELFNEKLVSDMLRQAA

SEQ ID NO: 199736 - protein, 344 aa, unidentified
MQVTTLGLDIAKTIFQVHGVDAAGQVVVRQRLARRRVLAFFEKLAPCLIGIEACSSSHYWARELIARGHEVRLMPAQYVKPYVKRGKNDAADAEAICEAVTRPTMRFVPVKTPEQQSVMMLHRVRLMLNRQRTQLSNSIRAHLSEFGIVASIGRRGIDQLLVIVADEEDPRVPADARLCLTMLAAQLTVVKEQILENDRRVRASARATGLGRRLMEVPGVGPLLASALTATIPDPAAFKTGRDLAAWIGLVPKQSSSGGKERLGSISKAGNRYLRQMLVVGAMAVIRYAERHGTRRPWLVQLMQRRSTKVAAVALANKTARIIWAMMMSGERYREPAATGAVAA

SEQ ID NO: 199737 - protein, 366 aa, unidentified
MKKISTVQVWGNEILQEQKQTIGVDLGDRWSFYCVLEEAGKIILEQKVATTPEAMKQTFAKIPRSLIALETGTHSPWASRLLTELGHEVLVAHAQKVELITKSNRKDDRHDARTLARLARIDPELLGPVRHRSAQAQIHLTVIRARAELVSARTALVNAARGLVKSYGQRLPKCGTQQVNRELAAGLSTELREVLEPLLQEIESLNERIPEYDERMEKIAQEVYPEVSLLKQVKGVGTQIALTYVLTIEDPYRFEKSREVGCFLGLKPGRRNSGNSEPQKKISKEGDRYLRTMMVQGAHYILGPFGEDSDLRRWGLKLAERGGKNAKKRAVVAVARKLAVLLHRLWVGGEVYEPLRNSQKAMRAVA

SEQ ID NO: 199738 - protein, 441 aa, unidentified
MRIMYERCCGLDIHKSSIAACALITEKGKPQEETRRFGTMTGDLRELAGWLQQKGIRHVAMESTGVYWKPVWNILEPAGFELLLANAQEVKVVPGRKTDQKDSQWIADLHKHGLLRKSFVPPRAIRDLRDLTRTRAILTQEHSSVCNRIQKVLEDANIKLGSVASDVFGVSGRAILRALMKEEKDPEVLAELSKGTLRKKIPQLRRALEGQITAHHRSLLTGHWDRMEFLERQIADFETQIAQHMKPTPEEMAFRIQNAAEDAPLPLSPREEAIQLWMEIPGVGWTAACSMVAELGVNMDQFPSAAHVASWAGLCPGNNESAGKRLSGKTRKGNVWLRRTMCEVAWAASHTKDSYFAAQFRRITSRRGNKRALVALAHSILVTAYHMLKHKRHYRELGADFFDVINRDQVRNRLVQRLTKLGFEVKLMPKGTVENVTSATN

SEQ ID NO: 199739 - protein, 362 aa, unidentified
MKKSIRERESEWKQRPDRTVGVDLGDRFSHYCVLNGEGEVLEEGRVRTSEEAFRRHWEAEPRQRIVMETGTHSPWISRLLRGFGHQVIVANARKVRAISENESKNDRQDAEMLARLGYCNPRLLKPIQHRSAERQCDLNLIRARDTLVRARTMVINSMRGLVKSAGGRLPPASSESFAARVSAAVPAELGTATHPLLHQIAGLTVEIRGLDQAIEKLAERYPEIRILRTAPGVGPVIAAAYVLTLDGVDAVEHSRSVGAFLGLRPKQSQSGDSDPEHNISKTGNIYLRRLLVQAAQYILGRFGPDSALRRWGLKLAQGGKRTKKRAVVAVARKLAVLLHHLWRTGQHYQPFPEVAAGAGSAA

SEQ ID NO: 199740 - protein, 425 aa, unidentified
MKYTQNEKILQHTEKTLIIGVDVASETHYARAFDYRGIEIGKIIKFSNKAEGFSNFSLWVKEIQFKYKKEAVMVGMEPTGHYWFNIAQYLKEESIKIALVNPFHVKRSKELDDNNPTKSDCKDPKTIAMLVKDGRYMIPYIPEGIYSEIRTAMETRWQLVKQLNRIRNRIKRWLNIYFPEFNEVFCDWEGKAALIALKEFPLPVKVVEQGVEGIVVHWQGIRAVGRKRAINLVEAARKSIGVREGLVAAENDLLTLIEEYELRLKQYERVMVFVEQLVIKIPGFKEITKIKGVGLITAAGFIAEVGDINRFEHPKQIQKLAGLNLKENSSGKHKGKTTISKRGRKRLRALLFQGIMPVVANNAEFKELHNYYTTRVQNPLKKKQSLILLCCKMIRIFFALLTKGTAYDPQKMMKDIKRPQLQEAA

SEQ ID NO: 199741 - protein, 309 aa, unidentified
MKEELVYLGVDIAKSYLDAAIGSEKRRFANDAVGHRALIKWIKEIEGLVQVICEPSGGYERALIRAVVGTQIRVSLVPANRVRQFARAAGILAKTDRIDAKVLCIFAEAMQPGTISGSQLEQEHLRELESQRRHLTHLLVMEQNRGARVSDVCVRRLNRTLINQIKKQIEQLDLLIKQHIEQSAELSAKAAKLTAITGVGARTAALLLAQMPELGKLNRREVAALVGVAPFNRDSGRMRGTRTIYGGRRPVRHGLYMAALVAARHNPILRAFYQRLRTAGKPAKVALTATMRKLLIVLNSALKSDLSYA

SEQ ID NO: 199742 - protein, 429 aa, unidentified
MEEIDDTDLVVELVAALDLGKAGLEACVRVPHTHHPGRRMQELRSYGTTTAQLLELAAWLRHWHVQRVVMESTSTYWKGVYYLLEAEGFDCWLVNAREVKNVPGRAKTDRADAVWLAKVAERGMCRPSLVHPPEIRRLRDLTRYRRALVQDRTRERQRVEKLLEDAQIKISSVLSDLHGVTGRAMMDALINGQRDPHTLARLAKGSARKKTARLEEALRGFFTDHHAMILQMMLANSDRLSSQIAELDGRIEEAVSPFCAQSARLADIPGVDVMAAAELIAEVGVDMTRFPSAAHLVSWAKFCPQTHQSAGKSKSQGRGKGNPWLAGTLGRVVFANSRSETFLGARYRRLARRRGQQKAIVATGNSLLTVVYHLLLNSDARFCDLGPGYYESRINKHRRARDLATQLQALTGQHIVIRDGKAVITDTAA

SEQ ID NO: 199743 - protein, 351 aa, unidentified
MPRATSNANVIATIGIDIGKNTFHLIGLDDKGAIILRHKLSRGQVYARLANIPPCLIGMEACVGSHHLGRQLSALGHHTRLMPARYVRPYSKGQKNDFRDAEAIAEAVQRPTMKFVALKTVEQLDLQGLHRIRERLVCQRTSVINQIRAFLLERGIAVRQGLRALRTEMPIVLAKTDKLSQRMIHMLEDLCTDWRHLNGRIEAVSKEIETLSEQDDGAKRLMTVPGIGPIISTATVAAIGTGEVFSKGRDFGAWLGLVPKQMSTGGRTILGPISKRGNRYLRMLFVQAARAVLLRPQSWEKHGLKLWIEAAARRLNRFKLAIALANKIARIAWGVLHGGRNFEVRPMNQVA

SEQ ID NO: 199744 - protein, 350 aa, unidentified
MPGIERQPLKKLAVDESTLLKLLIRWREEAKKSGHRIERIAVAFEAGRDGFWLARWLRARDIEAHIIHASSVAVSREHRRAKTDRLDTELLKRAFLGWLRGERDHCKMVAIPTIKDEDAKRPNRERESLVGEQSRIVNRMKAALVRLGIRGFNPKLKKAVERLDGLRTPEGEPIPPNTLAELRRDMARRRLVSDQIRQIEDARLERLEQAPSDGPHAMARLLARVIGVGIETADMLVQEVLSRNMRDRRAIARYAGLTGSPDESGRKRREKGLARSGNARVRRGMIQLAWRFLMFQKDSTLAQWFRARTENARSTRKTMIVALARKLLIGLWRLVREGAVPDGVVLRPVS

SEQ ID NO: 199745 - protein, 343 aa, unidentified
MGEVSTIGIDIAKSVFQVHGVDDAGAVVMRKRVGRSKVLQFFGSLSPCLVGIEACPSAHYWSRELQALGHTVKLMPPTYVKAYLKRSKNDANDAAAICEAVTRPSMRFVPIKTQEQQTGLMLHRTRQLLVRQRTMLSNAIRGHMAELGIISAKGRNGTAELLQIIGDAANDLIPPVARFCLDLLARQYLNLSAEVASVDKRIQAWHRSCEESRRLEEIPGIGPIVATALVAEIGDWGAFRSGRSLAAWIGLVPKQHSTGGKERLGRITKQGNRYLRWLLVAGAMAVIRYARQHGTKRAWLTRIMDRRPAKVAAVALANKIARMAWAIMVHGERYREPKLLLAA

SEQ ID NO: 199746 - protein, 430 aa, unidentified
MKSNTQNAKIEAITEKTLVLGIDVGSETHYARAFDYRGIEYSKKPFKFSNTEAGFATFKEWILDIKERHEKDKVVLGMEPTGHYWFNLGKFLQDNEMKPVLVNPHHVKKSKELDDNNPTKNDRKDPKVIAGLVREGRYMIPYLPDGVYADLRTASNIRFQLQAELTRIQNRISRWFNIYFPEYKTVYGKPDAKSGILILKAAPLPEDILTLGIDGVNQIWRDAKLRAVGKARAKTLIEAAEHSVGSKEGAVSARMEIRMLLEDYESRNTRLQEVMVLIEELVRKIPMAEKLLEIKGVGIRTVSGFLAEVGDISRFNNPKELQKLAGLALVENSSGKHKGETTISRRGRKRLRYLLFEVAMSLVSKNQEFRELHNYYTTRRLNPLKKMQSLMAIAAKLIRVFYAMLTKGVDYDPKKMVSDIKRPAVYLQAA

SEQ ID NO: 199747 - protein, 345 aa, unidentified
MNYIGIDYHKQYFVATMMNEQGKVIRKDKASTDRASIKRYFADADSRGETKAVMEACYGWECFYDEVSGLVDELIMAHPLKTRLIAEARIKTDTIDSETLAHLLRADLIPQAYAPDSATRDKKNLLRYRSSLTAMKVRIKNIIHSVLTRNHIEDSGFTSLSDKFGKQGMRYLRSVKLTGDDTGILNNYLDLLEETERKINAAEKQIRSICREDKICALLSSVPGIGHILAVTIRYEIDDIGRFMSAGKLCSYAGLVPSTYSSGNRTYQGKITKQGNKWLRWAMVEAAQRAPLNDLWLRSFYQRISKNGKKIARVAVARKLLEIIYRIWKEEKPYYKKGTVALPFV

SEQ ID NO: 199748 - protein, 361 aa, unidentified
MQSTTIIAFDQHAATTVAAVLLPQHRTPALHSLSSDIPTIQRFVARVKRQGAVSCCYEAGPCGFELQRALTARQIPCDVIAPALFPRRAGDRIKTDRRDAGQLAVLYRAGALTAIHIPSEEEEAARDLLRCREDIRADLLRARHRLSKFLLRHGRRFTATKKQWSKRHDAWLRAQTWSLCALDQTHRAYLRAVDEVVARLRDVEVQLHDLLTLEPLRPRVQRLRCFRGIDDLTALTIAAELGDPRRFASAPRLMAYVGLVPSERSSGTKRAQGGITKTGNAHLRRVLIESAWHYRHHPFVSAGLRTRQRGAPATVIAHAWTAQQRLHRRYARFAARGKRKQHIVTAVARELTGFVWAVLTQ

SEQ ID NO: 199749 - protein, 412 aa, unidentified
MEGETVIAGVDTHKDVHVLCLLDGLGRKVWSGSFGADPEGYDRLAEAIGDPGSCMVVGVEGTASYGAGLTRRLVELGYNVVEVLRPKRDKARPCEGKSDPLDAERAARKAASGRGCSVPKSQDGWVEAVRQLYVARRLAVATSTSCVACAKSMLTTAPSALRERFRGRERPKDLMPLLARGRKAGDALEESVLASLRSVAAVWKEARSQVESLDERIRALLEANAPALLGIEGCGTTTAAALVVAAGDNPGRLKGEAAFSMLCGVSPIPASSGKTERHRLNRGGNRQANWALYEIAIKRMAYDERTRRYVAKRTSEGKSRREAIRCLKRYIAREVYRVLMDPNPDGAAPEGPELAKMRKAMRVTQKQAAAGLGMSAASLGHLEHGRRRSTKLERRYYELLCELKGALPQTAY

SEQ ID NO: 199750 - protein, 331 aa, unidentified
MKIKETIGIDVSKATLDACIHSSQQSATFENSKKGFSLLVKWAYKGSPHPKADILFALEHTGLYSEKLSEHLSEEDIPYTVVPGLEIKRSLGIARGKDDRVDASKIALYAYRLRDEIKLSATPMKEVKALKKLLSLRERLVRQRAGYKTSAKEQKRVLEHYEAKLLLKVQYKMVKELSKQIDIVESEMQSIIRSNTELANMFDLLLTVRCIGKQSALFLIVCTEGFSKFENARQFAAYCGVAPFPNQSGTSLRGRSKVSPLANKKMKSLLDMCAKSSIRYNMEIREYYLKRVAQGKNKMSTINIIRNKLLYRVFAVVRRGTPYVDLYRHAS

SEQ ID NO: 199751 - protein, 390 aa, unidentified
MFYAGIDVAMDKHDCVVLDSDGDVVVEVFTFENSRDGFKTLKRVLQSCSKNPKKIKVGLEATGHYSDNLLVFLNKIGYDPVLFNPLHTNLFRKGLSLRKTKTDHVDAHTIATMLRAEDLKSYSQPSYHLNELKSLTRYRSKLVFECSQCKVSLVRLCQILFPELKNIVPKLHMSSVYTLLSELPSADKIAKCNLTHLTSLLSSASKGHYGRDKAVEIRDLARASIGIKSIVKELELQQTIDRIQIYHQQIESIEDEINKLMDEVDSPITSIPGIANRMAAVILAETNNFKYFDRAEQVLAFAGLEPSVYQSGQLTSTHSKMVKRGSKYLRYAIFNATKYVCIWDPTFNAYLAKKRAEGKPYNVAVSHAAKKLTRVMFHLVKTNKEFVPQA

SEQ ID NO: 199752 - protein, 414 aa, unidentified
MEGEINKSCGLDIHKRFFIATILSRSGEIQQQRFDRDDNGILNLKNWVTSEKCDVVACESTSDFWVPIYDSLINHLPVIVGNARDMKAFTHKKTDKIDSEFIAKLALNKMVQPSRVFLKNHREYRSYVRLRLTLVRKRTDMKNEAHAILSSEMLRLSDVLTDIFGKNGRAILSGISSGKTVDQIIESLSPNVRKKGSQIREILDREISQSAAIRLQICLNLIKHFDDEIKLLEREIFNYAYGKHKREMEILMSVPGIGEIGAATLIAEINNFNDFSSGDKLASWLGLVPNVYQSADKYHNGRITKRGSKVARWILTQIAQAAARKKNSKLKEFFNRKKKSIGHAKAIIALARKIATIIWHLVTNDEMYEDETGYEKGEIQKRKIVETETFTVDERITIISGLIAIMGKEDREST

SEQ ID NO: 199753 - protein, 356 aa, unidentified
MARYSLSSLQSFISTHLSEPFWIGVDVHKRSYYIALLRADNKTITFTTTASPEIFVEQLRRLNIRVAGVVYEAGPTGFGLARALLAEKIPVTVAAPSKIPRSVSPGAKTDRLDCLKLVQYAAKGLIRPIAIPTAEEEAWRALLRRRHQLVDRVRQCKQRIKGFLLYHGFKETDAIKNWRSDCEAQITALPLLPEGRMTMESHLRELRFLKQELSEVADQLEALNRHPDHYPAIQSLTSVPGVGKVVATTFHLELFRPERFQRGDEVASYLGLAPTVRHSGEKTPRGYLVPVGQKRLRSLLIEAAWMWRAKDPKACELYNKLLNKTGVPQKAIAAVARKLAIILWRLSLEQRAYRPI

SEQ ID NO: 199754 - protein, 345 aa, unidentified
MAIVEVTRPVTGGVDTHLDAHVAAAIDPIGGLLGVESFPTTPAGFTELHDWMIRLGDIERVGVEGTGAYGAGLARFLGGCGLEVIEVDRPNRQARRQAGKSDPADAVEAARAVLSGRATGIAKTGDGAVEAMRALLIAKRSGREARISCLNQLRHLGFCGPDDLREAFRGVPRTALGARAAALRPRVSGDDVAHATKIAMRTLGRRVLALDADNDELDALLAGLVHTTAPDLLGVYGVGVDTAAILLVAAGDNADRIRSEAAWAHLCGVAPLPASSGKITRHRLNRGGNRQANHALWRIVFTRLGSEPRTRDYLERRLAEGLSKREIIRILKRYVAREVYQQLPR

SEQ ID NO: 199755 - protein, 346 aa, unidentified
MSYSTTVGVDLAKNVIQVSVVSSRGKELLNRSLTRGKFAEFLCKQKPSLVAFEACATSHYWARAAQRHGHTARIIPAKAVAPFRQGHKTDSNDALAVAEAARRPNIKEAPMKTLDQQGLQAIQRSRELLVQERTALSNHLRGLLMEFGVVIPRGFAALQRKLPQILEDGDNEVPDMYRPALHRLYYRFLELRSDIRAMDAEIKALVKQHPGCRRLTALEGVGPISAVLLYASLGTGEAFSGSREFAAYLGLTPRQLSSGGKTNIVGLSKKIGNRQLRSVLIQGARSYVNKLKEPKTPKDRWLMELIERAGPGKATVALANKNVRTAWALLTQGTEYQRRAQLEVVA

SEQ ID NO: 199756 - protein, 331 aa, unidentified
MSTITLGLDLGDRTSSYCQLDAAGQVTARGKLPSTPAALERLAADLAAVRVVLEVGTHSPWVSRLFAAAGHDVIVANPRRVRLISAAVRKSDTLDAEALARLGRLDPALLAPIQHRGADAQVDWTLLRSRDALVRARTLLVNHVRGTVKALGTRLPASSARSFGRTARSRLPAALAPALTPLLDTLEAVNTQITAADRTIAQVAETRYPETRHLRQIAGVGPITALCFVLTLEDPARFPQSRGVGAYLGLCPRERQSGARAPQLRISKAWRRDAAPAPGDLRALHPRALRTRHHASTLGPAASGTRWNEREEAGGGWRWPGSWRRCCTISG

SEQ ID NO: 199757 - protein, 387 aa, unidentified
MRKGITYVGLDVHKDTIVVSLADGGLRGLRGEVREYGKIANTAAAVERLARKLAANGNELKFCYEAGPCGYGIQRQLSGLRHQCDVVAPSLIPRKPGERIKTDRRDANKLAKLHRAGELTPVWVPDQTHEAIRDLVRARHAAARELRRARQRLSSFLLRNGHAYHRKAWTGLHRRWLATLKFDQPMQHLVLEDAIAAVEAAQERRGRLEAQIDAALPTWSLAPVVGALQALRGVALVGAATLAAELGDVTRFDNPRQLMAYIGLVPSEHSSGGTRRQGGITKAGNSTARRMLIEAAWSYRFSARISRELLLKQENLAKPIRDIAWKAQDRLCRRYRTLARSGKLSTVICTAIARELAGFVWAVAREVGRSASGKSTGKPAIRRAAVS

SEQ ID NO: 199758 - protein, 389 aa, unidentified
MLLDHPSDGLTAIRTHIGAIFVSLELSRSNWLITSLSPGKGEKMSKHSVTAGDVAGLMKLFADLRRKAEVRTGQGYPVITIQEAGLDGFWIHRVLQQEGIESHVVDPASIATPRRRRRAKTDRLDGETLLRALLAYKRGEPRVCAMVVAPSPEEEDRRRLCRERATLIAERVTHVNRIKGLLFAQGISDYGPLRRDRRARLETLRTGDGRELPSHLKAQIGRELNRIELLVEQIKTVEAERDALLATARKPASEEAAPDPVTMLLALKGMGANFAAVLWSEAFYRQFANRRQVASYAGLAATPWQSGGIRHEQGVSKAGNPRLRTTMIQIAWLWIRHQPQSALTRWFKERSPQGRKRAIVALARKLLVALWKYVTQGVVIEGAVMKPAS

SEQ ID NO: 199759 - protein, 408 aa, unidentified
MQVTFGIDVSKSTSTVCELIGESKNELTITNDHSGFIQLLKELSAFSKHPQIIFEATGVYSRRLQAFLEDYDYDYVIINPLKAKKEMDLGLRHNKTDKTDAYHLALIQRLHHHPVNHLQSQTYKQLNSLSHFYDQLTSDLVMAKNRLHQALQSTFPEIETLFCSAKGKNYWQILLHYPHCDLVRKNDKKQIINWLVQLKGVGFKHAQKTADKLITLAYKAYPVVSCDSVEVEQVQYYAHRLLSLSEYREKIIERMVQLAKSLPNHDLENLESIPGFAQTTAVRVLSELGNLRRFSNPNKINAFIGIDPGRYQSGEMDSNLSITKHGNAVARKLLYCAIGQIDNASKTNPCHIADYYESKKLSSQTKGFKKIAIASIHKLIRTIYALIINDQLYDYNVATHNQKDFSRN

SEQ ID NO: 199760 - protein, 346 aa, unidentified
MLYAGLDLSRKRLDVHILDEDGRTVEVTAVSPDAAGLRRLAAHVLHFGHEVYGAIESMTGARFVHDTLERYGWDVAIADAAKVKGIAPLAAKTDRIDARVLAELARRELVPEIWLPDPTVRAERERARFRLHLVHHRTALKNRIHATLMTFGHPVPVADLFGVGGRELLARLALPEPWSGTLATSLRMVDELGAEIDACEADLRRLGADHPSIPLLLTVPGIGPILAYTIASEIGDIGRFSSPKKLTGYTGLCPIVRQSGNRDVRGPLAKNGPKYLRWALIEAATHAARDAHYRDRYERTKRRLGRQRGAKVARIDIARKLAEAIWHILTKNEPFAPAGPTMLLVA

SEQ ID NO: 199761 - protein, 405 aa, unidentified
MEIFVGIDWAEAHHDICVLNEMGMVLAKRRIAEGLDGVGQLHALLADHAAEPNQVVIGIETDRGLLVGALLAAGYQVFAINPLAASRYRDRHSTSGAKSDPGDAKMLADLVRTDRHNHRPVAGDSELAASLQVLARAHQNLIWSRQRLVNQLRSNLREYFPAALAAFGTDLAHPLALGVLDAAPTPAMGRTLSQSKLAAILRRAGRERGVEEKAAAIQAQLRAPQLAAPALIGEAYGKSVAATVRILRELNAQLASLAAELTQSFDGHPDAELYRSLPGLGVVLGARVLSEFGDDRTRFAHPKARKNYAGNSPVTKASGTRRVVLARMARNRRLADACHLWAFCALSGSAGARHYYRTLRQRGKTHHQSLRALANRLVGILHGCLDHGQVYREDIAWPQSPTVAA

SEQ ID NO: 199762 - protein, 414 aa, unidentified
MDDRKSWYAGVDWASQSHHVRLIDHNGRNLGERIFKHGGEGLAAMADWLMTTSGAERPEEIAVAIEVPHGPVVETLLERGFAVHALNPKQMDRFRDRYFPSGAKDDSRDGLVMASALRTDPHCFRRLAATEPAVVELREWSRIAEQLGEERTRLANRLREQLWRYFPALLELDADLAAPWILDLWRAVPTPQKARRVSNTTIAAILKRNRIRRFDAKTLLDILRQPHIHVAPGTAEAAQAHIALLVDNIRLVNRQITQAHHQLDVLPNRLADDEDAEPGQIKQRDAAILASLPGLGRINRGTLLAEASDALQRRDYPVLRVLTGVAPVTRRSGRACSVIRRFACNKRLANAVYHWARTATQHDPVSKAKYVALRARGKSHGHALRVVADRLLNVACAMLRAGTTFKKLSPQLSP

SEQ ID NO: 199763 - protein, 460 aa, unidentified
MGRKGKRTKGMEEAHPFTGMSQVNPNAAGVDIGAVEIVVCVAGDESTQIVKAFGNYTVDLQAIGRWLKEYQIRTVAMESTGVYWIPLFEELERQGFECLLISSRSLRRVAGRKSDIEDAQWIQTLHSYGLLESSFRPQAELIALRTLLRHRSQLIEHRSPHIQHMQKALLQMNVQLSQAVSDVTGVTGRAIIWAILAGEREPQKLAALREPGCKKSEEEIGKALTGTWREEHLFVLKQSMEMYVFYTEQVRACEEEIERVYGETRPDWEAGEVKPLSQRKRNSHSKNKPQNEEGIRSHLKRISGVDLSVVDGFGVSLAQTVVMECGSDMSQFPKDEHFCSWLGLAPKHEISGGKVLKNKTLKTKNRAGQAFRMAAQSVKQSDCVFGVMYRRMRARLGPAQATVATAHAIARVVYRMLKYKVEYETISVEEYEKKYKEQQLKYMKKRAKKLGYQLVQLDPA

SEQ ID NO: 199764 - protein, 376 aa, unidentified
MKGREPEKPEVQHWRPNAICTPWVSVEPRPFTLVQPEQSQGPCHMNTDHEPAIQGWVMTSITTYNQFVGIDISKAFLDVCFLPSGEILRLPYTKVGLSKLLHAIDDEPNSLIVMEATGGLERPLAQVMSEAGYATSVANPRQMRNFARATGELAKTDKIDAYIIASFAKMMQPAGRYSHDTQRSEIMAYTTRRRQVIDLLSAEGTRLDQTYDLKIKRRIKAHITWLKKEQIALDASIKETISVHPVWRHHHDQMVSVPGVGEATASTLISSLPELGSLSRKEIAALAGLAPFAQDSGTMRGKRRIRGGRREIRRVLYMAALVGTRYNPVLKEFYQRLVAKGKVKKAAIVACMRKLLVILNSMIKDGTHWQVKMHNG

SEQ ID NO: 199765 - protein, 338 aa, unidentified
MAKSQVFVGIDVAQATLEVAVRPTCEAWQVANNELAFGDLVERLRQLKPSLIVLEATGGIHLPVVAALAAAKLPVVAVNPRQARDFAKATGKLAKTDRIDAQVLAHFAEAVRPEVRPLPDAATQELAFLVARRRQLMEMRVAEQNRSRGTPARIRTQIREHVEWLNRQLDELDRDIGQRVRSSPAWRERDELFRSTPGVGPVLSTTLLADLPELGTVSHKQIAALVGLAPLNQDSGKKQGKRVIWGGRASVRAALYDPELLPAPSRHAQTQETGADRMYAQAAQDSQCHGPTSDTMVRPSWCLTTKTVANRWRTGPWLDLYVSRRHWGTRERCIHVCP

SEQ ID NO: 199766 - protein, 344 aa, unidentified
MNYHTALDVSLRSVSICIVDDEGPIQFEAKVPAEVEEIVACLRRFSAEINSVGFEAGALTQYLTYGLQAAGYEVICLEARQVSAALAAMRNKTDKNDARGIAQILRTGWYSRVHVKSMESHLIRALLSSRKTILKKCVDIENEIRGLIRLLGIRLPGTLKHGAYDAVLRQAIEADASMVNSLIPLLDARLMLYQTYLKLDNQVKALVREDPICQRLMTVPGVGVITALTFKAAVDDPRRFKRSRTVAAHFGLTPRRFQSGEFDNPGRISKAGDPDVRCALYVAAHSLVVRSDQWCSLKVWGIKLMKTKGHRRAMVAVARKLTVILHQMWLNGTDFRYGSSEATT

SEQ ID NO: 199767 - protein, 343 aa, unidentified
MKLSRVGVDLAKNVYQLHGVDRSGKTVWKRRLKRHQWFKVLLDTAGPECEIGMEACAGAHHWGRQLQSRGYTVKLIPPQFVKPYVKSNKSDAKDAEAICEAMGRPNMRFVTVKRVEQQDIQATHRVRAELMTQRTAKANQIRGLVAEYGLVAPKHLSSLRAAIPCWLEDAENGLTGDFRALLQGVWTDLLLLDDRVGEMDQKIKQLADNNEDCVRLQQLRGVGPMTSTAMIATVGDARQYPKSRQMAAAIGITPKQHSSGDRDRLLGISKRGDVYLRTLMIHGARAVVARAKHKDDRLSRWVTNIANKKHPNVAAVALANKTARMAWAMLRHGTDYDPDFAIR

SEQ ID NO: 199768 - protein, 316 aa, unidentified
MNNKEIFVGIDVSKKQLDVAILPDAKHKVYANNEEGIGQLTIFLKSLSPTLIVLEATGGFEMPCVGVMAAEGLPVVVVNPRQIRDFAKATGKLAKTDAIDAQTIARFGEAVRPEIRELKSPEMQELAALNTRRCQIIQMITAEKNRLATATKWTREDIKENLAWLKERLNGINDELNKSIRNSPVWREKDDLLQSVPGIGPVASATLLSQLPELGTLNRRQIAALVGVAPLNRDSGIMRGKRCVWGGRADIRTALYMATLVATRFNPVIAAFYRRLCNAGKAHKVALTACMHKLLTILNSMVKNRSHWSPVWLENS

SEQ ID NO: 199769 - protein, 341 aa, unidentified
MQITTIGLDIAKNVFQVHGIDAAEKVVVRKQLRRGQVMKFFAALPPCLIGMEACASAHYWARELRKLGHQVRLMPAKDVKAYVKRSKNDAADAEAICEAVGRPTMRFVEVKSAAQQGRLMQHRTRDLLLRQRTQVINALRAHMAELGVVAAQGREGLKSLLTIIADEKDERLPVDARASLIVLAAQLQALQTMIGSIEKRIIVQHRASEESKRVATVPGIGTLGASAITATVTDASAFRSGRDFAAWIGLVPRQDSTGGKPKLGPISKQGDRYLRRILVVGAHSVLRRAKQNPEKHPWLMQLLARRPFKVVAIALANKMARVAWALLARGGIYQAPRLAAA

SEQ ID NO: 199770 - protein, 355 aa, unidentified
MIIIGVDFHPEFQEIASVDTDTGEYQEKHLAHPEEAEQFYRALASVGQMVRVGMEASGHGRWFERLLEELRIELWRGDAEVIRAKRGRKQKTDREDARHIFKLLLKDDFPRIWVPSWENRDLRQLLWHRHRMVQARTRVMNQLQAVALNEGLRCKKKLWRTHGRQQLESFRLAPWASRRRRELLELLDRLNPTIAELSRAVDEEAEKCPEAKRLMTHPGVGALTALAFVLIIGNAERFRCGKQVASYLGLVPLEESSGNRRRLRHITKQGSSIVRFLLVEAAQVTVRRLPDWRTKYVHLMMRRGRKTAKVAMARKLAVRLYWMWRKGWDYEQWKKFGSNVGQPGHRDGVQQNTSN

SEQ ID NO: 199771 - protein, 363 aa, unidentified
MKTQITALPKLFIGIDIHKRSWKIHCSTDLFAGKSFTMPPDPEKLWEYVQKHFPDHEVSTAYEAGCCGYSAHRSFESFGWRSLVVNPADIHRKGKERYTKTDRIDAQLISRELKDGRLESIPVPGQEREELRSLFRRRNELVKDLRRVKSMIKMQLLYFGIKVPAEFDNDHWSHAFRHWIDSQEFNYPTARETMASKMRNFRFIDKELRDVSTQLRAYCRKHFKKDYYLLRSIPGIGGIVAVGIISELGDLRRFNSLKHLAGYVGLAPGIYESGATSKSTGMNPRCHRLIRSYFVEASWQAIRTDPVLQAYYRKHLGKDVKKIIVKVAHKLLSRTLAVIKTETPYEIGAVSYTHLTLPTKRIV

SEQ ID NO: 199772 - protein, 403 aa, unidentified
MNKLKRVCGLDVHKDIIFTCVKKGKYQSEVKQFSTTTQGLSELSHWIQGEQVERVAMESTGIYWMPVWRALESDFKLLLVNPYFIKQMPGRKSDVQDAQWIATLLDKELLKGSVVPDKTIRVLRDYMRRYAQLQGQMTRCLQQIEKQLSRCNIKIASLSSTIGSKTVIDIVASICKGEYQPEQLLKLVHGRIRNKHGEKVKQALEGIIDKHDIFLLRQIYADYIHIYDQCEALVDQAQKVADEYYQQEIALLQTIPGIKKLSAIIIFAEIGGCINLFATAQNLTGWCGLRPKNDESAGKIKSRSITKGNKYLRRILVQTGWAASRTRNCYLKTKFEQLSIRKSSKKALIAIARKQLVIIWNVLSKNEPYAEPQIVLSPEQIERKQKYYQGKLEKLFKTIEKAG

SEQ ID NO: 199773 - protein, 339 aa, unidentified
MLIIGCDFHPGFQQAAIFDNQTGEILERRLQHREEAEQFYGSLRGQQVRVGMEACGHYPWFERLLEDLGIELWIGDAARIRATEVRRQKTDRRDAEQLLRLLREGRFPRIWVPSLEERDVRQLLVHRHKQVQARTRTKNQLQALMLSQGLQKKRQLWTQSGRAELEKLELLPYAALRRQRLLTALGQQAAEIAALNRQVEEEVKRRPAAVRLMTHPGVGPVTALAMVLTLGPAERFENARQVGSYFGLIPSEHSSGGRQQLGRISKQGSSFLRFLLVEAGQTAARYDAELGRFYRRLAVRKHRALAKVAVARKLAMRLYLMLREDWDYAQLCKAMCRQA

SEQ ID NO: 199774 - protein, 393 aa, unidentified
MRKPKKQKKPLNDLSRSPTPFDPNRTLIVVIELGKESWLVAGIVPGVERQPLKRLAADENELLKLLEQWRAEAEKAGHKIDRITVAFEAGRDGFWLARWLRARGIETHVIHAASVAVPREHRRAKTDRLDTEHLKRAFLGWLRGERNHCKMCAIPTAAEEDAKRPHRERETLVGEQTTTINRIKATLARLGIRNFNPKLKKAAERLEHLRTPEGEPIPPNTLAELSRDMARKQLVAEQIKQIEKTRLEQLKEAPKAGPNLMVLILVRVIGIGIETADMLVREILSRNLRDRRAVARYGGLTGSPDESGKTRREKGLARSGNARVRRGMIQLAWRFLDYQKESALAKWFEARTANARGSRKKMIVALARKLLIALWHFVRDGVVPEGVILRPAH

SEQ ID NO: 199775 - protein, 393 aa, unidentified
MEPVVGLDVSKGSSVMQAFVKRNEAFGKAETIRHGKQGFERLREQLTELRERTGEDPVVILEATGHYHRGVVSFLLRNEFRHVIINPLQSKRAKGTQLRKVKTDAADAWHLAEMYYRGEVNPHRTQEEAYTELQHVTRQHEFVTGLYVQAKLNARALLDQVFPAFEGVFYDLYSTTSLRVLQCCLQGEVEKLQKILGDATGRSHSKAWIQEKTERMDWALQEWNKGEVSPAQVMTLEGMISLLFCLQDQLGRLEEQMEEIALSLPEVELLQSIPGIGDKLAAVIVAETGDARQFTSSKQLVAFAGLDPGVFSSGKFTAASNRITKRGSKRLRRALYLAVQCGLRKGANPRLKQYYDKKKKEGKPYKVAVIACANKLLHHIYAILCKRQPYKVV

SEQ ID NO: 199776 - protein, 409 aa, unidentified
MIFVGDDWSEDHHDIEVLDEDGATLERRRLPEGLNGVGQLHELLAGFASDPGEVVIGIETDRGLWVQSLVAAGYQVHAPNPRMVARYRERHVTSGAKSDPGDAKVLADLVRTDRHLHRQIAGDSELAEAIKVIARAHQRQIWARQRQVNALRASLREFYPSALVAFGNDLAHPDALGVLGKAPTPAAGRGLSLSTIAACLRRGGRRRFVEDTAKKIQTALRTPQMEPTTTLADAFGATVRSSVAIIVELNRQIAALETELRSHFEQHPDAEILHSLPGLGSVLGARALAEFGDDPNRYQDARSRRCYAGTAPITITSGKRKTVLARFKRNHHLADLCYWWAFCALTHSPGVRAFYDARRAGGNTHDQALRAVGNRLVGILDGCLRHRVLYDDAKAWGHRTDLSGEGAAA

SEQ ID NO: 199777 - protein, 505 aa, unidentified
MAKPTARHPPAASSAPSGQADQAQAQRQAYRRRKTRAKVKSEALHQKEAAQVEALPVQHPHAAGIDIGSRSHWVCVGFATEAASCLIREFPAHTAGLKAIVAFLREHQVTTIAMESTGIYWVPLYELLQAEGFEVFLVDPSYSHQLRGRPKTDRRDCQWIYRLHSVGLLAAAFRPDEKTCQLRAYLRQRANLVRSASRHVQHMQKALEQMNLKLTEILSDITGVTGRTILRAILRGTRSPEKLAKHRDKQCKASEAEIAQALTGTYREEHLFELKLAYEAWQFTLGQVEKVDGQIALQLGRMKGDRALPPLKPKARPKRRVNSPRFDVRAALYYVVGLDLTEIEGISELTALTVISEIGPGVSRFATVKKFCSWLGLCPNWQKSGGRVKSSRTRRGVNRAAQALRLGAQSLHHSRGALGGFLRRMKGRLGTQAAVTATAHKLARIVYLALKHGMTYVRQSQEEYEAQMKEKQIKALRRKARQLGLEVVEKMSGSDATATAVPVEG

SEQ ID NO: 199778 - protein, 338 aa, unidentified
MNIVFLGIDLAKNVFQLCGLNQAGKPVYTKRTGRKELLQTLANIPACLIGIEASTGAFYYWQREFEKLGHKVRVISPQYVKPFVRGQKNDGNDAQAIVVALMQPTMQFVPPKSPEQQDIQALHRARQRIVNHRTATVFQIRGLLLDRGIPIGSAVSRARRVIPLILEDAENGLSSRMRRTIAELYDLFNDPGRRIHFFDKEIETVFRQSEACQRIAKVKGIGPETATAVVAIGKGTEFKNGRHFAAWPGLVPRQHSSGDRQVLMNMTKKGDKHLRTLFIHGARAVVRVATNNNDGHMNQWVNRLKERRRFNKTTVAVANKNARIIWSMLRNDTGYQVV

SEQ ID NO: 199779 - protein, 375 aa, unidentified
MKEKLRFLGLDVHAETIAVAIAEPDGEVRSLGTIPNRLESVRKLIKKLSPVEKLRACYEAGPTGYVVYWQLAELGVKCDVVAPSLVPVKAGDRVKTDRRDAEKLARSHRSGDLTAVWVPDEGSEALRDLVRTREAAKQDQLRARHRLSKFLLRSGQRPPSGIRPWTRPYLIWVAQLRFTQMAQEATRLDYLHEVEHMRERVERLEGAITEAVKLASPALQQVINDLQALRGIADISAVTIAAELGQVSRFDGARQLMGYCGAVPSEDSSGKRTRRGSITKTGNAHLRRIVVEAAWGYHRPPCIWYGLRKRQESISEEVKEIAWKAQHRLHKRYMRLAAAGKDKRKITTAVARELLGFIWAIGTRAETTVSQRSAA

SEQ ID NO: 199780 - protein, 400 aa, unidentified
MATRKYDRPRVLAHRRPSGHIEREVTYVIAGIDTHKDTLAVAVVDDSGRLVAGGDVPNTERGFAQLVDMFTAHHVQRVGIEGSGSFGRAVAVHLALCWQSGQPVAVVEVPTLMTSRERHGQLGKGKTDPVDALAIARITTREQQLPPVRLTVGAAADLRALLDYREDLVRERGALVNRAHAELGGLRPGYQQQIPILTTRARVRAAVDLLGDDGSIRATLCRRRLERVIAIDAETAELKRQITGLVAAADTTLTELYGVGPLVAARFLAEVVDIRRYPNRNAFASANGTAPLPASSGRTVRHRFNPGGNRQLNRSLYTIALTQIRGDTEGRAYYERKRAAGKSKREALRCLKRRLSDIVFTTMRHDAAGADAPPDQASPPAWPVLVGVGAVDANEARLTA

SEQ ID NO: 199781 - protein, 428 aa, unidentified
MIPAVLERCAGIDVHKKFVMVCALLGPAQANPEVKIRRFGTYNAELEQLRDWLQELNCMHVVMESTGPYWKPVFNVLEEAGVQTTLANPQQVKNLRGHKTDMRDCQWLAHLLRHGMIRPSYIPPRPIRELRDLTRRRKQLVRNGAMERNRVQKLLEEANVKLGNVLSDVFGASGQEMLFALVQGRATAEQMAQLAKQRARKKIPQIQAALEGHRMNQTQRELISQCMAHMAFLEEQIEEVDRQIQDKIRSFGLSQSYELLQTVPGMKKEAAAAVLAEVGAKVDAFSTPAKLSSWAGVCPGNNESAGKRKSTRTTKGNPYLRDMLLECAWASSHRKNSQMQNRYQRLQVRKGHKRAIVAVAHALIQAVYYVLSTRQPFVDTAEPPHSPATVRRLIRHHTRRLRKLSCWLERSAHAIQTSTLHQQHITSG

SEQ ID NO: 199782 - protein, 346 aa, unidentified
MELHTIGIDLGKTVFHLVGLDLHGEVVVRKKFSRKQLLHFTANLRVKLIGMEACGGSHFLGRTLREQGHEVRLIPAQYVKPYVKTNKSDFIDAEAISEAVARPTMRFVPIKTDDQLDLQSLHRVRERWVMRRTAVINQIRGLLLERGITVRKGRCHLDAVLPGILEDATTKLSSAVRLLLAQLKVELDQLVIRLEEADALVKKIAQESEVCRRLDALPGVGPLTATAIIAAVGNGAAFRKGREFAAWVGLVPREYSTGGTQKLLGISKRGNCYLRRLFVQGARAVLQFREKQSSGLSAWLAQLASRAHHNVVGVALANKLARMAWAVLAKGEVYRPPELASNLACR

SEQ ID NO: 199783 - protein, 452 aa, unidentified
MDKNNKKIFIGIDIGKDINWVSFLAEGKKEEVRKRFKINNDIYGFYKLLEILEDYKVKDGIKESEFIIGIESTGHYWQNLYDFFNKRKYDVVMVKNRIVKLKREAKYSQKGKNDSIDCHCIGLILKDDDYFEIKERDKNYASLKRLARCKEDYTKSNTQNKNRLRAWIDVNNPVYLKVFSDVTSKTGIAILREYPSPWDIVDKEIEEVKEKLQKDERNKGILYRLVNEYLTLAKELYKDTIKINNGDREEIKIYLYQYEMLEYSIKDIDNTIRKLSEETIDSYDKIIKIKGVGNSEINLLLAEIGLVDNFINARALQSYFGLGIKGVGSGKEIKPPKITKAGSKRSRKLLYHMAMNLVSKNEDWRKVYCYYKSYNRNNPNTNKEMLVAVACKFLRVIFGILKHNVDFDTEELFKGFDFKKCNKEKFISEYVGEKGKWNLTEEEINKLFEYKY

SEQ ID NO: 199784 - protein, 357 aa, unidentified
MGKSIIDTSSVTRVGLDLAKRVFRIHGVDATGSVVIARSVNRRTLLKFFDALPRCVVAMEACASAHYWGRQLLELGFAVRLIPPAHVKPYVRRNKNDAADAAAICEAAGRPGQRFVPVRSVENQAALMRHRARELMVGQRTAALNALRGHLSEIGVVAAQGVQNAYALKRLACDGVDDDGEIVVPDCVRLALAPLVRQIDALDEAIEAIDKTLEASARTDETARRLMTIPGIGPVTAMALLATIQDFAAFSSGREFAAFLGLTPREHSSGGKPRLGRITKMGDRYLRKLLVVGACSALAARKGHNDALRRWASGMLERKTVKYKFKLTAVALANKLARIVYALATKGGHYDDRPVAA

SEQ ID NO: 199785 - protein, 353 aa, unidentified
MSDDKYIAFDVHQATTVVSVLNAAGREVNATILPTQAQPLIGFLEGLQGKLHLSFEEGTYAAWLYDLLQERVAELVVCDPRHNALLKEGNKTDAGDARKLAELLRAGMLRAVYHGSRSLRSLQELAHSYEVLRDDTTRVMNRIKAFYRGRGIDPAGRGVYAQGQRASWLGRLPAGASRLRGELLHDELDQLRSLRRKARRALLAESRKHTVAARLGEIPGLGPLRVALLMARLQTPHRFRSSRNLWTYAGLGLVRRGSSEYRLVEGRIVRRPKAVNPRGLNPNHRPELKEIFKSAALTAIRRPGPFKDYYDPRAQQGVDPAILRVTVARKLAALTLSLWKKGGHYRAESPKQA

SEQ ID NO: 199786 - protein, 392 aa, unidentified
MVVFVGIDVSKDKHDCFILSSEGEVLADVFTIPNNLDGFRFLLRRIRDCTHAQDKIKVGLEATGHYSYNLLGFLLDNGLPTYVLNPLRTNIYRKSLSLRKTKTDRVDARTIASMLLSDVGLKPYTDTAYHNEELKSLTRYRFDKVKERAKLKTSISRLVCILFPELEKLVPSLHIASVYALLEEFPGAKQIAAAHLTRLKTLLETASKGHYKRDMALEIRDAARNSIGSWMPAKSLELQHTIRLIRELDDEIAEIEKQIQAIMDELNSPITTIPGIGFRMAAMIFAEVGDFTRFDSPDKLLAYAGMSPSTYQSGQLKNCYPHMEKRGSRYLRYALYNATKYVCHWDPTFAAYLAKKRAEGKHYNVALSHAAKKLVRLIFAMEKSRQPYCPAA

SEQ ID NO: 199787 - protein, 351 aa, unidentified
MPRTTTVHAVTAIGMDMGKNTLHMIGLDARGAIVLREKVSRGRIALRFANMPPCLIGIEAGLATHYVARELAALGHDVKQVPPAYAKPFRQVHKNDFRDAHAVAEAVQRPTTRFVPAKTDEQLDLQALHRVRSRLVSDRTAVINQIRGFLLERGIIVRQGLRFLRQALPDILAKRTDVLSPRMIRIVADLASDWRQLDERIEAVTDEIETLAKSDDSCRRVMTVPGIGPIISSAMVAAIGSGGAFARGRDFSAWLGLVPKQMSTGDRTILGRISKRGNGYLRMLFMQAARVILMRPASWPKHGFGIWLARAAQRLHPNVLAAALANKLARIAWTVLAQERSYEARVTMTAA

SEQ ID NO: 199788 - protein, 358 aa, unidentified
MYKFMKKFFIGVDVSKDTVDVSFFDDDRMKSPEYLAQYSNSPKGFREMVKDLRMCCHGVSSGQWLFCCETTGRYDHPLCHWLVDHGMVVWRESALQIKWSSGIQRGKNDRVDSLRIAEYAWRHQDKMQKFVKPSESLSNLKAAFTHRRRLVEKRTATRCQLKSMSSEKGLSASVARMIVRDLSREIERLSASIATMDESIQEIIRSDSELDRNYRHIISVKGVGPITAVALIVCSGNFKAITSAKKMACYCGVASFRSQSGTSINRKASVSNLSNRQIKSLLSMAARSASRSNPVFAEYFNRTLSRGKPVALVYNNLRNKIITVVYKLIERDCDFDVDYMRMHSTGQRANEPAIREAV

SEQ ID NO: 199789 - protein, 318 aa, unidentified
MKDLLEISCGLDIHKEKIVACILTGPLGKPTHSEIREFTTLIPDMLALRDWIISENCHHIAMESTGIYWIPIYEILEDAFSGDITLLVVNARHMKNVPGKKTDMRDSEWISTLLRAGLLNASFIPEKRIREFRDLNRYRKSIIRDITSQKNRVEKFLQSSGFRLSSFISDIFGASGRNIILHLMEHGRIDKISLDSYLKTKTRKRIDEILMSVNGTLSEHQQSFLKLLMCHYDSMKEHLIEIETHLQEDMLPFALQIEQLNTIYGISTTASCAIIAEIGTDMKPFKTAEHICSWAGLCPGNNESAGKRKSTSITKGNP

SEQ ID NO: 199790 - protein, 340 aa, unidentified
MLSVGLDIHTKHIALCVLSEAGHVVQRARVRGLEELLRLLKGLPDRFEVCYEASCGYGHYHDLLRPLAARVLVAHPGRLRLIFRSRDKNDRKDAERLAKLLYLGETPTAHVPSLDVRTWRELINCRSQVIAKRTRAKNALRALLRGAGVVPPKSPGLWTKKGLAWLRQLELPTASQQLRRDLLLEEVEALNGQVRRLEQELNRRAQQTPAVARLRSIPGVGIRTAEAVAAFIDDPQRFRHAKAVGRYFGLVPCQDQSGDKNRLGHITREGPAVVRRLVAEATWQAVRRSPAVRAFLERTHRGDPQRKKIAVVATAHYLVRVMWALRKRGTVWQENEARAK

SEQ ID NO: 199791 - protein, 343 aa, unidentified
MRLFVGLDVSLEKTAICVVSEHGKIEREAQAASEPEALTRWMGDLDGTIAAIGLEAGPLSQWLHRGLTQAGLDVVLMETRQVKGALKAMPIKTDRRDAEGIARLLHLGWFRPVHCKSVSAQEVRAVLNARKAVQQGFIALEMSLRGLLRNFGLKVGSISRGRFEQRIRELAAGNPMLEAATEPMLRARLSLRQELAGLERRVRQLAQEDPACRRMMSMPGVGAVVALTYRSAVDDPGRFTSSKKVGPWVGLTPSRNQSGERDVSGGITKAGDVNLRRALCQAATVMMHRGRSTWLRTWAAQVARRRGSKRAMVALARRMGVILHRMWVEGTDFRSDGPAPKVA

SEQ ID NO: 199792 - protein, 428 aa, unidentified
MNCNTQNAKIASITEKTLIVGIDVGSETHFARAFDWRNYEYTKKPLEFSNTEAGFMMFKVLVEDIAEKQGKTAVIPGMEPTGHYWFALGKFLQDSGMKPVHVNPHHVKKSKELDDNNPNKNDRKDPKTIAALVNEGRFSYPYIPTGIYAEIRSLSNLRFQTQEELTRIKNRIARWFAIYFPEYKDVYGDLMAVSGRMILKEAPLPEDIRILGVNGVNQIWRNAKLRGTGMKRAKILVSAAEHSVGSKEAPEAARIELKNLLNDMDVYVSRMEELLQTIEEKLKTIPYVDKLMEIKGIGLITVSGFIAEVGDIGRFDNPKQLQKLAGYAIVANDSGKHNGESRISYRGRKRLRYVLYEAAISLGGKNAEFKEIHEYYRTRKENPLKKMQSVVAVACKIIRVFYTILTKGVDYDPMKLMSDIRRPQLQAA

SEQ ID NO: 199793 - protein, 316 aa, unidentified
MAEELYVGIDVSKAELVVAMRPSNERMTLANDRAGIKRLVGRLGELKPKLVVVEATGGLQRQVVAGLWMAGIAVAAVNPSWVRNFAKGRGLRAKTDRKDAELLALYAQREQPEPRPPADAETQALQELVMRREQLLEMLVAEKQRLTRASGTMRKELRHHIAYLEGRIKDSEADIDKTVRGSDAWRRKSEIVCSVPGFGKTFCAMVLAKVPELGTLNRKQIGALLGVAPMADDSGRRHGRRIIAGGRFEVRNKLYMCALVAARSNPVLKQFYARLVARGKPKKLALAAVMRKLIVTLNAMLKTNSLWRPPCPDLNS

SEQ ID NO: 199794 - protein, 341 aa, unidentified
MDLGSKQCAAVSINGKGKMIDSELFPTSARNLIAFAERQKGQVHVLIEEGEVAGWVMRTINPHVESVVISDPKRNAWVSKGSNKNDRVDAAKLAELNRLGSYSQVWHPEQEEIAAFKLVVQHYDECSRRVARIKCQVKARLRGQGVITRGGAVYGIVGRIKALGQVNSVAVRKVIESDFKLLDYLSRAKADALRHLIEVSKRFPVIARLKRIPGVGPVLAARFVAYVGDPMRFNKRTLASYSCLGIVKRSSDGSPIGREHLNRAGNSVLKDVSRTAFERALASRKPNGIKEFYWSSLKRTGSETKARLNTQRKILALMLAIWRDGTEYSDELVGGVAFTGA

SEQ ID NO: 199795 - protein, 435 aa, unidentified
MLKIRENAAGIDIGAKKVFVYVESQEVKSFYTFTEDFEALAQYLHKHKVQTVAMEATGVYWAILYDILEEAGIDVWLVDGRQTKQVPGRKTDVKDCQWIQELHSHGLLNRCFVVKDLVKELRSYHRLREDHLRSCVMHINHMQKSLTEMNIRIKEVLSQIHGASGLKMIEAILQGERDKNFLLSMCDRRIVKNKKTEVLKALNGRYTKAGLFALQQAYDGYNFYQRQISQCDKEIERIIHKMGNGGKDNNLPAKRKPIRHNKPNVEDLGANLIDIFEGKDATVISGITDYTWMQLLSETGTDLSRWPTEKKFTSWLGLAPGQHRSGKMKRTKRKHGRPKAGQIFRQIAQGLLTSKTIAIGAFGRRLRARKGPAIAIKAMARKLAELYWRVMVKGVDYAEHGIKKYEMQLLAQKQKSVERLAKELNLQLVKMQVVT

SEQ ID NO: 199796 - protein, 474 aa, unidentified
MLEGMRVELVLGIDVACRAAHQASLARPDGTFVWTGRKFFTRPAELEALWAALGLAEGDTVRVVLEPTRNAWAPLASWLRRRGAKVSMVPTTQSADLRAYYSKHTKNDHLDSKLLARLPLLHPEGLREHTSNGPAEPLRRIVKIRSSIVKRRTAVFQRLDAQLELLGPAWYDALGSNYGKAALAVLARYADPTSLLRLGQARLTRFLIRHSRGAWRDDHARALLTAAKQSIELWGTDPGTGIDFAELAADIAVEAEQAQVLTEQIDDLDERIANLYAEADPTGIVASAPGVGPVTSAVITGRIGDPHRFTSLAAIRAYSGLVPKVAQSGQSLHQHGLTKAGDPLLREALFAAADAARRTDPQLAAKYARLMATERHHDSAICHIATTLLTRIATCWRTGQHYVLRDTDGRQITEAEGRQIVRDHHQVDHRTRANAASKRQSQRLKNRTGREQKESQSAPASRPANTKSTNPSAA

SEQ ID NO: 199797 - protein, 342 aa, unidentified
MYCIGLDVHKKTISYCVKDASGQVHREGKVGATRGELDDWMRTLPQPWTVAMEATIFTGWIYDHLLPHAQQVKVAHPLMLRAIAAAKKKNDRIDAGKIADCLRCDSLPECHMACTAIRDRRRTLRYRHLLVRQMVQMKNRISGLLMETGVSHNKRRLHKVGYFRELLASNEEVNESIRPLLRVSRDTIVRLQKTEYALVSSLQRDPLLAERIKRLRTVPGVGPINALTWALEMGDVSRFPSIREAIIYCGLCGDEKSSADKVMRTPLSKQRNKHIQRVLVEAAKLAPRQNHDLALVHEREKQKGNANRATLAVARKMVAYLLAVDRGQRDFVPFADPRSVAA

SEQ ID NO: 199798 - protein, 459 aa, unidentified
MKSTLVLGVDVSKGYGDFVLLDTCKKVVEESFRLDDNKQGHDILKKQLLHWKKKHSVARLLLVTESTGGYEDNWLRVGKDKALGSFVESYRINAKIIFHEYEAQRRNSIDDGISALTIAEHVVKNLENFSSTNSFNETAYTSARSLVRHYTSLQQECTSHKNGLLKLIYQYLPSLEAVNPREWPSYWLEIFVRYGSRKSIQIAASKGFKQLKRVPKGKAKEIAEALANGIDVRHTPEMVVFAIRSKARQIKRLNEEIQEIKEMIIDQAPVDCDQVDLLKSIKGMGEITPVILLSFIEEVSRFKDAKHMASFFGVQPRVKRSGDGSYKTKMSKQGAGLVRRELYLLAFRTLTTEPYLRAIYAKARKKGMAHDAALGVVMHKLLRIIYGMLITNTRFNPGIDQLNQHQTGEEPKPQKQKKDASRRFQPASMVAPISFRQRRKRKKDYELQADGISESAESS

SEQ ID NO: 199799 - protein, 336 aa, unidentified
MADIYILAIDLAKRSFQVCAADRGGAVLFNRTLSRARLGKLLEAQEPCIVAMEACATSHYWGRQAQGLGHEVRLIPPIYVKPFVKRQKNDAADAAAIAEAALRPNIHYVAVKSAEHQAAVAFRTHQCFVGQRTQLINALRGHLAEFGLIVAQGPANLKAMAGMVDDETVDLPDTVREIVRLYLHQIEVLTAKIDELTLKLREATKVNDEMRRLCTVPGVGPVTAGAIMAFAPDLRSFSSGRNFAAWLGLVPRQRSTGGKTRLGSVSKMGQSDIRRLLIVGAMSRIRWIVRKGVLPDNWLGRLMGRKPRMVAAVALANKMARIIWAMMTKEENYRLA

SEQ ID NO: 199800 - protein, 343 aa, unidentified
MSKISIVGLDLAKNVFQVHGVDASGGVVLRRQLRRGAVEKFFAQLPPCTVGVEACGSAHHWARVIGRYGHQVRLMPPAYVKPYVKRNKNDGRDAEAICEAVSRPTMRFVPVKSVEQQATMAVHTTRALLVRQRTMVANSLRAALSELGIVAAQGIKGLRELMAKLEAPHEEVPEIMRGALLLLAKHWQALEADERVLERQIAKAARSDREACRLMEVPCVGPIIASTVLAKVPDATVFRSGRNFAAWIGLTGRDHGTGGKHRPGRISKQGDRMLRALLISGASAYLRHQRTRGVSDPWLRDLLARRPYKVVMVALAAKTARILWAMLVKGEPYRDRASAPAAA

SEQ ID NO: 199801 - protein, 425 aa, unidentified
MNYKQNEKINQVKESTLVVGIDIGSTTQYARAFDWRGIELGKVFPFSNSREGFESFKAWMQHLQDKYKKLDAIVGIEPTGHYWFDLGAYLEDEGILLVMVNPYAVKQTKELDDNSQSKNDRKDPKVIAKLVTEGRYSAPYTPDGVYADLRIMVANRKRLIREMTQIKNRFARWFAIYFPEYTDVFGDYEAQSSMLLLKKACTPEAIVELGAGKINQIWRDAKLRAVGMKRATTLCETAKRSIGLKKGSSAARYEMKLLLEDYEYKKAQLDAVMEEIEKLCRKIPESEQMLAIKGIGVITVAGFLAEVGDVRRFESPRQIQKLAGLSLRENSSGKHKGQTTISKRGRSKLRAVLFNAAIPLIAKNPEFKSLHEYYTTRANNPLKKKQSVIAISCKLIRVFYAILANGVTYDAQKMLSDIHRQPQAA

SEQ ID NO: 199802 - protein, 352 aa, unidentified
MHDITPDAIVIGVDTHKDAHVAVAINGLGAKLATASFPVTTQGYRQLADWAAGHGAVHTIGIEGTGSYGAGLTRSLTAMGVRVIEVGRVNRQLRRRHGKTDTVDAESAARSVLAGDAQGQPKTGDGAVEMIRHLKIARDTALKARTQAMVTLKTLLINAPQLLRERFIGITGKMTLIRGLAALRPGMPVSPTASAKMALRALAQRWLMLDAEIKEHESVLEVLVRAQAPALMDAPGISTGTIADMLVVLGDNPQRIRSEAAFAKLCGVCPVPASSGKTSRYRLNRGGNRRANAALYRVALVRMRHHPPTREYIKRRTAEGKSPREIRRCLKRYIAREIYQHLCTGKHPAKHS

SEQ ID NO: 199803 - protein, 346 aa, unidentified
MTIVEAARAVTGGIDTHGEVHVAAVLDEVGGLLGTQSFRADPDGYAELLSWLQAFGEVSKVGVEGTGSYGAGIARFLARAGVHVVEVDRQNRQARRQSGKSDPLDALEAARAAQSGRAHGRAKSRDGSVEAIRVLVVAKRSARGARIKALGQMRQLTFSAPDQLQSRLKGLPIAPFVAAAQGLRPTRSPDVVSAATKAALSSLAHRVADLEAEIAELDALITPLLQITAPELLGVYGVGIDTAAALLVAAGDNPERLRSEAAWAHLCGVSPLEASSGKVTRHRLNRGGDRQANRALWHIVITRLASDPRTQAYMERRVKDGRSKREAIRMLKRYVAREVYPYLPRA

SEQ ID NO: 199804 - protein, 343 aa, unidentified
MDHFAGLDVSVKETSVCIVDDTGKIVREVKVPSEPKALLKVLTNPAYRFKRIGLEAGPLSQWLLSALAEAGLPVICVETRHMRAVLQAQINKTDRNDARGIAQMMRVGLYRPVHVKTLRSQKLRMLLTHRKLLQSKAIAVDNDLRGTLRNFGLKVGIAGKAKFEARIKELVENYPDLAVLVEPLLIVRRVLGEQIVILHRRLLAIVRDDEVCRRLMTVPGVGPVVALTYRATIDVPARFRKSKAVGAVFGLTCSKYQSGEINRTGAISRCGDDMMRMMLYEAAQSMLVRSTRWSWLKAWAMQIARRRGMKKAIVALARRLAVIMHRLWIDGTEFRWTREVAAA

SEQ ID NO: 199805 - protein, 343 aa, unidentified
MQTITTIGLDIAKSVFQVHGIDAEGKVVIRRQLKRRYVLAFFQRLPSCLVGIEACASSHHWSRELQALGHTVRLMPPAYVKPYVKRQKNDMADAEAICEAVTRANMRFVETKTPEQQSCLMLHRTRHLFIRQQTAVINAIRAHLAEFGIVAPVGRNGVEDLLAVVADPSDKRLPDIARACLTALGAQLRRLKEQILEFDRMIRVWHRSSETSRRLDDCPGVGPVLATALVATVADPKVFRSGRNFSAWVGLVPTQHSSGGKDRLRSISKQGDRYLRSLFVAGALAVIRYAKIHGTKHRPWLSALLARRPTKVAAIALANKIARMVWAMMARGERYKNPVALAA

SEQ ID NO: 199806 - protein, 321 aa, unidentified
MSTTTIERYAGVDVSKARLDVAVYPASERYSVANDLEGIDTLVGRLKEAGPPKLVVLEATGGFERPAAMALAASGIAVAVVNPRKVRDFAKATGTLAKTDRIDAYVLARFAEALKPEPRALPDEEALLLSEILDRRRQLIGMLVAEKNRLAATVCGPVKRRIRSHARWLEKELSRTERELEEAVEASPIWRENEALLRSVPGVGPAALSRTLLAELPELGTLTHKRLSALVGVAPFNRDSGRMRGKREVWGGRARVRTALYMSAMVASQHNPLIRQFYERLVKAGKPKKVALVACMRKLLSILNAMMRDRTPWRCIHALTP

SEQ ID NO: 199807 - protein, 336 aa, unidentified
METQHFIGIDISKATLDWAVYSIQKGIIYQTQSANSEAAIKATLKIIESLPDFKRSTSVCCMEHTGIYNTHLLACLYHLHYPIWLENSLQIKRAGGLQRGKTDAIDAVRIAEYAFRFKDKTRLWQPPRQVIQRLAALSAVRHRLLTARQQLQQPLQEQQGFVTPVLQKQLTKTCQASLKAINLDIDKIEKQIKDLIDKDSHLKELFELITSVPGVGPSTASEVIIATNEFTAITDPKKLACHAGVAPFEYQSGSSIRGKTKVNHQARKRLKSLFHLGSMSAIRVKGEIQDYYLRKVAEGKNKMLVLNAVRNKLIHRVCAVVHRQQKYDKNYTHTLA

SEQ ID NO: 199808 - protein, 445 aa, unidentified
MAMRKREDDAVFPNAAGIDIGASSHWVAVPRHLAEAAGCEPVREVGTVTEQLRALAAWLVSLGVDTVAVESTGVYWIPVFEVLEQHGLKVWLVDARQLKYVPGRKSDVQDCQWLQKLMSLGLLRAAWRPSAEVCVLRAVARQRETLLLEQASWVQRMQKALVQMNIQLTEVLSDVMGQTGQAIVRDIVAGVRDPRQLCRHRQRKVKASEAQIAKALEGNWREEHLFVLKQALSMYDDIGRHLTECDARLDALLDARGRAQVDIGKVPRAGSKTRLEFDIRQRLANWAGVDLTRINGLGVTVVMKLLSEVGPDVSRFASVKHFCSWLGLCPGTKISGGKVLSSGTKRSANRARQALKLAAQSLCRSESALGAFYRRLCARMDKPKANTAAAHKLARMVYFMLTRGEAFVDQGQQRYEEQQRQRSIAALKRRAAALGFQINPLGTTA

SEQ ID NO: 199809 - protein, 404 aa, unidentified
MHYLGIDVSKASHECVILDANGEAINKSFTVQSSKDDFAKLVKKLSELNIPKSDLVAGLEATGNLWENIYGYLKEQGFKVILLNPYQTSKFHQVSLKKAKTDAIDAVVIAGLLRSGCASGSYIPDDHIQSLRDIIRLKDGYLKDIKDYKRKAYSLLGLVFPEFLNLVKDPFNISSTEILLKYQTAYDFKNLKPRDLLKVARGYQGNNYDEAWADKVISSAKGSIYSGKASKARSLVLKSLISNIKYLKEQIEMLENEIQNLLKPQGTQSNSDVDNLLTIPGVGPKTVAVFLAEAGDIKRFSRCKDFIGFAGLYPEIEQSGSSLNKARLTIKGSRILRHALYMASVASLIHNPYLKSVYQNKVSQGKSAKQAIIVVARKLACIMYSMLKNNTAYDPLRVAIPVAI

SEQ ID NO: 199810 - protein, 343 aa, unidentified
MHNGENSPADTITVAGADVSQAWIDVACQNPGQGAVAESRFDNTPAGHSRLIGWLRKEGVPARITIEASGIYSLDLALALHEAEGIELMVAHPKALKNYRSARGRRAKTDRVDARLICDFCRRMPFQAWTPPSKEAFELRALARRLQTLIEERVREKARLHAATTSRHASSYVANDIEVNIRHLERRIERIEAEALALIGGHDALAQACEHLRSVKGIGDRSAVKLLGELVMMPKDLTVRQWVAFAGLDVRHHESGTSVSKPGRISKQGNARLRKALYMPAQVAIQNEPNVRAFYDKLLKRGKKPMVAIVAVMRKLLHSIYGMLKHDQDFDGRKFYRIPVSAA

SEQ ID NO: 199811 - protein, 397 aa, unidentified
MTRDSGIVLSDLGSVASMGEARPETQVLDRRSRAMSHAEHCRRLKMEVKRQERREALVPPGAMVMGIDLSRDEMVWHALGGEDGPRRAVGFTGDRTWEGVRDMVKQARPIAAELGCSEWVFAMEPTGSYWLPVAEALHRAGERYVVVPAVFVKRTRELEDGRPQAADPKDARRIADLARQRKVLFVQPQEEAGWRRTWYEIAAEYYDLGEAIQVERHRLRSWTDISRPVWAAQISDLTGSTALAVAQVLRQVTGEWDERRFLEEVRKVYSGRRFPASVARRLWPEVHQPSEWGCSWYREGLDWRISLAAERLAGLLRQQAETEARMMPFYEQSPEARFLDTIQGNPRTLTACVMGLAGDPHDWDSPRALVKMAGLDPQRDQSGRWRGETHVSRKGQG

SEQ ID NO: 199812 - protein, 368 aa, unidentified
MNEVTTRHLGLDVHKATINVALADSGAAPVLYGTIANEPGAVRKLVGQLKRGCKLVAAYEAGPTGYGLHRQLTELGVECVVIAPALIPRRAGDRVKTDNRDAITLARLLRSGDLTPVWVPGQEDEALRDLVRARFDAKDDLRRAQHRLSKFLLRQSIQGPAGTTNWSARYQSWLNTLQLERPASRLVLEDYRATERAARDRIRRLDADLKRCAEQSPRLDLILALQVLRGIAFLSAVTIVAEVGDFRRFPDAPRFMSFTGLTASEYSSGQSRRQGGITHAGNRYLRHILVQAAHNARYTPALDGTVKHRLKGAPADLVELSLRAQTRLHRRYRHLDRRIGRAKAVTAVARELAGFVWAVGQRMEAGGA

SEQ ID NO: 199813 - protein, 334 aa, unidentified
MEQVTTVGIDLAKRVFALHGVDSAGRVVLRRTVKRDELVELVAGLSPCLIGMEAGSGAHEWARRFQAFGHTVRLMAAKFVTPYRRNGKNDGNDAEAICEAVGRPGMRFVPIKSAEQQAVLAVHRVRQGFVEERTSTINRIRGLLAEFGVVLPLRSESIRRHAREAAETLPDIARRPIQDLCAHLRELDARVLAYDREIERLARQSEAARRLMKIRGVGPLSALAIVATVGTARDFRSGRQFAAWLGLTPRQHSSGGKSRLGHITKRGDAYLRTLLVLGARSVLNTAMRHKDRISRWVLALQTRRGYHRALIAIANKNARIAWALLSRNQELRTA

SEQ ID NO: 199814 - protein, 299 aa, unidentified
MLRPARKALAQKAHSENPMNALHYIGFDVHKKTISFCVKTAAGEIVEEGVVAAQRAGLRQWASARPQPWRGAMEATLFSGWIYDTLKPYGEQLEMAHPAKMKAISAGKKKSDMIDARTIADLVRCNLLPACYVAPPRIRELRRLLRYRSLVVSEAVRMKNKMAGLLMETGALYVKEKLHRKKYFANLLEELEEVPESVIDLLRWSRGALEMFESTQKRLVRELLADSELAQRVERLMTIPAVGEITALTWALEVGDPQRFHSCSDAMSYCGLTAALKSSAGKQQRGPISKQRNRWLPPR

SEQ ID NO: 199815 - protein, 384 aa, unidentified
MAYIAEEHGAEVTSLGTIGTRQCDMDHLIRKRPSKAKHLVLVYEAGPCGSWLYRDLTKTGHVCWVVAPSRMPKNAGDRITTDRRDAVPLARLMRSGDLTPVYVPTVEDEAMRDLPRAREDALRDRTSAKFRLNAVLLRQDIRYTGQATWGPAHRRWLSDVVCATPAQQMVFQAYVRAVHAHTERLQRLEHARHDQVNTWRLPPVVEALQAVRGVQFTVAVTLVAALGDLTRVEHPRQLMTYLGLIPSAYSRGERRRQGSITTAGHTHARRTWVEGAWADRDPAKVSRHVQRRLANQPTIMQDISWKAQVRRCQRDRQLLARGKHATVVTVAMARELAGFLWARAKQVPVTPEGHDRSRLHDELRRVAHVHRMRRSPGVVFPSAA

SEQ ID NO: 199816 - protein, 338 aa, unidentified
MKKVSVLGIDLAKQVFQVHGVDERGHRSVSKRLRRASLPGFIAQLPPCLIGMEACGSAHYWARKFQGYGHEVRLISPQFVKPYVKNQKNDANDAEAICEAVSRPHMRFVPIKTPEQQDMQAEHRARQLLVKQCTALVNQIRGLLGEYGIVIAQGMTAARKRLPEILEDADNGLNPSVRVLFARLHEQVQALDAQIADSDQAIKQAVHSDERCQRLQSMDGIGPLIATALVAAVGDAQTFSNGRQLAAWLGLVPRQHSSGGKPTLLGISKRGDRYLRTLLIHGARAVIYRVKDASSRRALWLKQLIERRGINRATVALANKMARIAWALLARGEVYRAA

SEQ ID NO: 199817 - protein, 309 aa, unidentified
MDAIVVGIDVSKERLDVHVLPAGEAFAVSRDAAGLEILVGRLQSLAPGTVAVEATGGFETVVAASLSAAGLAVVVVNPAQVRAFAQALGKRAKTDPIDAAVIARFVAATNPEVRPLPDKQTRMLADLVIRRRQIIQMIVAERQREKRASAPMKKSIARLLKALQKELTAIDQAIDDAVRGSPIWREKEDLLTSVPGIGSTIARTIIAELPEIGSLDRRQIAALAGLAPWTRQSGKWRGKSFIGGGRTVVRSALFMGALVAARHNPALRAFHQRLIAAGKPKMVAVIAVARKLLTILNAIVRDRRPWQTA

SEQ ID NO: 199818 - protein, 338 aa, unidentified
MFIIGIDPHKGSHTAAVLDRTETVIGELRVSADRRQRDRLLHFAASFTPRRWAIESASGLGALLAQQLVAAGETVFDVPPTLSARVRLLDSGCTDKSDPHDARAAAIVALRHSRLRRVMAVDHTAVLRLLADRHHDLTGLRTQAICRLHALLCGLTPGGAGRLLSAPQAGRILRGVRPAGPVELERKRIALELLGDVCRFDNQLVATNERIVEAVVASGTTLTDIHGIGPLGAAIILGHTGDIDRFPTSGHYARYTGTAPIAASSGPKQRHRLNPRGNRQLNRALHVAAVTQVRNDTPGRAYYQRKLDEGKSRKEALRALKRQIAKTVYRHLVADTHR

SEQ ID NO: 199819 - protein, 422 aa, unidentified
MNEQEVIGYSVYVGIDWADKKHDVCICPRDSDTREFDVIRHCAKAIDAWVKDLHQRYGGRIAIAVELSKGPIVSALQKYDFIDLFPVNPSTLAKYREAFQPSKAKDDPTDAAIAVDMLLRHPEHFKVLKPQSAEMRALATMVEQRRRLVNDQGRITNRLRSALKQYYPQVLEWFEHIDTPLFCAFVKRWPTLTQARRARANTLKQFFHEHHMYRKEVVERRRKAIKAASPLTLDEAVIVPYRMQVLVLVEQLELMFKAIDQFDDAIAKLSSQHCDYDLFQALPGAGPSLTPRLMVAFGEQRERFSSAGDVQKLSGIAPVTDRSGQKHWVHWRLQCPTFMRQTFVEWAAQTINKSYWAGAYYRQQRAKGSTYQAAVRSLAFKWIRILYRCWQSGVAYDESKYLKALERRGSPLVKRQEMLKSA

SEQ ID NO: 199820 - protein, 378 aa, unidentified
MRRGGSQIANDSEGESMKNHTATKQVMSLTDLSACTTVAVDLAKQFFQVAGEDALGQVRYEERIKSREKFYAFLKELPAHVEVLVETGPGAQAWARQLQDQGNQVRILPARLVANHSSGAKNDRNDALAILRAGRDSHIAGVPVKSAAALAMQALHRVRQGCIRRRTAIGNQIRGLLLEHGVALAQGDLAISRTLPRILEDATQPLPDMLRELIDELQAEWQQTGIRIDVLTGRLEVAAQADATAKRLMTVRGVGPITATALLAKHTEPERFANARMFAAYFGLVPDQHSSGAKIRLGKMSKRGDGYLRGLMIQGAHAVLRQIKPDSEQPDDRRLLNWLSRVGRKEAAVRLANRNLRILWKLLQNNDIYSRQPDRQAA

SEQ ID NO: 199821 - protein, 349 aa, unidentified
MAMTIVEAPPGITGGVDTHLDTHVAAALDPLGRLVGTESFNADAAGYKALLAWLEEFGQVSKVGVEGTGSYGVGLSRFLRRKGVEVVEVNRPNRQTRRNQGKSDTLDAVEAARAAISGRASGAGKTKDGSVEAIRVLVVAKRSARQARVKAIVQMRHLGFTAPDQLHSRLKGLTVNALVTESAKLRATKSADPVTAATKASLSSLAHRIQALDRELAELDEKIESLLLAIAPDLMARFGVGPDTAASLVVAAGDNPERLHSEAAWAHLCGVSPVPADSGKNTGHLRRHAGGDRQANSALWRIAMVRIAHDPETREYFERRIKEGRTKRDIIRILQRYIAREVYRYLPRG

SEQ ID NO: 199822 - protein, 390 aa, unidentified
MYIVGIDIGKRNHEASIMNAAGKQYGKPIRFANSHTGFNKLMDWVKNISGADDVVFGMEATGHYWLALYTHLCHEGYAEHVINAVQSDALRGMYIRQAKNDSRDSFIIAEVIRFGRFCETAVSAPELHALRELCRHRFWIVDSVSDLKRKVIALLDQVFPEYENLFTNTFGKTSLQLLSEYTTPEELLAVDTDKLAETIYTASRGHHGIEKAQEIQNTARNSFGILLASDSIALLIRQYIEQIRFVEKQVDRIDTEIARLLSAFDNQLTTITGIGPTLAATILSEIGDIRKFASPGKLAAFAGIDPTMKQSGNFVGSHVHMSKRGSPYLRRAIWLAATIAAFKDPSISVYYQRKRSEGKSHLTALGHVSRKMVNIIFAVLRDNTPYSPAI

SEQ ID NO: 199823 - protein, 378 aa, unidentified
MLRTALEQDTTTTKRTLYLALDLSRKTWKLGFSGGGPKVRTVSVDGGSVPMVLEAAKVAKAKLGLPDDARVLSCYEAGRDGFWIHRALTAAGVENLVVDPSCIEVDRRARRAKTDRLDATKLVQQLIRHDERGDRLRAVRVPTREEEDARRPNRELERLKKERTGHTCRLRALLALHGLVAMKVGVGFAQRVDALCGADGATLPDELRAELKREAVRLDLVRAQVREMERSRAAALKAKPSRAMEMASSLMQLLGVGPNAAAILACEFFAWRDFKNGKQVGSCAGMTGTPYDSGSVTREQGISKAGNRRIRTLMVEVAWFWLRYQPGSKLSRWWWERFGVGGGRMKRVGIVALARKLLVALWRYATLGIVPDGALTRA

SEQ ID NO: 199824 - protein, 304 aa, unidentified
MSHSTIAVDLAKSVFEIAVSNHPGHVSEHHRLSRPRFELFFAEHQPATVLFEACGSAHHWARELQCLGHTVILLPPHTVRPYAVGNKTDRADAKALLDAFRNKDIHAVPIKSIDQQVMASLHRYRSAYIANRTARINTTRGVLREIGIFIPQGSSRVIPAVRALIEDPDSSIPPALRPTLHEASAEILHFDTRIRDIVHEIEALAAEDPIIRRLRTIPGIGLLTATALVAFIGDIHRFPSGRHFASYLGLTPREHFSPTTSPASPGPSGAKIKTSRLSRRIPNDGLLISHLGLHRESERMAHRF

SEQ ID NO: 199825 - protein, 408 aa, unidentified
MEVLYPRCAGLDVHQQTVVACARVASGSTVQQEVRTFGTATTELLALADWLAAHGCTHVAMESTGVYWKPIWHVLDGQFQLVLANALQIRSVPGRKTDVNDAMWIADLLAHGLIRGSFVPPAAIHELRDLTRTRKQLVREVSQHTLRIQKVLEDANLKLTSVISDVMGMSGRAMIEAIIRGEDDPERLADLSQGRLKASRPAVLAAVQGRVTPHHRFLLRLHLTQIDALEGAVRDVEARLGEALAPFQAAVDRLMTIPAVGRTVARVIVAEIGIDMSRFPTAGHLVSWAGLCPRQAESAGKRLSTRTRPGNPWLKTTLVQVAWVAARTRNTYLRTQFLRLKSRRGPKKAVLAVAASMLTAAYHILHDETTYQELGSDYFERRDKGQITRRLIRRLEQLGLSVEVRPAA

SEQ ID NO: 199826 - protein, 442 aa, unidentified
MPLLNPDAAGIDIGHREHWCAVPADRCAQPVRAFGTFTQDLEEMARWLKECGIKTVAMESTGVYWIAAFQILERHGFEVLLVNARHVKNVSGRKTDIQDCQWLQRLHSFGLLNASFRPPDHICVLRAYLRYRDDLVGLRSMQSQHMQKALQQMNVQLHQVLSDVTGLSGTRIIEALLQGERDPVKLAGLADKRVRANKATIQKALQGDYRPEHLFMLQTAFDLYQIYDQKIHLCDEQALAQMAQLPTQESKPLPERKACRKPIHDMVAGTDLRAELHRWAGVDLTAIEGFGVLTAQVILGEIGPDVSRWPSEKHFASWLGLCPDHRISGGQVLSRHTRRVVNKVSNALRQAAVTLQKSQTALGAFYRRMRGKLGAAAGVTATAHKLARLVYRLLKHGELYVQQGLAEYERKYRERVLRNLKKTAASMGLEVIEKQPLVSGVS

SEQ ID NO: 199827 - protein, 475 aa, unidentified
MKIPTDIMAVGIDPAKEVHQGVALAYPEVELLNSQFENSYETISSFDEKIMKLAHKNNLKVIYGLEDSGAYGKTIKEVLTSRFRETREVNPLKTNRQKDFYGGDKSDEIDARCIAQILLRSYESLPKIEEDNDIYASIREAERFREILVKMKTQNVNRLHFYLTKTWGGAYKNFFSSLQNKIALEFFRTYPVPQVLKETKAKELARFMYEASSHRLGRGNPRKVSIEKAKLILSSIKGIKDLPLTLEREMKKEIIKELVANISQVKASIKAIGRKLNKDLLPETHQSLTSLKSTDTVTASVLLGETLNPDRFSTRDKFARYNGSAPQERSSGGRAKHRARKGCNRRLKRTLRQISVTAIVREPLSRAYYQRCLSRGLSKSQALKRVDRKISDIVWKMMKTKEPYDRELAIKNIIKRSQRTKNLGRARWQSRNLRIRKPSDEIESLVLPPLNILAELEEIEKKYQSIMSVSERVLT

SEQ ID NO: 199828 - protein, 345 aa, unidentified
MARIAILGVDLGKNVCSLVGLDEAGTVVLRRRMRREGLPAFVERLSLCVVAMEACCGAHWLGRIFAAKGHTVRLMSPEYVRPYVKAHKNDDRDAEAIAEAATRPTMRFVELKSQEQLDLQTLHRSRDRLVSERTALINQLRAILLERGVIVAQGRRKLDQELAALIDEKQGVGLGQRVLLLIEDMRAQWKELDRRIGVFDAEFAAFAKANEDASLLLSIPGVGTMIASALIAAVGKAETFEHGRDLAAWLGLVPRQSTTGGKPKLLGISKRGNKYLRRILIHGARAVLPHLARKETSLGHWVRSLLARAHKNVAVVALANKLARIAWAVLRRREKFVATVLAAVA

SEQ ID NO: 199829 - protein, 440 aa, unidentified
MGGARPPKLDEVATKTATPRRKTVAACPPAADAARTPARSETQLEWAPKEQTAMRSVGLDLGSRKIAYCIVDKGRITARGVVGGLDELASVLGPGTPPAQVAFEACREAWHVHATVSDWGKTALLIDTTRVRRIGVGQHGRKTDRLDAEAIAWAVERDQIPLAHLLSPERQQLRVEILTRRGLMETRSQMITTVRGIVRGQGLRIAPCDAERFLDKVQATKLPQTVQALIDPLLAVVLVAHRQLCTLDERIEALCASEPAIQKLATVPGVGLLIAAMFVSVIDEAQRFRSARHVASYLGLVPLEKSSGLPGQRLGAITKHGNGYMRALLVQAAWVLLRTAPASDPLACWGRHLVKRRGKRVAAVAVARRIACVMWALWKRDVAYDPEHVAELSARGLERSAEVIASQALALQRQATRATERSSFLKRRRTAALRWEATMP

SEQ ID NO: 199830 - protein, 401 aa, unidentified
MQENQQHSSVDVFVGVDVGKGHHHAVALDRTGKRLYNKALPNDEAKLRALITELKTHGQLLFVVDQPATIGALPVAVARDEGVLVAYLPGLAMRRIADLHAGEAKTDARDAAIIAEAARSMPHTLRSLRLADEPLAELTMLCGFDDDLAAQITQTSNRIRGLLTQIHPALERVLGPRLDHPAVLDLLERYPSPAELAATSEKTLANRLTKLAPRMGKSLATEIVQALSEQAVIVPGTQAATIVMPRLAQQLASLRKQRDEVASEVERLVHAHPLWPVLTSMPGVGVRTAARLLTEVAHKAFASAAHLAAYAGLAPVTRRSGSSIRGEHPSRRGNKVLKRALFLSAFAALRDPVSRDYYARKVQQGKRHNQALIALARRRCDVLFAMLRDGAFYQPKSAPNA

SEQ ID NO: 199831 - protein, 344 aa, unidentified
MGEISTIGLDIAKAVFQVHGVDGEGAVVIRKRISRSKLLEFFAALVPCLVGIEACPSAHHWGRELAGLGHTVKLMPPSYVKAYLKRSKNDANDAAAICEAVTRPSMRFVPIKTKEQQTALMLHRTRQLLVRQRTMLSNALRGHLAELGIVSAKGRNGTAELLRIIADGADNRLPAAVRGILDVLARQHGAIGAEIRSIDKSILALHRSCEVSRRLAEIPGIGPLVATALVAEIGDWKAFSSGRNLAAWIGLVPKQHTTGGKDRLGSITKQGNRYLRWLLVVGAMAIIRYAKMHGTKNRPWLARLIERRPTKVVAVALANKIARMAWAIMVRGERYKEPKLLLAA

SEQ ID NO: 199832 - protein, 343 aa, unidentified
MQIRSVGIDLGKTTFHLVALGDNGKVLLKKKFTQKQLIAFTANMQTCLIGMEACSGSHFLGRALRAQGHDVKLIPAQFVKPFVKSNKNDFIDAEAIAEAVDRENMRFVPIKTDDQLDLQALHRVRDRLMARRTSLINQIRAFLLERGIVFAKSPIRLREALPEVLENVNENLTPRMRNLVAMLWSEWKDLELQIVQMNDEVERIASSDAACRRLRQIPGIGPLVATAIVASIGNGAAFRKGREFAAWMGLLPKQHSTGGKARLYGISKRGNCYLRKILIHGARAVVLRSKRDRIAMGPWMTSLETRAPRNVLIVATAHKLARIAWAVLSTGQDYRAVPEALTV

SEQ ID NO: 199833 - protein, 352 aa, unidentified
MSSSVGIDVSSATLAVHIRPEGVNFSVSNDLKGFQLLVEKLGGYAVSMVLLEATGGYECNVLKALQDADFPVCRINPSRARDFAKSMGKRAKTDPIDAAVLAHLAEVMPPRPCQVMTPERALLRELLMQRDRFVQQRDDDKRRLKQAQAPSVCLRLEQHIAYLKGEIRALEQEIAQQAAALPDDRVKQLTQVKGIGLITAGKLMALLPELGQVDKKEIAALVGVAPFNRDSGKQSGKRSIWGGARTSQAGALYGLLGGDTAQQGLLRALQSTASPGEMREGSGGGVYASIDSTVECDAQDRNALEGANSSFVGASLAGDARQSRAWGATRPIAGKASFHKKTVAPTGIQAAR

SEQ ID NO: 199834 - protein, 401 aa, unidentified
MQDTQQRDAVDVFVGVDVGKGHHHAVALDRNGKRLYNKALPNDEAKLRALIAELKTHGRLLFVVDQPSTIGALPVAVARAEGVLVAYLPGLAMRRIADLHAGEAKTDARDAAIIAAAARSMPHTLRSLRLADEQLAELTMLCGFDDDLAAQVTQTSNRIRGLLTQIHPALERVLGPRLDHPAVLDLLERYPSPAALAGTSEKTLANRLTKLAPRMGKGLAAEIVQALSEQAVTVPGTQAATIVMPRLAQQLAALRKQRDEIAAEVERLVLAHPLWPVLTSMPGVGVRTAARLLTEVAHKAFASAAHLAAYAGLAPVTRRSGSSIRGEHPSRRGNKVLKRALFLSAFAALRDPVSRAYYSRKIQQGKRHNQALIALARRRCDVLFAMLRDGTIYQPKSAPNA

SEQ ID NO: 199835 - protein, 407 aa, unidentified
MEILYPHCAGLDVHKDSVVACVRHVRDGKVATAVKTFKTTTQELILLSDWLAAEGATHIAMEATGVYWKPVWNILSDSDFHLVLANAAHVKNVPGRKTDVNDACWLADLMAHGLIKASFVPGQPTQQMRDLLRTRKQFVRERSSHQQRIQKTLEEANIKLDSVISDVLGLSGRRALIAGQTDPQALASLAHVRIRATAAELEAALRGRVTAHHRFMLQLHLDHLDAVDAAIARIDKEVDGNVEPFRTAVQMLSDIPGVSNLSAQMILSEIGTDMSRFQTEGNLISWAGLCPSNDQSAGKRRSTRMRKGAPWLKTTLIQCAWAATRKKDSYLQAQFLRLRSRRGAKKAIGAVAASMLTAAYHMLKHGTLYQDLGTKHFDQRTNAKQILTLVNRLKNLGFDVAITPQAA

SEQ ID NO: 199836 - protein, 416 aa, unidentified
MNNDIIRRTVIRRCIGLDIHEKVIFVTVLSPLEGTARQWEISTDRKAFRGFLETLQPGDEVALEATRGSRYYVDLLLTRVHSVLLANPQKLRTLSGKQAKNDRNDSLNLALLLAVGTLPTVWIPSEETRQDREILRHRANLVKERTRIKNRVRALLAENGLRWEGSDVQSTGARRFLSQLLTQLPWATREVLTSMLEQFDQLEVHLGRIEAVALDRAARRPEVAVLMTIRGIDVLNAFTIVSEIDAIERFASPDSLANYAGLVPSQRSSAGKDRFGRVIKGGAKMLRWALTEAVQQLAKQDGPYRNMARRIQNRKKNKGVAMAAVARKLLVAIWHMLTKKEAFRYAEPDLVERKAQRREQRLVVARARLEAEKDRHQQIITGRLALVQELAEHRVHIPVPEPLLTTFGRRPKRVAS

SEQ ID NO: 199837 - protein, 362 aa, unidentified
MRIIGCDLHARQQVVATLDTETGEIVKMTLTHEGNNVREFYSSLPRPVRVGIEATGSMPWFVNLMEELGIECLVGHPAQIRAAEPRKQKHDRRDADLILKLLVENRFPTIWLPSKELQDLRSLLRHRHQWVRMRTRIQNALQSIALANGLRRGTALWSQAGQHTIASLPLAPHSAYRRSELQAMYAKFEAEIEKLNQRVEEQACKRPGARLLMTHPGVGPITALATEVFLGDPARFADSKALASYVGMIPREYSSGGRQRLGGLSKQGNPLLRFLWGEAGAHAARKDPELQRFYRRKLVQKGLGKASVAVARKLGIRLWIMLRDQLEYNEFCRRGQKQQKSSDACVGMPETRYGAKSHRPID

SEQ ID NO: 199838 - protein, 357 aa, unidentified
MSSNVKRYIGLDVHKEAIAIAVLNGAGKLVMESIVETKASTLLDFLHGLRGELHVTLEEGTWAAWLYDVLKPHVHEIVVCNPRRNALLKEGSKSDKVDARKLAELLRAGLLRVVYHGENGLRTLRELARSYLTISKDQRRVMSRLKALDRSWGIPCSGKQVYTPRHRDQWLSRIAQPGVRRRAELFYQQLDGLLVVRHTVRGELLAESRKHQAVKILRQIPLIGPLRAALLLALMQTPHRFRSKRQLWTYSGLGVETHDSAQHRYVDGQLQRSKKPQQIRGLNQNHNHEMKRIFKSTAMSASRCAGPLQDFYGGLLAKGMKPEMARITLARKIAAITLTLWKKGERFDAQHLKSQAA

SEQ ID NO: 199839 - protein, 448 aa, unidentified
MRARKEPSARKLKLPKHLQHINAQAAGIDVGCRSHFVAVPEGSCEQPVREFSSFTDDLHRMADWLLECGVTTVAMESTGIYWIPVFEILESRGLEVRLVNARHVKNVPGRKSDVLDCQWLQQLHSYGLLAGAFRPEEQVCALRAYVRQRMTLVRYASSHIQHMQKALLQMNLQLSNVVSDISGVTGMRIIRAIVDGERDPKALARLRDPRCRSSESTIARSLHGHFRAEHLFSLKQAVELYEFYQAQIAECDREILAQLGGFDAADASGNGPPTSVDEALQRISGVDLTDIDGIDTTSALKIIAEVGTDMSRWSSAKHFASWLGLCPGTKISGGKRLSAKSKPVANRAAATLRMAAFTLLKSKSALGAYFRRQRARLGAPKAITATAHKMARLVYSMLKHGSAYVDVGQDHYEQRYRDRVVKNLKRKAQSFGYLLVKEAETLPQPLVP

SEQ ID NO: 199840 - protein, 331 aa, unidentified
MSHIIGIDVSKATLDCAYLRDPDQVKAKRKSCQNEMDRFESLITWAQALTGLPCQSLGFVIEPTHVYHEQLVQFLHSKGTTVYLVNPGRVRKFAEGIGILSKNDVIDADLLARYGLMAKKLIVFEPAPQEISDLRSLLNRLDVLERNLRRELNRLEKAGKSLTFHRLEQQSITRSIKRHEAEIVCFKNAARDCVNASPWLQRDVELLGTVPGIGERTAWLMTVILSSRQFLSAAEVASFLGLNPIEKRSGKSEYRKPRLSKSGSSHYRQALYFPAMVASRKNPDVRALYERLVDDGKPKMCALGAAMRKLVHICYGVYKNQQPYQPQASLS

SEQ ID NO: 199841 - protein, 377 aa, unidentified
MGDYSEAFVGLDTSKLRNAVAIADAGRGGEVRFFGEIENTPAATAKLVRKLSAKYKRLTFCYEAGPTGYGVHRQIKDLGFECVVVAPSLIPKRPGDKVKTNRRDALSLAKLLRADELTAVWVPDGGHEAMRDLTRARETAMLDLRTKRQHVSAFLLRMGRPYPESRKTWTKAHASWIASQKLEHPQQRLVLEEMMLAIRQAQERLARLEQAVAAAVPEWSLAPVVTALMAMRGIDLISATTLLAEIGDLSRFQTPTELMAYLGLVPSENSTGDTVKRGPITKAGNRRARRMLVECSWSYQHPPRVGQAKQPKVDAAPPAVREIAWKAQCRLYRRYRALIRKGKLKTVAIVAIARELAGFIWAVARAVSTTRIAAATV

SEQ ID NO: 199842 - protein, 384 aa, unidentified
MGGIILDVLMTRCAGLDVHAETIVACVMIGEQDDELFIETETFPTLTKDLFRLLKWLENHGITHIAMESTGIYWKPVYNILEDYFDITLANAQRIKNVPGRKTDVSDAEWIAKLLRYGLIEKSFVPPEDIRNLRDLTRLRKKWIGHLTSEKNRILKVLECSNVKLNSVISDVFGVSGRKLLSKLIQNGYVDSIDVENSIHGRMKHKKQMITDSLFGTLNDHQVFLIKQSWQHIVYLESLISQIEERIDEILKNYKEEVELLLTIPGIKKDSAAIIIAEIGVNMEQFPTSQHLASWAGVAPGNHESAGKRKSTKTTKGNPHIKTVLCEVAWAISKSRNRWLAAKYWSIAARRGKKKALVAISHRMLRIIYSMLINKEPYKEPLIN

SEQ ID NO: 199843 - protein, 452 aa, unidentified
MTKKSKKAIKIRYHEGLPQIRSNAGGIDVGASEVWVDVGSKDAEPVRAFETFTGELNRMGDWLKSCGIETVAMESTGVYWIAVCQILESKGIEVYLVNARHAKNVSGRKSDMIDCQWLRILHSYGLLSASFRPANDIGVLRTYMRHRQMLIEYAAAHVQHMQKALTQMNLQLQHVISDITGLTGMKIIRAIVAGERDRKRLAAMRDVRTKANEETIAKALEGDYRAEHLFALKQSLELFDSYQKQIQACHDEIENHLKSLESKADPAELKPARREKKKRRNQPEFPIREQAFRISGVDLTQIDGIHESAALALIAEFGVDMSPWKTEKHFASWLTLCPNNKVSGGKVLRRATRKSANRARDIFRLCAQSLLGSRSALGAFCRRMCGRLGTPKGIVAAAHKLAVLVYRMLKFGHQYTDIGQERYEEKYKERALKQLARKAHDFGFQLVPSLQN

SEQ ID NO: 199844 - protein, 355 aa, unidentified
MSQTPNTAIAVIGIDIGKNSFHVVGHDARCAIVLRQKWSRGQVEARLANIPPCLIGMEACVGAHHLSRKLASLGHDARLMPAKYVRPYSKGQKNDFNDAEAIAEAVQRPTMKFVATKTAEQLDLQALHRVRERLVSQRTGIINQIRAFMLERGIAVRQGIGFLRTELPTILATRTDALSPRMLRVIEELAGDWRRLDQRIDGLSGEIEALARQDQACSRLMTVPGIGPIISSAMVAAIGTGDVFSKGRDFGAWLGLVPKQISTGDRTILGKISRRGNRYLRVLFVQAAWVVLVRIKNWERYGLKSWIEAARRRLHHNVLAIALANKLARIAWAVLAKGRAFELTRTDDAGVVQPA

SEQ ID NO: 199845 - protein, 353 aa, unidentified
MQYVGIDWAYREAQWCALAPGGGIAGEGRIPADRDGLAQLVLRFGAEVKACVEMMSGAAWVREELCACGWQVEVADARKVKAIAPLAAKTDKVDARLLAELSRRELVPALWLPSLDERALRERLRRRMHLVRLRTSAKSRIFGLQTQWGVRVSLERLRRADGLALLEQAGLPAVWRRSISECLSVVDFHDERLEPLDAELKPFAGADPRAVLLDTIPGVAELLALTIAVEIGEVSRFASPQQLVSYARLAPRVRQSGEGRPRSGPLSKSGSRLLGWAAVEAAQQAWREANPWHELYLDVGRRAGNPKSAKAAVARKILSAAWHMLSRNEPFKPAPRRSGGTSVPATSPPPVAA

SEQ ID NO: 199846 - protein, 381 aa, unidentified
MRRVDVGKDVIAVAVRLPGDGPDGRQTVKRMFKTFYGVLREAAGWLSSLGVTHVAMEATGICSMPVCHALLEHGNFGQVLVCNAGHVKNVPGRKSDLADAEWLAHLLECGLLRGSFIPPTAIKAARDVLRYRTKVVQSRTSEVQRLGSVLQDAGIKIDSVASSIAARSGLAMIEALIDGERRPQVLADLAKGKMRVKIPDLELALEGRFGGHHALMCRLHLDHIGLLDEMIARLDAQVEAMMAPFRAERDLLITIPGTGALAAAAIISEIGTNMPGFFPGAAHLASRAGICPGTHEPAGKRRSGKRRHGKRAPAAGPGGKRPGGGPPPGLPQVPLPPARHEMGRLPQPHRQEESDHRRRPRDASHHLARPGRRRPLRRAGC

SEQ ID NO: 199847 - protein, 424 aa, unidentified
MKVTYQTCCGVDVHKSFLVATIVKTTGGIEPSYQKKRFSTFNNSILEFKQWLLDNDCHDVCMESTGKYWVPVFNLLEDEINVVIANPKWVKAVKGNKDDTKDSKWIGDLFRLGLVKGSYIPCKKVRILREYTRYRYKLVSCRSSEKNRYQNALTVCNVALDSVVSDIFGKSSTSIIDYLLKQSGTSVNHEEIASKLLRSLKSKEDAVIESIEGYQMTDAQKYRMRLVRAHMDYITAEINDVDKMIENMISSNPDFENAIQFLCTIPGVKRDSAITIISEIGTDMTQFSSSKRLCCWAGLTPGSNESAGKKKSVRITRAGVYLKPALVQCAHAAVKSDKSPYYKKKYDSLVKRRGKKRAIIAIARMILTAIYQMLSTGELWNPSDLYKIDMPVALVEKQKAKAIKQAKKLLQREGLLPPDEPLAS

SEQ ID NO: 199848 - protein, 415 aa, unidentified
MKVVFPTCCGVDVHKTFLVATIITTPADSLQPNYQKKRFSTFNSDLNRFADWLLEHNCLDVCMESTGKYWVPAFNILEKRSIRVVIANPKWVKAVKENKDDTKDSKWIGDLFRIGLVKSSFIPELNIRILREFLRYRYKLVSMKSSEKNRFQNAFTVCNVALDSVVSDMFGKSATAITDYLTSDESFDPDHCVSLLQRSLKKKAEKVLESIEGYSISDEQKARIKIIREHYDFVEKLIAKVDTCVNEMVEKYEGEINLLCTIPGIDRNSAITIISEIGADMSQFGSSKRLCCWAGLTPGNNESAGKKKSVRISRAGVYLKPALVQVAHAAVKDKANPYYALKYERIAKRRGKKRAIIAIARMILTAIYTMLCTGEVWNPVDLFKIDMPEHLKEQQLAKAIKQATRFLEKQGLTVA

SEQ ID NO: 199849 - protein, 272 aa, unidentified
MYELTTVGIDLAKDVIAVCVLDIHGAIVERRVLRREAFERWAAQLAPSNVAMEACGSAHHWGRWFAARGHTARLIAAEFVVPFRKGGKNDGADAEAIAIAARQPTMRFVPIKTVDQQAILAWHAVREGWKKERTALLNRVRGLVAEFGIVIGRSSDKFLNALPTLVEDPRLPDPIHALLLEVREEFTSLHARLARCDAQIAAHARNTSVAKRASELLGVGPVTSSALAATVPDAKVFRNGRQFGAWLGLTPRQHSSGGRTRLGRITENSVNK

SEQ ID NO: 199850 - protein, 341 aa, unidentified
MKKFIRIGIDLGKRYFQVHCLETEGGRSISRKLTRSKMLEFFSQIERCRVGMEACGSAHYWARELVAMGFEVVLIPPTYIKPYVKRGKNDAVDAAAICEAMSRPGMRFVPIKSADQQAVLMLHKTREMLVKQRTMSVNALRGHLAEFGIVVAKGIGRVDELLALAQSDAALPQVAKSAVADQAQHLEGLDQSIEAVEDEIARAHGQNPTSRLLDEVPGIGTLIASVIAASVPDPGVFKSGRDFAAWLGLTPRQNSSGGTEKLGAITKQGNRYIRKMLVTGSTSVLRVAGRRKGALADWINALRARKPERVVAVALANKLARICWAIMTTGESFRVDTYVKA

SEQ ID NO: 199851 - protein, 324 aa, unidentified
MWHIGIDLHRRTVVMSAVNDSGEVVSPVTIECLNTNAILEFLQPLKPFRAVVESTATYRWLYKLLSEEGTILLAHPAKLRLMIQRRAKTDRLDCQLLANLLRINQIPLSYIPPDDYQQLRKITRHRARLARDRAQIKIGLRALLARNNRDAPYRIPFGPRGIKWFRGQSFSPIDNLIRDELITRLDHFTEQIKVIDQELEELRVSFPQVEALLNIHGIGLYTALVIVAELGEVERFRSAKQVGAYAGLTSKVNQSGGHCYYGSITRQGPPWLRWVLTEVAIHVIRRDVPLKNFYTRIRKRSGAKKARVAVARKIAEISWKRLLR

SEQ ID NO: 199852 - protein, 380 aa, unidentified
MVFLPSTIPSRMARTNLASSLQPGGDPGPVSVFIGVDTHRDFHVAVALSLQGSLLGEMHLPACMAGYEALLDWALELAEGRATSLLFGIEGTGCYGAGLSRHLQAAQCSVREVNRPNRQTRRQRGKDDAIDAEAAARSLLAGTATAVAKAGNADAEILRVLKSTRDSAVRCRTRAITQLKALLIVVPAELREALQHLDTAELVNRCLDRNEEVATSPLTAARLAMRTLAERIRHLEQELMVLGRQLDRITQAVAPALRAAQGIGPDNAAALLIAAGDNPQRLRSEAAFAALCGASPIPASSGTRQRHRLNRGGNRQANCALFRIALNRLRWDPATKAYAERRTAEGKSKREILRCLKRFIAREVYRLLQAGSLRPAAMSA

SEQ ID NO: 199853 - protein, 418 aa, unidentified
MNAEISKVERVIGFDSHPDTFTAAVLQGSTPAAAVVQKIFNKVPLSQLQTWAQKQTNPQDLFVLEASGNSFHVVRVLAKVNRKALVLESGHLGKLKEAHANNDKISAVRIGKAYLAGTARTVWVPDLKTQERRDLFHMHRKAVKRTTQLRNRLQSYLSDNGVRLSKGTRLTQAATSEKIRKAHEWLPGQWQLIEGLLMELRHAEEQRQHWRSLVAQEVLSDPLLLSIVRLCGVREMVAFALGALVGDIKRFADPKKLVKYIGLNPAFDDSGEGQWTGGIRGHGRKDLRCLLIEAAQAILRCSKTPLACWGKKLLGRKGAINLTVAAIARKLAVAVWYLMMGRWTTLEEIDKRLSQKVGKIISQVGAAGLKNLGKTRKEFRDQICQSLKSGRQYILDPDKKFTPKIQRPLTVAEEYGLR

SEQ ID NO: 199854 - protein, 319 aa, unidentified
MSKTVLGIDVAKSKLDVALMLNGKALMKKFDNNIKGFKLLQGWLTSMKVEQVHACLEATGSYGNAVAEFLHERGHRVSVVNPFRIKSFAKSDLQRNKTDQADARTIAAFCLAKDPDDWHPLPPEIKQLQALTRRIEALERMLLVETNRLEVASETTRLSIDRMIENLKKEIEIVQRLIKDHIDKHPDLKQQSDLLQTIPGIGEKTARLLLGEIEFRSFASARALAAHAGVTPRQFQSGTSLNWTRLSKLGSGRIRKALYFPAVSAIRYNAVIKKFARRLSENGKAPMQIVCAAMRKLLHIAFGVIKNNRPFDPTPAFNV

SEQ ID NO: 199855 - protein, 366 aa, unidentified
MRVYVGLDVHSKWSVFVIEQEDGKVIGRGQIPTTPAGLERLKKEHRLGPGTAVALETGTVAFYVARELTRLGLKAVVIDAHEVRVKAQRPGQKSDRRDAFEICEGLRRGIYRTIVHVPSEEISRLRETLSRRRHFVWVRTGEINAAKRLLRAGGLGHLSKSLGTEAAWKKLLVALPVDGELRSYVAQHGAVWRCVQEQIAVLDEALATQQAPVASAVERLQSVPGVGPIVALTAVAVFSDVSRFGSCKEAASYGGLVPSSNQSGDRDTHGHITKRGSAALRSMLCEAAHHAARPTHPLNPYFAKLCAKGGYKLAVVAVAHRLCRIVFAMLRDGAVFDIGKLGVEEGSFRRTRIRHYRLKAVPAVRG

SEQ ID NO: 199856 - protein, 343 aa, unidentified
MAEVTTIGLDIAKHVFHAHGADATGRAMFSRRITRGKLLDFFAAHPRCLVALEACGGAHHWARELQAMGHEVRLIPPAYVKPFVKRHKNDAVDAEAICEAAQRPSMRFVVVKSEEQQAAALVFRTRDLAVKQRTQLANAIRGHLTEYGWVAPKGAAHLAMLADLLEDGEIGESLPEAARPMFTMMIDMLAELDKRIAALDKEIARRAREDVVARRMTIPGIGPITATAIAAIAPPAETFAKGRDFAAWLGLVPKQASTGGKQKLGAISRMGERTLRRLLIIGASAVVLQVSKRGAPAGSWLEGMLARKPRMLVTVALANKMARTVWALLVKQEDYRAPVAVAA

SEQ ID NO: 199857 - protein, 346 aa, unidentified
MKIVAGLDLGSESISLWTMDQAGHRLGGGKTDWDEKVWKQWVKKYGAENLEVAFETGPEGYRADWMLKELGVKTYPFHAGHFGEISRSRKKTDKIDAEKICRALRGGALPRRVELPGPGQARLRNLVSEWEQLLKMLRQCEGRVKGLARQWGVKLPGYRSGDRESWWKAAVEAFPERMRGDIRRQERVALGLLQNQLELGEAIGQETKASGQSEQAEQLESIPGIGPTVSKATVAFLGDGARFGSGRKFAAYVGLAPSVEQTGKSEARLGSITRQGPACLRRLLVQAAHAAVQSHLFQASRWYQWFLKLKQRRGYRKAIVALARKLAEFCYAVVRDGRRWDPWPTT

SEQ ID NO: 199858 - protein, 356 aa, unidentified
MNRFYVIALDVGCAESAVAVLSPSGRVVRRERCATRIPALVDVIERVATPRHLVMEEGSMADWLWRHLRPHVQEAVVSDPRRNHLVARDGDKDDPIDAGKLGLLYQGGFVRRVHHPETLARQEFKQTVLLYHDRVRQRVRQANQVMAMFRECGERISERRFARPEEREALLRSTSLSLLYRAQLRMLWDGYDGMCDQVRTMRRMVIRLAKRESAIRAFVTVPGYKWIRAATFFVCVDTPWRFRNKSALWKYLGIGLERRHSSEGPTYLRVPIEVNRPLKNVVHGAARSAIASGDNPFADQHRRWRDAGLTPRNARRNVARSQATMLWSLWKTGGVYRPEWVGADWMGRAGMSLQTG

SEQ ID NO: 199859 - protein, 377 aa, unidentified
MKRIIRIGMDVHSTNYTLCAMEPIIGEDDRIFATIDVAPNYKNILMFIENLKMKLGIDNQYDIQCGYEAGCLGYSLYNQLMAANVKCVILAPTTMLTPQGTRVKTDARDAKMIAQCLSYGGYHAVYVPTEEDDSVKEYIRMRDDHKTALKKIKQQISALCLRHGHHYAQSKWTIAHWKWLKQLELSALYREVLDEYITSYEEQCAKIERFDQRIEELASQEKYAEKVKKLGCFLGIQTHTALSLIVETGDFARFAKGNIYAAYLGLAPGEDSSGPKTNRTSLSKAGNSHLRQLLVEAAGGICKGTIGHKSKALKARQNGNTAEIIAYADKANTRLRSRYYKLIRHGKARNVAVAAIARELACFVWGMMTDNISVKTV

SEQ ID NO: 199860 - protein, 370 aa, unidentified
MKKDTLFVGLDTDKKHVDVAVAEPLPRGEVRYWGRTANTPASVDRLVKKLGHGGRELVVCYEAGPCGYGLYRQLTDKRGVRCLVVAPSMTPQRPGDRVKTNRRDALKLARLLRAEELTEVWVPDAAHEAMRDLVRARSSVVSALTRCRQHISSFLLRQGIAYAGKPWTNKHRAWLGTLRFEHAAHRLLLAELLLALDQAQAGRDRLTDHIRELVPNWSLAWLVEALQALRGYELINAAVMVAELGDPRRFAKPRQLMGFVGLNVSEASSGETVRRGRLTKTGNKRARKALIEAAWTYSRPAATTSKPAAARLPAAVQQIADKARHRLSRRYRHLVRRGKLKQVAIAAVARESLGFIWAIAHAAAPLPAQS

SEQ ID NO: 199861 - protein, 364 aa, unidentified
MNCVIRNTELSSLEETRSEFNRSKAIIKLGIDVHQDFYTVVMQVSGSNPKPSQRFEKEAFLHWAARLKSQGAEVHAVYEACGFGFGLQRQLSALGIDSYVVCPQKLDEHNKRVKTDGLDAKALCLKLDRFVQGNREALALVRVPSEKEEQLRAIHRQREQLVKARKQLEAQGRSLMVNHGIEPIQYWWKRRTFAALPVPEWMKELLGNSQPILVALQEKISALTVQLQTAAAPEQPRGLGAMTSVIIDREIGDWIRFSNRRQIASYTGLCPGEYSSGNTRLQSCVTKHGNPRLRAALVELAWRLVRFQPNYQPVIKWKEVLRHGAPATGAARKKAIVAVARQLAVDLWRIRTGRLSAESLGLIN

SEQ ID NO: 199862 - protein, 349 aa, unidentified
MTIVEDARVITGGVDTHAGLHVAAALDPLGGLLGVQEFPATAAGYARLLDWLGGFGTVALVGVEGTGSYGAGLARHLAAAGVPVVEVDRADRQDRHRQGKSDPLDAVSAARAAQSGRASGAPKGRDGAVEAIRALMVAKRSARHERTQAINQARALIVTGPDELRARFAGHTPAALVEAIAALRPRPGDVPGHATRVALRELGRRAQFLDAQLDRLDELIGPLVAARAPGLLSLHGVGPDTAALLLIAAGDHPERLRSESSWAHLCGVAPIPASSGKVSRHRLNRGGDRQANHALWRIVITRLSSRPGHPATRAYVTRRTKEGLSKKEIIRCLKRYVAREVYHQLRAGA

SEQ ID NO: 199863 - protein, 409 aa, unidentified
MLALNARVPSVYEIRWDEKSRSPERDAISSQVIHALEAQENKETGMKKISTTTAKAFRKMEKLTIGLDLGDRSSCYCVLDERGELVLEQKVSTTPKAMEEVFGGMPRSRIALETGTHSPWVSRLLSELGHEVIVAHARNVRLIGESRRKDDRLDAKTLARLARIDPQLLCPVKHRSAKAQAHLTVIRARAGLVRARTALINVARGLTKSYGERLRGCSPRNLNKRAEGLSVELRTALGPLLEEIESLSERIREYNQRIEGIAQEHYPETALLKQVKGVGTLVALTYMLTLEDPHRFSKSRDAGCYAGLQPGRRNSGQSQPQMRISKEGDAYLRGLLVQSAHHILGPFGADSDLRRWGLKLAERGGKNGKKRAIVATARKLAVLLHRLWVNGEVYEPFYSSSRRVLVAAA

SEQ ID NO: 199864 - protein, 412 aa, unidentified
MRRVIGLDIHRTFAEAVAWDDGRLIRLGRLDMTRTALEGFGKSLRPSDEVVVEATGNAMAVVRVLSPFVARVIVANPLQVKAIAHAHVKTDKIDAGVLASLHAAGFLPEVWTPDPETERLRRLVARRNQVVRHRTRIKNEVHSILHAHLIPRCPHADLFNRRGRDWLSRQPLPVDEKATIDRHVRELDRLAEDLDVLDREVAQGAIGNPSIERLITITGVNVTVAAGLVAAIGDIRRFTSPQKLVSYVGLNPRVRQSGLGLAQHGRISKVGRSHARAMLVEAAWAAAKAPGPLHAFFVRIRARRGHQVAAVAVARKLAVLCWHLLTKETDYLWARPALVAIKKRSMELQAGQPARKGNQRGPAYTYNVKELRNREMLVATQAERAYEHFVGQWRPRGPGKGVRERLNPARHE

SEQ ID NO: 199865 - protein, 415 aa, unidentified
MALKIVYQICCGIDVHKTFVVACIASTNKQGVTTYKRHRFSTFTQGLKELLQWLLDNHCKDVCMESTGKYWIPVYNVLENDCTIVLAHPKYVKAIRGKKTDKKDAKWIADLFKHDLVAGSFMPPADIRQLRDLMRYRYKLTCFMSSEKNRFQNCLTVSNIQLASVVSDTFGKSSQRILDKILENPHDTSFDIESLIHGSMKKKLPELELAIDGFITPEQDGKLKIIKKHFEDLESRKAELEELILALASPYQQELDLILTAPSFKNTFTAIGIISEIGVNMEAFPSAKHLCSWAGLTPTNNESAGKKKSVRVSKAGCYIKPLLVQCANSVVKSEKHPEIRNRYLRLRKRRGHKKAIIAIARMLLTALYNMLKNKEPYNSELYRKSDILPVNREITVEQAILMAQFQGYKIKSATE

SEQ ID NO: 199866 - protein, 342 aa, unidentified
MQSVVTVGLDIAKNVFQAHGVDAEGEVVFRKRITRAKVRDFFASLPKCLVGIEACASAHHWAREIGTLGHTVKLMPPAYVKPYVKSQKNDSADAEAICEAVTRPNMRFAEVKSVEQQSVLAMHKLRATLIRHRTRVGNSIRAHMAEFGLIAPIGRIGLESLVQIICDEKDERITSMVRRALGYLVNQYDQLQAQILDCDRQVLAWHRSNETSRRLATIPGIGPLAASALAATIGDASTFKSGRALSAWLGLVPKQSSTGGKERLGAISKRGDNYLRWLLVAGSLSVIRYAQRHGTKRPWLVKLLERRTSKIAAVALANKTARMVWALMTKGEKYREPQLQAA

SEQ ID NO: 199867 - protein, 372 aa, unidentified
MEENSVTFIGLDTSKLKISVAVADGERNGEVRFFGDISSEPASVASMVNKLSKRGAKLHFCYEAGPTGYGLYRQIVELGHDCVVVAPSLVPKRVGDRVKTNRRDAVSLARLHRAGELTAVWVPDEAHEAIRDLVRAREAANGALKQARQQLQSFLLRHGRIYTGRTPWTRAHTRWLARQTFDHPAHHILLAEYCQAIEDAGVRLDRLTELVVETAASWSMAPVVAAYQSMRGVAFMTAVTFVVEIGDVRRFDNPRQLMAYLGLVPSESSTGARIKRGGITKAGNARVRRVLIEGAWTYRFPARVSPKIQTRLEGLPRTVREIAWKGQVRLCARYRKLMAAGKPKVITVTAIAREMAAFLWAIGQEVAPTAKG

SEQ ID NO: 199868 - protein, 339 aa, unidentified
MNYIIGIDISKDTLDVHRLADGQHMQVLNGIRGFAELFRWIEPHPTALIIFEATGPYHRQLEQALCVKGIPFVKVNPKQARRFAQASGKLAKTDRVDCEMLAKMGAALQLMPKPISAENLYDLRDLLAARRALIKDRTAAKARNATVTHALVKRQLEKRLRQIKCDIAKIDAAMLEMARQDLRMTERLDILSSIPGVGVTTALIILVDMPEIGELDGKQVASLAGHAPMSQSSGKWQGKARIQGGRPNLRHAIFMPALVAIRFNADLKAKYDQLVAAGKEKKVAITAVMRKLLVLANALLRDQRMWSENQGCSRRILGRLLRNRLPGSERRDHPLPACA

SEQ ID NO: 199869 - protein, 360 aa, unidentified
MTTYYIGADVHSNSTELAIERNSKIVQRYKLPTSIAALSSVLDSLKGEKHLAIEEGPMAGWLYRNLSKKVDELIICDPRRNKLIDSDGDKDDKIDAAKLACLLRGNYLRPVYHSDDDGRTELKHWISLYHDRVRDAVRNINKIRSRCRMHGLAIPRVVVRQAKARDKWLSDTNNQTLAKQLELLWIGYDATSQQVRIARRRLSVLSGKYPIIKRWSQLPGIGLVRAVTLFAYLDTPWRFKRKNKLWKYCGVGLQRITSGTDSKGRPKPARLQLPWAVNRTLKNAILGAVSSVINQKNNLFKEHYERMLEDGIMPSNARHAVARKLLTVIWAMWKTNSRFDENMCRKPDTEMALVSSRLSL

SEQ ID NO: 199870 - protein, 425 aa, unidentified
MSYRIVGIDVHKKMLAVVVSDVEVDGEYPFERRLFGSNPGQLRSLAEWLLEQEVEEVVMESTAQYWKPVWGALERYWKPIRQKREGAGPMSGTLHLAQAQSNRGPRGRKKDFPDAERLVKRLVAQELTLRFVPDTHQRLWRTVMRRKYQLTHNRVRLQNRLESLLEEAHIKLSSFVSDLLGVSARRMLKALAEGETDPAALAVMADRKLRATQEQLRDALGACTELNPVYRRLLKMMLEELRWIDEQIGQLDHLLTQHQDAVQRLAEVPGLSVDSAQQIIAEVGATAATFPSEKQLSSWVGACPGDEESAGVNYSHRSPKGNRQMRRILNQSANAAVKTKGSIFEIVYRRTVPRLGHNQAIGVIAHRQCRLIWKILHQGVHYEERGSAVNIKSRQRRAARMIRELRGLGYRVEPANSQQNPAGGR

SEQ ID NO: 199871 - protein, 346 aa, unidentified
MSLYVGIDLHSNNMFVAIMNADEELLFQKRLSNDETLILQELSRYPTEEISIVVESTFNWYWLVDALMSHGYSVKLANPAAMVQYSGLKHTDDRSDAIWLARMLKMNLIKEGYIYPKENRPIRDLMRRRMMFIQQRTQMILSLKSLIRRELGQRVSTNMILGERKPLPIKEMFFDEDLLFTAERMLSAIYELKNNAKQIERRVEKKLKLKSEFQNLTTINGIGPILAFTIMLEVGDISRFKTVGDFSSYCRCVSSQRTSNNKVKGKGNKKNGNKYLEWAFVEAANFIKRFNTNAQRFYQKKEAKTNAIVATKALAHKIARASYYIIRDNVPFDDEKLFNYSPPVNS

SEQ ID NO: 199872 - protein, 410 aa, unidentified
MYKICCGIDVHKTFVVACIASTNDKGITSYESHRFSTYTSGLKTLLQWLIDRNCKDVCMESTGKYWIPVYNILEKGCSIVLAHPKYVKAIRGKKTDKKDAKWIADLFKHDLVAGSFMPPSDIRQLRDLMRYRFKLTCFKSSEKNRLQNCLTVSNIQLGNVVSDTFGKSAQAILDKILENPADTSFDLEPLVFKSLKKKLPELRDAIDGYITPEQAGKLKVIKTHYEDLESRKAELEELILALAAPYQQELAILQTAPGISSDFTAIGIISEIGTNMEAFPSAKHLCSWAGLTPTNNESAGKKKSVRVSKAGCYIKPLLVQCANAVVASKKHPEIRNRYLRLKKRRGHKKAIIAIARMLLTALYYMLKNGENYNAELYRKSDLPPVDREITVEQALMIARNQGYKIKSATA

SEQ ID NO: 199873 - protein, 375 aa, unidentified
MIKHSEVFVAFDTSKLRNAVAIAEAGRAGEVRFLGEIENTAGATTKLVRKLGAKYERITFCYEAGPTGYELQRHIHGLGHECIVAAPSLIPKKPGDRVKTNRRDAVSLVKLLRAGELTAVWVPDPRHEAMRDLTRAREAAVIDLRAKRQRVSALLLRQGRSYPADKKTWTKVHMNWLASQRFEQPERGIVFAEMMFATRQAQERVERLEQAIRTAVPDWSLAEMVTAFMAFRGIDLVSATCLLAELGDLTRFPTAPEVMGYLGLGCSEGSTGDRIKRGGITKSGNRRARRTLVECAWSYQHPPRVGIAKQAKVAAAPAKVREIAWKAQCRLNRRYRVLPRRGKLKTVAITAVARELAGFLWAAARELSSPERVAT

SEQ ID NO: 199874 - protein, 347 aa, unidentified
MNFYNNTHPYYCGIDLHARSLYVCILDQQGKTLVHKEISANPEYLHQLLKPYLGEIIVGVECMHCWYWVSDFCDDIGVDFILGHALYMKAIHGGKAKNDRIDSFKIAKLIRGGTFPLAYVYPKEMRATRDLLRRRTKIVRHGADLKAHVVNTTSQYNLPPNKVNLKNVCAREQLKTTFPDTSVQRNIDLDMAILDCYAKELSKIEWYIEQQAKQHNPVHLKLLRSIHGIGRILALTIIYEIGNINRFESVQKFASYSRLVKCKAESAGKSYGTQGNKIGNAHLKWAFSEAAALYLRGNKEGQNYLLKLQKRMSKAKALSALAHKIGRCVYFMLINETTFDEKRFLKG

SEQ ID NO: 199875 - protein, 403 aa, unidentified
MNNVTENTKVIYVGIDVHKDTNSFCAYDSREDKLFAEHKSSSKFENTLHYLKNLQKSVGKDAVFLIGYEAGPTGYGLCRKLQKEGFACVIIAPSTIARAPGQKVKTDRMDARLLAKTLAFKTYSPVCLPSEKLEAIKEYTRVRTAKITMLKKAKQNLLSFLLRMGLPYPQSGHYWTQAHMAWLRTVNFADKWLQESFEEYHAEVITLMDKVQRIEAKILELCKDDEVREKIDALVCISGISYVSAISIVAEIGDFSRFSKAKSFVSFIGLCPGEDSSGNRVRHTAITKAGNSRVRSLLVECAGSLRMHSVVTAKSVRVKERQKNASAAIVSYADKCTLRLRKRMLYLSQKGLPYNLVTTAGARELACFVWGMMNLVDNRKTALNKIDEGELSDIQKTVEEFIA

SEQ ID NO: 199876 - protein, 457 aa, unidentified
MSKTRKKALTKKMVKLDSLKQINLNAAGLDIGASEIWACVPEDRTETPVRAFPTFTTDLYALANWLAECGVKSVAMESTGVYWIPIYEILEARGLEVYLVNARHIKNVSGKKTDVLDCQWIQQLHTYGLLHGSFRPAEDLCALRAYVRHRDNLLRYRAAHIQHMQKALQQMNVQLTNVLSDITGVTGMTIIRAVVAGERDPIRLAQFRNARCASSEEEIAKALTGNYRAEHLFALKQAVELYDFYTQQIQACDTEIERTYTAFKPVVDIEAQPLEETVKSKRRKPKNAPAYDLRTYLYQLTGVDLTRVDGLDAVLVQDILSEIGVDMGPWRTDKHFTSWLRLAPHNDISGGKVLRTKTGKTTSRAARAFRLAAQAVSKTNTALGAFYRRMRAIHGGPKAIVATANKIARIVYHLIKDHKEYVDPGAAYYEEKYRDRALANLKRKAAKFGMQVVPIPA

SEQ ID NO: 199877 - protein, 356 aa, unidentified
MSEGSWVGLDVHARSVVAGVIDQGSGEVRSLRLPPGPAETVAWLKTLPAPVRVVYEAGPTGYRLARACAGAGINCVVAAPSRIRPPADRVKTDRRDAERLARLLRLGEITPVRVPEPEEEAARDLVRAREDARGDLMRARHRLSKLLLRHGMVYDATAWTRAHDVWLRRQRFQSGPLAVVFDECYGRMLDAKTRRDALDKAIAELAGAPPYVDVVERLVCLRGVSTLTAFALTVELGDWNRFRPTSLGPFLGLTPSENSSGERRRQGAITKAGNSHARRLLVEAAWHQRRPPRLSVTLERRRAGKSLAVRAQADRSARRLHGRWHALEARGKPRTIVVVAVARELAGHCWALATME

SEQ ID NO: 199878 - protein, 467 aa, unidentified
MARKQKNIKGMNRKGKPRSLKTIQPNAAGIDLGSREHWVAGPPLADESPNVERFGTTTPELLRLADWLEQQQIVTVAMESTGVYWIPLFEILDSRGFKVFLVNARHVRNVPGRKTDMIDCQWLQLLHACGLLRGSFRPSDDICRLRALFRERNTMVDQRSDWVRRMQKSLDQMNVCVHHAVSDITGVTGMSIIRAIVDGERDPQVLAGLRDRRCRKTKKQIAEELTGNWRPEHLFTFEQSLKMYDQLCNVIAAYDTEILNYIDSLQPPDAQNSLAPPSSSKTKARNFVKRGKEPLRQALYRMSGFDLTTIDGIGVDTAAVVISELGLDYSAFPDESHFVSYLRLAPNISISAGKKVPGKFKAVTCTRVSNALRMAATTLRNSKTALGAYYRRISWRKGASIAVFAIARKLAQIIYRLVRYGQDYVDAGTEAYEARFTQRRLSSYTKALKEMGYKIEPLTDTEAVAVS

SEQ ID NO: 199879 - protein, 365 aa, unidentified
MNTIYIGVDFHARQQTICYLKTETGELVTRELKHQDKDQVRGFYAAFTGHVVIGLEASGYSPWFEAMLEQLNCEVWLGDATEIRRRARWRQKNDRRDAELILDLMVHNEFPRLHRPAVASREVLRMLRYRQKLTKIRTMSKNSLQALALQAGLAKGKHLFTESGKQEFSLALMSPVMHWQREHWLQLLEPLNQQLMETMAWFKEQARGDVRVARLRTHPGIGLLTALCIVHSLEPVSRFRNQRKVAAYAGFDPVERSSADRKHFLGISKAGSRLLRYLLVEAAHTAVRYDENLKRFYKRLAERRGRPKAKVAAARKLLIRAYIMLRDEIDYAEFQRRAVAAALARRSQRPPVPEVLIGQSASPQQ

SEQ ID NO: 199880 - protein, 410 aa, unidentified
MSERPYAFYVGVDWASETHQFTVLTPERHLEAERRIEHTGRALSEMADWLTALADGEPARIAVAIEVPRGPVVETLLERGFHVFAINPKQLDRFRDRHSPAGAKDDRRDGFVLADSLRTDRPAFRQVHVDDPLLIQLRELSRAEEELQTELRRLSNRLWEQLQRFYPQVLRLSPAVDEPWIWALLQLAPTPVAARALRRATLARLLARHRIRRVTAETVLAELHSPALRVAPGTTEAAREHIALLLPRLQLLHEQRGRCARRIEQLLDALEGSDAEHRDVTVLRSLPGVGRVIAATMLAEAARPLAERDYHAVRTQGGVAPITRQSGKSVLVSMRYACNHRLRNALYHWGRVSAQHDPSTRRHYRALRQRGHGHARAIRGVIDRLLVVLMAMLRTGTTYDPARRRVPAAA

SEQ ID NO: 199881 - protein, 471 aa, unidentified
MIRSVGIDLHQGQHRARCLDESAQPCDSFSFQTTPEGLATLEGHVFRDGANPIIVLEPAGLPWLMVAVYLRSCHPDCQLVKAKTQKVAALRRYLRGPVKSDRIDALTLAKMPFIDPEQMDEIYLPPAEIHALQRLTRQRKRIEQDIAGRKIRISAIVDGYLPGVRRTFNDAWSSPIRAFLRSRLNPFIVVRDGEDALHAFLSKNSYHSKWSKAQTRLVFLACQSLAAVCELSELAGTVNEDFFMDLQDEIARELRMLEADEIESEALARRIAELYQKLHSSDNLRTIPGVGEHTAPIFLATVGDPARFPNQSAFANYEGVVPGAKQSSNVEAKGLRMTKAGPSIMRMALYQAGDIGRRWDPQLAAVYYREMVYHGKNHRQAMGAVMSHLGARVLTVLKVDRPYELRDIEGNSISKERARKLILSKYHVSEDIRRERRRRNSKISRARETATYRTNEAAKAPQPVKAEAVSH

SEQ ID NO: 199882 - protein, 428 aa, unidentified
MAEDTTLTSQTWLVAIDIGKSFHAVLVEGGDGTRQQFRMANHVEDYDRLVVFLRGLPGPARIALEPTGDFHRTLAHRLLREGFSVVSVSSVAGARYREALFNSWDKNDPKDAHVILQLLKHGLVQHYHDPLLAGDHDLQELAKTYHQIVLARKRLADSLLNHYLPLYFPEMGRYWESTRVEWFVAFLEQFPTPAAVQTLPKEAFVRAAWLVVGRKVNKQAKLEELYELAQRSIALPVAVDSVAIETFRLQLAQLRRLAELRQTLEARPHALLKDRADFQRLCSLPGVAAILALVILAEGGDLRRFPHHRQFLKYCGLDLAKCQSGQFRGREMLSKRGNARLRMAFWMAAQRAVRMNENSFRDKYERYTRHDSGNPDVRRKALTAVAAKMARVAYAVVKHDQPYHGYHEQALPSGSIPLKRAVGARATP

SEQ ID NO: 199883 - protein, 415 aa, unidentified
MEGMEVLHEHVAGIDVHRKSLSVCVRHVGADRRIRQEVRTFGTMTRDLLELRDWLQTEGVTHVAMEATGVLWKPVYNLLEDRVEVLLVNARHVHQVEGRKTDVKDCQWLAQLLACGLLRASFIPPKPQRELRDLTRMRAQLIAGRTQVVNRLHKVLEDANIQLGAVASDILGKSGREMIEALIKGEQNIETMAQMARRRMRAKLPQLRLALDGRVNEHHQFLLEILLDQYDGIDHQIERLTARIEKVCASFAPAIEKIVEIPGYDQTSAQNVVAEIGTDMSRFGDDDHLCSWATICPGNHQSAGKQTSGRTVKGNRWLKAALCQSAWAAARTKNSYFGAQFHRLAGRRGKKRAVIAVAHAQLKVIYHLLSSAQSYQDLGADYFLKLNADRAARYHRKVLESLGYTVIPPEADKAA

SEQ ID NO: 199884 - protein, 485 aa, unidentified
MAKRKMSTFERLQRGKWSREQRKELAQKLEAADLTIVHPDAAGIDVGNDSHFVAVPAGRDAQPVQEFGSWTADLQRMAAWLKACGIRTVAMQSTGVYWIAVQEVLEQAGLKVFLVNARGTKNLPGRKSDVQECQWLMKLHTYGLLANSFRPPEEIRAVRTIWRQRDRLVQDAGRAIQQIQKALTTMNIRLANAISDVSGVTGLAIIRAILKGERDPRELAKLRHPCIQASEEEVVRSLEGHWRDDVLFELKQVVEGYDFYQRQMGACDEELQKYLAVLPDRRRESAAVGADPGPTKGTKQRHRSKAERKGKTRRKNQPGFDLQAELHRTFGVDLTRIDGIDIMTGQVILSEVGPDLSDFPDEDHFASWLELAPRRNITGGKVISQKSRESRNRVANALRLAAESLSRSDSYLGARYRRLRGRKEGKKAVKAMARHLACLVYRLLTKGQDYVDRGAAYFEKKRTEREMIGLHRKAAEHGMRLVPMA

SEQ ID NO: 199885 - protein, 394 aa, unidentified
MDNSKVWVGIDAGKEVHWAHVLDASGTKILSRRVENDESDLSELIDEVLALSEEPLWAVDQPGGSAALLLALLWERDQEILYLPGLAVERARDAYPGESKTDARDAYLIADQARMRSNLAQLLPGEDDLAELQLLLARRRDLIADRTRSINRLRDVLLSLFPALERALDLNSKGALILVRHYQSPRAIRRVGLSRLARFLKNRGVKGAEDIARKALTAAKAQSVTLPAEGVAARIVAELAREVLALKENIETLDKELEQRFFARPEAQILASLPGMGPILGSEFLVSVGDLCTFQSADQLAAYAGLLVPAAQDSGKRTGNHRRMRGGNKILKRVFYQSAFASLRSSPHSRAFYDRKRREGKKHTQALIALARRRVNVLWAMLRDETTFEVPPAA

SEQ ID NO: 199886 - protein, 405 aa, unidentified
MQNVYERCCGIDVHKKLIVACFRNGRKAELRKFDTLTSSIKELGNWLLDNHCQMVAMESTGAYWKPIYNILELLNIDVMVVNAHHMKSVPGRKTDVKDAEWIADLLQHGLLKASYIPDREQRELREIVRYRKNLVEERSRELNRLEKTLEGANIKLSSFVSDLSGVSSRNLLKQALIGEVNQENIGDLIHSSMQSKKSVLLQAMDGVLSPIQKQLVKAILDHIDDMTKRIKDLDNIIDDHMKSYEDAIKKTDEMPGIGKRSAETILAEIGIDMSRFPSAAHLASWSGLCPGNNESAGKRKSGKTNKGNKYLKTTLIQCAKSASKNKDSFFHAQYQRLVVRRGANRATVAVAHSMLIAIYNMLKNNVPFKDLGSDYYTKFNTEAKAKYYMKKLQALGVSVPVSLAT

SEQ ID NO: 199887 - protein, 358 aa, unidentified
MPRSVPTNTEVITLGADTHKDIHVAVALDGLGRRLGTLSVPAIPAGYENLVNWARGFGPLERAGVEGTGSFGAGLTRFLRAQGIEVFEVIRPKRRDQYRSGKSDPIDAEAAARSVLAGTAIGQPKDADGEVEMIRTLRITRRSALKARAQAANQIQALLVTAPEGLKSELCELSTARLIEKASRLRPGATLSDVEAATKFALRSVARRYQHLSKEISELDERLNRLVSEVAPQLVAVEGIGTDTAASLLIAAGDNPERLKNEAAFAHLCGAAPIPASSGKTVRHRLNRHGDRDANRALYVIAICRMSCDKRTRAYVERRTKEGKSKKEIIRCLKRYIAREVYRILASLSLNKPPVPVP

SEQ ID NO: 199888 - protein, 336 aa, unidentified
MYSVGLDVHQRRSSLEILDPNGKRVNRLEVKGPWPKLVEQVERLPRPFSICFEASCGYGHLYEQLARHAEHVAVAHPAQLRLIFRSKRKNDRVDAAKLAKLLYLGEVPQVHVPDKDVRQWRASIEWRQALLGRRVRVKNQLRAMLRTHGLAASAPRSLWSKKGLGWLAGQPLEEFEQLRRSMLLDELAEVNRKLALVERHLAKVAAAHPGVALLRTIPGVGIRTAEAFVAYVDDVRRFARVRQVGAYVGLVPCQDSSADVRRLGHITKDGPATVRKLLCEAAWQAVRRSPSLKARFERIAGGKPDRRKIALVAVAHHLCHAMAAMLRSGACWSERA

SEQ ID NO: 199889 - protein, 412 aa, unidentified
MEVQRNKVCGVDVHKRFLVATILSRDGTKQTQRFRMNPDELSKFRTWVVENGCEQVAVESTGIYWIPVLNAIEGYVDLILANAYKIKNTSRPKTDLTDSEWMAELCLNGMIKPSRIFPRDDRDLRSLTRARERYVNDTTREKNRIHKLLDSCNIRLSSVLSNMFGEVGRYVLEGLLEGKDIDEIIEGIPVKRLMKKADQIREAVKNGLDITKIQLIRGSLELIAALERRVDELEAEIRRRVVHKKENIRILMSVPGIGFISAVTILAEIGDFRDFEKPEKLAAWCGLVPSVYQSADKLITGKITKHGSRHLRWILVEVAQTVARCGSPKLKRFFLRIMERKGFKVAIVALARKILCILHHLLMNQEMYEDEVTKKEARIELAAPETSMSIEEMIEYMIKAGYEVKKKPGVGG

SEQ ID NO: 199890 - protein, 348 aa, unidentified
MVVVGVDAHKATHTMVAVNHVGAKLGQKTVAARTEGHRQALSWAHSTFGVDITWAVEDVRTVSRLLEQDLMDAGQKVVRVPTWLMARVRGKGRQSPGKSDPIDALAVARSVLQEVKLPIAQHDNESRECKLLADHRDRAVTQRTGAANRLLWFMHELNPDHHLTVRRLYTGRNRDALDVWLAEQSGPVARLAREELADVGRLTDVAGHYERDLASIADRVAPSLLELPGCGPLLAARIVGVTANVTRFRDESAFARFAGVGPKPSWSGNTYGRARPFVGGNRQLNAALHHIAMVQIRDGHTGERYFHRRIEEGDSPAKARRCLKRKLARAVYTRLRADYFARHPVERT

SEQ ID NO: 199891 - protein, 441 aa, unidentified
MASLNKINPNSAGIDIGSSKIFIAIEDCEVKSFNTFTDDYLKAIVYLKEHNVTSVAMEATGVYWIALFEMLEASEIEVCLVNGRDVKNVPGRKSDVADCQWIQQLHSYGLLRPFFIPDEAIRQLRTYVRLRNDHISMASQHIQHMQKALDLMNIKLHNVISQIHGKSGMRVLNAIIKGECNPEALAALCEDSILKKKRAEVIASLKGNFRAEHIFALEQAVAAYQFYQQQILKCDKQIEALLEQFTEGKEVPPNIRKPKPIRHNPPKVKELHSKLMVITQGKDATTITGMNDKTLLEVIAATGLDLEKTWRTKKHFTSWMALCPNMHRSGKSNKKRKVKKHSTAGQIFLEAAMSIANSKYSALSSFYKRLQAKKGRRVALKATARKIAERYYDLMTKGIEYVEQGINLYEQKFKEQQLKRLYKQAKLFNLQLSPLTSGVCQ

SEQ ID NO: 199892 - protein, 431 aa, unidentified
MNSSLNNDPTQNLYAAFIAIDWADQKHTFSLQVAGQAKKETGTLEQKPEIIGPWVAKLRERFGGRPIAVAVEQSRGALIHALLAYDFLVLYPIHPTTVAKFREAFKFSGAKSDPLDTDQILEILTKHLELLKPLNPDTQETRLLGRLVADRRNAVELRTSHIQALLASLKEYFPQAIELVSGNLTSRLAGDLLKKWPTLESFQQAKPSTIKRFYYGHNVRSPEVIERALKLAISAQPLTTDSAIIESSRRVSEMHSQMIQALNPVIDAYDQRIEKVFHDHPEFPLFSQLPGAGPVMAPRLSAFFGTDRSRYSKAQNVQTFSGISPVTKSSGKTRVVYFRRACPQFQRQSFHEFARLSVASCQWARNYLDYYTGKGKKYNTVVRALAFKWIRILFRCWKDRTPYDDNKYMEVLKKRGSIFATFHLEQKNENC

SEQ ID NO: 199893 - protein, 482 aa, unidentified
MKSKPQEKNKRATNHPTQHHWHEMNRKQRREMTRQIQSEDLSLEVIHPDAAGIDIGNESHYAAVPPSRDSQPVREFRCTTAELKAMAAWLQQCRIRTVAMQSTGVYWVAVYDILEEAGLEVYLVNARDTKNLPGRKSDVQESQWLMKLHTYGLLRNSFRPPQEIRTMRTYWRQRNDLVQSAGRHILRIQKALTQMNLQLANVLTDVSGATGQAIIKAILAGEHDPHKLAEFRDPRVKASEEQIAQSLEGNWQPDLLFLLKQEQDGYEFCHKQMAECDRQLAQYLQRREDRSHGTPLPEEKRKGRLNKKRANKPQFDLREGLFRMTGTDLTRIDSVDVMTATTVISEAGYDMSKWETENHFVSWLRLCPDNRISGNKVIGKGRLPTNNPLSIALKMAASTLRQSKTYLGAQFRRLRTRLGAPIAIKAMAAKLARLIYRMLRYGMKYVDQGAAFYELQHRHLQIKQLKWKAAKLGFQIVGAPAA

SEQ ID NO: 199894 - protein, 276 aa, unidentified
MALYGGIDLQANNSVVVVSDEQDHIVYQRRLRNDRAEILPALAPSQGVLQGVVGESTYNWYWLVDGLLAAGQRVQLANTAAIQQYAGLKYTDDHSDARGLAHLLGLGILPQGYIYPAAERAVRDLLRKRSQFVRQKTTNVLSIENGLTRNPGLTCSGNRIKPLTAEEVEHLLPAPEIARAVQSNLAVLRCLAEQIERVERVGLARAKVKEAFQPLLTVSGIGQILGMTSMLETGDVGRFATVGQFASYCRCVGSQKLSNGKRKGEGNTKNGNKDLA

SEQ ID NO: 199895 - protein, 347 aa, unidentified
MSKRSHPLQSKRSDPLPPTVFGGVDVSAATLAVAILQDGQPLEQREFPNTDSGHKALIACLHKRKARARVSLEATGIDSLNLARALDAADEVEVAVLNPKVVNRFAQTLRRSKTDSADAQVLAEYSRRMDFVAWRTPSRKGLQLRTISRHIDGLTVEHTREQNRLHAALGSAATPGCVVQDLKRSLASLQRRMVRLRREAMALIASDAILAQRFELMISIPGIAEISALQVLGELATLSPEMSVRQWVAHSGLDPVHEDSGTSVHRPSRISRAGSRPLRRALYMPALVAAQRDPHLRAFYELLQSRHKAKLQALIAVARKLLHAIDGIFRSQTPYDGHKLFPALIPG

SEQ ID NO: 199896 - protein, 414 aa, unidentified
MRIMYQHVAGIDVHKKIIAVAILVLDQEGQWYQETRTFSTMTADLLALSDWLTSHGVTHVAMESTGEYWKPLFNILEEDFEVVLVNARHLSKVPGRKTDQSDAEWLAKLMQCGLLKASFIPPPGQRELRELTRYRNSFVRERVNLMNRLHKLLESANIKLGSVASDVLGVSGRAMLEAIIAGQMSPAEMAELAKGRMREKREELAKALEGRVKAHHRFVLTELLCQIDSLDETIARFDQQIVEYCRPFEEAIALVDTIPGVGRRSAEDLIAEIGIDMERFPTHRHLASWAGRSPGNHQSGGKRRSGKRSKGNKRLGAVLNQMAHAAARSKDTYLSAQYHRLARRIGKKKAIGALEHTILVMAYHMIKRRVPYHELGADYFEKRNSELTAKRLIKRLEKLGYQISIDQQPVSLAA

SEQ ID NO: 199897 - protein, 383 aa, unidentified
MRRNATVTHMGLDIHRNFTQASACDQQGQLLWRARLQHADRQALRQELAQWPKVPVVLEGSFGWGWLSDELLLAGQEPHLASSRKIAGWRKAQGIAKCNRTDADLLADLWTEKKKWWEVWRAPAEVRDQREWLRYRMGLVRIQTETKNRIHATLHRHGIVNPHSDLFGVAGRRWLSLLISEPASQSLLRETGRQTLKGHLVLLDQLRKHIAQATRQLRRAIKDSPVARRLMSLPGISWILAYTIIAEIGRIERFRSGRKLCAYSLLVPLADDSGDEIDAPPLGRRIGHAGRLTLKWAWIEAAHGAVRRPSRFKAIFDRRSDNGKRDRGRSYIAVAHDLCRIAWSLWKNDVDYRDCPPPRPGSRSDTSRPGTGQPENPMVPALA

SEQ ID NO: 199898 - protein, 395 aa, unidentified
MYKVLVGIDVSKERFSAAGIDSVGKEAFSQAYTMDSKGFEDLLKMVRSHCEEDSKVLMAMESTGCYHINLYSFLISQGIRTLVVNPLLISNYAKLSLRKTKTDKKDAMTIAKFLLDHHKEISQLSISQDNQDLRDLSRERESLSHLISATKVEIKRVLRTTFPELETIGDIYTGVMLRLIQEYPSVRLVRAAKLKGIIKLLKEPRRGNKLTYTAEDIYRAAKTSIATVSSGKEIILRGKVATLLHLQERLEEITKLLTELCQSTRMDDLDILQSIKGVGPNTAAPLLAEMGSIENFSSHKKLIAFAGLDPSVKESGQYIGASRLSKRGNRHLRRAIYLMTTSVVSWNAWFKAYFQKRKAEGMAPQKALFATAHKLIRVIFAMLSQRTYFKVKEAK

SEQ ID NO: 199899 - protein, 492 aa, unidentified
MSAASERNPCLLCLHFFSRAFAARLPQPQHQHGGATTQSIRKTNAQPLRAAQAQVSTPEVTVRALYRSAIGIDVHLNVLVCCHQRQLSDKNELCESCDFLTNRDGINEFTAWCKERNPEIILMESTDVLWQSPYEALENAGFSSDRLALINARDAKAAVGRKTDRKDAARLAALSRSGHFRRSFVPPKGFRLQRVIAREIQTNRRDLARTVNRYQKLLNQCGCRASTVFSDVRGVAASVILEAKINNAENLEEIVKKNSRRLRASPQEILSALDFAIPEAIAEQIKDCRNKIKELLDYEARSFDRLCTLQQAHERDIDLLVSISGIQERVARLLYAELCENLKEHFSSCDHFTSWIGICPGDNTSAGKQKSGKCPKGNKYLRRILIECTRGFVATKNQLCAREKFLALKLRRGYKRATVAMAHLLARIIYSVLTKKSFYTTYMTKALRDVIVERACRSVRQLAKREDVSVIDGQVVDNETGVILARLDFFSS

SEQ ID NO: 199900 - protein, 426 aa, unidentified
MGISKPAGLKSPRGEVKSVNPLFVGIDVSSKNNVAYLMKPDGSKHSSFSVQNNLGGAKLLSERIVSALSSMRLSDVVIGLEATSIYGDNLVYALREDGGLGRFRRKIHVLNPKQVKKFKEAYPDLPKNDWVDAFVIADHLRFGRIAKEVYMDDYRYQALRTLTRARFDVIQNLTREKQRFANYLFLKCSGMAQDKGIQNTSATTIALMERFETVDNLANADLDDLTAFVAETGRGRFADPESTAKAVQAAARGSYRLPKTVNDTVNQTMAVSIASMRALKEQVKVLDKAIEQQFEIIPNTLTSIPGVGKVYSAGIIAEIGDIHRFASQASVAKFAGLVWTQHQSGEFEAEHSRMIKSGNRYLRYYLLEAANSVRRCDSEFRRYYDLKFKEVNKYQHKRALALTARKLVRLVFRLLKDNRLYIPPEG

SEQ ID NO: 199901 - protein, 347 aa, unidentified
MEHIAIDLGGRESQICVRASDGTVLAEERWPTGSLKKYLVRRPKSRVVVESCAEAFSVAEAAEECGHEVNVVPATLVRALGVGARGLKTDVRDARNLSEVSCRMARLPALHIPAKASRERKSLCSLRENLVEVRTKLANGVRGWLRSEGLRSPRVGQPERLWLRVQEHLKQRDRVMPGYVERNLKAINFLTEQIEEADRELGATAKADPTCRRLMTVPGVGPVTAVRFAGAVDQVERFPNSHALESYVGLVPGENSSSERKRITGLTKAGARKLRWTLIQAAWSARRCRRNDPMVAWALQVEARRGKFVATVALARKMTGILYAIWRDGSTYHANRGSGPVCEPSPP

SEQ ID NO: 199902 - protein, 367 aa, unidentified
MTRVAQNVKEGKNIFCAIDLHQEKMLAGIAVDQGLPEFRELDTREESGVKGLLSLLQSCGRRFPGARIRVCYEASGSGFRLADRLEEAGYWVAVLAPTHLPSSPKQRSNKTDKRDVVRLLEALRGHMLAGNSLPVVWKPPAELREDREVVRRRLGLGDKIAGVKNEIHGLLRRYGRRAPEGIKNPWTKKHARWLEGVAEELPAGGGTVLGGLLRELRFYQEELVRGGKAVAALAALAEEERYRKQVEALVAIPGVAALTAMVFLTELGDLSRFPNRRALGSYLGLAPRAWESGERSDRKGHISKMGSPRVRKVLNQASWALVRLAPSWRAWFKKRMRGQKKERKKALIVGVMRQLGIRMWHLAQEAA

SEQ ID NO: 199903 - protein, 320 aa, unidentified
MMAQNGLVVAGIDVAKDKVDVCIRSLSLRRTFASTAEDRRELASWLRRQKVGRAVMEASGGYEREWAKTLRDARIEVRIVDPKRVRSFAQSAGRLAKNDAIDAEMIAWFAETFDKARGQACDAAREELVQIVNARQALLEQQVQMQNRCEHTVPIPVRKVHERLLKAIALEVDRLEAAIAAMIKATPHFAEIAEIIESVPGLGKITSAGLIAAMPELGQVSNEAISALLGVAPYDDDSGKRRGERQIKGGRRKVRNLFYMACLGAATRHNPALKAFYCRLIAKGKKAKVALVACMRKLIVILNIMIARGEKWDASRYAVD

SEQ ID NO: 199904 - protein, 355 aa, unidentified
MLADRVDYIIGVDTHTATHTAAVVAPTGAALAHRTVPADADGYLHVYRFAIEQAPGRRVWAIEGTGSYGAGLTTHLLEQGEWVVEVDRPARPARRNGTKTDDLDAVRAAREALGREHLAQPRQRGDREAIRVLVTTRQSAMQARTCAINHLKALVVNAPERLRQQLRALATDQLLARCARLRSHPTQPIEYRATIAALRRTAQRSLALAAEADDLHAELDTLIRRRAPWLLAEPGIGVICAAQLLNAWSHAGRLRSEAAFAMLGGAAPIEASSGKVVRHRLNRSGDRQLNRALHTIVLSRMAYHAETRAYVARRIAEGKTAREIQRCLKRYLARRLFKLLEAPPAHAQKEKIATT

SEQ ID NO: 199905 - protein, 351 aa, unidentified
MVVTGGVDTHKDVHAVAALDGIGRVLGTETFPTTVAGQADLIAWLASHGPLGRVGVEGTGSWGKNLARSLAGAGVEVIEVQRPSRQHIRRHGKSDPADAIAPARSVLADDATGSAKTATGPAESVRLLRAVRSSAMKARTACGNQIHAVVATAPDTVRGQLRDLKLTKLVEAAARFRIVGALTTPDAAARWSLRQLARRYQTLTAEIADVDGELATVVAAAAPPKLLCEPGIGIDVAGAIVTAVGDNPQRLATDATFAALAGTSPVDASSGKQRRHRLNRGGNRELNNAIWRVVMVRLRWDDTTKAYMPRRTAEGKTKKEIVRCLKRYVARRIWTIYRDHLSVTDVIPVAA

SEQ ID NO: 199906 - protein, 333 aa, unidentified
MLPPNCGTATPYILRNTVGLDISKLTFDATAIVGNAEYSAKFDNDSKGLNQFSDRLKSLGCQNLHICMEATGNYYEEVADYFAQYYSVYVVNPLKISKYAESRFKRTKTGKQDAKLIAQYCRSAQESELVKRQKPTDEQYRLSRMIAAYAQIKSECAAMKNRHHAAKDEEAAKAYAQIIKAMNEQLEVLKEKIKEQTEKPNCKEGVKRLETIPAIGRMTAAVLFHHLTSSKFETSNKFAAFAGLSPQQKESGTSVRGKGKLTKFGNRKLRAVLFMPAMVAYRIRAFPDFIKRLEEKKKPKKVIIAALMRKLAVIAYHVHKKGGDYDPSRYKSA

SEQ ID NO: 199907 - protein, 338 aa, unidentified
MEQVTTIGLDLAKNVFQLHGVDAAGNVLLRKQLRRGEVLRFFSGLSPCLVGMEACATAHYWARELAKLGHTVRLMPPAYVKPYVKRGKTDAADAEAIAEAVTRPTMHFCAVKTAEQQAVLMLHKVRDLLVRQRTMLINALRGHLAEFGIIAARGPSGVTAAIVALHETQDSLPVLARVALHGLVDQLRIVRDEVVKVEKRIVAQHRADDASRRLATIPGIGPITASAIAAAVPDATLFKSGRQFAAWLGLTPRTHSSGGKERLVGITKQGDGYIRRLLVIGATAVIRLARQDNASKAWAAKLLKHKSARLVSVALANKTARIAWALLARNQSYVAPAM

SEQ ID NO: 199908 - protein, 398 aa, unidentified
MTESSDYESVQVFIGVDVGKDTHHAVAINRSGKRLFDKALPNDENKLRSLISDLKQHGQILLVVDQPATIGALPVAVARSEGVLVGYLPGLAMRRIADLHAGEAKTDARDAAIIAEAARTLPHALRTLKLADEQIAELSMLCGFDDDLAAQTTQASNRIRGLLTQIHPALERVLGPRLDHPAVLDLLQRYPSPEKLASLGEKKLAAQLCKLAPRLGKRLAADIAQALAEQTVVVPGTNAAAVVLPRLALQLITLRKQRDEVALAVEQRVLAHPLYPVLTSMPGVGVRTAARLLTEVACRAFASVAHLAAYAGLAPVTRRSGSSIRGEHPSRRGNKALKRALFLSAFAALRDPLSRAYYTRKMSQGKRHNQALIALARRRCDVLFAMMRDGTFYTSQAS

SEQ ID NO: 199909 - protein, 419 aa, unidentified
MEVLHPRCAGLDIHKDSIVACVRLAEGRRVVRHVETFATTTSDLERLSAWLAGHGVTHVAMEATGGYWKPVWAVLAEDFDLVLANAHHVKAVPGRKTDVNDATWLADLLAHGLIRPSFVPPMAVQALRELTRTRKQLTREKAAHVQRIDRLLQAANLKLGSVLSDIMGPSGRAVLDALAHGESDAQALAALIGPRVRASRAHLVEALRGRLAPHQQLLLRLHLSQADAIDQAVAQIDQDVADRLEPFRDILTRLSRMPGVSAITASVILSEIGFDMRRFPTPAHLVSWAGLCPKNDESAGKRRSTSLRHGAPWLKTLLVQAAWAAVRVKASYPQALFLRLRARRGPKKAIVAVAASMLTAIHVMLDRSLPYQDLGADHFERAHKDRLAARLTKKLHQLGFDVALTPSRGLSGQSKFHPS

SEQ ID NO: 199910 - protein, 390 aa, unidentified
MLRKNIVQTLDAATSWKVFGLDLAKHDLAVVAIPADGSEVQYVKRYSYADFLEFTAQIPSATMVFEPGNGANHFALRLQAQGHTPKTVSGASVKSWITLHMSGQKTDLNDAYALARLSEDPDLKTVRIKSVDQNRLQSLQAMRKQLVEQRTKTIVSIKGIFQCWGILFKKDSRSLKKFKEAANNNKELLGEEVVEAMILQIDRIADLDKDIKHVEELLKKVTMQDPRAQPMLDIPCVGLQTVSRLRAIMGDIKDFETPRSFVAFIGLVPKNMISGNKTTTPSGYEQVGQGKVNRRGDKMARSLIIQCASSMYMNFHKDNFPECALKDWIQKQKDAHKPYGKIMVSLAAKLLRIIYAVLKHGEAFSYEKAGISRSALAALKAAQPAEVGNA

SEQ ID NO: 199911 - protein, 363 aa, unidentified
MKTTNQINNAQADVAPVVSKQYRCIKLGLDVHADSIRVVRMIDGATPQPAQKMTPDEFPKWAAKQLTLADRVCSCYEAGPLGYGLHRKLMALGIENIVIRPQVLDEYRVRVKTDKTDALALTKRLDTYVRDNRKAFAVVRVPTEQEEQDRTLSRQREQLVREARRLGAQGRSLMLFHGFHIHGVWWRVQWKTLKEKLPGWLVERLEVFRALLQVLDAQIRKLTQAVEAQAPATRPRGLGALSFEVIRREIGDWRRFNNRKQVGSYTGLCAGVSSSGGSRKMLSINKCGNPRLRSSLVTLAWRLVQYQPRYRLIQKWKRVLLKPQMSSGARKKAIVAVARQLAVDLWRWQTGRIQTEQLGWRMN

SEQ ID NO: 199912 - protein, 350 aa, unidentified
MEYIALDSHKRYSFASIQDRDGKIRLERRVEHHPGAIREMLGQCEHGSPVAVETIGNWYWIISEIEEAGMIPKLVHARRAKMMLASVNKTDRLDARGMNLLQRTGTLPTVWIPPGQLRDQRELFRTRMVLTQQRTRLKNRIHATLAKYALRIEESSDAFNKKGRKELELKLQGLPPHTRYSAERVLEQLDSIQEQIRLFEVRMKEVFVPSEELGFLITLPGVGFILAAVILSEVGDIERFPSALHFASYAGTAPRVHASGGKVRIGQLRSDVNRYLKWAFIEAANSISVNRHRCSQRHVNPLYERIRSRRGHQTAAGAVARHLAEATFWVLKKREAYREPTRARISSTKR

SEQ ID NO: 199913 - protein, 398 aa, unidentified
MTESSDYESVQVFIGVDVGKDTHHAVAINRSGKRLFDKALPNDENKLRSLISDLKQHGQILLVVDQPATIGALPVAVARSEGVLVGYLPGLAMRRIADLHAGEAKTDARDAAIIAEAARTLPHALRTLKLADEQIAELSMLCGFDDDLAAQTTQASNRIRGLLIQIHPALERVLGPRLEHPAILDLLQRYPSPEKLASLGEKKLAAQLCKLAPRLGKRLAADIAQALAEQTVAVPGTNAAAVVLPRLALQLITLRKQRDEVALEVEQRVLAHPLYPVLTSMPGVGVRTAARLLTEVACRAFASAAHLAAYAGLAPVTRRSGSSIRGEHPSRRGNKALKRALFLSAFAALRDPLSRAYYTRKMSQGKRHNQALIALARRRCDVLFAMMRDGTFYTPQAS

SEQ ID NO: 199914 - protein, 370 aa, unidentified
MPNYTTSIGLDVHARSIKGCAFNPYTGEVWRKSFGYDPVAVAEWILAFENPKAVYESGVTGFHLCRELRALGVDCVIGAVSKMMKPAADKRVKTDRRDAQFLAKQLALHEIHEVHVPDAECEAARDLSRALADARDDVAAAKQRLSKFLLRHGHCYPNKTPDGRPRKTWTKAHWAWIKDIEMTEPAARSTLEYYIDRVERAVEEKRDPEAKVKELAEAPRWKPTADALRCLKGIEAVTALSLACEVDGFSRFRNASAFACWLGMTPSESSSADSRRRGGITKAGNKHLRKSLTESAWRFANASRNAKQLVKGQAVDPAVRRHALKGNRRLLDRRKALDEAGKKPVVANMAVARELACWCWAVGCMAEGAA

SEQ ID NO: 199915 - protein, 478 aa, unidentified
MGNCAGVDWASEKHDVRVCNAAGDQLLATTFAHDEAGLRSLCGVLVQMKVELVAVERPDGVLVDRLLDAGLRVLALHPNQVAAARARFRASGGKSDQFDAFVICELARTDSHRFRVLEPDSDQTKALKALTRAREDFVTARVALVNQLRAELERFWPGPAGLFSSLDCLISLAFLRRYPSPLDAQRLTAARLLAFLRSQRYSGGKTAAELLDKLRAAAAGCAGEIEAQAGREIVLALVATLETLGKQEKQLDREIASAIRAHPDGEVFLSLFKGADTVLTASVMLAEIGDCRARYPTHESLSGDAGQSPVAVESGKHKVAHFRWACNKRLRDAFCTLADSTRHWHPWAQAVYARAIAKGHDHQRAIRTLGRAWSRVVWRCWQDGVPYELARHRAAQQYITVIVPSPDGDSIDVPATRRMAGDALAPQPGRWLCSGQPARSATFTAKTAARGRAVKSGPSGPSAARRVAAPLDGSNALR

SEQ ID NO: 199916 - protein, 523 aa, unidentified
MATKCKSRARRSKRYLTIVKPSGSLHPRVQKVGPEHFGIVAVDCAKARSKWMLADFYGRILIPPTVVEHHKQGFDSMIAEIRSAIQSHGLGDVLVAIERTGIYHLPVKRVFVSYKFDTRIVHPLTTKQYRLPADPGNKTDDTDLFAIHRATTNGFGLIELALDEIHGPLQLLARYRRNLVRKNASLRNQIIALLDVLLPGYTGLFNDVFNNQAALSIARNVQSASKVRALGSEGLAQMLRELKVRYQRRTLKKILDWANGIDSTTEYSEMYHTILVHLDDERCGRLQHIAKLEQEMAGLLVRTAYVVLLSIPGVSIVTAAEFAGEMGPIVNYANDQAITGRAGIYPSRYQSDKVDRCDGPLVRRANRKLRGVIMMIADNLLSCNRFFQALRMRWMAAGMEQQAMCVRVAKRFCRIAYQMVAGSQVFRHPSCQKRDYILRKLSIFHAEHGSSMAQVMTDLQAATDHIPESEHAPEAKSLYEELQPSNRRQQSGPRRLGEILPVVLAKLGVTAVELSLKGENDLT

SEQ ID NO: 199917 - protein, 410 aa, unidentified
MKIAGIDVHKRVLMVVVMDASAPEEKPARRRFVTLPSELQRFRIWLQEQGVEEAVMESTAQYWRSVWLELEPHMGLHLAQAFSNRAPRGRKHDFKDAERLVRRLIADELILSFVPRGEQRIWRSLTRMKVQLTRDRVRLQNQMECLLEEMRIKLSIVVSNLLCASGLRILHALAQGESDPKKLAELGDERLHCTEEQLVDALTGRVQPMHRGMLALQLQRLQLIDQQMAQLNHMIAQAMKSHQDAVIRLAEVPGLGVDSAQQIIAEVGAQARTFSSAAELTAWVGTCPGKEESAEQNQSSRSAKGNKYLRRVLNQAAHAAVAKKGCHFQVVFRRLLPRLGYKSAIWAVAHRLCRVVWKILHEGVRFIEQGREVGPREKKQRAQMLARALRRLGYEVTITPINQLAPKPVI

SEQ ID NO: 199918 - protein, 397 aa, unidentified
MIAVGIDISKAKSTVAVIDSDGTVLASPFTMAHTQPEMEAFVTYLKGLGEPTTILMEYTGHYHYPVLKKLQDEGFPVCIVNPYQMKKYGDVEIHKAKTDKKDALRIAAYALEKSYKLVPYSSMEQKYEDLKFLSRQYSQRITYVAKLKVQLIALLDQTMPGITRILPLNSRNPEKCALLLFIKRFKSFDEIQRIGKARFLASYDVLAKKASERSASSKGLSIYELAVDSITARGEDPYIWLSQNQCVDLLSATQNAADEIISQMRNIAETIPEYKVLRAMHGVGDRLGPIILAEIGDVHRFHSGKALNSYAGNDAPPYQSGQFESRNRHISKRGSSTLRKACYEVMQALKLTKPQDDPVYLFMLKKEQEGKPFNVAKMAGVNKFLRIYYARAMELYK

SEQ ID NO: 199919 - protein, 395 aa, unidentified
MRRDTKEVLAELVGKLKEKLDPKKPPATSAGEKHKRGELRPNLDRLTVGVDLGDQWSHYCILGLEGETLAEGQLRTTQEDLAEFFQALNAARVVFEVGTHSPWVQEVIGGCGHEVLVANPRMMEGPKRRKRKNDRIDANKLARLGRVDPQSLHPIQHRSREVRQDLVVLRARDALVAARTELINATRGLVKSMGTRLPKCSSPSFAEKVEGTVPAELRDALLPLVRMAAALSGCIQEYDKKIEKLGREKYGHTALLRQVKGVGPITALAYVLTLENPDRFVKSRDVGPYLGLVPKQEDSGEIQPQLGISKTGDTMLRKLLVGSAHYILGPFGPDTDLRRYGLRLCERGGKNAKKRAAVAVARKLAVLLHCLWVSGEVYEPLRQGTSATIAPAVAA

SEQ ID NO: 199920 - protein, 341 aa, unidentified
MKLTTIGIDLAKNVFQVHGADDKGHAVLKKQLKRAQVLAFFANLVPSKIGMEACGSAHYWARKLQALGHTVQLIAPQYVKPFVKRNKNDAADAEAICEAVTRPNMPAVPIKNASQQAILSVHRARQGFVKARTALANQIRGLLAEFGIAIPQGIGHITKRVPEIMEDGENDLPGSFRLLIERLVDHLKELDRQVGELEGEILLWHKDNEASKKLAKIPGIGPVTASAVVASIGDAKNFKNGRQFAAWLGLVPKQHSTGGKSTLLGISKRGDCYLRTLLIHGARAVIRVAENRPNGGPWLKKLLARRNKNVAAVALANKNARTLWALLVHDRVYEPDYEMAA

SEQ ID NO: 199921 - protein, 366 aa, unidentified
MKTSITPIGTPVGVDVHKRRCKVVEFDHGDIKVRKPIANTREEWLEMLSELPPDAEIGLEVSTAGYYAMSVLEEAGWRERAHWVHPAGIDSNRRQKNDRLDAERLARKLAAHHLDPLPEAWFPPPEIRALRLRVRQRCWLALLRTQTKNHLQSLLQMHGLLLPGSDPFWAEGQAWLAQQKLPLPLTASIPQIQHLLKLLGEELEISEQHLAAVRKQFPQLVLLQTIPCIGSLLGAVIWSEIGSIERFASAKALANNTGLVASYYDSGEVQVSGPITRQGSRWLRWALVTAANVAVQHRNPFADRYHRLRRKKKPNVAKAAVAHSLARCVYGVLKHGCPYGEDRWGRKVGALEQEARGSQRSTKTVP

SEQ ID NO: 199922 - protein, 349 aa, unidentified
MAYGAIDLHKKESQVRIVTDAGDVIDRRIGTRREAFTQLFGEQPRMRVLLEASTESEWVACHLERLGHEAIVADPNYAPMYGGRSRRIKTDQRDVAALTTACARGTYRPVHRRSPARRAIQAHLNVRDELVHTRGRAISMVRAMTRAEGLRIRSGSPETFLRRLAAVDVSPSLAATVEPLCQLIACANDQLRGADLYVRDLVTQDPTIARLTTFPTIGPVTASAFVAALDDVSRFRRASQVASYLGLVPREYSSGERQRRGHILRSAHPRVQALLVQAAWRIWLSTRNETAALRTWARLLARRRSTPIAIVALARRIARILFAMWRDECEYHVPRRAERAPVSMDAAVS

SEQ ID NO: 199923 - protein, 377 aa, unidentified
MKNVRFVGLDVHAESIAVAVAEAGNEVRSLGVIPNRAESVSRLIRKLGKPEQLRVCYEAGPTGYVLYWQLSELGVKCEVVAPTLVPVKAGDRVKTDRRDAVKLARSYRAGDLTPVWVPDAAHEALRDLVRARWAAKRDQLRARHRLSKFLLRQGRRAPEGTNAWTDKHLQWIRSQVHFAYPPQQVTLEDYLHEVDHAAARIERLEHSIDAAIETLPLKMRAVIEALQSLRGIAQISAVSIVAELGELSRFEHPRQLMGYSGAVSREHSSGERIRRGAISKTGNGHLRRIVVEAAWAYRHRPAVGTTLAARQRRSSAPVLELAWKAQQRLHQRYVRLMGRGKCKQLTVTAVARELLGFIWAIGVHVERELQAPVRQAA

SEQ ID NO: 199924 - protein, 351 aa, unidentified
MGVYVGMDLHRKRSQVAVVDDTGAAQRNRNLANDPAQLVPILGVLPPGTPVAFEAAYGWGWLVALLEELELEPHLVHPSRCKAIASARLKNDKVDAATLAQLLRADLLPEAWIAPQQIRDLRALLRHRASLVRLATGLKNRVHAVLADRGISERSSLWTAPGRAWLAGLDLPPIQRAIIQDCCGLLDALATPIARLDGEIAALARPDPRVQALQALPGVGKLTAMTLVAEIGDISRFPTARKLCAWAGLTPQVRNSDRTVRHGHITKQGSRWVRWILQEAAQTAKRHPMFADTYGQLARRRGRNIATVAIARRLLARSFHILTQLEQASLSEKALPGALASLHEPAIRPLS

SEQ ID NO: 199925 - protein, 359 aa, unidentified
MNYIFVGCDSHDKTLVTKIAVNREAAEKKTFSATKTGRRKFVQYLKERAKGGAKVVVAYEASGNGFILCDELRAAGFACHVLAPTKIERSTKQKRNKNDDRDADRLLEILRGHYLAGNRLPSVWVPDVQTRDDRETVRTRQDMSQKATAVKTQIQMLLKRNGEEKPEGIGKGWSKGYRLWLKGMAESGAERVGMKTALGSLLRQLEFLENEIDRLDQAMQQLSDSPRWKPITEALMKEKGVGLNTALKFATDIADFSRFRRGRQIGAYYGLVPSSQESGENNDRKGHITREGSPSTRQILCQSTWARVRHDEKEREVYRRLTARNPKKKKVALVACMRRLSVRLWHVGLQAQLKMKMEG

SEQ ID NO: 199926 - protein, 343 aa, unidentified
MKHIGMDVHSTTTDITVLNSNGKKIYYQKIPTRREELVASIKSIPGKKQVVVEESSLSDWVTRLLEPYATKIIRCQPQYNRLISESEKKCDEEDSHSLAELSYLDKLKGVHHPPQIYRDLREGVRAYWYSSRQVTRAKNRLKAFLLFNGIEKQGKQTYSQRKRACMLDKIKNSSANMKLATIRYWELDAARQSQLEHQRLLRELAKPVQDKVKILKTIPGVGEIVAHTLVAYLEDGRRLPNKRKLWQYCGIGIRRHESSNKGIEGASRQGNRCLKNALMIAVAHILTGCNGDNALWRIWCSQQAARIDPRRTRRNLARKIAVIAQHLLRSKEPYDDERIIMAH

SEQ ID NO: 199927 - protein, 344 aa, unidentified
MGNYKVVSIDLAKKKYHIVAFDQSHRVVLKLPILREDFFSQVEKLFPQKETFAFEACAGCHHLGQFLSRLGHKILILKTKDVKGYAKSRQKNDLNDAIAIGKAALDPELKTVTLKSLEDQRVSYLHKSRQNAIRQRIQRSNSLISSLYEFGYVVGCGKSQFVRSCEMYVQEAFEKGYIDNDLREDMLRDCLEIRGLLLREKELERAIIVRNKNNPVAQILETIPGIGPINASILSHKPLSSYEKPRDFAASLGLVPRQNTTGGEIKLGSITKQGDRYARTMLIQAGRSLVMRYGKPGMPDNDLFRFIDRLKKGGKGYNVICVAVANKLARIAYGCALKQEIFKA

SEQ ID NO: 199928 - protein, 482 aa, unidentified
MKAKQKEPTEKSPGQSSQLNWRQMNRKQRRDLERKIQSADLTLQLVHPDAAGIDIGNESHYVAVPPDRDNQPVRHFGCTTAELRTMADWLKQCRIQTVAMQSTSVYWIAVYDVLEQAGLEVYLVNARETKNLPGRKSDVQESQWLMKLHTYGLLRNSFRPPQEIRRMRTYWRQRNDLVRSAARHIQRIQKTLTQMNMQLANVLSDVSGVTGQAIIKAILAGERDPQKLAAFRDPRVKASERDIAQSLEGNWQEDLLFVLKQEQAAFEFCRKQMAECDCQLEQYLQKMEDRSQGATLPEEKRKDRLHKKKGNQPQFDLQQQLFRMAGTDLTQIDGVDVMTATTILSEAGWDMIKWKDEDHFVSWLRLSPDNRISGDRIVGKGRLPTNNRVTVALKLAASNLRTSQSYLGAQFRRLRARLDTPVAIKAMAAKLARLIYRMLRYGTKYVDHGARHYVIQQRTRELRRLKLKAAALGFQLVRSTAA

SEQ ID NO: 199929 - protein, 410 aa, unidentified
MNIHPRMLYTYVGSDSHKDTHTLVFLNCFHEKIGEITIGSAPSEFPKFLKQAKKYLQPNTSFVFGFEDCSAYGRAFVKFLVERGYTVKHVNAVKVALERGSGEGKTDSYDAECCSKVLINEFDKLPNANPQDKYWTLGNLVSRRNSIVKINVMLKNSLHGIIVEHYPYYKKFFSTLVVLSALDFYEAFPAPYLLDGMNEEDLYQHMKSNCKGRFSTKKALLILDYVKQSDIKKTEYQEVRDFSVRSLIRQIKSNIDEMSAIDEQIEKLMVEFDYPLTSMKGIDTLTSAQLINEIGDINRFKSSASLAKFAGVAPLTYASGMTKLELANAKGNRKLNELTYRIALSAVSPIGPKKMLLNPIFREYYEKKISEGKSVNKAIKCVQRRLINIIYNIMKHNKPYINPEVAYLTD

SEQ ID NO: 199930 - protein, 416 aa, unidentified
MSTSISPPLERYLGSDLHKHYLVIGGVNAKQEVVLPPRRIELGDWPKWAKMHLQPTDVVVVEATTNAWDFYDVTSPLVQRVVVANAAKIALIAKTRVKTDKIDVMVLARLLAAGLIPEVWVPPLEVRELRSLIAHRRRVVGTRTSLKNRLQSVLHRHHLVLPSGDPFSDIHRGWWDTLSVSPTERLHLRHDLATIAQLDTQVAEINDELGRLSCVAPWAAPVRYLIQLPGIALITAMTVLSAIGDVTRFAHAKELVGYSGLGAGVHDSGQTHHTGHITKQGRKELRTVLVEAMWRAVECSDYWQVEFERLTRRMHPTKAIVALARKMLVVIWHVLTEQAADTHANADLVAFKFMVWSWKLTDAQRGGLTTRQFVRYQLMHLGLGQDLTHVVRGGARHLIAPSEEVLALKPELTAAA

SEQ ID NO: 199931 - protein, 319 aa, unidentified
MENNAIKFKMIGVDVAKLKLDIAFDDKHIITIDNQKDSFKQLLKLIADATQVCFVMEATGGYEKPLSNFLLAQGIAVCIVNAKRVRDYAKAIGRHAKNDRIDAQVIRLYAEIAQPKQLELRGTEAHQLEALIKRRDQLIKQRTMEKQHLEAANDADSIRSIKKFIKAFDKEIERIEFNIKKLIETNKALQDLRKQLTQVDGIGEVSISILMAHLPELGQLSNKQISALVGVAPFCKDSGTMKGRRVVWGGRASIRSVLYMATLSAIRYNKPIRTFYQRLVANGKLKKVALVACMRKLLVILNAMVKNGSEWNPDYVKLI

SEQ ID NO: 199932 - protein, 462 aa, unidentified
MTINKLWQNRKERKELARRLRSEDPGLEVVHPHAAGVDVGNSAHYVAVRPDRDSQPVRRFECFTADLNRLADWLKSCGVKTVALQSTGVYWIPLYDILEERRFEVYLVNARHTKNLPGRKSDVQESQWLLKLHTYGLLNNSFQPTSEIRVLRTYWRQRAEHLREIGTCILRMQKALTQMNLQLANVISDLSGVTGQNIVRAILKGERDPRKLAELSDPRIHASKEEIAKSLEGNWRQELLFVLQQEVDMYDVYQKRIAECDQQLQKHLARFADTVPAQTREEAKKKKGKQKNHPQFHLADELQRITGVDLTRIDGIDVMVAQTLVSEVGLDMSRWKTEAHFASWLGLCPDNRTSGDKVLSRGTRHVVNRAATSLRLAATTLLRSQTYLGAQYRRLRSKLGAPKAITAMAHRLARLVYRMLKYGQQYVDKGAEYYEQRNRQQQIEFLRKKASKLGLQVIAANT

SEQ ID NO: 199933 - protein, 401 aa, unidentified
MIDIRDVAVFLGLDVGKGEHHATGLTPDGKSVVDKPLPNSEPKMRAMLDKLTAKYGRVLVVVDQPASIGALPLAVARDAGCEVAYLPGLTMRRIADLYPGEGKTDARDAAIIADAARTMPHTLRSIELDDETIAELHMIVGFDDDLAGEVTRVANRLRGLLTQIHPHLERVLGPRIQHPAVLALLEQFGSPKAIRKAGRRRLITLLRPKAPRMAERLVEDIFTALDEQTVVVTGTDAAAVIVPKLAKNLASLLGQRKELASDIEELLKSHPLSELLTSMPGIGVRTGARILIDVGDGTAFPTAGHLAAYAGLAPVTRRSGSSIRGESPSRRGNKHLKRAFFLAAFASLSDPASRAYYERKKAEGKRHKQALMCLARRRVDVLFAMLRDGTFFEPQAVPQAA

SEQ ID NO: 199934 - protein, 426 aa, unidentified
MFAASVDEDQIIARVAALDIGKAELVCCVRVPAPGGLKRRAQEVTTHTTMTRSLAELANRLVDLRVERVVMEATSDYWKPVFYLLKAHGLNPWLVNARDVRHLPGRPKTDVLDAVWLCKVAERQMLRPSFVPPQPIRVLRDLTRYRIDLVAARTAEKNRVEKLLEDAGIKMSVVASDIFGVSGRAMLAALIAGERDPGVLADLARARMRAKIKLLEEAFAGLPRGGFGEHHRFLLERMLGRIDAIDADIAVLDAEIEAHLAPFGQAVQRLDEMPGIGPVAAAIIIAEIGVDMTRFPTAGHLCSWAKFSPGIKSSAGKSKGNGSTGHGDRYLARVLGEAAVMAGRSDTFLGDRYRRIARRRGKKKAIVAVDRSMLVIIWHLLSDPDTPFHDLGADHYARTVNTEARKRNHIRQLEALGYRVTLESAA

SEQ ID NO: 199935 - protein, 312 aa, unidentified
MAHRVVDAGVDVSKPWLDVALWPTRETTRVSRDAAGLSELASWLTLHEVGRIGVEASGGYEREVIDTLQALGFDVLLLNPLRVRRFAQAKGRLAKNDRADARTIAQFVSVMVDTPQPARRRELDPLVEHLTLRRQLLDWSTDCTNQLEHLKNDGLRATIERQKARFEDVLATIEAKLAKLIAEHDDWSALSRRLRTVPGVGPVLAQTLIALLPELGTLSGRAITSLVGLAPFDHDSGKYAGERHIKGGRSEVRNVLYMAMLSAKQHNPLIAAFATRLAGKKFKVIMVACMHKLLVMLNAMVRDGADWRTNAA

SEQ ID NO: 199936 - protein, 416 aa, unidentified
MDEEVYYERCAGIDAHKKVLVVCLRIGRKSEIREFGTLTHEIRDMVVWLKDSGCEMAAMESTGSFWKPLYNIFEQESLPAMVCNAHHIKNVPGRKTDVKDAQWIAKCLSQGLLNPSFIPDREQRELRDMTRFRKSQIEERARNINRLQKFLEGANIKLGSWLTDVEGKSATRLLELVIGKPDFTLEDVVECMHGNLNSSADELFLSLEGYMTPTQREFFRHVMDVIRQQTTQIEKTDALIKRNLSDNYKAAVKALDTIPGIGEVSAEQIIAETGTDMSRFVTPERLSKWAGVCPGNNESAGKRKSGRCPPGNKTLKSTLAQSASSAKRKKDSFFNAQYGRLVTSRGKNRATMAVAHSLLIAIFHVLSGKEFKDLGADYYTKFNRQKKINSHVKQLSKLGVAIPDDVLRDAISRISA

SEQ ID NO: 199937 - protein, 421 aa, unidentified
MIDAIRWDEKSRSPERDAISSQVIHALEAQENKETGMKKISTTTAKAFRKMEKLTIGLDLGDRSSYYCVLDERGELVLEQKVSTTPKAMEEVFGGMPRSRIALETGTHSPWVSRLLSELGHEVIVAHARNVRLIGESRRKDDRLDAKTLARLARIDPQLLCPVKHRSAKAQAHLTVIRARAGLVRARTALINVARGLTKSYGERLRGCSPRNLNKRAEGLSVELRTALGPLLEEIESLSERIREYNQRIEGIAQEHYPETALLKQVKGVGTLVALTYMLTLEDPHRFSKSRDAGCYAGLQPGRRNSGQSQPQMRISKEGDAYLRGLLVQSAHHILGPFGADSDLRRWGLKLAERGGKNGKKRAIVATARKLAVLLHRLWVSGEVTNRFIVPAGACWLQPHRSVNRLQERKQEIQKPKAEFR

SEQ ID NO: 199938 - protein, 427 aa, unidentified
MYRIAGIDVHKKKLAVVVTDVEVHGEYQFERCWFAANPEQLRQLSQWLAEHQVEEAVMESTALYWKPVWGALERYWQPICQKRESAGPTSGILHLAQAQSNRGPRGRKKDFRDAERLVKRLVADELKLSFVPDTEQRLWRTLTRRRYQLTRARVQLQNQLEALLEEAHLKLSSLVSDRLGVSARRMLQAIAQGETNPDALAGLADRRLRATPAQLCDALGACTELHPVYRRLIKMMLEELKVIEEHTAELNQELATLLRPHQDAVERLAEVPGLGVDSAQQILAEVGAKAATFASDKNLCSWVGVCPGDEESAGESSSHRSPQGNRQMRPLLNQAANAAVKTKGSIFEIVYRRLVPRLGHNQTIGAVAHRLCRLIWLILHKGVRYEERGPAVSQRSRQNRTGKMIRELRMLGYRVEFLNAVPSVPIP

SEQ ID NO: 199939 - protein, 355 aa, unidentified
MNDTKYIGLDVHQATISAAVLDSAGKLVMEAILETKAETILQFIQGLRGSLRVTLEEGTCAAWLHDVLKPHVAHVLVCDPRKNALIKAGNKSDRIDARKLADLLYLDKLHPVFHGETGNRALKELARSYLALTRDTTRVMNRLKALYRSWAIPCAGQRVYAPRYRSEWLAKISEAGVHRRAEIYYHEFDALRSLREQVRRDLLVEGRKHKAMKLLRQIPSIGPIRAALLIALMQTPHRFRTKRQLWAYCGLALKTSTSGEFRIVEGQLKRARKFLAIRGLNTNHNHDLKNIFKGAATRAAAVPGPFQEFHAGLVARGMKPTMARLTLARKIAAITLIVWKKGVDFDAEHLKQQAA

SEQ ID NO: 199940 - protein, 457 aa, unidentified
MVDEAIFILFVQEKKKSFLATMTLINFVAANQKYYAFNLLSVFIMVFWSVQYLLQHLLVQTQVSHQLLQPLILILQLPQTPQFRHARPGKFFLPVNGMDYFLPLRLTVRNVLTRRITMNIVFLGIDLAKNVFQLCGLNQAGKPVYTKRTGRKELLQTLANIPACLIGIEASTGAFYWQREFEKLGHKVKVISPQYVRPFVRGQKNDGNDAQAIAVALMQPTMQFVPPKSPEQQDIQALHRARQRIVNHRTATVCQIRGLLLDRGIPIGSAVSRARRAIPLILEDAENGLSSRMRRTIAELYDLFNDLGRRIHFLDKEIETVFRQSEACPRIAKVKGIGPKTATAVVAAIGKGTEFKNGRHFAAWLGLVPRQHSSGDRQVLMNMTKKGDKHLRTLFIHGARAVVRVATNNNDGHMNQWVNQLKERRGFNKTTVAVANKNARIIWSMLRNDTGYQVVCN

SEQ ID NO: 199941 - protein, 345 aa, unidentified
MELHTIGIDLGKTVFHLVGLDPRGEVVVRKKFSRTQLLRFTANVHVGLIGMEACGGSHFLGRALREQRHEVRLIPAQYVKPYVKTNKSDYIDAEAIAEAVARPTMRFVPIKTDDQLDLQSLHRVRERWVMRRTAVINQIRGLLLERGITLRKGRHHVDAALPLILEDADANLSGAVRLLLTQLKLDLDQLSVRIDEADAVIEKTAHENDACRRLVAIPGIGPVTATALIAAIGNGGAFRKGREFAAWMGVVPREHSTGGQQKLLGISKRGNSYLRRLFVQGARAVLQQRTKQSSGLSAWLAHLTSRTHRNVAAVALANKLARIAWAVLAKNEHYRPSVLADVAAA

SEQ ID NO: 199942 - protein, 360 aa, unidentified
MLYLGIDVHRKQLTVSVRNEAGEVIVRRQVSTEWPRVRAFFTELTERARPEGGYVAMLEVCGFHDWVLKMLTEYGCRETVVVQPTTRTKKKTDRRDAQALSETLWVNRARLAAGQPIRGLRRIQPPSAVDAENRQLTTLRARMKQVRTRTINKVHHILLKHNLHQHCPTKGLATKGARAWLTALKLPELDRLEMDLLLAQWKLWNHQLEKVEAQIARRQKQSPTATLIATVPGAGAFGSLALAARMDNIERFPRPGSLANYWGLVPSVRNSGETTDRLGSITKEGSRLARFVLAQMVLHVLRRDPTMKQWYQRIKRRRGSKIARVAVMRRLATILWHMVKHQEPYQVGGLPRRQLSAAAG

SEQ ID NO: 199943 - protein, 336 aa, unidentified
MKYSGIDLHSNNSVVTVTDEEDRVMAEKRLPNDLATILGFLLPWRDELVGVVVESTYNWYWLVDGLQEAGYRVHLAHCSAIKKYEGLKHSGDEADARHLAHLLRLGILPTGTILPREQRALRDLGRKRMQLVRSRTQHILAVENITARERGARISSEQVKRLSVETIDQMPVPEDVALAVKANVAVIHTLSVQIDLLEKRLQKAVPRTEYDLVTTIPGIGRILATTILLETGPIDRFASPGNFASYARCVDSQHTSNGKKKGEGNTKNGNKYLSWAFIEAAHFAMRYCVEAKRFYERKKSRTNNVVAIKALAHKLARACFHMLKERKPFDVTRCFA

SEQ ID NO: 199944 - protein, 351 aa, unidentified
MMLIGVDYHPGFQTIAFFVEETGEYDERELNHSEGEAERFYRDLQQRGIRVRVGMEATGFSRWFERLLAELGFELWIGDPAEIKAKRVKKRKYDREDARLLLRLMREGNFPKVWVPSPENRDLRQLLWHRHRMVQMRTRIMNQLQALAMNEGKRRKSKLWSTQGRAELEKLALAPWASRRREELLKLLDQLNPSIEELTAAVEQEARKRSDVLRLMTHPGVGPLTALAYVLIVGTPERFQCGKQIGTYVGMIPTEDSSAGKQRLGHISKQGNSLLRYLLVEAAQAATRINPHWRRRYLHLAMRRHKSIAKVAMGRRMAIRLYWMWRNGCEYSPSFEFGSYVGKLEIVHGVK

SEQ ID NO: 199945 - protein, 430 aa, unidentified
MEVIYPKACGVDVHKSFIVAVICDSTSAKPQYLRKRFSTFNNSLIEFRNWLLANDCQNVCMESTGKYYVPVYNALEGHISNVVVANPKWVRCIKGEKDDNKDAKWIADLFKLGIVRSSFIPNKDIRILRELTRYLYKLTNMRTSEKNRFTNALTVGNCKLDMVFSDIFGKSSSAIINTILSQNEYDDEDILKNIDKHCKSSNEDILNSINGISWETAQKQRMNIIQEHIDYLDKAIKSVREIIDSIIAPYESAINLLCSIPGIDRNSAITIISEIGTDMSQFSSHYRLASWAGLAPGCNESAGKKKSVKISRAGVYLKPALVEVAHCAVKDKSNNYYAKKFNLISKRRGKKRAYIAIARKILVAIYHMLSTGELFNPTDASKVETNDKDKIKFTKNNFMQSTKQLLSLGLTIDELQEFITSKISESTPVI

SEQ ID NO: 199946 - protein, 437 aa, unidentified
MMIKLSGSKQLPNIFKGCGSMIYVGIDIAKQKHFAAATTADGEVLIPPFGFSNDAEGFKLLLSKIKSFKKENTLIGLESTAHYAENLICHLFELGYNISVINPIQTSTLRKTNIRKTKTDKVDCLLIIKSMIVNKPRIYSKIDIDSLRLKSLCRFREKIKKAKAKLKIQLVTYVDILFPELQYFFKSGIHTNTCYQLLKEHSSPDDIAALHLTYLANLLQKASHGRFGKEEAFALKGLAKSSVGTGNTAVSIQITQSIAQIELLEQQLADLDRAIESIMLEMDSVILTIPGIGFLNGAMILGEIGNISRFSNPSKLLAYADLDPTVNQSGKFNAKSTKMSKRGSKLLRYALINAAWNVSLNNKTFNDYFNLKRSQGNNHYAALGHVAHKLVRIIFKMPIFRLSKFLSVGIIFLLTIHSWSPLKIAYFYFFVHLLKTF

SEQ ID NO: 199947 - protein, 438 aa, unidentified
MSNKVIFNLDELFISVGIDVGADFSWMSIALPNQQFVAKPYKILHNSIDSLTTAVSKIKEAEELYSLESRIFLESTGIYHYPLFCYLRDKGFNCSVINPIITKNSTNINIRKVHNDRFDSKKAALVGLKPDLKVSLMPSDLALNCRNLCREYYDLMDNRSAYVNKLQGELRMAFPQYLGIFSKVTINTSLTLLETYTSPSAFLQADNQEIIDIIKSTARFGLTYAQNKYNAIIQAATDANQFGYIIDSNIKRIRLYISFIRKYDEEINSILESLHELVDANEDSDFVKQIHLIETFKGAGFLSAVSIMSEIGDFSSFSKPKQLFAYFGLDPAVKQSGKFEGTKVQMSKRGSAIARRVIHTLTLQSISISRNGKAKNPVLREYYIKKCDSKPKLVAMGAVSHKVCNMIFAILRDNKPFKIIAPQEHIKQYNAAKCDIAA

SEQ ID NO: 199948 - protein, 421 aa, unidentified
MKKTGTGKIERVKEDTLIVTIDIGLEMNRGYCTTTDGRDIKPFRFDNTRAGLDRLWSMIVVNKNRFRCDEVIVGYESTGPYGEPIGHYLSKKPVTVVQVNPMHTKRVKEINDNSPLKTDDKDPRVLADIILLGHSLSIVIPEGDAAYLRRLNNSRERHVGERTALLNQLQQLVFLLFPEFRTVIKDIQLKTALYILNKYLTPEIIGGLKKEELGEEMRKRSRGKFRESHAEMLIRLAKDTIGIREGAAGLSMDIRHILIQLELVNRLIAEIENEMEIALGRIPYSSKLLSIKGLGTVTVAGLIGEVGDFKKFRTQSEIMKLAGLDLYEVSSGKWKGRRRISKRGRSLLRKILYYAAMQAIRKNGIMHEYYTRLTGRGMKSMMALVAVSRKLLRIIHAILRDEGEYIVDYESVKGQVIKRAA

SEQ ID NO: 199949 - protein, 384 aa, unidentified
MKVTRIGLDIAKQTFELHGVDQRGRAVLRKTLKRERMLEYFTQLEPCEVALEACGGAHYWHRELSKLGHTVRLVPANKVKPYVDGNKNNAHDAAAICEASSRPSMRFVEPKTVAQQDLQALHRVREVAVHHCTLLANHMRGLLLEYGVTVGRGYPALHRALPELLGDDEQRLSRLLKQLLAQQWRMLKLHQKQVQTYDRRINCIARGETSCSALLKIEGIGPITATALVAAAGKGHQFKNGRHFSAYLGLVPGHSNTGNKTVMLPITRRGNRYLRTLLIHGARSALYAARNKDNPRSLWLQRLKARRGYNVAAVALANKNARIAWAVLRFGETYQPARAHRPERCATPSPRLQRQPQSRLTLKPQGASSQVRNSASSRPALIKP

SEQ ID NO: 199950 - protein, 398 aa, unidentified
MVCFDISKEKLDGYAIHTRTGAPDREITITIERRTDQIEEQLGELASYADKHGLDGLCVVCEPTGGYDEELLRLARQQGHETAYVNTEHSAKMSSVESGDTNKTDPADARAMSLVAQVDRTQAHRALEGEYGLLRELGQIYEDEDRQATRARTRFHHVLKRLFCDYEKSAEFLFESTGTAVMEEYAWDPEAIVQDGYEQFCQKVKSHVKRAQWSTLEALFKQAQRSAKMQWPERYRSVWKRRLKQLWTDYKRHSRRKEQIAERIEQLYLRLQKRGEVPAPFEEITAKQLGRLVGELGPIEDFDVHAAVEKYVGLNLRERQSGDYEGEIKISKKGRPLARKILGQMAHQPITEGRLFGAYYRRKLQEGMRKAKAYVAVMRKILRLIVGLYKSDRPYDPD

SEQ ID NO: 199951 - protein, 339 aa, unidentified
MRYIGIDLHTNSFTLCILEAGCAERIQTLPVQKGGLEILIKDLQPDDEVAIEATGNSTWFREQLLPHVARVLVIAPWQFEVIRRSVKKTDKHDARAIAFFLSKDMIPEARLKSAEHTQLSSLIATRDQLVKLRVSLLNKMHGLFVRHGLKIKKEVLTSKVGFKRAVSSHAWDVLEQVEIEVIADQLESIHQSCARLKTEITSFAKALPGYENLISIKGIGPLSAAVFLCTIGDIEDFAKTGNLAAYLGIVPRVSQSNDSQRVGRITKRGNKIARTTLVQCTLIAKRYSPYLRDFYEHIKKTRGSGKAIIATARKLLNTIFYTLKKKWVFEDFTNFKLKT

SEQ ID NO: 199952 - protein, 407 aa, unidentified
MLVEVVHERCCGLDVHKASLTACVLSSQKREIRSFGTMTDELLRLAEWLRQEGVTHVAMESTGVYWKPVHNILEQGTLELLVVNARHVKAVPGRKTDVKDAEWLADLLRHGLLRASFIPDRAQRELREVRYRRGLIDQRGDVARRIQKVLEGANIKLGDVASDVLGVSGMAMLKALVAGEADPIALAALAQKGLKRKRSQLERALLGSVGAHQRYLLRHQLNQVEFLDRQIADLSQEIEARMRPFEVAIAHIDAVWGLGRRSAEAILAEIGTDMSRFPSEKHISSWARLCPGNDESAGKRRSGWTGKGNRWVKSALVEAAWSAVRNKNTYYAALYHRLSQRRGKKRAIVAVAHSLLVTIYFMLRDGTVFQDLGANYFDRRDREHIARRSVRRLESLGYHVTLTEGAA

SEQ ID NO: 199953 - protein, 382 aa, unidentified
MTEIQMTPGPDNIRNDRMYIALELSNTKWKIAFGNGFKIRLKTIGAREREQFELEVQRSRRHFGMAEEVPVYCCYEAGRDGFWIHRYLCTLGIHNLVVDSSSIEVNRRSRRAKTDRLDAGKLLTMLIRYINGETKLWSVLRVPQKDHEDARRLHREIERLKKERTAHTNRIKSLLALHGVVMEMGIGKTFPEYIEKVVLWNGEHLPSRVKEEMIREYRRYDLIQQQLQASEQEKKEALKRESESSKKVLTLQNLKGIGPVSSWVLVYEFFGWRLFKNVKEVGAAAGLAPTPYDSGGSQSEQGISKSGNRRVRALMIEVGWYWLMHQPKSKLSQWFMERYGQGGKRMRRIGIVALARKLLIALWKYLEQGIMPEGATVKAYFD

SEQ ID NO: 199954 - protein, 347 aa, unidentified
MNFYNSTHQHYCGIDLHARSLYVCIISQQGETLLHKEIPAKPDALIELITPYSDDLVIGVECMHCWYWIADFCDDHDIEFILDHALYMKAIHGGKTKNDSVDSFKVAALMRGGNFPLAYVYPRNMRATRDLLRRRTNLVRHGADMKAHVVNTTSQYNLPSNKVNLKNVGAREQLNTTFTDSVVQRNISLDMAVLECYHRELSQVEWFLEKQAIKHQPAYFYLLKTIPGIGRILALTILYEIGDIQRFESVQKFASYARLIKCKAESAGKTYGTQGNKIGNAHLKWAFSEAAVLYLRGNPGAQQLLQRFQKRMNKAKALSALAHKLGRAVYFMLKNEKIFNEQRFLTS

SEQ ID NO: 199955 - protein, 483 aa, unidentified
MKPKPEEKSKGATNHPTRHHWHEMNRKQKREMMRQIQSEDLSLEVIHPDAAGIDIGNESHYASVPPSRDSQPVREFGCTTAELKAMAAWLKQCRIRTVAMQSTGVYWVAVYDILEQAGLEVYLVNARDTKNLPGRKSDVQESQWLMKLHTYGLLRNSFRPPQEIRVMRSYWRQRNDLVQSAGRHIQRMQKTLTQMNLQLANVLTDISGATGQAIIKAILAGERDSHKLAEFRDPRVKASAEQIAQSLEGNWQEDLLFVLKQEHEGYEFCQQQMAECDRQLQQYLQQREDRSHGAPLPEEKRKGRLLKKKGNKPQFDLREGLFRLTGTDITRIDAIDVMTATTVISEAGYDMSKWKTEDHFVSWLRLCPDNRISGNKVIGKGRLPTNNPSSIALRMAASSLRLSKTYLGAQFRRLRTRLGAPIAIKAMAAKLARLVYRMLRYGMKYVDQGAAVYDLRHRELQIKRLKAKAEKLGYRITPIPAAA

SEQ ID NO: 199956 - protein, 342 aa, unidentified
MGKVSIIGFDLAKRSFQAHGALADGGVGFRKKLSREKVLGFFAEQPRCIVAMEACGSAHHWGRAIGDLGHEVRLIPPAYVKPFVKRQKNDATDAEAIAEAASRPTMRFVAVKSEGQQARAMLFRTRDLLVRQRTQLINALRGHLSEHGVVAAQGPANVKVLEEAVEDQTTSLPLLVVELARVFLDQIEGLSKTIAKLEKVTAQGATCGETTRRLQTMPGVGPITALAIETFAPPMDVFRRGRDFAAWLGLVPRQQSTGGKQVLGKISKMGQRDIRRLLIIGAMAVVRSTLRKGAPEGSWLQRMLARKPKMLVAIALANKMARSVWAMLAKGEDVRVPRVAAI

SEQ ID NO: 199957 - protein, 374 aa, unidentified
MQGITKFVGLDVSRDRIEVAIADSGGGRARLFGGIRHEPEAVRRLMLQLGCAKEIMVVYEAGPTGYGLQRLLQGMGIACMVAAPSLIPVRPGDRVKTDRRDAMRLAELLRAGELVGVWVPGEADEALRDLVRAREDAKQDLLRARHRLQKLLLRRGLRPPEGVRNWSAKYRRWLDSVKIEQPGTRLAFEEYLHSLHEIEERIKRLEAEIHLQATDSVHAPVIQALQTFRGVAELTATTLVAEVGLFSRFDNPAQLMAYAGLVPREHSSGSSRWQGGITKTGNAHPRRVVVEAAWSYRYPSAVKGPLRKRYEGQPAEIQAIAWKAQQRLHRKYVRLVARGKPTTVALTAVARELLGFLWDAARRVEARMPIQAAA

SEQ ID NO: 199958 - protein, 338 aa, unidentified
MTKYNIVFIGLDTHKEFNEGAYIEDQRGAKPVHLGRISSSKLAINRQFESKYPHATLHFVYEAGPCGYWIYRLITSLGHCFYVVAPSLIPKKPGERIKTNKRDALKLAKLLKSEDFTPIYVPEPEDEAIRDLSRAREVAMKDLKDAKYQLKALLLRNNIYYAGTANWSVKHLRWLTELVLPHPAQQIVLLEYIQTITDRLARLERLINELTHYVFQWRYYPVVKAIQAMRGVRLLVAAGVIAELGDLTRFDHPRKLMSYLGLVPSEHSSGGKRHIGAITKCGNGRARRLLVEGAHSYRYTANISTELQKQQEGLPKQIIDIAWKAQLRLCKRYKKTHC

SEQ ID NO: 199959 - protein, 427 aa, unidentified
MAYRIAAIDVHKRMLAVVVTDVEGKGEYQFERRKFGTTPGELHVLAQWLVQLEVEEVVMESTAQYWRPVWGALELFWRPARQQREGAHKMSGTLHLCQAKSNHGPRGRKNDFLDAERMVKRLVAQELVLSFVPDEEQRLLRTVTRRKHQLTRAKIGFKNQLESLLEQGHIKLSSLVSDLLGVSARRMLKALAEGETDPAVLAAMADRGLRATGEQLRDALGASAQLNGAFRRLLKLSLEELEMIETHIERLGQEAMGLLKGHEDVVQRLAEVPGFGPDCAVQMIAEVGLEAAKFLTEKKLSSWVGVCPGSQESAGESQSTRSPKGNRQMRRLLNQAAQSAVKVKGSIFEVTFHRLLPRLGYQQAIWAIAHRLCRLLWLILHKGVRYEERGPAVSAKSKRTRAARMIRELKKLGYRVEGGPLPAVARA

SEQ ID NO: 199960 - protein, 377 aa, unidentified
MSTVRFIGLDVHAETIAVAVAEPTGEVRSLGEIPNRGESIRRLVKKLGPVAQLRACYEAGPTGYVVYWQFTALGVPCQLVAPTLVPVKAGDRVKTDRRDAEKLARCARAGDLTAVWVPDAAHEALRDLVRAREAAKKDQLRARHRLGKFLLRHGRRPAERMTPWMERHLTWIRQSVHFDQPAQEATLLDYLHEVEHEARRIERLERAIDDAIVGAPPRMRAGIDALQALRGIAKMSAVTIVAEVGTLSRFARAPQLTGYAGLGASEDSSGDRHRRGGITKTGNAHLRRVVIEAAWAYRHRPAISGTLRKRQATLSPEVTEIAWKAQHRLHARYCRLLGRGKCPQTAITAIGRELLGFIWAIGCAAEAAPEQRQPRAA

SEQ ID NO: 199961 - protein, 381 aa, unidentified
MTTAATHNEQSNATEATLFVAFELSEKTWKLGFTTGHGQKPRERTVTARQQERVLDEIAQAKRRLGLPDSAPVVSCYEAGREGFWLHRFLQAHGITSHVVDSSAIEVNRRQRRAKSDGLDVRKLLSMLMRYHSGERQVWQVVKVPTVEAEDQRHLHRDLETLKQERASTTTRIQGLLSSQGLRVTSLTKLPEQLDALRLWDGSPIPPGLRRRVLRVYAHHTFLSEQIAAVEVERRTQLQASTDTSIDKVRQLMQLKGIGINGAWLLVMEFFGWRAFKNRREVGGLAGFTPTPYQSGESAREQGISKSGNRHVRWMTTELAWSWLRFQPDSALSVWFRARFGGGGKRLRRIGIVAVARKLLIALWRFLETGVIPAGAVLKEA

SEQ ID NO: 199962 - protein, 406 aa, unidentified
MQGPVITVDVSKGSCHYQPYIEYGKPMRKPKVLHDTIEGFAELNNAIETIKQKSECDIVPVVFEATGVYHRCLQKYLNDNSIPYYIISPLLSAAYRKTKINGNKTDDLDCTHIAKAYYGEDNLLPYERPSDHYELMRSMNRQYELEVGHLRKRKVDFRSTLDIIYPRLDKCFKGNASLYDEVPLELLKRYPHPSLLLKQKEETVIKVVVKKTSHNLKFVSAIVHKMYECASNCYSGADINDYEVITLPDMIEEIQYQMNRCDSMLNQLIEEARKDSNFVCVASIVGIGENLAARIIAELGDISRFKNRKAITAYAGLNPKILQSGDIDGIHLHISKKGNRHLRSLLYLGASCNYRLRKHDPIYEFNQKKRQQSQSPLRHKAANIAAAHKLLVIIYALSRSGELYHL

SEQ ID NO: 199963 - protein, 336 aa, unidentified
MEPTTIAIDLAKRVFQIHYVERVTGAIRSKVLKRAQLVPFFANRPATCVVMEACGSAHHWARVLARLGHDVRLIAAQFVRPFVKSNKNDAADAAAIWEAAQRPGMRFVAVKTEDQQAMLAMHRIRQQLVRIRVMQVNQLRGLLYEFGVILPAGRRASIEAAKVALASMAEQLPTMLADSLQDQISRLRGLDEQIARIEQRILEWRRNNDACRRISEIPGVGVLTATAAVSVIGQAKTFRSGREFAAYLGLVPRQNGSGGKVKLGGISKRGDVYLRTLLIHGARSVISSSRYLPERLRQMLTRRPTNVVAVALANKMARTIWALLAYGRTYQAAPAQ

SEQ ID NO: 199964 - protein, 416 aa, unidentified
MFAVGVDVANGRSMVAVLDGMRNMVAKPFEVVHTAQGFAALVEKLRQLDGEVRIVMEHTGRYYESFAMSMHRAGFFVSAVNPLLIKNYQGSINVRKVKTDKADAQKIAQFALDKWTILPHYTPMDTIRYNLKTLHRQFQLASKTKTALSNNLIALLEQSYPGANRYFDSPVRTDGRQKWVEFVDTFWHVDCVARSSEHAFVERYRKWCKRHGYIFSEQKAIELHADARQKFPLVPRSDTCKLLVREAVSQLNAVSRTVETYRAEMDRLASQLPEYETVMGMTGVGKSMGPQLMAEIGDLRCFAHQKSLVGFAGTDPIKEESGDKVSQSAPSSKRGSPYLRKTLFVIMTILLQLQPQEDPVYQFLDKKRSEGKPYYVYMTAGGTKFLRVYYGKVRDCLKAKGLWEVPASASQEVNPG

SEQ ID NO: 199965 - protein, 413 aa, unidentified
MSSTLIVGIDISSELNAASFIDEAGNRLVKKALFFPNDLDGAQQLVDFTISLAQQFNLSSIKFGMEATSHYAWHLHTFLASSPELAPFNPIFYVINPSIIKSFKGAYIHLPKTDSVDATVIAECVRFGQVKPTPLPDLRYAALQRLTRMRYHIVRSLVREKNRALSLISFKFSTYPSECPFSNIFGKASLAIIENFTPDDIASMPLDDLIDFIVKNGNNRLSDPTQIAKTLKAAANRAYRLHPDLAEANDLALSMTLENIRFLESQLKKLDGEISRQLKAFNQTLTTIPGIGDVLAAGIIAEIGDIQRFNNEAALAKYAGLIWNKYQSGNFNAQDTSLVKCGDQYLRYYLVEAANCVRVHTVRFKEYYNKKYREVPKHQHKRALVLTARRLIPLIFAMLSKGQIYQERGVVSI

SEQ ID NO: 199966 - protein, 352 aa, unidentified
MRKECSTVSFKNQVIYVGIDVHKSSWQVSIRHCRHHLANFSMNPDALKLAEHLSRNYPEAEYRSVYEAGFCGFEIHRSLCGLGILNIVINPADVPTSGKERANKNDCLDSRKLARELENGSLEGIYIPQEDNLVLRNLTRRETQLTGNIIRAKNRIKSHLYFNGLKFRSWSGSSLKIMESDAVKRHDFALCSLLRELRFLRLEKLQVVRDEKECLKFLNREKTQENLQSIPGIGFRTAVVLQSELWDLKRFPDKDHFKSYVGLAPRLVGSGEHEEVKSAGNRKKKQLHYLLIEASWRAVRFNLEYRARYGAILSKGACPQRAISIIAKKLLLSIRAVWIQNRLFVELLPRTK

SEQ ID NO: 199967 - protein, 374 aa, unidentified
MENTITYAAMDTHKKSHTIALHYPCREEIVEFTVNNTAADISKMVKKIKKQAPGEVEFCYEAGVCGFALKRRIEQLGCRCMVIAPSLVPRKPGERVKTDRRDAKKLLVMFKAGLLTEVHAPNEHQEAARELTRLRETAKDNLKRVRHQLLKFLTRHGYVYRQGRHWTQRHVAWLRGLEFTEHMLRQVFEDYFNEMIYCAGRLENLDNEVGLLADSKEYKEVVGLLCCYHGIDTLTAVTIITEIFELGRFESPRHLMSYLGLTPSEDSSGDRQKKGAITKAGNKRIRRLLNEASWHYRHLYVPSAALKKRRKGQPKWAVEIADAAGRRLSKRHRYLINKGKMPCKANIAVARELAGFIWFTVTQYQARKNTVGAA

SEQ ID NO: 199968 - protein, 408 aa, unidentified
MNTLYVGIDVSSKSNVVYLMLPNGDKHSNFSVANSHEGSTLLVKKIYSALTSHSLDTVLIGLEATSVYGDNLVYFLREDATLAPFNRKIHVLNPKQVKKFHDAYNDLPKNDYVDSFVIADCLRFGRINKEVYLGDYRYKALQNLTRARFFAVQNLVKEKQRFMNVLFKKYSTMTQEKVFSDAFSTTALAVYDEFDSAEALANMDLHELTDFIIEKGKNRFPDPDAVAKAIQKAARSSYRLPKTVNDSVNQVLSISITSMKALESQIKEFDKAIKALMELLPNVLISIPGIGPVYSAGIMAEIGDINRFDNQASLAKYAGLAWKQHQSGGFEAEVTRLIPSGNRFLKYYLYEAAFSLVRCDKEYSDFYHLKYKEVNRCQHKRALALTARKFVRLVFRLLKDNRLYCPAK

SEQ ID NO: 199969 - protein, 341 aa, unidentified
MDIAVLGIDLGKNVCSVVGLDDGGRVLVRRRLKRPAVIEFAGQSPGCVVAMEACCGAHHLARQLAAEGHEVRLMSPEYVRPYVKAQKNDDRDAEAIAEASLRPTMRFVPVKSEAQSDLQSLHRARERLITERTALINHLRAVLLERGIIIAQGRRKLEKALPEILADAASGMSPRIHQLIGDLRDEWHMLDRRITSFDAELVSLARTDEAARRLASVPGIGTITATALVAAVGDGSAFGRGRDMAAWLGLVPRQATTGGKPRLLGISKRGNRYLRKNLIHGARSVLPYLVRRDTPLGRWVMGLMTRAHKNTVVVALANKLARIAWAVLVRGRGFDPAHVGA

SEQ ID NO: 199970 - protein, 400 aa, unidentified
MIHVGVDIGKSKHAAAAVNDAGACVMRPRFFTQDAGGFASLFGALEGQGGAASVVVGMEATGHYWKVLRHALVARQYRVDVINPLITSREASADVRGRKSDKLDALAIANVLRKGGYSPAPGELAATDTLKVLARHRKALVARGSDAKRRLISALDVAFPEAAKTLGDLFGAASLAVVRAFPSARLGAAADIRTLTSLFAKASGGQLGREAAEAYREAARHSLSLAMDTKGEEFVITQIVDEIRAAADQIDEVERRILAEPQPIIARLLGSIKGAGKIQPMAVAAELGDPSRFAGPDMAKKVLAYAGCDPRVRESGKWKGRAKMSKRGSPTLRNALYLLAGTIRLHTPYFNAVYKRQVAMGKHHNVALSHVVRKIVEVMCGMYKTNTPFMPQQPEVTPCS

SEQ ID NO: 199971 - protein, 593 aa, unidentified
MSLMTEPAPKRTGSPTTRIGVGIDTSRYGHYAAFLRDDLQPATAELSFAESANGYSQFRQRLEGLADRHPAASFIIRLDVAGPYADNLLHFLHHLADRSASTASPLAGRDITVSCGDPLRNKNYRAAFFAARKSDAVEARAAARFAISERPAGTSLLAPALRVLRQTATRLQAVVRQRTRLINQLHYLLVPAFPELALIVKDISLGWVLELLHRYPTAALLAKADDADLADIPYLPEQRIAELLAQARSSIASLEGSTIAELVRDQVRQLRDVNARQQRLEGILVTAYRGLPKANHLNSIKGIGEVTAAVLTAFILDIKRFATPNKLVAYFGALPIEMSSGIDREGQPRSSRRYVMSKRGNDLVRRYLWMAALSAVQCNPAVRALYRRVVVKHPEHKAIAIGHAMRKLLHLVFAVWTTDKPFDPNHHPWEGPTGGVAPAGTSESGAKGSEQAAGHKPESKPAEEVVTATCTVKVAAAASIGEGTYIDFGHVKQQLPLERVLVHLGLAQRLRGSGPQRRCACPIHRGDGRSRTFSVNLKDNVFTCFDARCGKQGDVIDLWAALHHLDLRGAAIDLIRTFNLEPAPAPRTEKRNG

SEQ ID NO: 199972 - protein, 351 aa, unidentified
MVTAGIGPHKHVHIAVAVRAEGRPIGKPLTVKNDAVLIITLLKWIRSITDGTATWAIEDGRGFARRLADGLLLAGQEVVWVPSRLTAAHRKLHAATGAKSDPVDATAAAHAAIATPDLDRHRIDEHVRELRVLVDYRADLIKRRTMVINQLKAQLHVWLDHTPQDLTRAKNLAMVTTLTSTAQLSPHVRRALAGMTAEIAALNRQIRDLDTTIRQLVSPLAPTLLQVTGISYNSAAVLIAEIGDITRFPSSARLARYTGCAPIPVYSAGQERHRLHRGGNRRLNSVLYTTAIVQKRFSPAAQQLLAHHGPAKGTRGARRILQRHLIDVIHRAMTADQATWQHHITRHHNAA

SEQ ID NO: 199973 - protein, 312 aa, unidentified
MDKPLTFVGVDVSKDRLDVHLRPSGEHFTVSHDEAGVAALVERLAALAPALVVLEATGGLEVAPAAALAAAGLPVAIVNPRRVRAFARATGRLAKTDRLDAEAIARFAEAVRPPARPLPDEATRRLGALVARRRQLLEMLVAERNRRHAADPSLREGIDAHLRWLGEALDGVERDLDEAVRASPVWRTKEELLRSVPGVGPVSARTLLAELPELGSLTRRQAAALVGVAPFNHDSGKMRGKRAVGGGRAALRACLYMAAVAAVRAGNPAVAGFYGRLRTAGKPAKVALTACVRKLVVTLNAMLRTGTAWKPA

SEQ ID NO: 199974 - protein, 375 aa, unidentified
MKEKVRFLGLDVHAETIAVAIAEPDGEVRSLGTIANREESIRKLIKKLGPPEHLRACYEAGPTGYVLYWQLTQLGVECVVVAPTLVPTKAGDRVKTDRRDALKLARSHRSGDLTAVWVPDGDSEALRDLVRTREAAKQDQLRARHRLSKFLLRTGQRPVVGMKAWTEPYMAWVRQVRFERPAQQATLQDYLHEVDHMVARVKRLEQAIAEAVKLASPQVQEVVRGLQALRGIAEISAVTIVAELGQISRFDTAPQLMGYSGAVPSEDSSGKRKRQGSITKTGNAHLRRIAVEAAWSYRHRPAIGPKLRKRQEGVPEPIKEIAWKAQIRLHKRYMKLTAAGKDRRKIMTAVGRELLGFIWAIGVKLETPVKQQIAA

SEQ ID NO: 199975 - protein, 378 aa, unidentified
MQPTQRDDRNPALEVSLELAGKSWKLAVSHAGRANPAIVQVNATGLWERLQQLLQQLNEFRRRWRLAADCPVVLIYEAGQDGFWIARALQAEGIEVFVVDAASIPVPRHARRAKTDRLDAIKLLQVLRNWLRGERGEVRMVHIPSEAAEAQRLLTRERGLLQKEVQQHVDRIRKRLRLYGCTEELDAQFVERLTAGEVRHADGRPLPEELWDWLMREWERLELARKQLGCLEKTLFHQLPEQVQQTITLLARLSGVGWVGATRLVLELFWRDFANRREVGACVGLVPQPYDSGDSHSDQGISKQGNARVRSLLIEMAWMWLRHQPDSELAQWFARRTAGPSKRGKRIAIVAVARRLAIALWRYLRDGEIPAGARLKMA

SEQ ID NO: 199976 - protein, 335 aa, unidentified
MLYIGLDAHQSTSSICILNENGKRVKRQTVHGFFPKVMEELRKVGEPFEICFEASCAYGYLYDELQKIARRVVVAHPGQLRLIFRSKRKSDRVDAEKLAKLLFIGEVPEAYVPSINVRNWRRLIEYRRRLIDKRTRCKNAIRALLRSHGVRAPRNLWSRKGVAWLASLEWPNLAAEVQRELLIDELAMFERHIRKVTKALDEMGFKHPAVVLLRTIPGVGARTAETTAAYIDTPSRFSRAGQVASYFGLIPCQDSSAGLNRLGHITKQGPPTARKYLVEATWQAIRRSPKVKAYFTRICGEKQDRKKVALVATSHYLLRCMWAMLLHGEPWREAA

SEQ ID NO: 199977 - protein, 320 aa, unidentified
MASRESLFIGIDVSKQTLDVAFGADPHAPRETIPSTDEGVQLLVTRLQRLQPTLIVLEATGGLERMVFAQLLQAGLPTARVQPRRVRALAHAEGRQAKTDRLDARLLARFAERVRPPHHQATDEQRASLRDLLVRREQVIQMRTAEINRLTAAAPNLRPGIQQHIDWLDQEIRALEQERDNEAERTDEVRRKRELRESVPGIGAITALNLLLRLPELGTINRTEAAAFVGVAPYANQSGAQHKPRHSSGGRRDVRSVLYMATLAATRRRLVRRAFDQRLCQAGKPRKVAIVAAMRKLLTILGAILRQQKPWDPAVHTSAP

SEQ ID NO: 199978 - protein, 345 aa, unidentified
MQTMYYIGLDVHKRTISYCVKDGSGTIHGEGTIAATRFDLDRWMKALPQPWTAAMEATVFTGWIYDHLQPHATALKVAHPLMLRAIAAAKKKNDRIDASKICDCLRCDFLPECYMASTAIRERRRTLRYRNLLVRQMVQMKNKISGLLMEAGVNYNKQRLHKAGYFRELLATNPDIDEGLCSLLRLCRETVVRLGKTESALVRSLERDSLLMERVERLMTIPAVGPITALTWALEVGDAKRFSSIKKAISYCGLCGAEKSSANTVQRTPLSKQRNKHLQTTLIEAAKMAPRNSPELAMLYDKEKQKGNANRATLAVARKLVAYLMAVDRGQRNFQVVETSNGIAA

SEQ ID NO: 199979 - protein, 342 aa, unidentified
MYYAGFDVASKGSFFYVRDRKGNKVEGKEIATNRRGISEAFRKYRGKKIIVAIETGGSTRWIYDLLTRMGIEVYVVNPNKVKAIADSKRKTDKIDAKILSELLRIDALPEKVYMPEDDDRYLRDLMQARQAIIKGYTNLMNNLRGLLRQEGYSIKTRGLKNTNYFSIIAKLNLPGHIKEILKRHKSSIEAMLEQKNKLEESIIKRYKNDDIELIKTIPGMGEISSRTIQAAIGEIKRFKRAKQLTSYCGLVPSVRSSGERTEHGHITREGRSEVRRVGIQSAHAVLRSKSMESAPLRRWHANIARRRGYKTALVALARKLVTIVFYVLRDKKEYDYTLLRVA

SEQ ID NO: 199980 - protein, 358 aa, unidentified
MTYYAGLDVSLEETAICVVDGTGAIVKEVRAESEPGALNDALKRLGLALQRVGMEACSLTAWLHDGLAEAGWPAFCIETRQANAAMKTMPNKTDRNDARALAQIMRTGWFRQVHVKSHQSRRWRSLLVARRTVLNHMRSIENLVRAISREDGIKLGTPSRKDFTARVREMAGTEPELMAMLEPLLAVLASMMEELGRLTKRVLDIVRNEATCRQLMTSPGVGPITALTYRATIDRPERFARSRDVGAHLGLTPTRYQSGETDIAGRISRCGDELARTGLVEAAHTLLVRSKKWSSLRVWGLAIAKRRGMAPEPKSQWPESSPSSCTGCGSTAAISASAGRPWPETEDIERLALVRPKG

SEQ ID NO: 199981 - protein, 338 aa, unidentified
MSAIKVIGIDLGKSTFHLVGHDYSGREQYRHKLSRSKLLQFISVHEPTLIAMEACCGAHWLARKCQEYGHQVKLIPPQYVKPYVKAHKNDFIDAAAIAEASTRPNMRFVSPKSEQAQVGVVIRRVRTGYIRERTATMNRIGSMLIEFGISFPRGHANMKKLFQWLADNKEPIPPLLVQELQNQLDYYNQLNERIKEQDRKIEKLSSEDELYTLLQTIPGVGPMTASCCLSCVGKPSDFSNGRNFAAWIGLVPFQYSTGGKQRMLGISKRGNKELRELFVHAARAVMWREETAERYFGSWLLDLKRRKPFNVALVALANKLARIAWSVMTSHKPFELRV

SEQ ID NO: 199982 - protein, 345 aa, unidentified
MKKRIEGVTVYGIDIGKNSFHIVGLDSAGKPVLHTKFRRDRLLDHFANTPAVLVGMESCPGSQWLARKLQASGHTVRIIPAQFVKPYVKSNKNDMVDAAAIAEAVTRPTMRFVQVRQPEQCARQALHRVRDRYMSQRTGLINQMRGFLLEFGIAVRQGAGVFRMDVPRVLGDEQNELPPSMRSLLADLWNDFKLLEIRIEELSKQIQRSVQYSDTARRLMTIPGIGPLAASALEASAGNGHQFINGRYFAAWLGLVPRQYSTGGKTTLLSISKRGNAYLRRLLIHGARSCVQTCDPQRHPLGAWITKLEQRMHRNKVIVALANKIARVAWKILTKPEEIYHWSEA

SEQ ID NO: 199983 - protein, 310 aa, unidentified
MQACVGVDVSKQHLDWVLGGEDSPERVTNTSAGIRSLVAKLRRTNAALITVESTGGYERALVEALAKADLPVVLVNPWRVRRFAEGLGVLAKTDPIDAQILALYGERARPTRRPLPGPTQRQLADLIRRRRQLIAMVTAEKNRLDTATAVIQRDIRALLKLLERRVNKIDERIDAAIAADPEKAENWERLQSTPSVGPGVARTLIIDLPELGALDRKQITSLVGLAPFSKDSGRKTGQRRIRAGRAAPRTALYLAAMNGARFNPVLKEMYSRLITAGKPPKVALVAIARKLLTILNAMVRDETTWQQATR

SEQ ID NO: 199984 - protein, 412 aa, unidentified
MTVTNQFAAHVGLDWADKKHDVCVQFKNGERVFDVIEHTAEALDAWLTELYQKVKGRIAIALELKKGPVVYALQKYPFITVFPVHALSLARYRQAFSPSGAKDDPQDAELALELMLRYPQKIKAIEPDNADIRLLQQLVEQRRQLVEDKRRFVNRIINTLKQYYPQPLEWFSHRGSLLLCELIIRWPSLQQLKRARRDTIRNFLNAKGGRAMALTEQRVASIDNAIPLTTDPSVIEANALMAAALATQIKVVSEIIKTYDERIETLFDTLPDAGLFKSLPGMGPCMGPRMLAALGDNRDRFNSAEEIQNYAGIAPVTERSGQKSWVHWRWQCAKFVRQTFVEWAAKTVNSSYWAKLYYQGLREKGKSHQSAIRALAFKWIRIIYRCWKARTCYDEAKYLLALEARHSPLLKP

SEQ ID NO: 199985 - protein, 280 aa, unidentified
MENDSTLYVGLDVHKDSITVAYALGNDEVELLGKIGTTQADIERLCKRLQSKARRVCIVYEAGPCGYGLYRELVQKAFDCMVCAPSMIPRKPGERVKTDRRDAAKLVRLLRAGDLSAVYVPSVEDEAFRDLARAWVSAKDDLKRARQRLKAFLLSHGVRYAGRADWGPAYRRWVSTYAFASAWQQLAFEEHRRSIEDRLTQCERLEAALREAVVEWRFYPAVLGLQAMRGVQFTTAVGMLAELGDLSRFVHPRQLMAWLGVTPSERSSGGKRHLGVSGSA

SEQ ID NO: 199986 - protein, 392 aa, unidentified
MQNIEDCAERTGTEPHAWETGLMDNITYVGLDVHKATISVAVAESGRNGEVRQVGVIENRVEVVLKLAKRLNEGGRRLSFCYEAGPCGYGLHRLLSRCGHDCVVVAPSLIPTKAGDRVKTDRRDARMLAKLHRAGELTPIWVPDAAHEAMRDLVRARATAGRVLSKARQHLQSFLLRHEWIYRGTRAWTLAYRRWLTTVRLDHPAQQIVLQDYIHAVQDAEARLARLTGQIEELLPNWTMAPVVKALQAMRGVAQIVAVTVVAEVGDFRRFTNARQLMAYLGLVPSEHSSGGSTRRGGITKAGNVLARRVLIEGAWTYRMSARISRKLHDRNEELPTVIRDIAWKAQVRLCGRYRRLAAAGKAKVIVTTAIAREMVGFIWAIAQIAQPAFAG

SEQ ID NO: 199987 - protein, 402 aa, unidentified
MRRCIGLDVHREFAQVAIWEDGVIWQAGRIELTPEALRDFADSLCATDEVALEATGNTYAIARLLERQVGRVVISNPQKTRAIAEAKVKTDKVDAAVLAGLLAADYLPSVWLPDDATFALRRQVTRRAHIVRQRTRLKNQVQSILHRNLIPRCPAADLFGTKGRAWLAAQDLPPDEQQAVGALLRQLDFHGQELRIVDAELGRVALEHAEVRRLLTIPGVDATVALAIVAAVGDFGRFSSPQRLVSYLGLNPRVRQSGGQPAQHGRITKQGRAHARGMLVEAAWAAAKTPGPLRAFYERVRARRGMQVAVVATARKLATLCWHLVVGDQDYAFARPSLTDKKLRALELRAGMPPRRGQKGTAAAYSLKEVRRRERALTEQAEAAYRQLVAGWQPKRPATKPR

SEQ ID NO: 199988 - protein, 332 aa, unidentified
MNAVSTVGIDLAKNVFSVHAVDSQGTVVARRTLSRAKLGELIAQLPACLIGMEACSGAHEWARRFAACGHTVKLMAPKFVTPYRKSGKNDGNDAEAICEAVARPNMRFVPVKSIEQQSDLSLHRVRQGFVEERTATLNRLRGLLAEFGHVLPVRTSEVRRRVPQLLGKLPTRVAACARDLLEHAARLQAKALEYEQEIKIHVRSNALACRAQTRLGIGPITASALVATVGNGHDFKNGRQFAAWLGLVPRQYSSGGKTRLGHITKRGDPYLRTLLVMGARAVLQRAVSLTDPLSRWAFAVRERRGYHRACIAIAAKNARVAWALLAKEPVAP

SEQ ID NO: 199989 - protein, 428 aa, unidentified
MRFVGLDVHQGFCEVAIREDGKTRSAGRVETARGTLELFARSLGPTDEVVMEATGPAMEIARIIAPHVARVVVANAQEVRAISHARVKSDRFDARTLAELLAAGMLEPVWVPDAATAGLRRGVARRAALVRQRTRSKNEVHATLSRCLLGRSPFSDLFGKKGRAWLAAQQLGIEESETVAGCLRQIDFLDAEVAAIDRKLSEWAVGSEDVKRLMSIPGVGAGVAVTLMAAIGDISRFSTPRQLVAYLGLDPKVRQSGDEPARHGRISKRGNAQARSVLVEAAWIAMRQPGPLNAFGERIRARKGSQVAAVAVARKLTCLCWHLLTKGEDYAFARPSLVRAKIRQTELRAGAAPHSTRHDGQRISASAAERDAERELVQRAETAYRQLIADWQATGPAKAGAGATRGRAPSRPPKRQATRQAPAQTPAL

SEQ ID NO: 199990 - protein, 362 aa, unidentified
MTNFIFAGCDLHEETLVNRIAIGQQPSERKTVGNSRAGREKLIAGLKRESDKHGGARIIFGYEASGEGFGLHDQMVEAGIECYVLAPTKMESSVKQKRNKNDDRDAERILKRLRAHKLAGEELPSVWVPDLQTRDDRETVRARQDLGDKLSSVKVQLRSLLQRHGIEKPTGVGKPRTKSHQQWLEQLSGDSQLGVGVRTALGSLLRQVRHLEQEIQQLDEAVDQLSRKPHRQAVVDALDQETGIGRLTATAYAVEVADFTRFRRGRQIGAYWGMAPSSDESGEVNDRKGHITRQGSPRIRKLLCQATWYRVQKDPQVRAIYQRLVIRNPKKKKIAVVACMRRLAVRLWHIGRQAQLAMKEAK

SEQ ID NO: 199991 - protein, 498 aa, unidentified
MKNRSVQVLPPEYNPSGGIAPHGARSGKSYLTKVTPSSPARAAAPVSKSERTIARQAPGIRLTYDSATMPKEKGKTMKEWQIITHYTGFDWARDHHAVVIVNQQGQIVADFEFEHTQAGWKTFRDKTAAFPNLAVALETNQGAAVNQLLQASYTVYPVNPVAAKAYRQRKAPSGTKTDHLDGGSLADALRVDGQGWRALQPTDPLTVQLRLLCQDEVVLICQRTLLVNQLQQALVEYFPAATEAFDDWTLPACWDFVIQFPTPESLVKAGKRRWEKFLHAHRLWRPATADKRLEIFARADQFAGSPPIVQAKSRLALSLCKLLRTLQQQLDEYRKQIEDLFGRHPDHDLFGSLPGAKQKLAPRLLAAIGSDPARYANAVSVLQAYAGTAPISFQSGQRNQVKMRWACDTFMHHTVHLWADCFRHASSWGQVYYQNKRHAGMSHACALRCLGQRLLKIVFRMISDKKPYDAELHARNQQKHGSWILTLANKTSAATAGE

SEQ ID NO: 199992 - protein, 419 aa, unidentified
MFKIIRFNCCGLDVHKTWIYACIGITDTNGRTEYKESRFKSFSYGLRNLTDWLAKYSCTEVCMESSGKYWIPVFNILEKSCKVTLAHPKYTKPQKGNKTDRKDARWICDLFMCGMIKPSFIPPAQIRQLRDLIRYRFKLTNMLTGEKNRALNCLTVSNLKLDDVFTDVFGKSSRSIISFILEHPGETFDVAPFIDRRCKTPVEEIQMAVDGAVCPEQALKLRQCLKHIDELEAHKAEIESEILTIAERYKDSLNLLFTIPGLSANPMTAIAIVSEIGSDMSVFPTAKHLASWAGCCPRNDKSAKHVKSTRISQAGNYLKPLLVQVANALIKSKKHTEFRERYQRLKARRGHKKAIIAICRMLLTAIWNVLSKSEPYCSDGFIDHRPVHESKVLTTSQALHLLKMRGYTIKDEPPVPDSA

SEQ ID NO: 199993 - protein, 352 aa, unidentified
MDTSKKTIMIATLWPGEQVPVTERIANEEAAIRRFFGRLGDSSALRSCYEAGPGGYDLYWLLDSTGVACDVVAPSLIPKGGSDKVKTDRRDACRQARLLRAGELTAVRVPTRAEEAVRDLVRVRAALLADRKRAQQRLTAALMRHGCIWTQGSYWTAAHRAWIAAQRFSEPALAAAIAHYRGALDTRETELAAIEAALAPWALREPLAGPVARLGCYRGIAELNGLTLVSEIIDWRRFACARAFMSYTGLVPSEYSSGERTRRGHITKAGSEPVRTALTEAAWAYQHAPAIGATLRRRQAGADPGTLARSWKAQRRLYARYRALTGRGKAPAEAVTAVARELAGFVWAEMTA

SEQ ID NO: 199994 - protein, 411 aa, unidentified
MEVFCGIDWAEDHHDIAVVDRDGKLVARRRISDDPAGLAGLLDLLAEHGDSADDPVPVAIETPRGLLVACLRATGRPVYPVNPMAVARYRDRHSVTGKKSDHGDSVVLANVLRTDMGMHRPLAADSELAQAIAVLARAQQDAVWDRTTAHNKLRSHLREYFPGFLAAFAAARGGITRPEARAILAAAPTPAAAAALTLAQLRSLLKKAGRSRGIDTEATRLRDAFRIPQMRQLPLIEQAMGQQTLALLRQLDAACASADDLEQAAAASFNQHPDAGIITSFPGLGPLTGARVLAEIGDDRSRFQDAKGLKAYAGAAPITRASGKTRSVTRRKVKNNRLAAAGYIWAFSALTASPGARGHYDRRRDAGDKHAGALRNLFGRLTGCLHHCLITGQHYDEATAFCATTKQPAAA

SEQ ID NO: 199995 - protein, 344 aa, unidentified
MDTIGLDLHKRESQLCIGHDDGTVTEQRIATTRERFTAVLGGRPRARILLEASTESEWVARHLESLGHEVIVADPNFAAMYATRARRTKTDRRDARTLMEACRLGAYRVAHRLSDARRHVRAELAVREALVRTRTRYIALAKALVRRDGLRVPSSDSHLVAQRIVALELSASLAGELLPLFEILAPLNEQIAAADRRIAMLTKDDAAVGLLTTAPSIGPITAAAIVATIDDVTRFHSAHQFEAFLGVVPSERSSGEKRRIGRITKAGNARARYLLVEAGWRILRAKDAETEALRAWAMNIAARRGKRVAVVALARRLAGILYAMWRDQRPYDAAQLRLPRPRAA

SEQ ID NO: 199996 - protein, 343 aa, unidentified
MEHYAGIDVSLECSSVCVVDATGRVAREGKVASEPEALIGWLGALGLGLAQIGLEAGPLSQWLFAELRKAGLAVELLETRHVRDAFKAMPVKTDRNDARGIAQLIRLGWFRPVHCKSMGAQETRALLTARKLVQSKLHDVEMGLRGLLRGFGLKVGAIAPRSFEGRIRELVGGHSSLEVIAEALLAVRTVLLREFNGLDKRLRTLARHDARARLLMSAPGVGALVSLTFASAIDDPGRFKRSKMVGAHFGMTPKKYQSGETDITGRISKSGDKSVRTALYEAAHIILTKPVKGCAALKSWAMRLAKRAGLKKAKVALARKLAVIMHRMLVDAKPFHCTAAAAQ

SEQ ID NO: 199997 - protein, 376 aa, unidentified
MKDDSTVYVGLDVHKESITVAYAIDAVEVESLGKIGTTQTEIDRLCKRLQSKASHVRVVYEAGPCGYGLHRQLTQRGFESMVCAPSLIPRKPGERVKTDRRDAAKLVRSLRAGDLTAVYVPGVEDEAFRDLARAWAAVKEDLRQARQRLKSFLLAHGVGYTGRANWGESHRRWLSEYSFANAWQQLAFEEHRRTIEDRLVQCGRLEAALRDAVVNWRFYPVVLALQAMRGVQFVTAVGMVSELGDLSRFTHPRQLMAWLGVTPSEHSSGGKRRQGSITKTGNSYARKLLVEAAWSYRHVARIAPEIQRRHEGLPKAIIDRAWDAQLRLCRRYRKLVARGKNANIAVVAVARELAGFIWDIARLAMALALPRSVQST

SEQ ID NO: 199998 - protein, 347 aa, unidentified
MGKSITDLSSVTTVGLDLAKHVFQVHGVDASGRVIVAKALRRKDVLAFFAQLPECLVGMEACGSAHHWARELIKLGHDARMMPPAYVKPYVRRQKNDAADAAGICEAVTRPSMRFVGVRTLENQAALMHHKLREMLVAQRTQLINALRGHLAEIGVIAAQGLKNARELAWVILAEGDETIPACVRAALAPLVRQLHALDQELARSDQTIAAMARDDEMARRLMTIPGLGPVTASAMATSVQDVSVFSGPREFAAFLGLTPRQNSSGGKERLGRVSKMGNRYLRKLLVVGAHAVLYHRKPHDDALRSWAKKLMQTKPFKLVAVALANKMARIAFAIMRGKTSYSAAPA

SEQ ID NO: 199999 - protein, 316 aa, unidentified
MAKQLESIIVGVDTSKAKLDIYRADTETSHVINNDQDAIESFVKALPAETLIAIEATNRFHESFVAAALARNLVVYVVDARRLSHYRTAVGVRAKTDLNDAVLAARYLAAERHNLRPFVAQNPEATQVWQLILRRSKLVKARTSIKQTLANLDVVIDDVAAAMEALDKLINTLEREAYKLATQLGWREDIARVQAMPGVGRLTALALVLVFHRHPFRSADAYVAFMGLDVRVRDSGKFKNKRKLTKMGAPEFRRLLFLAGRSARLNTPEVFGECFERQIANGKSKTAADITVGRKIARIAFSLLKNETQYQPKMAA

SEQ ID NO: 200000 - protein, 418 aa, unidentified
MKRERNTREAEERYIGLDVHKHYITVGGMNEKQEIVLRARAVEMERFKTWAGQNLRETDEVVLEATTNTWDVYDTVAPLVKRVVVAHPAEVKQIANSRVKTDNQDVIRLIRLLIADLVPEVWVPPVEVRELRALISYRWRLVKMSTAIQNRMHSLLHRHNLPAPQGKIDTGENREWWEQLKLSELETLRLKQEIKTLRLVREHIAEVEKELGRLSTSERWGNQAVYLMQIPGVGIIVTMTILSAIGDIRRFESPKKLVGYAGLGAGVHDSGQKHREKGITKFGRKELRWALVEASWQAIRSNPRWRAEYDGLRKRKHPNQAIVAIARKLLVTLWYLLNNQTTYKHSSDEDLAYKMLTWAWHIDKTALNGMTNQQFAKYGLMRLGKGEHLTRIVRGGLPRRIASQEEVLALKPDLQPPQ

SEQ ID NO: 200001 - protein, 394 aa, unidentified
MPERQGTLMPRKTSSPASPESFSLLAQETLYVGVDIGKRAHVAGFLSVTLLTRHQRFEQCPALSFDNSREGFRSLIDRIQTFVPLTQVQVLLEVTGHSHRALMHYLQDLDIPVYIIHVQKRREGLLKSDKRDALGLANMLFNQLEKGIQVDDPLQAVRKLAPPTEAAAQLRGMVQHHAELVRESTQRKNKLTSICDELFPELTRLLRNPNLPTALALRSRFPTPSDLALASFAELRAARGRTCSVSDAKLVELQRLAAHSIGAKDPARVHALVFEQKQLIAELNLLGDHLQLLEAEIIQVVEHSREGKILTSIPGIGPQAAATLIATIGTIANFERPAQLKSYFGWVPKVAQSGSSLDWTRLSPRGVRQMKQTMYLIVWRAMQWDSDWKEIYER

SEQ ID NO: 200002 - protein, 458 aa, unidentified
MSRNKSSDKVRATMAMVHPNAAAIDVGATMHMAAVNADRTAEAVRSFGTFTTDLHRLVDWFAECGVDTVVMESTSVYWIPIFELLDARGFAVFLVNARDAKHVPGRKTDVSDAQWLQRLHSFGLLRASFRPKGQIAELRAYLRQRERLLEYGASHIQHMQKALTEMNVQLHHVVTDITGATGLRIIRAILGGERNPAVLARMRDRRCHATVETIEKALAGNYRAEHLFALEQALALYDTYQQKASACDARIEAVLKELSICRGRKAGPLPSPRQNRSRQQNSLLFDVRAALYALLGKDLTQINGVGPYLALKLIAECGDDLSAWPSAKHFTSWLCLAPSNKISGGKVLSSRTRRSGSRAAALLRLAAATVGRTDTALGAFYRRLSARIGKAKAVTATARKIAVLFYNAVQHGMEYVDPGASSYETRYRARVIDNLHRRAKAFGFVLEPIDPTPGIAVS

SEQ ID NO: 200003 - protein, 427 aa, unidentified
MSYRIAGIDVHKRMLHVVFSDVQVDGEYNFTRRVFGSLPEALRSLAAWLVEQQVQEVVMESTAQYWKPVWGTLERYWKPICHTRKGALATSGTLHLAQALSNRGRRGRKKDFRDAERMVKRLVAHELVLSFVPDVEQRLWRTVVRTKYQLTRNRVQLQNRLEALLEEAHIKLSSLVSDLLGASARRMLGAIADGETNRETLAALADRGLRATQEQLQDAFGVCQQLNPVYRRLIRMVLDEVASLDKRIEQLNQEVANLLRPHEDQVKRLAEVPGLGVDSAQQVIAEVGATAATFPSEKHLSSWVGACPGDEESAEVNRSRRSPQGNRHMRRILNQAANAAVKHKGSIFEILYRRYVPRLGHNQTIGIIAHKLCRLVWKILHRGIRYEERGPEVSKASKQKRTRKMIQALRRLGYRIEPSPSQSAIRA

SEQ ID NO: 200004 - protein, 383 aa, unidentified
MRAVCGLDVHKDTVYLCILCSDGEIIERVFGVLTFQLRDMRRLMQSHGVTEVTMESTAMYWIPIWRMLEPHFRLKLVNPYFIKQLPGRKSDVKDAQWIAECTMKDLVRGSFVPPERIQQLRQYDRRIFDLDAEIVRKLSKLDGIMQRCNIRLSNYVSNTDTKSYKAVVDMLCEGITDAEELIRKVHGRIVNKHGREIILASLTGVVSDAEKDTMRQLREEIALAETHKRECLDKMLQICRTYYPNELRRLMTIPGIKERAATSLIAEIGVDMTKFQTAAHLASWSGLKPRNDVSNGKFKSRRITHGNAYLRKTIIECAWAASRTKDCFFSRFSYHQTVVRKKNKMKVLVAVARKLLIAVWHVLHDATDYVDFNPDCKSPANNG

SEQ ID NO: 200005 - protein, 346 aa, unidentified
MDKLIRIGMDTSKSVFQLHGVNEAEQPVLRKKLRRNQVLAFFAGLPPLKVGMEACGAAHYWARELRALGHEVLLMPAQHVKPYVQRSKSDAADADATCEAMNRPRMRFVAAKSADQQAAQMLAKLRAQFIDRRTQLSNSIRGFAAEFGLIAPKGLSRLGDLLADIRADTTVPDMARDMFETLARDYAHISAEVALLDEKLLALHRHNEVSRRLAAIPAVGPVGATLLAIKVTDVHGFKSGRDFAAWLGLTPKNHSTAGKNRLGVITRAGDEMLRSVLVAGATALIQHMRRGSKRVWPWLAALIARKAPKLAAVALANKLARIAWKLMVSGEQYHPIGATYPAPVVP

SEQ ID NO: 200006 - protein, 342 aa, unidentified
MGKEKQKCGQTVLGADVSLEKFDAGIAVPDSLDDLRSIKVRTFPRSPLGVEQCLEWIDERGGVDSVVMEATGYYSRDLAKWFHEQRPELPVFVVNPFQIKRFGESLGVRTKTDAQDARVIACFGVGRRLWLPHEKAEILRELHRLHKDRTALVNMLKSERLRASGAERDAVAIKVHKSLCEELKRGIETLDQAIQAMVKEQAPLKADVALLKSIPGVGAQTATLILGALGDLRRFDRSRQLAAFVGVSPRQKDSGKSVHGRAVLCKKGSPQVRAALFLSAMAAVRVKGPFKEIFQGLVVRGKARMAALGAIMRRLLVLMRAVLISAKPYDPIDHGKALAKTI

SEQ ID NO: 200007 - protein, 461 aa, unidentified
MKEEKIEMSVVNPKVAGIDIGSRSHFVGIGQGKEHVREFGIYSEDLTELVQWLLDNNIEMVAMESTGDYWQNLYAELIKNNIDVYLVNGKFTKTMNRKKTDVIDCQWIQKLHSLGLLHRCFLPDESTEKLRTLCRQRGNIIAAKADASRKMQKYLKFLNYRLDVVVKDITGQTGIAIIDAITKGEHDPYKLAKHRHYNCRKSEEEIAKALHGNNREDYLIGLQLEYERHLFCVSQLEKCDIHIAELLKIHIASMADVIDELPSDKKHKRLNKNSIKTIDLNIIAFQYFGGVDLLEIPGVSYGTLLSIMSEVGPNGLDNFPTAKHFTSWLRLAPNNKISGGRRISSKVPRGSHRLKVALRNAAYSIARLKDSPLNKFYKKIAFKKGGIKAVSATARKLAVIIWNMLTKKIPYRAKEEYLFLDQKRKQIAMMRKKMAKFGIDPNDLGIFTRPEYKLAHDKKTQ

SEQ ID NO: 200008 - protein, 419 aa, unidentified
MSFKILKFKCCGLDVHKTWIYACIGITDSNNRTEYKQARFSSFTKGLNELCDWLAKYNCTDVCMESTGKYWIPVFNILEQHNLWVTLSHPKYTKPMKGNKTDRKDAKWICDLYMCGMVNPSFIPPADIRELRDLVRYRYKLTCMITGEKNRAQNCLTVSNLKLDDVFSDVFGKSSRSITEQILQHPGEKFDVAPFVHGRCKTPIEEIQAAVDGAISKEQAVKLRQCLDHIDELNKHISELEQEILRLSDKYEAALNLIRTVPGFDKNPMTAVQILSEIGGDMSVFPTAKHLVSWAGCCPRNDQSNQKIKSTRISRAGSYFKPVLVQVANALIKSKKHLEFTNRYKRIKARRGHKKAIIAICRMILTAIWHILSDLKPYTPEGFLESHPVKEGKVLSSSQALNFFKQRGYIIKDEPLSVS

SEQ ID NO: 200009 - protein, 359 aa, unidentified
MKITKVEKINNPMRYSAVEELYEYYVAIDWSTTVMTIARMRSNSIHPVIDRDLPAKVKIIKDYVKKLSGKIILTMEETTGAQWLYVELREFVDKIIICDPQRNALLKEGPKNDSKDAAELCRLLKAGLLKEVYHSNDENYKIRKLFSSYTDLVKAGVRSKNQLSAFYRSYGLNYKKEKLNIEQDNYIKLIVEEKLRTIAHYKEQKNKYIEIFRELKKKNKTIRNLAKVSGINAINAVKIFSVVIDAKRFADKYKYWSYCGLIKYKMESGGKLYGKKNTRYSRVLKEAYKTAVQAALKGNNDIREYFQAILKQGIPEKQARNTVCRYIAKSTYAMMKNGTEYKPYNWREKTETINKLSYC

SEQ ID NO: 200010 - protein, 359 aa, unidentified
MSTQSKAFSFKGQKIFVGLDVHLRSWSVTVLSEQAVLKKFTQDPSPAALNKFLTNTYPDAEYYSVYEAGFCGFWIHWELHNLGINNIVVNPADVPTMAGERLRKTDAVDSGKLARSLRAGELKAIYVPDSVATEIRSLIRLRDSLTKDQTRHKNRIKAHLRYLGIDIPEEFCRPGRTWTNRFVQWLKGLELETEYGKKTLDLLIAQYEDLRGQQLKMMKELRVLSQTERFDKPLQFLMSIPGIGQLAGLTILSEVDDISRFKDAAHFASFIGMVPMCYSSGEHDGTGNITVRRHAKLRWLIVEAAWIASRKDPVLSAAYVEYCRSMKPSKAIIKIARRLVNRIYFVMKHQQPYVNCYVS

SEQ ID NO: 200011 - protein, 436 aa, unidentified
MRGCRCSMIMGFTKPIEHFNLQRKKVITMNTLYVGIDVSSKSNVVYLMLPNGDKHSNFSVADSHEGSTLLVKKIYSALTSHSLDTVIIGLEATSVYGDNLVYFLREDATLAPFNRKIHVLNPKQVKKFHDAYNDLPKNDYVDSFVIADCLRFGRINKEVYMGEYLYKALQNLTRARFFAVQNLVKEKQRFMNVLYKSSSTMTQEKVFSDTFSTTALAVYDEFESAEALANMDLHELTDFIIEKGKNRFPDPDAVAKAIQKAARSSYRLPKTVNDSVNQVLSISITSMKALESQIKEFDKAIKAQMELLPNVLISIPGIGPVYSAGIMAEIGDINRFNSQAALAKYAGLAWKQHQSGGFESEVTRLIPSGNRFLKYYLCEAAFSLVRCDKEYSDFYHLKYKEVNRCQHKRALALTARKFVRLVFRLLKDNRLYCPAK

SEQ ID NO: 200012 - protein, 418 aa, unidentified
MLWTGGEEIVSIIAVINRTMDLPMRKPRPRNRSQRKPNDLSRSLAVLDMDRTLIAVIEMSASTWLVAGIVPGVERQPLKKLEPDEHALLALLQRWRGEAERSGRTITSIAVAYEAGRDGFWLARWLLSRGIEAHVIHASSVAVSREHRRAKTDRLDTQMLKRAFLGWLRGERDHCKMAAIPTLAQEDARRPGRERESLAGEASRIVNRLKSALARLGVRKFNPKLKKASERLNDLRTPEGEPIPPNTLDEMKRDMERRQLICAQIRKIEQERLKHLVQAPDTGPHAMVRLLARVIGVGIETADTLVQEVLSRHLRDRRAVARYGGLTGAPDSSGSINREKGLSRSGNARVRRCMIQLAWRFLRFQKDSALAQWFFHRTGNARGMRKTMIVALARKLLIALWRLVHEGVIPEGIVMRPA

SEQ ID NO: 200013 - protein, 351 aa, unidentified
MNTQIIATPKLFIGIDIHKRSWKVHCSTDLFAGKSFSMSADAEQLHKYVLKHFPGHEVSVAYEAGCCGYHAHRCFEGYDWRSLVVNPADIHRKGKERHTKTDRIDAQLISRELKDGRLESIIVPDKKREELRSLFRRRNDLVKDFRRIKSYIKMQLLYFGIKEPEEFDNDHWSHKYRKWLDDMVFEHPTAKATLESRMRFFRFVDQELRDVSTQLRRYCKTHYKKDYLLLRSIPGIGGIVACGILCELGDLRRFNNVKHLAGYVGLAPSVHQSGGNQKAMGMTPRAHRLIRSYFVEASWQAIRADPVMQAYYRKHMGKNVKSIIIKVARKLLSRTLAIIKTEVPYTIGVVE

SEQ ID NO: 200014 - protein, 408 aa, unidentified
MSIVFGIDVSSRDSSVCVLQSGATREYKITNDTIGFKTLLIDLKEYAEHPQIILEATGVYSRRITRFLDEYDYDYVLLNPLKARKEINQGLRRNKTDRNDAYHLALAQDRNQHQPNRKEPEVYHQLQSLSRAYEELTHDIVSSKNRLHKYLQLTFPELETIFNNSRGVNYWYLVGLFPHCQDVRNLDVSTIAKQIKDFKGYGINRAQKLAIKLKHLADLAYPAVDQDDPERDEVVYYANRLLRLTADRERRSEAMIKLAKTLPNRDLEILMSIPGIAEITAVRILAELGDIRRFSNPNKINAFVGIDPGRYQSGEKDSSLRISKHGNAVARKILYRAIGQIDLAAKTSPCHIADYYERKKQFSQTKGFKKIAIASIHKLLRTVYILIITDQMYDYNVANNNQKDFCRN

SEQ ID NO: 200015 - protein, 392 aa, unidentified
MVVSVGVDVSKDKHDCFILSSEGEVLADVFTIPNNLDGFRFLLRRIRDCTHAQDKIKVGLEATGHYSYNLLGFLLDNGLPTYVLNPLRTNLYRKSLSLRKTKTDRVDARTIAAMLLSDAGLKPYTDTAYHNEELKSLTRYRFDKVKERAKLKSSISRLVCILFPELEKLVPTLHIASAYALLEEFPGAKQIASAHLTRLKALLESASKGHYKRDMALEIRDAARNSIGSRMPAKSLELQHTIRLIRELDVEIAEIEEQIQSIMDELHSPITTIPGLGFRMAAMILAEVGDFTRFDSPDKLLAYAGMSPSTYQSGQLKNCYPHMEKRGSRYLRYALYNATKYVCHWDPTFAAYLAKKRNEGKHYNIALSHAAKKLVRLIFAMEKSRAAYRLTA

SEQ ID NO: 200016 - protein, 311 aa, unidentified
MTLACAAGVDVGRDFLDVGIEPSGRVFRTPNAPAGIAAVVERLQRAGVRRVVMESIGGYGARLVRALASAGFEVGVVDPKRIRALRLAEGHKAKTDRLDAQLIARFALIMRDAARPIPDPQAFEIRALSTRRRQLVEMIAMEKTRLKQALDEEIAQSCRAMIAQLGDERARVEARLRERLALQPNAERRAALLQTIPGVGPGVSMTLMADMPELGSLERKSVASLAGLAPHANQSGTRDGARHIHGGRPCVRAALYMAAVTAARADKGFKREYLALRAAGKPAKVALVAIARRIAVAANAILKTGQPWSHA

SEQ ID NO: 200017 - protein, 345 aa, unidentified
MKHFAGLDVSLEETAVCVVDEAGTMVREARVPSEPEALVAFFQGPGLVMERIGLEACSLSAWLHESLVAAGLPAVCIETRRAKAAMGAMPNKTDRNDARGLAQIIRTGWYRAVHVKSPACRSWRALLAARRLVLNKMRDVENGLRALLREVGLKLGTPTRKEFAARVRELTTADPVLSVLVEPLLTIIAAMTRELAQLTKRVLEIVRDEPVCRRLMGVPGVGPLTALAFRATIDQPSRFRRSRDVGAHLGLTPKRYQSGETDLQGGISRCGDELARTALYEAAHSLLIRSRKWSTLRAWGLQVAKRRGMARARIAVARKLAAILHRMWADGTEFRWGKDDAAVAA

SEQ ID NO: 200018 - protein, 344 aa, unidentified
MNSMHYIGFDIHKKVISFCEKQVDGTIVDQGTLRANRQALSKWAEDRKTPWHGAMEATLFTGWVYDHLLPYAAELSVAHPAMLKAISAAKKKNDAADAEMIADLLRCNLLPVCYMAPEEHRNLRRVLRYRNFLVCEAIRMKNKTSGLLMEVGAEHNKSRLHGGKYFNELLGGLDYIPESVLNLLKITRSNLETFTRMQKSLLCALRANPFISQRVDLLMSIPGVGEVTALTWVLEVGDVHRFNRISKAVSYCGLCSAQKQSAGKNYRGPISKQRNKHLQTVLIEAAKLAPRWNSQLAAVHEREITKGNRNRATLAVARKLVAYLLVVDKSGQPFIPKEVLQEAA

SEQ ID NO: 200019 - protein, 356 aa, unidentified
MNYAGIDYHKRYSVVTAVDEKGQVIRTQRLDNRPDPFQAFFSSLDGPSEAVLEATRTWGVLYDMLEEIDGVASVTLAHSLKVRAIAEAKIKTDKIDSHTLAQLLRVDLIPAAYIPSKETRSFKDMIRQRVFLVRMRTRLKNRIHVLLDRRHIPPPPVTDIFGKGGTAYLKKLPLPGIDGEILRENLELLEVLDTLIKEAEREIQRLIGNDPRVKLLRTIPGLGPILAAVVALEIDDVARFGAAPKLAAYAGLVPSTYASGGKIFHGHLIHMSNKWLRWALVEAAWTAMRSSPYCRHYFESRKRHKGPHVAIIALARRLSEIVWHVLHEKRVYEERPLRVYKRTPSKETSPAALTIT

SEQ ID NO: 200020 - protein, 529 aa, unidentified
MVSSARTRRRGRSKSSSRNARNRTNLQKPNGVIGPRVQRVGGERFAIVCVDPAKHRSEWMMADYFGNVLIQPQTLEHKAVFFKLAVEQIRQAQEQHHIQDMIVVVERTGNYYLPPKRAFASAGFDTRTVHPFATKQYRQPADPGNKTDETDLYAQHRAAVAGFGLYEFELESPYRELRFRARHRRNLVENAAALACRIRDHLHLAMPGYADLFDRLFEFPAPLAMARRCDSPAMMLQLGQIGLSQYLRDNKIRHRGRTIDRVLAWAAQATHDDIQDGPMHYAIWTDLHELYQHFRRKTSNLEQQLASGLARTPYVRLLAIPGINVVSAAELAGEMGPIKRYANANAITGRSGLYPSRHQSDQTDYDSGPIIRQANRRLRCALMRIADNLACHCNYYRGQAEVDQTRGVDKRASRVKIAKRFSRLALACVAGDEPMRHPCFQQPDSILEKLRRFHHDHETPIGCLMEDLHATVPQLPYNTRHHEAQVVAAVLEKQTERHRGGVAIGELLPAVLARLGVNTTTSKENRDRP

SEQ ID NO: 200021 - protein, 343 aa, unidentified
MELNAIGIDLGKTLFHLVGLDASGNVVVRKKCSRAQLLKYTANLRVQRIGMEACSGSHFLGRALREQGHDARLMPAQYVKPYVKTNKSDYIDAEAIAEAVQRPTMRFVPVKTEDQLDLQAVHRLRERWVMRRTAVVNQIRGLLLERGVTLPKGRSHVDEALPEILQDADLKLSGSFRLLLAELQLELEQLAEHIQQMDSAIQHTVKENEACQRLTTIPGVGPVTATALIAAIGNGSGFRKGRDLAAWVGMVPREYSTGGKQKLLGISKRGNNYLRTLFVQGARAVMRYRAKQAPGLNHWLTQLLARTHQNVVIVALANKLIRMAWAVLCKNEVYRAPALVASD

SEQ ID NO: 200022 - protein, 417 aa, unidentified
MQYALTQVLPDVPAGGVCAGIDWATADHAACVVDMAGRVTDRFSAAHDKAGITALITRLRRSKVTEVAIERGDGPLVDALLAAGLTVVVITSRQVKNLRSRFGAAGAKDDRFDAFVLADTLRTDRARLRPLVPDTPATISLRMTVRARRDLVRHRVAACNQLRAHLAVAFPAGITLFHDLDSPISLAFLARFGSQDAAAGLDEQAIGAWLATIAVRGRPAPASVLHARLQAAPPGATGTDGAAQAGITAALTATLTALSAQIKALATQIAGQLAAHPDGHIFTSLPRPGTVRAARLLAEIGDCRSRFPDPESLAGLAGVAPVTRRSGTRIAHGFRWAVNRQLRDALCDFAADSRHASPWAAAIYDDARARGKDHPLAVRITARAWTYVIWRCWHDGTAYDPAKHNALQAVLARQQDQ

SEQ ID NO: 200023 - protein, 406 aa, unidentified
MNYLGIDVSKATSRYVLLDNDGEKAAKPFTLDNNQQAFAKLLERIKELNLQPDGLLIGIEATGIWWENLYCFMTEQKFKVIVLNPHQTNKFREALRLKAKTDDIDAYVIAGLLRSGEYAASYIPEETIQVLREIVKLRHQLVTNRQSFERQTHALLGLLFPEYEKTAIKNPFSVASLAILKAYPTAKHLAEAKTKNIEKIVRHIQGNNFNIAEIQTLIATAKNSIYSGRAKDARGMNLNILLTHVETLHQSIAQLDQRIDDILSPQNSDDAHSFPGANLLSIPGVGPKTLAAILSVVGADGSAYPDGKSFIGYIGFFPKIYESGETRRDNIISKRGPNYIRRALYIAAVACLKHNPQLKALYDRKISQGKKPKQALICVAKKLAHLCLSMLHSGESYNPSRVFMPA

SEQ ID NO: 200024 - protein, 352 aa, unidentified
MRRQYIELQPGEALFIGVDLHKERWHVTIRTTDVELWSGSIPGRWESFQLLLHRYRQCTVQVVYEAGCFGFWLHDRLIEHGVECLVTPPSLVPQEAGNRVKTDRKDSRKLAHLLAKGLLKRIFVPGKKECCHRQVVRRRRQMIGDRTRVQNRIKAELCFYGMNISEPVGKWTKGFMENLNSIRFEDRFMQESFNHLLEQYRFLAGQIEKQNVLIHELSETELYRERVEILKSVPGIGTIAAMELLLELQDVARFQHADQLAAYVGLTPSQYSSADKIRLGRITKAGKHSVRATLVQVAWQLIRKDQAMREKYERIKTRSGARRAIVAIARTLLLRVRRMWLDSVPYRLAACA

SEQ ID NO: 200025 - protein, 342 aa, unidentified
MQPILYVGLDLGSSFCYQTVLNADGALERSRSIPTSEQNLRNAFADLQGDVRVHLEAGELSNWVYSMIAPLVAQVVVSHPRSLAWIGKDAVKDDRIDARKLAELLRLNRVHAVYCEADCSRQSFKQLVTHYEDLSREQARLKSKIKARLRTLGLIRKDGRLFSAAGQTALLDEIKEPIVKLMLAQSFAVLNQMLAALKEAKTAMRDFAAHFPEVELLQTAPGVGIITACRFVAYLQTPRRFSNKRKLWRYCRLGITRRESNGKRLAHPRLDNAGVGSLKDVSRKVFEAARRTKKDHLFKRFYEQSLTNTKNAVHARLSTQRKILATLRAMWLSMKPYQDSAD

SEQ ID NO: 200026 - protein, 347 aa, unidentified
MTLTIVDEARAVTGGVDTHADAHVAAALDPIGGLLGVEEFPATPPGYARLLAWLRGFGTVNLVGIEGTGSYGAGLARHICAAGIRVVEVDRADRQDRRRAGKSDPLDAVSAARAALSGRAAGAPRGRDGQVEAIRALMVAKRTARAQRTQTINQARALIITGPDDIRTRFTGQAPAGLVAELAALRPRPGSMVRYHTLLSLRELGRRAAYLDGQLARLDELITPLVTARAPGLLSLFGVGPDTAAVLLIAAGDHPARLRSEAAWAHLCAAAPIPASSGKVSRHRLNRGGDRQANHALWRIVLTRMGSHPPTRAYVARRSKEGLSKPEIIRCLKRYAARETYRHLRHS

SEQ ID NO: 200027 - protein, 420 aa, unidentified
MEGRPGRRRQPADKGRPQSRSVGCAGGKTASQSYTRKGPAVTKHTTEAFSIKYVGLDVHKETIAVAVADSGTAEPRGLGIIPNDTDALRALVKKLGRPSELRVCYEAGPCGYVIQRFFQQLGIDCVIVAPSLIPRKPGDRVKTDRRDASKLARLLRSGELTPTWIPDEQHEALRDLVRAREDAIEDRLRARNRLTKFLLRLGVRPPDGVKAWSAAYKKWLDELVWDRPVQQVVFAEYRQSLEEIQQRVTRFEREIQTLAPNTAHGPTIAALQAMRGVKLITAATIVSELGDISRFQNPRQLMAYAGMVPSEHSSGGNVRRGSITKTGNAHLRRVIVETAWHYRHVPGVSGDLRKRQSDVPAPACTIAWNAQQRLNKRYRHLLVRGKTKHQTVVAIGRELLGFSWAIASAVKLTSHQPAAT

SEQ ID NO: 200028 - protein, 367 aa, unidentified
MMGWMAPLRHRRAKLVFSRITRNREPSMSEITTIGLDLAKHVFQVHGIDAEGTTVLRKRLRRGQVLAFFSRIPRCVVGLEACATAHYWARELGALGHEVRLMPAQYVKAYIKRNKHDAADAEAICEAVQRPTMRFVPVKTTEQQATALLHRGREQLVRQRTMLVNALRAHLAEFGMVAAQGLRNVGELIAIVRDDGDTRLPDVARQVLQVLAAQLEQIEAAIAALEKQLMAWHKTNAVSQRLASIPGIGPIIATAIATTVADPGVFRSGREFAAWLGLVPRQNSTGGKTRLGGITKRGNRYLRRLLINGASANLLRSKATKADPWVIGIRRRRPPLVVAVALANKTARIAWAVMLRQKEYQPRALAA

SEQ ID NO: 200029 - protein, 367 aa, unidentified
MGEASTFVGLDVHKNTVSVALLRPGQPPLEWSLVNDTGGVCRLIRKLEREAGGPVRCCYEAGPTGFVLHRQLARAGIDCRVIAPSLIPVKPGARIKTDRRDARKLAELLRAGLLTEVKPPTEDEEAVRDLTRSRDDAQRDLTRARNRLSKFLLRRGCVYAVGRKPTWSGKYRAWLRALTFSRRADQVIFEDYLLAVEQVEARLDALGEEIETVAQQDPWRERVQTLRCFHGIDTVTAVAIVAEIHDPRRFAHPRHLMSYLGLVPSEHSSGMRERRGGITGTGNRHVRRLLVEAAWHYRHKPLVSRTLRLRRAGQSPKAIALADRALRRLTLRQRRMLYLGKHPNLVNIAVARELTGFIWNVLHPATV

SEQ ID NO: 200030 - protein, 351 aa, unidentified
MNTQITAPSKLYIGIDIHKRSWKVHCSTDLFSGKSFSMVPDPEHLKTYVDKHFPNHEVSVAYEAGCCGYYAHRSFKSYGWESLVVNPADIHRRGKERYTKTDRIDAQLISRELKDGRLTSIHVPNTHRESLRSLFRRRNDLVKDFRRIKSYIKMQLLYFGIKIPEQYDNDHWSHGFRNWLDHMVFQYPIAKASLDSRMRYFRFVDEDLRLVSNQLRAYCRKHFKKDYYLLRSIPGIGGIVACGILSELGDLRRFNSIKHLSGYVGLAPGIYQSGANSKTMGITPRAHRLIRSYFIEASWQAIRTDPVMQAYYRKHQGKNVKSIIIKVARKLLSRTLAVIKTETPYTIGVVE

SEQ ID NO: 200031 - protein, 390 aa, unidentified
MQALCPRPDNHAAIRTDLKAIFVSLELSRSTWVITSLAPGGGEKMSKHAVPSGDIPALLARLSQLKEKARLRTGQVFSIIVIQEAGLDGFWIHRVLQQEGIESHVVDPASIATSRRRRRAKTDRIDGEALVRTLLAYKRGEPRVCAMVKAPTPHEEDRRRISREREVLTAERVQHVNRIKGLLFAQGISDYEPLHRNRRERLEELITGDGRPLPEGLKAQIRRELDRLELLIEQVKAVEAERDALLAQAQASPGVPAPAAQLLTLKGIGPEAAATLWTEGLFRTFSNRKQVAAYAGLAPTPWQSGAVHRDQGVSKAGNPRLRTIMIQIAWLWLRHQPQSALTLWFRERIKRTGGRLGKTMIIALARKLLVALWKYATAGVLIEGAVLKPA

SEQ ID NO: 200032 - protein, 326 aa, unidentified
MNTTVKEKRTNWIGVDVSKDKLDVYDLSAETYTPYTNDTAGIEALAQMLLTRPQPAIVCEATGGYEATMALRLHQLGLSVSVVNPRPVRDLARALSKLAKTDPIDAYVIAKYGEVTEPAATVFACEAESELKQWVSRRQQLVEILSAEKNRRTLLINGPARDEVSEHIEWLDEKIKRLDKKIEEISDSTPEWKERKAILRSPKGIGPLISASFLVLIPELGKLNRRQIAALAGLAPFNRDSGRFRGQRRIWGGRGAVRSLLYMATLSALKCNPPIRAFYQHLLAKGKVKKVAIIACMRKFLICLNAMVKNNEPWDDDKVTAFFQTP

SEQ ID NO: 200033 - protein, 332 aa, unidentified
MKKFFIGVDVSKLKLDFCNWHNESIVGEMVIPNRLTSIKSYLQGLLLDNDVKDLLVCAEHTGQYTYPLCCACSELGVDLWLENPTQIKYRSGVQRGKNDKLDAQKIAIYASRFKDQARLFSFPEEIIRTLKQLVSERDMYVCDKAKYKGQLSDQQDYMDRADYKQKSDRMKRLIKGLELAIEQIEEAIRVLINNDKTLSRQHQLLCSIDGIGERTAVKMILVTNAFSKFKDPRKFCCHAGVAPFSFKSGSSLHSKNKLSHRADKSIKTLLHLAALTATRSKGELHDYYNRKVSEGKNKMSVINAIRAKLVLRMFAVIRNNKLYEKNYINPLA

SEQ ID NO: 200034 - protein, 407 aa, unidentified
MNTAVGIDVSKGRSVVAAMRPFGEVALPPREFLHTSEGLSALSEALRLIDGNTRVILEATGRYHEPVVMALQEAGFFVSAVNPKLIKDFGNNSLRKVKTDKADAVKIARYGLEYWEEMREYTQTDTTRQQLKLFSRQYNLHMKTVVSLQNNLISLLDCVFPGINELFTSPVREDGRQKWVDFVCTFYHRDCVSSVSLAAFSERYRKWCKRKGYNFSTAKAAEIYAASRNMVVTMPKDALTKALITSAAGQLVAATATLATLKAEFVRLAATLPEYEVVRSMYGVGEVTGAQLMAEIGDVRRFANRGALIAFAGVDPGVNESGKHSSQSVRTTKRGSPHLRRTLFQIVSTHLKQSPPDEPVYQFLDRKRAEGKPFLVYMTAAANKFLRIYHAKVRDHLNALEQVDSNT

SEQ ID NO: 200035 - protein, 416 aa, unidentified
MNAAGIDVSSRKSTVAVLRPFGEVVRLPFDVAHNTEGLVSLAEQLKALDGETRVVLEHTGRYYEPVAKALHEAGLYVSAVNPLLIKEYGANSLRKVKTDKADAVKIARYALDNWTDLRDYTPMDTVRYDLKTLNRQFQLASKQRTACSNNLIALLEQSFPGIRKCFDSPVRSDGTQKWVDFAHTFWHVDCVRKQSFNAFSERFRKWCKRHGYFFKQSNAEEVYTLAKNAVVLVPKSEVTKVLVQEAANQLTSISRSVETYRAEMERLASMLPEYPVVMEMYGVGKSFGPQLMAEIGDVRRFERKQALVAFAGIDPMPNQSGDKNVRSNKSSKRGSPYLRKTLFNVMGIYLKCAPQNEPVFQFLDRKRAEGKPYYVYMTAASNKFLRRYYAKVRDYLATLENLPPVDMDSTGLQERN

SEQ ID NO: 200036 - protein, 397 aa, unidentified
MYIVGIDIAKRKHEAAVIDGEGTVIIKPFSFTNNCSGYNRLLAMLTKAKLPLDEVSFAMEATGHYWLALFTRLQKEGFRVQVINPVQTNSIRSFYIRQAKTDPRDALLIAEVIRFGHFSESTLHPENIYELRELCRGRHAIVSMQADVKRKVVALLDQVFPEYETAFTNLFGDTSMAILQTCPTPKELSEMPLEELCHLIEVPSHKRFRMAKAQELQALARNSFGFAMAGDVFSTMIRLYAKHLVFLKQQVQEMDRKIAEIMDTLDTLITTITGIGPTLGAYILSEIGDISRFSSAAKLAAYAGIDPTMRQSGEYNGVRNRMSKRGSPYLRHAIWLAASSAVLHDPALKLYFQKKRDEGKPYMASVGHACRKMVSIIYAVMRDNKAYTPCIPNEISA

SEQ ID NO: 200037 - protein, 426 aa, unidentified
MTTATNFAATIGLDWADKKHDLWIQSSDGSKAEHLRLQQTPEALHEWVAKVRERFGNRKIAIAVETSRGPVISALVAYDFIVLFPVNPKGLKSYRDAFSVSGAKDDRTDAQLLEELVRLHPSKVRALEPDTELTRKLGGLVENRRHLVDERTRLINQIHATLKTYYPMADALLEGQMNTPMAADFLLRWPDLDSLQKAQPEVIRSFFYKHNSRNAKKTEERLEAIKKAKALTTDRAIIVPARHLVVALAGMLRPLHQAVARLNKEIEQAMDQHPDAPIFRSFPGAGPALAPRLLVAFGTNRDRFDKSKDVAEFYGVAPVVIQSGNSKTVHVRYRCPKFGRQTFHENAGCALKKEPWAKFYYQQQKQRNKGKHHQACRALAYKLVRIYFACWKQRKTYDPNLYLKALETHASPLYRKLENFTDTHCE

SEQ ID NO: 200038 - protein, 444 aa, unidentified
MEQSTRFVGMDVHKDTIVVAVTATGEVGKATAYGTFPNTAAALEKLVKRLRQAGDGPIKFCYEAGPCGYGVHRTLTRTGEECMVVAPSMIPRKSGERQKTDKRDAASLAVLHRGGLLTAVWVPDAAHEAMRDLIRARQAAVRAVRAARQQMSAFLLRHERIYPNGKRAWTKAHRGWLADQTFAQPAHQIVLEECIEAVRQGEQRRERVDGYLRAQIPSWSLFPLVQNLCALRGLDMIVGAGLAAAIGDPSRFATAPHFMAYLGMVPSEHTSGPKRRIGAITKAGDVHARTLLIEAAHSYRYPARIGRHKLAAVDAVPEAVRAIAWKAQTRLCQRYRQMTAKGKPNQVVVTAIARELAGFVWSIACITSDPVVSGNVVTEAYDEGTTLWNEVTIASEEVARQIQQITPDTGRLHAPRHQSLKGTARRTSKTGQTRAGSAERSQTG

SEQ ID NO: 200039 - protein, 405 aa, unidentified
MNSVGIDVSKGKSMIAVLRPFGEVVSTPFEIRHTASELRDLACSLKGLDGETRVVMEHTGRYHEPVAQTLCSAGIFVSAVNPLLIKSYGNNSVRKVKTDKADALKIARYGLDNWADLREHTIMEKHREQLKILNRQFNLYTKNRTALKNNLTALLDQSYPGAKGFFDSPVRDDGSQKWVDFAADFWHVDCVRELSEKAFTKSYQKWCKRHGYNFNSSKAASVYEDSKELVPTLPKNDYSKILVCEAINQLNAISRTVEVLRNEMNRMAEQLPEYPVVMSLFGVGPSLGPQLMAEIGDVLRFTHRGALTAFAGVDPSPNQSGTHERKSNPSSKRGSPYLRRSLFLVMTVLLQNAPADDPVYQFIDKKRSEGKPYYVYMTAGANKFLRIYYGRVKEYLNSIDGESLS

SEQ ID NO: 200040 - protein, 522 aa, unidentified
MAVRTARKGKRSSCTEVLHRPRGLFHSRVQQVGPEHFGIVSVDCAKARSKWMLADFYGRVLIPPTVVAHNRVELDATIAQIRQALTTNDLHDMLVAIERTGRYHHVIRDAFVRAEFEARLVHPFATKRFRQPADPSTKTDDTDLAAIHRAAVNGFALLEPKLSEDWLSLQMLVRHRRNLVQKNAALRCQIREHLEAAWPGYAACFDELWDSHIAQALIRRYATPLELLAERTPAIDHWLRQQGVRFQRPTLDTILAWAQRATPGDPLTELHRRLALAYDDDRLQKTQEIQALERDLAHRLAQTPYVLLLSFPGINVVSAAEFAGEMGPIEHYANPRNITGRAGLFPSRYQSDQVDRPHGPLVRRGNRKLRAAILGVADNLLACNQHFKVLATRWKALGKHTRHTHVKIALRFCRIAFHMVAGRQVFHHPGLRERHYILDKLLAFHTEHQTPWEQTLRDLHHAIDQVPTKEHRGEAQPLADRLQRWRQRRRGPQALAEILAIVLARLGVGIVQSQESGEQDPS

SEQ ID NO: 200041 - protein, 339 aa, unidentified
MQLYAGLDLHSRNTYIGIMDKEFKRVFGKRVSNKLPLILEALDPFRDRLKGIVVESTFNWYWLIDGLMDAGYQCVHLANPSAMKQYEGIKHTDDQHDAFFLAQMLILGILPQGYIYPKQDRPVRDLARKRLFLVRHKTAHILSLQSLIARCCAKRVSANEIRKFTIEDLQQLLKEEHIVLSAQANLDTIGFLKQQIQRLEKAIQKKVKLNKAFQQLLTVPGIGLILAMTIMLEVGDIGRFAQVGNFASYSRCVSSQRLSDGKSKGHGNRKNGNRYLSWAFTEAAHLSRRYNEHFRSYYNRKVAQANTSLATKALSNKLARICYYIMRDQVPFKENLLSQ

SEQ ID NO: 200042 - protein, 348 aa, unidentified
MSIAVLGIDLGKNSCSVAGLDDTGRVVLRRRLTREGVIRLAAGLPACVMAMEACCGAHHLGRVLRELGHAVRLMSPEYVQPYVKAQKNDERDAEAIAEAATRPTMRFVELKSEAQLDAQILHRARSRLVGQRTALINQLRAVLLERGVVVAKGRRRLAEYLALMLDDAAEPSLPLSPRTRLLIEDMLLEWGELDRRIAALSAEFVARAREDQAARRLITIPGFGALNATALVAAIGTGETFRRARDLAAWLGLVPRQATTGGKPRLLGITKRGNAYLRTLLIHGARAALPSLSAGATPMGEWLRSLLGRAHKNKVVVALAGKLARIAWAVLRSGESYVAKPSSRPAMA

SEQ ID NO: 200043 - protein, 361 aa, unidentified
MEYAAAEGRNVGIDLGKRTYEIKFIGKDGKVTGTNGKTDKSGREKLYAMLRPGDRVALEVCSLGMLMAKEMKEKVGCNVVLLNPSQIALIYRSLKKNDKEDALKIARLVQKYTDEELPTVELPTEHEERIRQILCELRQLKNDRTRDINRLHAVFLESGITEIKRKDLATGSNREDCIKILKGLALENARRILKRLSMTDEQIGEVDELLDRELEGDKNIERLTEIPGVGKQLSAAFIAFLGDGSRYPNASAIGAATGLVPKLDMSSTKLRLGHITKCGNSNLRSLIILAAWSHVRAKGGGALKDKFLYMTRVQSKSRKIAIVATARKLAELMYTLLKTGVPYEKRTSPTIQQLVGEALTA

SEQ ID NO: 200044 - protein, 347 aa, unidentified
MELVYLGLDAHARHCVLVCMDSEGKLLNQWRFATSESEIVRHVAAVQAKHKRLAIEEGSLTHWIANLIKPYVDEVFICDPRENAAIGLHPHKNDGRDAYQLARLLRLGELKRVYHATEDHRAFFKAAVQQYLDLRGQTVALKLKIKSKYRTWGVVEVEGTAVYTLKSREKYLKQVAAPVISHQLQRLYGVLDQNQKAQAEALKEAVALGKKYPEIAQFQQVPGVGVIGAHVFDAYIQTPDRFGSVQKLWRYAQLGICDRSSDGKPLGFRRLDRSGNSELKSMSYFAWKGSLQTLQPNEVRSYYEASLQRTHNKVHARLNTQRKILCVLWTIWKRKEPYRPERFAGLN

SEQ ID NO: 200045 - protein, 429 aa, unidentified
MSEEKPLELRVSVDVGYRGHSVAMGLSSGEVLEEFEIEHRPEGFQEFFSRIEKHHKKKNCSVAVAMEGYNGYARPLDSMVRQRGYRLYNLNNLKFARFKEIFPGAAKSDRIDARKGLELFQLSDHLPLAKEVLQEVSGTPPENEVLKRLTRRRRRLVNERVRVVKNLQADLQAVCPGLLEITGEASNQWFLNFLLSADTLPQLARLKRSTLLKIPAVGVKSAAIIEDWQKRAHFSQEVNWVGEMIQEDARRCVELDEKIKRLETKVAEVAKDSKIARTLRSIPGFGAVCTSELAGEIGTIERFASEGSLSLYLGMSTLDNRSGKYQGTKTPKHVNTRAKAAMMIGVDRHRKYVPESQRYYEKKRSEGKKHNQAIRALGRHLSRIIYKMLKEERQYEIRSEKGNTKTKVSPRSLLKTQIRRPKISSKKNK

SEQ ID NO: 200046 - protein, 335 aa, unidentified
MKFYVGIDAGAKSFTACVVTREEVIRSAQSFENNAEGIASLHEWMEQTRLSKGETLVAVENTGVFTEALCYELDRRGYQLVLLDPHKVWKAFAEGAKTDPLDSRKIAEYAYRYLDRLVLWGPREAIVEQVKVLLRTREQFVEQKTAAQNSLTTLRRKYIQTPAANAALERTLLHLKAEIRDIEAEIHRLIRSNPTAAQMIALLMTAPGVGHLLASHLFVLTGGFAETPSYRSLAQYLGIAPNAQQSGSWTGPSRSRGYGPSTMRKLLYLAACSLRTHNDRYRQYYLRKVAEGKPKRLVLNNVANRLLRVLCAMITSRQPYIENHLSVQPMLLTKS

SEQ ID NO: 200047 - protein, 332 aa, unidentified
MDNCIGIDISKASINIHISKNGQDLKVDNSIKGFKSLYSKLKKIYKKEIEDNVFIFEPTGSYSEALRKYCSEQKIKCFIINPKQFSNYAKALGVEVKNDVEDARILSRALHLAKDGQVKIPVYDEDVERIKELMSYYKFTTKQTTQQKNHLESLESKNGDSFAIRELKKSIKESKVKEQHIIDQIQIIIDSNAKYKNDYENIISIMGIGQIGAIALLHLFIKYPEANQRQITSLTGLNPIYKQSGTSIQSGYRISKSGAKTYRGSLFMAAMSAVRHDKNFKAFYERLKSKGKHTTQAQIAVMRKLIITAHSLYKNNRKYDVNYNLQEVKTMG

SEQ ID NO: 200048 - protein, 338 aa, unidentified
MKAYVGIDLHSTNSVIGIIDENNNQLFLKKLPNDLKQILLVLEQFKKIIIGIVVESTYNWYWLVDGLLANNYPVHLSNPCGNKQYSGLKYSDDKKESLWLANLLRLNILKEGYIYPKKDRPVRDLLRRRVMFVQQRTAQILSFQSMITRNLGIKKSSNEIKKLKPENVHELFDSPHLIIMAECYLNTIKNLTAQTRIMEKDIKSVAKVKKEFEYLLTISGIGNILALTIMFEVGDIGRFVKVGNYSSYCRCVSSIRKSNDKKKGEGNRKNGNKYLSWAYVEAANFSRRYSSEAQSFYQRKKSKTNEIVATKALANKLARASYYIMRDKVPYDPKKLFG

SEQ ID NO: 200049 - protein, 323 aa, unidentified
MTYIGIDISKDSFVAAFPKVSGYQTQTYPNTVKGIRKFIGSLSVTEHHCVMEATGNYGFLLLYLLDRQGIAASMVNPKQIKHFSRMMMTVTKTDPKDACMIAMYGEKMNPPVYKMPSETVMLLKQKKTIIRQLKKQLTASKNLKSSLVVLPFQDKNGMKALDKTISFLASQIESLESELADLASSEFDRQVKLLTSIKGIGITLATSLIVATGGFSYFNNAKQVSRFIGICPTYQQSGTSVHIKGGINRNGDATLRSLLYVASWSALRGNTTCKECYARLKANGKPSKVALIAVANKLVRQAFAVIKSDAPYVDGFVSIHQTK

SEQ ID NO: 200050 - protein, 531 aa, unidentified
METVGMATKVKARKKRTRSRSGKFRLAVLGKPSGVIQPRVQEVGPERFGIVAIDCAKARSKWMLADFYGKVLIPPTTVEHQRTAFQLAVCQLKQAQEQHQLKDTIVCIEMTGIYHKPVWRAFRKAGFETRLVHPFASSHYRLPEHGDIKTDDNDLAAIFRAAVNGFGLVEKEVPPIYQEMQILCRHRRDLVNKRSKLQCQIRHHLEHCLPGLTALFDGSELWIQATPVHLLKAIAEHGGTADDVVEAGQQGIAKWLKDAGIRFHQRTIDRVVVWASNAATHDEMAPTYTRVWQTLLEDWLLKQKGIAELERNIASVFVQTPYVLLLSHPGINVVSGAELAGELGPIENYASAKAVSGRSGLFPSRYQSDQVDRGGNLSRFRNGRLRAAWLLVADNMTKCNAYWRQKATVWKAQGHDPRDIRCRVANRLTRTVFQMIFGRRLYQHPSRLDRSYVMEKLLVYHREHQTAPHVIVRDLEQAAVQIPKTSHKDEAKPLVAAYEKSRRSRRREPQALATLLVAVLARLGVDDLESK

SEQ ID NO: 200051 - protein, 438 aa, unidentified
MSNKVIFNLDDLFISVGIDVGADFSWMSIALPNQQFVGKPYKILHNSIDSLTTAVSKIKEAEELYSLESRIFLESTGIYHYPLFCYLRDKGFNCSVINPIITKNSTNINIRKVHNDRFDSKKAALVGLKPDLKVSLMPSDLALNCRNLCREYYDLIDNRSAYVNKLQGELRMAFPQYLGIFSKVTINTSLTLLETYTSPSAFLKADKQEIIDIIKSTARFGLTYAQNKYNAIIQAATDANQFGYIIDSNIKRIRLYISFIRKYDEEINSILESLHELVDANEDSDFVKQIHLIETFKGAGFLSAVSIMGEIGDFSAFSKPKQLFAYFGLDPSVKQSGKFEGTKVQMSKRGSAIARRVIHTLTLQSISISRNREAKNPVLREYYLKKCDSKPKLVAMGAVSHKVCNMIFAILRDNKPFKIIAPQEHIQQYNAAKCDIAA

SEQ ID NO: 200052 - protein, 357 aa, unidentified
MAEGSWVGLDVHARSTVAGVLDGGSGELRSLRVPTRCEEAVVWLQSLPRPVRVAYEAGPTGYGLARACAAAGIVCTVAAPSKIARPSGDRVKTDRRDAERLARLLRLGELVAVRVPDPFEEAARDLVRARADARADLMRARHRLSKLLLRHGLLYEASAWSVAHDAWLRAQRFDSRALSLAFEECYGAMLQAKLRRDGLDRAIAELAAEPPFAEVVGRLVCLRGVSTLTALALTVELGDWRRFRPESLGPFLGLTPSERSTGERRRLGAISKTGNTHARWLLVEAAWHQRRPLRPSAQLERRRAGQPAAVRARADASARRLHRRWQALERRGTPRTLVAVAVARELAGHCWALATMS

SEQ ID NO: 200053 - protein, 380 aa, unidentified
MSEAVIGLDVGKSSHWACVATRDGEVLLSTPVANREDDLDSLFGRFPDALVVVDQSRNIGALALARARAAGMSAAYLPGLAAHGAARLFAGDAKTDERDAMVIAKTALGIPDALLPVGDPGPTIAAARALAAQRNFLTCENTRNKNRLRSILLESCPAFEALVDLSDGPQLRLMASLGGAWSVADAGPRRAAALTRGAARGKIEALVRSTTSSTRPDASVVAAEDRAVKLLARRISENSAEIEAITAEISALLEGDDTYRCLLTVPGIGPKTASELAISIDIEDFPSHDRLASYCGLAPRNRQSGTSISSVTASRQGNKRLKNLLIFSCNCLTRTEGRWGDYYTRCRERGMSHGKALKALARKRLKVIYAVMRDRVPYAA

SEQ ID NO: 200054 - protein, 335 aa, unidentified
MKQYDYYIGLDWSQAKMAIAISEKGSAESRVAELDSDVRKLKYLLKSLNGKKVLTFEESTASQWLWVELHDYVDEIIVCDPYHNFLLSSGPKNDRIDAGKLLELLRGGLLKPVFHSADVFMRYRKLISTYDDVVKTGVRWKNRRSAILRAQGKGKQSHTLETEFDRFNLAMADSYITQYEDAKKVYHERFKQFIGKSKTLRSLHSIPGIGPIGAVKIAAVVVDPERFQDKGRFWSYCGLVKHHKMSGGRSYGKRSPRYSRTLKNVFKTAAFAVIDSGSRNSLRDYYDSLVSRGMASWDARNKVARKIAELALSIMASGKLYQTGRFKQCKTVSGN

SEQ ID NO: 200055 - protein, 350 aa, unidentified
MIVIGVDAHKRTHTLVAVDEVGRKVGEVTVGTASAGHLQAVAWAARWPDVMFALEDCRHLTRRLEGDLLRAGHRVVRVPTRLMAGTRRSSREPGKSDPIDALAVAHAALREPELPVAQLDGPAREVKLLTDHRRNLVVERTILANRLRWHLHDLDPELLVPSRGLRRFCVIDALQAELERFDGVVVRIARELVVRCRELTVRINELERELRTLVRKLAPSLLTIPGCGVLSAAMFIGETADVRRFRSKDAYARFNGTAPIPVWSGSVRMRLNRGGNRTMNTALHMVAVTQARGVGPGKAYIDKQRAVGKTRTEALRLLRRRLSDRVFTALLVDANSKCETDDVAESSNAA

SEQ ID NO: 200056 - protein, 341 aa, unidentified
MDKELYIGIDVSKKTLDLAYYDGETIDWKNAHIKVSNDTSGFKEVASWLAKIANRFDNLLFCMEHTGLYCQDFRMWLESHQYIYGMVDPRKMHRFEPDLDAGQRSLDRVKSDELDAFRIAIYCEQNHKKILRSPSRLPPAIYFKLKRLYAERKQDSKQSVLYKQQLHDTCAYDTESSMERKRLLLGSLKESIKAVDEEIACCLDEEASIRKNYDLLLSMPGIGHVVALETIILTENFTAITNPRKYACYIGIAPFPKESGTSVRKRTSVSCKGFSKAKADLSISAVSAITHSPTLREYWQRKRKEKCGSIVLNAVKFKLVLRMFAVIKRGTPYVETDAYKN

SEQ ID NO: 200057 - protein, 355 aa, unidentified
MDSKKYIGMDVHKESISLAVMNAAGKIVMECVIETKASMILQFFDGLRGDLQVTFEEGTSAAWLHDLLKPHVTKLVVCDPRKNASMREGNQNDKIDARRLAELLRLNHLHPVYHGEHGLRSLKELVRSYLTITKDLGRVMSRVKAIYRSWAIPCSGKQVYAPRHRVEWLGKITEPGVRRRAEFYYQQLDALRTLRKQVRRELLAEAKKHPVWKRLCQIPAIGPIRSAVLLGILQTPHRFRSKRQLWTYSGFGIKTESSADHRSVDGQLKRVKKQSSVRGLNRNCNHDLKNLFKGAAIVAASKPGPLQEFYSALLSKGLRPEMARLTLARKIATIVLIVWKRGVCFDAQHLKPQTA

SEQ ID NO: 200058 - protein, 342 aa, unidentified
MKVMIGVDPHKGSHTAVAIDGNEEEVGRLKVRASAGQVDRLLAWAEPHPQRAWAVESAGGWGYLLSQQLLAAGEEVLDVPAVLAARVRLLGSGRSNKNDPNDARSVAIAAMRAPGIASVARTDHRGVLRLLANRYDNISRARNRTALRLHTLLAQLVAGGIAGVISATRAEAMLAEVTPATPVEATRKDMALEHLDDLRRFDTQLKASRARLCDAVAASGTQLTDLYGVGPVVAATVIGHAGDVRRFKSRDAFATYSGTAPIELSSGGRVVHRLSLRGNRKLNHAMHIVAVTQVSHRDTAGRAYYERKLAEGKTPKEALRSLKRRISDAIYRQLLTEASTTG

SEQ ID NO: 200059 - protein, 422 aa, unidentified
MKKHRYKAINVKQVSWEKLCSSAAGQRIVFSVDVAKEEFFGVLMKSDLTVIDTLKWIHPVQTRELVGHLLNDLGASAVEVVMEPSGTYGDALRAYFTALGVRVYRVSPKRVHDAAEVYDGVPSLHDAKAAYLIGRLHLDGASREWMELTAQRRDHQALIAELELYQSEHRRNLNRLEASLSRHWPEVGHIMALNRVSLLSLVAEYGDPRAVSSHCEEAGQLLRRTSRGALKGAQIQRILESAQQSLGIVCTEGERHWLKVLGQALLRTHRELQAIERCIQAEVKADVVLTHLAKVVGATTSMALEASQGSPLDYPNAGSYVKGMGLNLKERSSGKHKGQLKITKRGPGRPRKYLHLATLRMSRQDPVMEAWYQNKIKRDGNRKGKATVALMRKLAMALWHVARGEDFDSRKLFNVRTLGLAD

SEQ ID NO: 200060 - protein, 344 aa, unidentified
MTFVGCDLHTRMQQVAVLDTGTGEVSERQLPHDGLAVEEFYAGLPRPVTVGIESTGYAVWFHALMQRLGPTLLVGDAAKIRAMVVRKTKTDRRDALHILDLLRHDRFPTIWVPDPVTRDLRALLTHRMRLVRIRTMVKNGLQAIALNYRLAGGSKLLRQAGLAQLQALALPPHTARRRDQSLELLAGLNTQIHELDDAITTAALAHPDAPRLITHPGVGALTALATVVVLGPVARFSDSKHVVSYVGLAPALNASADKYHLGHITKQGSTLLRFALGQAAAHAARMDVDLKRTYFTLVHRRGRPKAKVAVARKLLVRLFIMLRDQIDYDEFQRRGRRTLAIASG

SEQ ID NO: 200061 - protein, 389 aa, unidentified
MKIYVGIDIAKLNHFAAAISSDGEIILEPFKFTNDADGFQLLVSKLESFDKNSIIIGLESTAHYGDNLVRYLVAEFYQVCVLNPIKTCQMRKNNVRKTKTDKVDTFVIAKTLMMQDDLRFITFFDLDMMDLKALGRFRQKTIKQRTRLKIQLTTYVDQVFPEIQYFFKSGLHQNAVYALLKEAPSPKEIASMHMTHLANLLKVNSHGHFTKEQAKELRVLAQKSVGANDSAISIQITQTIQQIELLDSQLQKIEAEITDIMKFNDSVIMTIPGIGYINGGMILGEIGDIHRFSNPNKLLAFAGLDPSVYQSGNFQAKTTRMSKRGSRVLRYALVNAAWNVVRNNATFKAYYDAKRAEGRSHYNALGHCAGKLVRVIWKMLTDEVEFNLE

SEQ ID NO: 200062 - protein, 412 aa, unidentified
MDVLYPQCCGLDVHKKTVAACLITSTAGAEPVKEIRTFRTMTADLLALVDWLQEAGCTHVAMESTGVYWRPVYNLLEGQFELLVVNAQHIKAVPGRKTDVKDAAWIAELLRHGLLQGSFIPSKPQRELRELTRYRSTLVQDRARALNRLQAVLEDANLKLASVVTDIAGVSARAMLEAILAGQRDVETLADLARGRLRAKRDQLQAALEGRVTAHHSFLLTEHLSIVDTLDEAIERVSGEIDQRLTADQAAIALLDTIPGVGQRAAEILIAEIGTDMSRFPSAKHLASWAGMCPGNHESGGKRLSGKTRQGNRWRRPVLVAIAPGASKTKNTYLAAQYKRIAARRGKKRALIAVGHTILTIVYMMLTRKQPYQDLGAAYFDQREQERVERRLVHRLERLGYEVSLQPRALAS

SEQ ID NO: 200063 - protein, 376 aa, unidentified
MKIVGCDLHTRYQQIAMLDTETGELIERRLEHANGEARAFYAGLQGPVRVGIEATGHTRWFERLLAELGHELWIGDAAQIRAAMVRKQKTDARDAAHLLQLLVEERFPRIWRPTMAERDLRQLVWHRQKLVWMRNAVGNQLHALAMGEGVCRKKQLWTKQGRAELQALNLGAWASYRRQELLEMVDQLDGSLEKLDRAVEEQSQQNEAAVLLRTHPGVGPVTSLAFVLTLGPVERFKRSKQVVSYLGLNPREHSSGGKQRLGAISKQGNPMMRSLLVEAGHSAARLDAELHKDYQRLKLRRGSGVAKVAIARKAGGTDVLDAAPTGQLRAAGSHARQPVGHPGGEVAHRWADWAPCLPGRAGKFEQRIMVGTRVTG

SEQ ID NO: 200064 - protein, 373 aa, unidentified
MYYTTLFVGMDVHKENFTVCCYDMIQDKIFYAQKLEPDYNQILKYLTFVRKAFRKDVDFVCGYEAGCLGFTLYHQLTQHSVSCVILAPTTMMKPAGKKKIKTDKRDAALIARCLASNNFSPVHVPTTQDEEVKEFLRMRDDHRLALKKVKQQILAFCLRHGYSYTATKNHWTVAHIAWLRSLKPEGLYSEILSEYLLTFQALSDKLERLDQRIEELAAMKAYSEGVKKLSCFLGIKTHTALATMVEVGDFHRFASANQFASYIGLVPGEDSSSESVNRLGITKAGNAHIRTLLVEAAQSYTKGQVGYKSAALKKRQAGNTSEVIAYADRANERLRRKYYKMILSKSKRTNVAKTAVARELACFIWGMMTDRIA

SEQ ID NO: 200065 - protein, 453 aa, unidentified
MPRKRVNKSKKVALPILNPDAAGIDIGATEIYVAVPADRNPEPIRMFATFTQDLSELADWLQQCRIRTVAMESTGVYWIPLMQILETRGLEVYLVNAKHVKNVPGRRTDVSDCQWLQYLHSVGLLRASFRPAQDVCALRSLLRHRASLVDMASCHVQHMQKALDQMNLQLHHVISDITGTTGLAILDAILDGNRDVHALATLRDPRIRASHETIAKSLVGDYRREHLFTLRQSVALYREYQRQITICEQEMHLLMKDLETKADPTATLPTAKDSVKKCKVMAPARAMALREEAYRIFGVDLTAIPGISVLHVQCILAELGHGISKFNSSGAFSSWMGLCPDNDISGGKVLWTGTRKVKNRIAVTLRMAAQSLQQSESALGVFYRRMRTRLGAPKAVTAAAHKLARIIFHMLTTREPYDESVFAQAEQKNLQRMEHRLKIQARALGYTLLPAQP

SEQ ID NO: 200066 - protein, 343 aa, unidentified
MQDNIYDHYVAIDWSIKNMAIARMTKKSNKITAIDVPSDIEDLQAYLKNLRGTQILTIEETTTSQWLYAELKEYVDRILICDPNRNKLLNEGPKTDKIDATKLVQLLKAGLMKEVYHSTDKFLYLRRIVSGYEDLVKAGVRLKSQRYALLRACGKNGYEKTGSTLDSQGEQFVLECLDRQIEAYEEEKEGYEKEFERLARKIPVIKHQKSLPGIGTINAVKIVSRVVAPHRFADKGHYLSYTGLIKLEKTSGGRSYGKKNPRYSRQLKSVYKSGVLAAIGGNNPINDYYEHLIQEEGYPEHNARQKACRRLAILSLGVFKSGKKYQPYRRDHVKGSKEGTSGL

SEQ ID NO: 200067 - protein, 397 aa, unidentified
MYIVGIDIAKRKHEAAVIDGEGTVIIKPFSFTNNCSGYNRLLAMLTKAKLPLDEVSFAMEATGHYWLALFTRLQKEGFRVQVINPVQTNSIRSFYIRQAKTDPRDALLIAEVIRFGHFSESTLHPENIYELRELCRGRHAIVSMQADVKRKVVALLDQVFPEYETAFTNLFGDTSMAILQTCPTPKELSEMPFEELCHLIEVSSHKRFRMAKAQELQVLARNSFGFAMAGDVFSTMIRLYAKHLVFLKQQVREMDRKIAEIMDTLDTPITTITGIGPTLGAYILSEIGDISRFSSAAKLAAYAGIDPTMRQSGEYNGVRNRMSKRGSPYLRHAIWLATSSAVLHDPALKLYFQKKRDEGKPYMASVGHACRKMVSIIYAVMRDNKAYTPCIPNEISA

SEQ ID NO: 200068 - protein, 355 aa, unidentified
MPSKANTAVARTIGIDPGKNTLHMIGLDEKGVIVLREKVSRTRIAARFVNVPPCLIGIEAGMASHHIARELVALGHEVKQVPPAYSKPFRQGHKNDFRDAHAVAEAVERPSTRCVPIKTDGQLDLQALHRVRSRLISNRTAVINQIRGFLLEHGIPVRQGHHFLRRQLPQLLATRADVLSPRMIRITGDLMADWNYLDERIDRVTDEIEALAQADDGCQQLITVPGIGPIISSAMVAAIGNGAAFCKGRDFAAWLGLVPKQMSTGDRTILGHITKRGNRYLRMLFIQGARAILLRPASWAKHSFGTWLMVAARRMHRNVLAVALANKLARIAWTVLAQGRHYEARVELRVDPATA

SEQ ID NO: 200069 - protein, 312 aa, unidentified
MDLCILDQAGETLLHRHMQATPEALLKAIAPYRGQIVLAAECLFTWDWLADLWAEHEIPFGLGHALSMKAIQGGKAKNDTIDAQKIAVLRRGGLLPQASVSPAEMRATRDLLRRRMPLTRTRAALLAHVQNTNSQYTLPAIGTKMAYTANRDGVAERFADPAVHKSIAGDLALITSDDELWRDVERTIVKTAKHHDAQTLYLLHTVPGIGKILSLVLRYDIHQIDRVPRVQAFASSCRLVKCAKASAGTRSGTSGTTIGHAPLTWAFSEAAVFFLRDNPAGQPCLTRLEKKHGKGKALTILAHTLARAISCR

SEQ ID NO: 200070 - protein, 342 aa, unidentified
MKIIGCDFHPSFQQIAMVDTETGEQTEARLTPAEAVGFYEQLAGPVLIGMEACGNTLWFERFLAKLGHQLWLGDAGKIRAMEVRKQKTDRRDAELLLQLLLEKRFPRIWAPSPEQRDLRQLLLHRHKLVGMRRQVKGQLQHLALNQGIQRKYKLWTAAGRKVLEELPLTGWTAQRRKELLTLLDDLDTRVESLDQAVLEAAHKDRVAQLLQTHPGVGPVTALCYALTLGEISRFSQSRQVVSYLGLNPAEHSSGGRQRLGSISKQGNPLLRSLLVEAGQSAARLVPELKRAYQRLKHRKHSSVAKVMVARKLAVRLYWMWRTQQPYSATRMQGSPGNPVAVV

SEQ ID NO: 200071 - protein, 340 aa, unidentified
MSKITTIGLDLAKNVFQVHATDETDGLVMRRALRRGQVLRFFAGLPSCLVGLEACATAHYWARELRALGHEVRLMPPQYVKAYVKRNKNDAADAEAICEAVKRRSMHFVPVKTVERQSALLMHRGRELLVRQRTMLANALRGHLAEYGLIAAQGLHKVAGLIAIVRDERDARVPNMARQVLRVMAEQLGDLETRIAAIEAQIMAWHKSNPVSRRLATIPGIGPIIATAIAATVADPSVFRSGREFAAWLGLVPRQNSTGGKARLGGISKRGDSYLRRLLVNGAHAVLLRSRAARADPWLLALRGRRPRLVVAVALANKTARIAWAIMSKQDTYRRTIAAA

SEQ ID NO: 200072 - protein, 411 aa, unidentified
MDLVYPRCAGIDVHKRTAVVTIGWVDEQGQRQRKTRTFGTMTAEIEQLAAWLVEHGVTHVAMESTGVYWRPVFNLLEPHVEVVLANAAHVKAVPGRKTDVRDSEWLLDLMQHGLIRGGFIPEAPIRALRELTRYRTGVIEERTRALNRIQKVLEDTNIKLASVVSDILGVSGRAMLEALIGGETDPEVLAGLARGTLRKKHDALVQALQGRILDHHRFLLRTLLAHVDQLTASIAELNAEIARRLEPYAAAFDLLCTIPGIKRRVAEVVLAEIGTDLGRFADARHLCSWAAICPGNHESAGKRRSGRMRHGNRWLRGILVQAAWAAIKVRGSSFGARFRRIARRRGDKRAAIAVAHSLLTVVYHVLTRDEPYRELGGEYFDRRKPEHQARYYARRLAELGFDVTLDPVTAA

SEQ ID NO: 200073 - protein, 341 aa, unidentified
MRKTFFCGVDLHSNNAMYVITDQEDKPVLKKRLPNRLPVVLEVLEPFRKQLKVVAVESTYNWYWLVDGLRDHEYPVVLANPSAIDQYDGIKEADDLTDAAFLARLARLDILPTGYIYPREDRPVRDLLRRRTLLVQQRTAIIQSLQNMALRQTGQSIGWRAIGKLSDEERTELLGDHDCLGFVTTQQGDLIKLLGEKIKRFEEKVLEHAHLKPVYACLLTIPGVGVILALTIMLETGDIGRFETVGDYTSYCRCVRATHSSNGKSKGKNNGKNGNPYLAWAFVEAVHHAIRACPQAERFYDRKRAKRCGALATKALAAKWSKAAYYMMKRQEVFDLKRVFG

SEQ ID NO: 200074 - protein, 355 aa, unidentified
MNCEKYIGLDVHQATISVAVMDSMGKLIMESILETKASTLLEFLGGLRGTLSVTFEEGTWAAWLYDLLKPHVANVVACNPRKNAALNQGNRSDKIDARELANRLRRNDLKPVYHGENGIRMLRELARSYLAIVKDLTRVMNRLKALYRSWAIPCAGRDVYYSRHRSQWLEKITEAGPRRRAQQLYQQLDMLQYLRQQARRELLAESRKHSVTAKLRRIPGLGPIRSALAVALIQTPHRFRSKRQLWKYCGLALETRITGEYVYVHGERRRSKKQLSIRGLNKDHNHDLKGLFKGAATRASVKPGPFQEFYQRSLAKGIKPTMVRLTLARKIAALTLTLWKKGENFDVDKLKSQAA

SEQ ID NO: 200075 - protein, 386 aa, unidentified
MDNYTGVQPNSQIIQEAFMQFIGVDLHTNKFTCCYRDEKSVPDGKKETATFELSPYGIAQFFSTLTGETYVLIEATITTFCFARLIQPMVKQVIVANTYELKQISLARKNTDKVDADILCRILKMQVLSGEQTISPVVVPPVEIQELRGLFTTYRLFRKQTTQVKNRIHSLLKERLYGFTQEEIFTQGQRKAIRALDKGSAMSFQVNQLFDWLESMESQVESLKGRIMEHAEPFMREIEILTSMKGISVFIAIAVIADIISVDRFRNSKAFTSYLRSAPKVANSNTSVNVGRTNKKGRKLSSSLITQSLNHVLDASEKLSEWYDRLTEYKKAGLVRGGLRRRVFAEIYQMLKKGEYHYGRDAKKHEAKMRQYKNILEKRKNLVKTA

SEQ ID NO: 200076 - protein, 412 aa, unidentified
MKFVNEKTLIVAVDIGKVSNQGYGRCPNGEEVKPFEFFNNGEGFKKFWERIWQAKEIYHLEAVVVGFESTGPYGEPLVQFLSKRPVRLVQVNPMHTKRLKELEGNSPEKTDRKDPKVIADIMGLGHALTVIIPEGSAAELRRLTQARERAVQRKTVLWNQLQSLLALLFPEFLQVMKDMKTHSARYLLGHYPTPQEICRLGLEGLTALLKRVSRGKLKGERARAVYEAASESVGLQEGQLAICLEIRELLGAITATEGFIAVVERGMAQGLEQIPYSPFLLSVRGVGKVTVAGLIGEVGDFRKFHTLSEIMKLAGLNLFEISSGQHKGRRHISKRGRPLLRKLLFFAAINMVRQNGLMRPFYQRLVGRGMRRIKALVAVARKLLGILFALVRDHQVYIPDYGKKGTVELEAA

SEQ ID NO: 200077 - protein, 351 aa, unidentified
MIIIGCDFHTRFQKIAMVDTETGEITKRRLEHGNGDARAFYAALPGPARVGMEATMNAQWFERLLQEYHHELWVGDAAQIRAAAVRKQKTDDRDALHILDLLVRDKFPRIWIPSPENRDLRQMLRHRDKLVRIRTSVQNQLHALAMSQGLCRKAKLWTKAGRKELEGLPLDPWASRRRRELLQLFDQLDPQIEELDKVVIQEAEKRPAAVHLMTQRGVGPVTALAFVLTIGAVERFPTSKHLVSYLGLNPGEDSSGGRQRLGAISKQGNSIMRHLLSEAAQTAVKFDPELRRDYLRLKFRRGISGVAKVAIARKLAVRLYWKLREVAQPNTAARMQGSPTSLMVEATPSRN

SEQ ID NO: 200078 - protein, 356 aa, unidentified
MKNTKLNFSGQRIYIGIDVHKISWNVTIILNGIKVKKLSMNPKPKELYNYLVKHYPQGEYYSVYEAGYSGFWADRELRALGINNIIVSPADVPTKSKERRRKTDRVDSGKLARELSVGHLDGVYIPEEKAEALRVLVRLRRQLVTDQTRVKNRIKSLLLFLGQRVPAEVEEKHWSKRYVRALRNLPINQEESKRALLELLDNLESIRNQIASIVKQLRNYVAQDKELSKTIGLLITIPGIGFVLSIILYSEIIDIKRFGRLDELASYVGFSPAVYSSGEKEITLGLSKQKNKYIRNYLIEASWIAVRRDLALQMAYGKLCKRMPGNKAIIRISKKLLNRIRYVWSNQQPYQFSVVG

SEQ ID NO: 200079 - protein, 343 aa, unidentified
MSKISIVGLDLAKNVFQVHGVDASGGVVLRRQLRRGAVEKFFAQLPPCTVGVEACGSAHHWARVIGHYGHQVRLMPPAYVKPYVKRNKNDGRDAEAICEAVSRPTMRFVPVKSVEQQATMAVHTTRALLVRQRTMVANSLRAALSELGIVAAQGIKGLRELMAKLEAPYEEVPEIMRGALLLLARHWQSLEADERVLEQQIAKAARSDREARRLMEVPCVGPIIASTVLAKVPDATVFRSGRNFAAWIGLTGRDHGTGGKHRPGRISKQGDRMLRALLISGASAYLRHQRTRGVSDPWLRDLLARRPYKVVMVALAAKTARIIWAMLVKGEPYRDRASAPAAA

SEQ ID NO: 200080 - protein, 393 aa, unidentified
MRISVGTDVAKETHWVVALTEPGEVLLDHAVDNDPAAIEALIAELGALPGECTIGLDVLGGIATLLSAMLLAAGQRVVHVPGLAVNRARQGTTGGETKSDPRDARVIAEQVRSRRDLRSIAVEEEPLAELQLLVGRRRDLVAEQTRRLARLHDLLSRIHPGLERALDLTNKSGLCLLTRYVTPAEIRHAGRARLARHLRASGARHVEAIATAALEAAQRQQIALPGERVAADLVRELAREALAVRERLGEIDAELAQVLAVHPDSTLIRSLPGMGVILTAEFIAEVGIRDRFADADALAAAAGLAPVLRQSGKVRFLRRPLGGDKRLKRVFYQAAFCSLSCPASRAFYARKRREGKRHHQALLALARRRVNVLWAMLRDRRPYELQEPRCGAA

SEQ ID NO: 200081 - protein, 365 aa, unidentified
MQKAELSCEADSENYLGGSSETMYYIGLDVHKRTISYCVKDAAGRVHMEGKVGATRRELDAWIKTLPQPRTIAMEATIFTGWIYDHLLPHAEAVKVAHPLMLRAIAAAKRKNDRIDASKIADCLRCDFLPECHMASTEIRDRRRTLRYRELLVKQMVQMKNRVSGLLLEKGVTHTKRRLHKVGYFAELMAGSEEIDASIRPLLKLSREHIVRAQKLDYALVSSLERDPMLVERLKRLRTVPGVGPITALTWALEIGDVTRFRSIKQAISYCGLCGAEKSSADKVMRTPISKQRNKHIQHVLVEAAKLAPRLNHELAQLHEKEMQKGNRNRATLAVARKLVCWILAVERRKQDFVPAEKLPGTAAA

SEQ ID NO: 200082 - protein, 370 aa, unidentified
MLHLLSDVMVSSQIRHPSAMIEFELTIKPEKTKMKITTIGLDIAKRDFHVVCCNKEGRLLKKKMLKRAEVLAFFHSHPECLVAIESCATSSYWAREIQRCGHEVKLIPPQHVKAFLVGNKNDYNDALAIAIAARQPHIRAVGIKSVEQQDNQAQHKARALAVGQRTALCNQIRGLVAEYGICVPQGVHTLRKHISIWLEDGNQQLSIQFKALLLQLNKQLHTLDSSIEVYDKAIMQYAKNNAICQRLLSVPGIGPMISSAYFNEVGNGRAYRKGRDVSASLGLVPKQHSSGGKDVLLGISKKGNRYLRCLLVQGAKAVVSRAKSKDDKLSLWINHLVFTRGHNRACVAYANKMARMAWAITVSGEEYSPV

SEQ ID NO: 200083 - protein, 373 aa, unidentified
MKRQNKTVGRKPNQEMIEGGMNAVAGLDLGDKHSVVTVMDLDGEIVERKKIRTSVAAFERYFQAWARMRVVFEAGSPANWTYRLLERLEHEPLMADTHRLALITQSLSKDDRNDSERLAELGLRMPEMLNAVEPCSLETQNDRAVLKAREALVEVRTKLINGVRGTLKSFGLRLPAMSSPTFAKKAGSLLPEELRDVLRPLLLMVQHASDEIRRYDKRIEELAETKYPQTKRMRTANGVGAITSLAFVLNLDNDPNRLRHSRDAGARVGLRPKRRDSGERSPELGITKTGDPMMRRLLVQCAQYILGHRGKDSALRRWGLGLAARGGKSAKRKAVVAVARKLAVLLHVLWQRDVDFEPFYGVQEVPEAPPQAA

SEQ ID NO: 200084 - protein, 353 aa, unidentified
MTDIATHNDRIATIGMDLGKRSFHLIGMDAHGKVIMRQQLSRGRFERHMTNLQPCLVGVEACAGAHHIGRRLSAFGHNVRLIPAQYVKPFRKGQKNDYRDAEAIAEAVQRPTMRFVPIKSAEQLDLQALHRIRSRLVGHRTAVINQLRGFLLECGVIVPQGPAMLRKILPSVLAQRTDVLSPRMVRLIEELADDWRRLDDRVDAVTGEVQALARQDEGCRRLMSVPGIGALTASAVVATIGNGAAFTKGRDFGAWLGLVPKQLSTGDRTILGRLSKRGNKYMRTLFIIGARAVLAKPGSWAKFGLEGWLAAAAKRLHHNVLAAALANKLARIAWSVLYHGRSFARDFELQSVS

SEQ ID NO: 200085 - protein, 426 aa, unidentified
MVECLTVAAGISLAARETICNDPQVCRIVDLPVYYELETNNGNRDYRIQIGGHYMNYNTVYVGMDVHKESFTLCSCKYEDEKASHYQRTPASYKNVLRYLAFLRTIYGEDTRFVCGYEAGCLGYSLYHQLENFNVECVILAPTTMLEQRSKRRIKTDKRDAEIIARSLAQHNYSPVHIPTETDNQTKEFIRMRDDHKAELKKIKQQILSFCLRQGYQYDGSGNWTAKHVKWLRSLKPAGLYKEILDEYLLTYTILTDKLNRLDQRIEELASKEEYTESVSKLTCFLGIKTHTALSVIVEVGDFQRFVSARKFAGYLGLVPGQHSSGDDRNGLGITKAGNTHVRRLLVESAQSYTRGKIGYKSRVLRSRQAGNSPQVINYADRANERLRRRYYKMVLKDGKKYNIAKTAIARELACFIWGMMTDNIY

SEQ ID NO: 200086 - protein, 436 aa, unidentified
MASHCQFYNYKFQEVILLSFKILKFKCCGLDVHKTWIYACIGITDSNNRTEYKQARFSSFTKGLNELCDWLAKYNCTDICMESTGKYWIPVFNILEQHNLWVTLSHPKYTKPMKGNKTDRKDAKWICDLYMCGMVKPSFIPPADIRELRDLVRYRYKLTCMITGEKNRAQNCLTVSNLKLDDVFSDVFGKSSRSITEQILQHPGEKFDVAPFVHGRCKTPIEEIQAAVDGAISKEQAVKLRQCLDHIDELNKHISELEQEILRLSDKYEAALNLIRTVPGFDKNPMTAVQMLSEIGGDMSVFPTAKHLVSWAGCCPRNDQSNQKIKSTRISRAGSYFKPVLVQVANALIKSKKHLEFTNRYKRIKARRGHKKAIIAICRMILTAIWHILSDLKPYTPEGFLESHPVKEGKVLSSSQALNFFKQRGYIIKDEPLSVS

SEQ ID NO: 200087 - protein, 351 aa, unidentified
MKTNTPPNSETQARIQQLKLGVDWHADHFRVVRMRDGQSPQPAQRFTPASFLPYVQKQLTLADQVCVVYEAGPGGFHLHRQLTALGVRTFLVHPQKLDPRHKGVVTDKTDARELTLNLDRYLRGNLRAMSVVRVPTPAEEQRRALSRQREQLRRERQRLAAQGRSLCLTQGIRLRGEWWSQTLSLPEWLEPRLSVWRKLIMAVEEQLEALTQQVEALAPKARPKGLGPLTLGLLIAELCDWSRFKNRKQIGSYTGLCGGVSSSGQSHCDLSITKAGNARVRWALIELAWRMVLYQPQSKAVQRWKHVLLNPRAAARQKKRALVALARQLAVDLWRWQTGKITPEQLGWVMV

SEQ ID NO: 200088 - protein, 332 aa, unidentified
MSSMQQDPSRRRVIIGVDTHKYVHVAVALDANGGVIGSGTFAADSFGYQQLIDWAIAFVKKTVFAIEGTGSYGAGLTGAVRRRQVGVVEVMRTDRRDRRLRGKSDTLDGENAARTVLAGKADAVPKSADGAVEMIRQIKVAKDVAVKARTSAMISLKTVLVNAPDELRQALQPLSKMALIDRCATMRPGVVNSVPAATKHTLRAIARRWQTLDTEIKIHEKLLADLTTALVPQLTEAFGVGPDTAAELLIVAGDNPSRVRSEPAFAKLCGVSPIPASSGMINRHRLNRGGHRQANAALYRTVNVRMQYHEPTKTYVARGTAEGKPRPRSSAA

SEQ ID NO: 200089 - protein, 410 aa, unidentified
MSVLEVALDPATVIVAVDPGKAFNRVWISDGSGLLADPMSLPVTRDGICHLERVLNEQGSTGPVIAVEATGSLHRPWVTELERRHPGSVRVFAPSETKSARMQLGSGRFKSDDRDCAALTYMARQGGGRRHGQQSAVEALRAAVRYRRGLVADRKVAQQRLHDQLNALCPGLSAPAGHGRSLALETPTGLAVLACAAAFSGRPPRLRSLMSRAPGRLSTQTAEYWLQRWRRCLPPPADADRRAWRLGRDLGRYRCLQADIVAVDEEIAGLLAATEGQVLITLPGVGTIRAAAFAAHSLPIERFPDAEHLYSATGLAPALYQSSTLNRRGRISRQGLAEHRDALMGIAWGLSQNSPSFATRNAELRARGMAPIQARVALARHACRLAYRLLRTQQPFDEQRYRRGRLGRER

SEQ ID NO: 200090 - protein, 346 aa, unidentified
MLIVGCDFHPSWQQIAWLDSETGETGERKLAHAAGEAKQFYEQLPGPALIGMEATGNTQWFIELVEDLGHVMWIGDAAEIRASYVRKQKTDKRDAAHILKLVVEGRFPRLWMPDREQRDLRQLVLHRHKLVMIRSRVKNELQHLSLNKGMQRKARLWSEAGLELLRQLPLKPWASCRREDLLGLLSMLDGQVGKLDRAVEQAAQANPQAKLLMTQPGVGPNTALAFVLTIGDVSRFRRGKQVASYVGLIPREESSGGRQKLGSITKQGNRLLRSLLVEAAQNAVRYDPGFRKPYLHRCHQKPKAVAKVAAARKLAVRLYWMLRTQVGYPEIVRIESSPRVALVGAS

SEQ ID NO: 200091 - protein, 410 aa, unidentified
MLKIVYPICCGIDVHKTFVVACIASTNAKGVTTYQSKRFSTYTKNLRELSDWLAANNCKDVCMESTGKYWHPVWNVLELTCRPVLAHPKYLKAIRGKKTDKKDAKWIADVFKHDLVSGSFIPPALIRELRDLLRYRFKLTNFKSSEKNRAQNCLTTSNIQLDHAFSDVFGKSATAILNHLLEHPNDKNFDVTPFIDRRCKTPIEEIQLSIDGELSHEQAEKLKIIRSHMDSLEDCKATLEAVILKLAEPLLPQINLVSSVPGIKEFSAITVIAEIGVDMSVFPTAKHLCSWAGLAPQCNESGGKKKSSRVSRAGVYIKPLLVQCANAVVKSNKHPEIKNRYLAIKKRRGHKKAIIAIARMLITAIFHILKKNEPYNPELYRQSDVSPVDRVEQAVKLLEKNGFVVSRPVE

SEQ ID NO: 200092 - protein, 352 aa, unidentified
MTVTIVETRPNTRAITGGVDTHADVHVAAALDPVGGLLGVQEFPACPAGYAQLLGWLRGFGAVCLVGIEGTGSYGAGLARHIAAAGVRVVEVDRADRQDRRRQGKSDPLDAVSAARAAQSGRAAGAPKGRDGAVEAIRALMVAKRTARAGRTQTINQARALVLTGPDDIRIRFTQHTPADLVAELASLRPRSGAVVCYATRIALRELGRRAQFLGRQLERLDELIVPLVTARAPGLLALYGVGADTAAMLLIAAGDHPERLRSEAAWAHLCATAPIPASSGKVTRHRLNPGGDRQANHALWRIVITRMSSHPPTRAYVERRAKEGLSKKEIIRCLKRYVAREVYPHLRAPAG

SEQ ID NO: 200093 - protein, 438 aa, unidentified
MSNNVIFNLDELFISVGIDVGADFSWMSIALPNQQLVGKPYKILHSSMNSLTTAVSKIKEAEELYSLESRIFLESTGIYHYPLFCYLRDKGFNCSVINPIITKNSTNINIRKVHNDRFDSKKAAFVGLKPDLKVSLMPSDLALNCRNLCREYYDLMDNRSAYVNKLQGELRMAFPQYLGIFSKVTINTSLTLLDTYTSPSAFLEADKQEIIDIIKSTARFGLTYAQNKYNAIIQAANEANEFGYIIESNIKRIRLYISFIRKYDEEINGILDSLHELVDANEDTDFVKQIHLIETFKGAGFLSAVSLMGEIGDFSAFSKPKQLFAYFGLDPAVKQSGKFEGTKIQMSKRGSAIARRVIHTLTLQSISISRKGDAKNPVLRDYYLKKCESKPKLVAMGAVAHKVCNIIFAILRDNKPFEIITPQEHIKQYNATKCDIAA

SEQ ID NO: 200094 - protein, 296 aa, unidentified
MNLKIDVARASLEIALSAQGIVMTFPNTPEGHDQLASTLANYEIDLVVLEATGGYEMPVACVLQTRGLAVAIVNPRQARDFAKAMGYLAKTDKIDAQMLAQLALVLSQQTDRDKITRVLPSAQQQVLQAMITCRRQLVTLSVSERQRLGSCHPEIRESITLMISFIQEQLKVIESALSKHIKAHHRSKLDLLSTVKGVGPATIATLIADVPELGKLTRRKISAVPWLALHRLIRIQDSGFFRGKRTIFGGRAIVRRMLYMATLTAIRFNPVLCAFYKRLTEAGKPNKVAIVACMRK

SEQ ID NO: 200095 - protein, 343 aa, unidentified
MKQKATVLGIDLAKRVFHLVGMDDAGHIVLKKRLTREALLPFIAQLSPVVIGMEACGGAHYWARQFRAHGHTVKLIAPQFVKPYVKSNKNDPADAEAICEAVTRPTMRFVPVKEVDQQDLQAFHRARARVVKARTALVNEIRGLLAEYGIVLPQSVTKFRHTFLATLEAERAKLTPLSTELFGQLYDEFGALEKRLAYYTAKIEAIGAAHPVCQRLMTIPGIGPLTATALVAAVSNASAFKNGRQFAAWIGLVPRQHSTGGKPRLLGISKRGDVYLRTLFIHGARATLRWLRLKTDRRSTWLRGLMDRRGKNKAAVALANKNARIAWVLLTTDQVYIAEQAAA

SEQ ID NO: 200096 - protein, 346 aa, unidentified
MGKSIIDLSSVTAVGLDLAKHVFQVHGVDALGHVVVAKPIRRNKLLEFFASLPRCLVGLEASGSAHHWARELIKLGHDARMMPPAYVKPYIRRQKNDASDAAAICEAVTRPSMRFVGVRSLENQAALMRHKAREMLVSQRTQLLNGLRGHLTEVGVIAAQGPRHARELAELIEACDEAIPFEVCEALALLVVQLRNLDDAIARLDRTIAKLAQKDETARRLMSIPGFGPITASAMAATIQDTSSFAGPREFAAFLGLTPKQNSSGGKPKLGRISKMGNRNLRKLLVVGAHAVLFHRKPHTDSLRMWAKKLIEKKPFKLVAVALANKMARIAFAILRSKTVYREIPA

SEQ ID NO: 200097 - protein, 378 aa, unidentified
MNKCHLNTELSSHEGTRCQFNGGTGAIELGIDVHQDFYVVVMQEGGANPKPPQRFWKQAFLHWVAKLARSGSEVHAVYEACGFGFTLQRQLSALSIRCYVVCPQKLDEQNRRVKTDGLDAKALVLKLDRFVEGNRSALALVRVPTQEEEQKRAIHRQREQLVKVRKQLEAQGRSLMVNHGFEPVKSWWKQRTFAALQLPAWMKELLLANTQPLLLALQEKIGALTVQLQSAADPKQPRGLGLMTSVIIDREIGDWNRFNNRRQIASYTGLCPGEYSSGNTRLQSCVTKHGNPRLRAALVELAWRLVRFQPNYKPIFKWRRLLAKGAFATGAARKKAIVAVARQLAVDLWRVRTGRASSRSVHLVVRGEQKGEHGLKTN

SEQ ID NO: 200098 - protein, 346 aa, unidentified
MEHYAGIDVSLELSSVCVVDTHGKIVRETKVASEPEALVAFFASLGFAVKRIGLEAGPLSAWLHAGLKRAGFDTVLLETRHVKAALSAMMVKTDRKDARGLAQLIRMGWFRPVHAKSMGSQEVRALLVARKQLLGRLIDVELSIRGILRGFGLKVGVVTRKGFEGRIRELVTGHVTLERIAGAMLSARATLKVEYEKLHKIVLTIVREDAVCRRLMTVPSVGPLVAITYKSAMDDPDRITKSKAAGALFGLTPKKYQSGEKDVTGGITRAGDEMVRTALYEAANVLLARITRFSKLKRWGMDVAKRRGSKRAKVALARKIAVILHRMWVDGTTYRWTDAQPIAVQV

SEQ ID NO: 200099 - protein, 316 aa, unidentified
MSKTTIVCAGIDTGKRRLDVAINNTGEELAVDNTADGHARLSAWLRQHRVRRVGIEASGGYERDVVLALRRDGFKVIMFQPAQVRAFAKFNGQRAKNDRIDARLIAACTAAVKTIHAAPDPRLLKLADHLTVIEQIGEDIARHKTRRETCRDARRRAFWSAEIVRSERMLNAELKTLAAAIRAHRDLATRLDLIASVDGIGERTAIAILVRMPEIGRLSREQAAALAGLAPYDDDSGEHHGQRQIDGGRERLRTSLYAAALPAAFRWNAQLVAMYKRLIAAGKPHKLALVACARKLLIFANTVVARGTPWTSQPAH

SEQ ID NO: 200100 - protein, 357 aa, unidentified
MESQEVKYVGVDCGKKSIEVVRINSENSLERRQFSTTESGINNLLQWLTLNDIVGLEAGSQSFRIAKSILNKGVQVIVLNPGNLATIYQSLKKTDKEDSLKIARLIQRHPIEELPTVPIPNDEEEDNRRLCSEHENWTKQLTQGKNRLHSLFTQAGLTQITKKHLRTKANREISVALLPSRYQKEAERILKVLDLVEQNLKLIEKEIQEALKKSKAYVQTIMSMPGIGMITSLAIMSYMGDCKRFSSAKQAAYYAGLVPRVDISGDTVRYGRIINRGCHSIRRVIVQAAWSLVRCQHGGKVKEFYQRLYLKKGAKKSIIATSRKMIEVLYVMIRTGKLFDSMPENILNRKLTQYGLM

SEQ ID NO: 200101 - protein, 348 aa, unidentified
MTIAMIGLDTAKTVFQVHGIDESGKAVLKRKLHRSELVGFFEQQPRCTVFLEACGAGHHWARLLSGLGHEVRLIAPEAVRPFVRKGSKNDAADAAALCVAGSRPEASFVPIKSVEQQAVLALHAARSLLVKQETMLANALRGLAGEFGLIVPKGMHKLEELMALVSAEAGIPAAGRQAMAELHAHGRAVAGRVATLEEQIVRHARQDATARRLATIPGVGPITASLIAATVGGNIGAFGSARRFAAWLGLVPRQHSTGGRTRLGRITKAGNAEIRRLLVLGATSMVRRATRWDSQAGLWVRGVLARRPVRLVTVALANKLARVAWALMTRGEIYQARGRTPAAAATVA

SEQ ID NO: 200102 - protein, 346 aa, unidentified
MKYIGLDVHSDHINCVVINEKGNLIHHDCFKTSLKNLINLSEKLKHPLSLVFEEGELADWLYQGLRSHFEKITVADPIENRMIYGGDQKSDPIDPLKLATLLRGGFINPVHHTWDHHRSQFKQLVFAYHDMARQLTRIKNKIKAYYRKQGIIIKTSSVYHPLHRQEFITQCRHPEIIRKYYQFLDLFQLEKNRFEKKLRKESRKYPVIKRFLKIPGVGIVTATTFFTIVDDPNRFDHKQKLWAYAHLGKAVHQSGNYEVTRHQRKGNRLLKYVIKIAVGDAVRQKTNDFTRAYIHMVNIQQKDSKLAYRILARKLATIMWTMWKNNQPYIPRNSDMMPKDTAYEIS

SEQ ID NO: 200103 - protein, 314 aa, unidentified
MIISPHCVGIDVSKRMLDIFDDAVGRPERIANTLQAITERVAGWRCGNVFVVFEATGVYDRELAEALRQADIRFARINPARARDFARADGRLAKTDAIDARMLAIFARKMMPAVEPAPEPARSALASLAKRRDQLVQIRAQEKNRRSEATDRTTIEGIQRHLDFLNGEIKAIEASIKTLIKAEPDISEQARLMRSAPGIGPVACMQLLAKMPELGCLGSKQVAALAGLAPFNVDSGSYRGKRAIGGGRKRVRDALYMAALNAVRRDLTMKAFYQKLRTVGKPAKLALIAVARKLLTTLNAMLRDRKTYALPQPS

SEQ ID NO: 200104 - protein, 317 aa, unidentified
MTQTSMTTAGIDTSKNKLDIAVHGLSQRWQVANTPAGWRKLADRLAETEVKRIGIEATGGYERGVVEHLRAAGFAVKVLQPAQVKAFGRVHLRRAKNDTLDAVLIAACTAALDPLRIASDLRLTKLADQMTFLDQIGEDIARFKTRLEHIDDPRLRRVVLEDIARLKARKLAQIRDIARQLRSHHDLAVRLDLVLSIPGIGELTALAIVIRMPELGQISREEAAALAGLAPFDNDSGQYKGQRRIAGGRNRLRRSLFAAALPAAFRWNEALIALYRRLIAAGKAHNLALIACARKLLIYANTVVQRGTPWTERPVHV

SEQ ID NO: 200105 - protein, 410 aa, unidentified
MTLFCGIDWAQSHHDVAIINDTGTVVAQARVGDDAAGFACLLELLAGAGDTAGNPIPIAIETDHGLLVAALRSTGRTIYAINPLSASRYRARHQVSGAKSDAADAVMLANIVRTDAGAHRSLPVDTDLAQAVRVLARAQQDAVWSRQQLGNQLRSLLKEFYPAALEAFAGLPEGGLARRDARAVLAVAPTPALAATLTRARLRTLLTKAGRRRNIDHDVDRLYGIFRSSRLRQPPMVENAMGIQFSALLRQFEAACAAADSLAEAARTHFEQHPDATIITSFPGLGLLAGARVLAEIGDDRTRFTDPRGLKAYAGSAPITRASGRKTVVSHRHIKNRRLAAVGPIWALASLRASPGARRHFDARRAAGDWNHQAQRHLFNKFLGQLHHCLQTGCRYDEHQAFPPPLAAAA

SEQ ID NO: 200106 - protein, 348 aa, unidentified
MIVIGIDSHKRTHTAVAVDGTGRKLAEKTVPARSAGHLELVHWAARFADRTWALEDCRHLSRRLSTDLLVAGEGVVRVPPKLMAGVRRSSREPGKSDPIDALAVARAALREDLPVATLDGPDRDVRLLVDHREDLVAERTRAQNRLRWHLHELDPGNEPVARGLNRAVVLAGLERDLAAAPGTVGRIARELVDRIRELTATINDLEREIARLVAALAPSLLALTGCGPLTAAKLVGETAGIGRFRSRAAFARHNGSAPLPVWSGNTVRHRLSRTGNRQLNLALHRIAITQLQREGPGKTYLEHRRAQGDTKPEAIRALRRRISDEVFRRMSHDEAARAALPSGLAAAA

SEQ ID NO: 200107 - protein, 394 aa, unidentified
MKLVGIDVGKNSHHFCVMDKETGEFNVTPTSFSNNKEGFDFLIKSLKPYSKKSILIGMEDTGHYHVALLKFLLSNGYTVALINPKTTDLTRKMEGGITKNDKLDTITICDVLDTPERKKQYRITKVDRFDLYEQRQLTRHHHNLKEELNVYCNRLQKSIDLVFPEFNTLFSSKYSIVYMNLLKTFGSAEAIASTDIRTIRKCFEIKGRGNRISLTPEKLKECAKNSIGISSEVETIQIKHLVSQITLIKEQIAEIDKKIEEFSITNNSPILSIPGISHFSGTSILAELGDIGNYSKPSQIIKFAGVAPYHYESSQYNAQHTGITKKGSKYLRKTLYQIILTVINNNPVFKKYYLLKISQGKGHRCAQGHCIRKLLRIIYHLLETGQSFDPALLR

SEQ ID NO: 200108 - protein, 359 aa, unidentified
MNAIHYIGLDVHKKTISYCIKTADGQIVQEGTLEAERTVLRRWAKSLRQPWHGAMEATLFSAWIYDTLKPYAQQLYMGHPAKMKAITAGKKKSDRIDARTIADLVRCDLLPKCYVLPPELRDLRRLLRYRNMVVQQSVRMQNKMAGLLMESGTAFNKEKLHGKKYFTDLIKSLREVPESVKDLLRMSRGAMEMFESTQKQLIQRLLSEPALEQRVERLMSIRAVGPITALTWALEIADPHRFSSIADAASYCGLTTAFRSSAGKQQRGPISKQRNAWLQTMLIEAAKLAPRWNPQLAALYAQQLKRGHPNRATLQVARKLVAYLLAVDKSGQPFQLPTPPMLPITAKAKKKKAALARAA

SEQ ID NO: 200109 - protein, 401 aa, unidentified
MEGPIVSIDVSNGNSHYMCFIKNNKRFGKVKKIDHDIEGFKRLLEDIQKLEAETNEKVCAVFEATGVYTKPLERFLSKNSIKTYMINPLESARKRKEEIHNKKTDKLDPISISKVYYDKEEMMELKKKDETHNWLRKKNRLYEDQLNHLRKYKVTFQNQLSICFPGYLDLFKDGYSDIPMTILKKYPHPDLLKNKKAETVARYLEKNTCHTHKVSLEYALKIIEFAKKTYPGCEKDDVEVEIFKILLDKVIETQRECEKTLNEMITVASTLEEYRYISSIDGIGPNLAARIIAEIGDIEEFKSREALVAYAGLDPHIYQSGDQDGKHLKISKKGNKYLRCLLFLAVGCSIRGAKDNPVNRFYQKKKQQSNPLNSKAAKTACTAKLLKIIYGICKNKTTYER

SEQ ID NO: 200110 - protein, 369 aa, unidentified
MAKGESQVQAFLDQSKPYGKSFSIKHTREELDHFIGFLKEIEEVTGQMPMVILESTGHYHTPVIQFLEEQGVLYILLNPIISYQAKKSGLRKVKTDAIDAYQLCVLYYKEDFESHKIRGIRLLDLRNLSRQQEIVTNMYVEAKLQFHTILDQVFPEYRKVFGDLYSKVSLLMLKEYPTSEAVLTTGESRLAESVIEFCSSRSGECAWGKAKKIMDSASRNPFQKNVYESHVINLRMYMELLFHYQGHLSDLEDRIVALANELEEYKIIQSIPGIGEKIAATIISEIGEIDRFNHPKKLVAFAGVDPSVHSSGKFTATINRITKRGSSRLRHSLYLAVLCGIRSSRNNKLKAFYDKKKSEGKPAKVSIVS

SEQ ID NO: 200111 - protein, 351 aa, unidentified
MTMVGGFDVHRKQITFDYVDDDGLVRFGEIRPATRKTLRGWLSEHCPEGDAEFALEGCTGWRYVVDELAAAGVAAHLGDPAEIAVARGPKKRAKTDRADARLLRTLLLQGRFPESWIPPAHVLEVRVLGRLYCTLMDERRAWQQRIHAQLFHQGCPPIRALLTEAGREALARVELSAAGRQYVDSALRRIDELSAEIGPLRTQLVNFAKHQAGCRALQVHYGIGWLCAAIMWAEIGDARRFASSDQLVRFAGLDVTVYSSDRKCAPGHLSRQGSPELRWATFEAAKCAARRGSPDYGYYHKLAAKHDGHNGKNPTLAVERKILRRCYHTLRELGDAALGLPDTQPHQEVAA

SEQ ID NO: 200112 - protein, 345 aa, unidentified
MKKRIEGVTVYGIDIGKNSFHIVGLDSAGKPVLHTKFRRDRLLDHFANTPAVLVGMESCAGSQWLARKLQASGHTVRIIPAQFVKPYVKSNKNDMVDAAAIAEAVTRPTMRFVQVRQPEQCARQALHRVRDRYMSQRTGLINQMRGFLLEFGIAVRQGAGVFRMDVPRVLGDEQNELPPSMRSLLADLWNDFKLLEIRIEELSKQIQRSVQYSDTARRLMTIPGIGPLAASALEASAGNGHQFINGRYFAAWLGLVPRQYSTGGKTTLLSISKRGNAYLRRLLIHGARSCVQTCDRQRHPLGAWITKLEQRMHRNKVIVALANKIARVAWKILTKPEEIYHWSEA

SEQ ID NO: 200113 - protein, 337 aa, unidentified
MEQPTQYVGIDLHRRRSLIVRRNYAGETLDTVRIDNDPEALAAELAKAGEHPEVILEATYGYYWAADVIEACGGKLHLAHPLGNNWGNRRLKNDERDATDLVDLLRMGRLAEGWVAPPQLRELRELIRYRAKLVHLRTSCKAQVHSVLAKEGVVVPMTDLFGVAGRELLNHLQLAPAYRHRVDSLREFISHFDAEIAHLESEITPAFADDIGYHAIQAISGVGPVLAAVFVAEIGDIGRFGSAPRLCSWAGLTPTHHESDEKVRRGHITKMGSRLARWAAVEAVAHHRGATALRAFQHRVEDRRGNKIARVAAARKLLTLVYYGLRDGEIRCLAQTG

SEQ ID NO: 200114 - protein, 328 aa, unidentified
MPMYQLGIDVSKNTLDLCLLREGIKGRIKTRKLKNTADAAKVVAEWLKKQSCELGEVHIIMEATGVYHEPLAYGLHFAGARISLANPHRTREFARGMNILTKNDKVDAWMLACYGSLKEPEAWTPPPESVRYLRALLRRRDALVADSTREKNRLEKSVFTDSPDAVRASIENMLQELSNEIEHLDVLIQEHIETHPELNQDFRLLTSIKSVGYLLGLNMLAILKSHSFESAEQAAAFLGVVPVERRSGTSVKGKPKLSKIGPPEIRTKLYLAALCGLRFNPAMKQMYTKLCQRGKSKMCAIGALMRKLVHWCYGVLKTQLPFNAEYNQ

SEQ ID NO: 200115 - protein, 325 aa, unidentified
MADNVTGIAVVGGVDTHKDLHVAAVVDQNNKVPGTRSFSTTRQSYRKMLAWMTSFGALKRIGVEYTGTDGSGLLRYFQNAGLEVPEVTAPDRMARRKRGKSDTIDAECAAHAAFLGIRTVTPQTRDGMIESLRVLKTCRKTARSARRVALQIIHPNIISAPDELREQLRIMTRMQRIRMLGSWVPDASEYRNVTSVYRITLKSLARRYLELHDEIADLDVMIAALVDELVPELITHNTIGYENASQLLITAGDNPQRLRSESDFAALCGVSPVPVSSGKTNRYRGDRAAKSVLHIIAIGHLRTDDKTKAYVARRVAEGHTKMKAI

SEQ ID NO: 200116 - protein, 351 aa, unidentified
MSQNLNSAVAVIGIDIGKNSFHIVGLDARGAIVLRQKWSRGQIEARLANMPSCLVGMEACVGAHHLSRKLKALGHDARLMPAKYVRPYSKGQKNDFRDAEAIAEAVQRPTMKFVATKTADQLDLQALHRVRERLVSQRTGIINQIRAFLLERGVAVRQGLRFLRAELSRLLATPPDVLSPRMVRIIEGLAADWRRLDERIDHLSDEITALARQDAGCERLVSVPGIGPIISSAMVAAIGTGDAFSKGRDFAAWLGLVPKQISTGDRTILGKISKRGNRYLRVLFVQAAWVVLIKPQSWERHGLKPWIEVAKKRLHRNVLAIALANKLARIAWSVLARGRSFEARPTMASAA

SEQ ID NO: 200117 - protein, 364 aa, unidentified
MALSTLAPPLQSTQTLEPAVFIGVDTHRDFHVAVALNRQGALLGEMHLPARIVGYEALLDWASELIDTHGSGLLFGIEGTGSYGAGLCHALQEAGCEVREVNRPNRQARRQRGKDDSIDAELAARALVAGTATAVAKTRNGEAEMLRILKGTRDSAVRCRTRAITQLKALVISAPAELRESLEHLATADLVLQFSLAETPDVTCPYTAASRALQALAARIHHLEQEIAGLGQELDRLTHLVAPDLRAAQGIGADNAAALLIAAGDNPERLRSEAAFAALCGAAPVPASSGNRNRHRLNRGGNRQANCPLFRIALSRLRWDPRTKAYAEKRTADGKSKREILRCLKWFIAREVFRLLAANRVQPV

SEQ ID NO: 200118 - protein, 423 aa, unidentified
MDVLYERVAGLDVHKDTVVACVRMLVDGKTKRECRTFAATTEQLVELRAWLEECRCTHVAMEATGVYWMPVFRILDDGEFELIVANAAHIKNVPGRKTDMNDAMWLADLLACGLIRASFVPNEGVQELRGLTRTRKQLIREQTRHMQRIEKTLAEANIKLGSVISDVMGASGRRIIKAMIAGVRQPKQLAELAGKQIKASPKELYDALHGRLTDHHRFLLELHLKQWDSINETIRKLDLEVDQRIARMEAKAGSRNTPFRTLIELLTTIPGVSAVAAPAILSEVGDDMSRFPTAGHLVAWSGLCPGQNESAGKRKSSRLRKGAPWLKTMLVQCAWAAKRTKDSYYRAQFFRLQAKRGPQKAICAVAASILTAVYHILKNGTEHHDLGAAYFDRRPVELKASRLVARLKKLGFTVQLQPSAETA

SEQ ID NO: 200119 - protein, 389 aa, unidentified
MFYAGIDIGKFIHEITLIDDKSSKPKSLRFQNTRQGFEKLKQFLPDAQEVKISIEATGHYWLTVYYFLIQQNYSVLVVNPLQTDAYRKTKLRKTKTDRQDSFILAELMRLNLIQETPVAPPWTHQLKSLSRFHFGLVDQIADLKRQLFSLLDKVFPEFESLFSHPLISSARTLLKNYPLPEEIAKLDLSELKNLLEKSSRNKFSQEKAIKIKELATSSIGLPYLADAARVQILCLINHLEFIERQLEIIDSHISNLVKTYAPYLSSLPGFSDILAGVCLGEIGDISRFANKNKLAAFAGIDPTIYSSGEYTAPEHHMSKRGSPYLRRALWIAATIARKYDKELKQLYERKINQGKHYGTAIGAVARRLVNRLFVVLKEQRPYKLSSVNS

SEQ ID NO: 200120 - protein, 407 aa, unidentified
MEVIIERACGMDIHKDSITACIMTPEGKVIQTFSTKTVFLLQLIDWIKEHGCTHVAMESTGVFWKPIVNILEAENIEFLVVNAQHIKSVPGRKTDVKDAEWIAKLLRHGLLKASFIPDRTQRELRELVRYRRSMIEERARQHNRIQKVLEGANIKLGSVVSDVMGVSSLDMLRAIAEGENDPEKLAGFARRSMKKKKAELELALRGYIQPHQRLMIKTILTHIDFLTAQIELLNQEVTCRLSTHQEDIERLDSIPGIATRMAEQILAEIGTNVEKQFPSAAHLCSWAGLVLGHNESAGKRKSSAMKKGNKYLKSALIEAAHSVRGSRTYLGALYRRTATRKGKKRAGISVAHAILRIAYYLLTRKEMYIDLGEDYFDKQKEQSIIRYSVRRLESLGYDVTITETDAP

SEQ ID NO: 200121 - protein, 370 aa, unidentified
MSMYFVGIDISKYKHDCCIISAVDQQIVSKFTITNDKDGFEQLLISLNSLSNPEDIKIGFESTAHYALNLELFLENANHSFMEVNPVLIKEYKKSTTLRRTKTDSVDCESIARWLMTVEYKPHSKGFYHAYSLKSLTRLRDRLIRQRSFYLVKITNVLDHTFPEFKPFFNERLSKTAIYLLENYGSAEKMAHMNSASYDKLRCISRGKFSIQQFLHLKELAANTVGVNNSIFDIELNSLLTLYNSLCKEIKNLEAEITRLIEEVHPHYMSIPGIGPISAAVIYAEYGDISNFSNPSQMLAFAGIEPGINDSGTESHGGRMVKHGSSQLRYVLLNACLPLIRFDLTFATYYAKKRAEGKKHRVAITHVAKN

SEQ ID NO: 200122 - protein, 344 aa, unidentified
MSNLDSCGIEVSAKELLVRLRRQGELQPLRNFTNTPEGREMIIRYLRQAGRVVRVCLESSGLYGLDLALALSAAPGLEVMVANPRAVRHFATALMKRSKSDPVDAGVLEEFAARMPFQAWSRPSPAALALHALARRLRELVEIQTAEKNRQHAAGLSETIPTAVRRDLARSLRAQQRAVERLTRAARKLIAQDPQLRERYELLDSIPGIGETSAVQLLGELAVLAPDLDARQWVAYAGMDPRQYSSGSSVHKKPRISKAGNKHLRHSLFMPALVAVQHDPYLGAFYQHLLAKGKFKMQALVAVMRKLLHAIHAMFKNHQPYDGSKLFQLPPIPAREVPSAAAVA

SEQ ID NO: 200123 - protein, 346 aa, unidentified
MTIVETRAITGGVDTHADVHVAAALDPVGGLLGVEEFPVSPAGYARLLGWLGGFGAVALVGIEGTGSYGAGLARHLACAGVRVVEVDRSDRQDRRRQGKSDPLDAVSAARAAQSGRARGAPKGRDGAVEAIRALMVAKRSAAGERTRTINQARALLLTGPDDLRARFAKHAPAALVTGIAALRPRPGVAAGYATRIALRELGRRAVFLDGQLERLDELIVPLVTARAPGLLAVYGVGPNTAALLLIAAGDHPGRLRSEAAWAHLCAAAPIPASSGKVTRHRLNPGGDRQANHALWRIVFTRMGSDPATRAYVERRTKEGKSKAEIIRCLKRYVARQVYPHLRPAGD

SEQ ID NO: 200124 - protein, 346 aa, unidentified
MNITTVGIDLAKLVFQVHGVDARGKAVLRKQLKRSQVSAFFAQLAPCLIGMEACGGAHFWARKLMEFGHTVKLISPQFVKPYVKTNKNDAADAEAICEAVGRPNMRFVPIKNTEQQALLGLHRARQGFVTGRTAQANQIRGFLTEFGLVMPVGIRSIKSKVPEMLEDAENGLSVVSRALIARLFEHFRTLDRQVDELEREINAWHREDTASQRLQAIPGVGPITASALVASVGDAKVFHNGRQFSAWLGLVPRQDSSGGKTNLLGISKRGDTYLRTLLIHGARSVLLSLKRHPDRADGWLARVAARRNPNIAAVALANKNARTVWALLAHGRDYQDGYSSVKPLAA

SEQ ID NO: 200125 - protein, 340 aa, unidentified
MNTMTLLGIDIGKHSFHLHGQDSKGHQVLRKKTNRGQLLSTLAQLPVCTVVMESCGGAHWLARQIGALGHEVKLIAPQYVKPFVKGNKNDFIDAEAICEAASRPAMRFCSIKTAEQQTLSALHRVRESLIGHRTMATNQIHGFLLEFGISLPIGVTALHRVPALLDDPQHPVPVRLKGVVMRLHRQIQQLNDEIKDIESDLKQQLKEDDAGSRLQSIPGIGPITASAVLADVGDASNYRSGRDFAASLGLVPKQYSTGGKTVLQGISKRGDKHIRQLLVQGARALMQHIDKREDALGPWVRELLTRRHANVVACALANKLARIVWAVLAKGGQYDPHPNV

SEQ ID NO: 200126 - protein, 322 aa, unidentified
MNKYKETYGVDISKDVFDVYGNKSGHCQFKNDEAGFKALLEHLPLQCLVVMEATGYYHYRLAQFLYKRAVAVSVVNPLSVKRFIQMKLAKVKTDKSDAKAICEYAQMNNVPLYNALTDVQSECLQLFRLLDSFLKHRTATKNKLHGEDALGIPSKAVYRSLKRNRKHLDKEISGIEERILSLVKKDQHRQLTLLTSIPGIGLKTALFLIVVTDGFSKFENASQLCSYVGITPTIRESGSSVRGRSRISKVGNRKLRNLLFLCSFNACKHNSACKAIYERIVNKGKSKKLALIAVSNKLLRQAFAIVKSGRPYDEAYVSVLPR

SEQ ID NO: 200127 - protein, 343 aa, unidentified
MKYFAGIDVSLNESSVCVVDESGAIIREGKVPSEIAPLVDWFDGIDVTCERIGLEAAPLSQHLHEGMAAAGLSPVCIETRHVKAVLSASINKTDRNDARGIAQMMRVGLYKPVHVKTQTSQEQRVLLTSRKFIVHKRQDVENEIRGALRNFGLKIGNAGRARFEVRVRELIQDNAFLRDVVGPLLEVRHCLREQEAALHKQVLRIARQDPVCRRLMTAPGVGPIVALTFRATVDVPARFAHSKSVGAHFGLTPKTYQSGNIDVTGRISKCGDGMMRVALFEAANTILTRIVKWFPLKAWAMNVAKRRGAARAKVALARRLSVILHRMWVDGTDFDWGSESCPV

SEQ ID NO: 200128 - protein, 343 aa, unidentified
MECYVGLDVSLKQTSICVVDQTGAVVREGVVDSDPEAISVYVRSKAPNAVRIGLETGPTSTWLWTELKRLGLPVICIDARHAKAVLKMQINKSDRNDAIGIARIMQTGWFKEVHVKDIDSHSVRALLASRALLVKIKRDLENHVRGLLKNLGLVIGRAKFNVFAVRAEELIEGRPELVVAIRPLLEARSAVEQQVSELDRKVMKLVRRDAQVRRFMTVPGVGPITALAFKATIDDPARFARSRSVGAYVGLTSRRHASGEVDWTGRISKCGDAMLRSYLFEAAGVLLTRVPKWSAVKAWGVKLAKRNGLRKAKVAVARKLAVILHRMWIDGTEFNWSKKEIAA

SEQ ID NO: 200129 - protein, 344 aa, unidentified
MTNIQPKETAQEAKPDLFAGIDVGAEELILVIRKNGKPFDPQKFANTPADRDRLVKKLVKLPGIIVCMEATGIYHFDLAIALHDAGVSLMVINPKASHNFAKVLMKNSKTDTVDANTLAEYAARMDFVAWTRPSDETIALRSFARRINALTGQKAAAKNHLHALNATSETPKAVLKDAKLAITQLEKRIDRLTAEALVLIGKHPELKRILALLIGIKGVGETSAIALMGELLLLPPGLSHREWVKFAGLDPRAFDSGKSVHKKTRISKAGNRHIRAALYFPALSAKQHDKHVKAYFQHLMDNGKTPLQGVCAVMRKLLHAIHGMLKKNEPFDNTRFYAIPECNG

SEQ ID NO: 200130 - protein, 331 aa, unidentified
MTTFAGIDVGATSVVLVSRHNGRSSAPEPFDQSVAGHAALVRRLCQLKPQLVVLEATGIYYLDLALALRAAGLPVAVINPRSFHHFARLKLVGSKTDGVDAALLAEYAERMNPALWQAPDPHRLALRDVGRQINRLTAARTQAKNRLHALRAKASTLPLLIDDELEGIALFDRRIQRLTVAATELLGQAPVLARQCQLIDAATGIAQASAIAILAELCILPSHLKANQVSRYAGLDVRLWQSGTSVNQRARMSKAGNAYLRAALFMPAMSAVRYDPRAKAFSLALQRRGKKKMQAVGAVMRKYLTGIWACLKTDQPFDSAKLFSEIHLAET

SEQ ID NO: 200131 - protein, 446 aa, unidentified
MAKRKKSTYERLQLGSMNRQQRRELKRRLNTEDPGLEVLHRDAAGIDIGNESHFVAIPPDRDSEPVREFGSWTADLLRMASWLKEHGIRTVAMQSTGVYWIAVQEVLEQAGLEVFLVNARGTKNLPGRKSDVRECAWLRKLHTCGLLRNSFRPPGEIRAVRTIWRQRDRLVKEAGRAVQQMQKALTKMNVQLANTISDLSGVSGQAILRAILAGTRDPWELARLRDGRIAASEDGIAHSLQGNWREDILFELRQVVEAYDFYQKQLADCDQELAKYMAAVASREAPKGQDLPKGASALPSSKPVRRSKTQRKNKPGFDLAADLQRTMGVDLTRIDGIDVITVQMIFSEIGPDFTAFPDEDQFASWLTLAPQNDITGGKVVRRVPAAGRNRAANALRMAAQSLSRSNSYLGARYRRLRARLEGPVAVKAMARYLACLVYRMVTKGQA

SEQ ID NO: 200132 - protein, 354 aa, unidentified
MKYYAGMDVSLEEIAICVVDETGQMIKEARAPSEPDALHAVLASFDLPFERIGLEACSLTAWLHGELTSAGWAAICIETRHAKAAMGAMPNKTDRNDARAIAQIMRTGWFKAVHVKTPTCRSWRSLLVARRAVLNEMRTIENVVRAIFRETGLKLGTPTRKDFIVRAREFVAGEKGLAMMIDPLLEILATMLREFTRLTKQVLVIVRDEPVCRRLMSTPGVGPLTALAFRATIDRPERFKKSRDVGAHLGLTPRRYQSGETDIQGRISRCGDELARTALYEAAHSLLIRSKKWSALRAWGMKIAKHRGMARARVAVARKLATILHRMWVDNTEFCFGREQAANPTIKATTVIAV

SEQ ID NO: 200133 - protein, 367 aa, unidentified
MMGWMAPLRHLSAKLLSDRISSEWEPSMGEVTTIGLDLAKHVFQVHGVDAEGATVLRKQLRRAQVLAFFSRLPPCLVGLEACATAHYWARELGALGHEVRLMPAQYVKAYIKRNKHDAADAEAICEAVGRPTMRFVPVKTAEQQASQLLHRGREQLVRQRTMLVNALRAHLAEFGMVAAQGLRNVGELVAIVRDDGDRRLPAVARQVLQVLANQIEQIEAAVTALERQLLVWHKTNPVSQRLASIPGIGPIIATAIATTVTDPNVFRSGREFAAWLGLVPRQNSTGGKIRLGGITKRGNRYLRRLLINGASANLLRSRATKADPWVIGLRRRRPPLVVAVALANKTARIAWAVMLRQKEYQPRAVAA

SEQ ID NO: 200134 - protein, 346 aa, unidentified
MEHYAGIDVSLELSSVCVVDAQGKIVKETKVSSEPEALVSFFKGLGFPMKRIGLEAGPLSQWLHAGLAQAGFETVLLETRHVKAALSAMTVKTDRKDARGIAQLLRMGWFRAVHAKSIGSQEVRALLVARKQLLGRLIDVELSIRGILRGFGLKVGPVTRKGFEPRIRELVTGQATLERVAGAMLLARAALKMEYEKLHKAVLAIVRDDAVCRRLMTVPSVGPLVAITYKSAMDDPSRIAKSKAAGALFGLTPKKYQSGEKDVTGGITRTGDEMVRTALYEAANVLLSRIARFSKLKCWGMDVAKRRGSKRAKVALARKIGVILHRMWVDGTTYRWREAKLIAAQA

SEQ ID NO: 200135 - protein, 319 aa, unidentified
MRIVHENVAGLDVHKKVVVAAVIVKQADGNWLEEKHSFGTMTVDLLELSDWLLLHGVIHVAMESTGEYWKPVFNILENNFEVIVVNAQHISKVPGRKTDQSDAQWIAELLQYGLLKASFIPPLGQRELRELTRYRSSFVRERATLVNRVQKVLESANIKLSSVATNVMGVSGRAMLEALIAGSASPEQMAELAKGRMREKREQLTKAMEGRVQAHHRFVLTELLCQIDSIEETITRFDQEIEAYCSPFEEVVELLDTIPGVGREAAEIIVSEIGNDMSRFPTADHLAAWAGVSPGNNESAGKRRSGRTRKGNQALRTVC

SEQ ID NO: 200136 - protein, 371 aa, unidentified
MKEYSTFVGMDVHKNSIAIAIAQRGRNGEVRSYGKINGTLDDLDKVVRKLVSKGGRLHFVYEAGPCGYGIYRHLTAKGYDCAVVAPSRVPKKSGDRIKNDRRDACMLARLDRAGELTPVYVPCAEDEAIRDLTRAREDAKADEKRSKQRLKSFLLRHGLRYAGKASWSKAHMRWLSDIKMDHPSQQIVLQEYINTINECTLLVQRLTEQIRVLLPSWRMSPVVEALQALRGVSLIVAATTVAEVGDLNRFKNPTELMSYLGLVPSELSSGEKTRRGSITKSGNGHVRRVLTEAAWAYRLPAKVSRAILDRQQGLPKKVCDISWKAQVRLCRRYRRLWAKGKPKQVVVTAIARELCAFMWAIAKEIEIPAAS

SEQ ID NO: 200137 - protein, 375 aa, unidentified
MSKDTRFVGMDVHADTIAVAIAEGRDRVRSLGIVPNRPEAIRRLLGKAGKLASLRVCYEAGPTGYALYWQLTKLGVHCDVIAPSLVPTKSGERVKTDRRDAEKLARSYRSGDLTPVWVPDSKHEAIRDLVRAREAAKEDQLRAKHRLSKYLLRYGQRAPDGCRAWTAVWWQWVRGLELTHPEQNTTLVELVLEVDHQAQRIERLDGAIDRAVNEAPEQLRALVDALQALRGVAKITAVTLATEFGSFSRFERAVQVMSYTGMVPSEHSSGARSRRGAITKTGNSHLRRVLVEAAWHYRHRPKLNQRQKELQPSLAPKVAAVAWRAQERLHRRYWALAKKSKPTGKIVTAVARELAGFVWAIGVETEKQLATVKAA

SEQ ID NO: 200138 - protein, 340 aa, unidentified
MNEITRIAIDTSKSVFTLHGTDAQGRALLRRNLRRQEMIGFFKTLAPLEVVLEACGGSHYWGRTLAAVGHRVRLIPPQYVKPFVKRGKNDRNDAEAISEAASRPEMREAPVKSAEAQAEAMLLSIRELLMRQRTQLINALRGHATEFGLVAAKGTKGLAELRAEIAAGDTLPPAAVYALQQLDREIDQVEGRLAEIDKRLAAQHRANAQSRRLAEIPGVGLMNALNFTLRVDPSQFKSGRHFAAWLGLTPKEHSTGGKQRMGGISRAGDERLRQLLVLGATAVISHAKKGRPGISAWLLNLLERKPRKLAAVALANKMARIIWAMLTSGEAYRRSAPIAA

SEQ ID NO: 200139 - protein, 341 aa, unidentified
MNIITVGIDLAKNVFAVHGVDDNGKPVLVKPKVSRADLLPLIAQLPPCLIGMEACSGAHHWARLFRQHGHTVKLMAPKFVAPYRMTGRRGKNDAADAAAICEAVTRPAMLFVPIKEEHQQIILCLHRTRQGFVEERTASYNRLRGLIAEFGIVLPQKVACLRREIGAHLEDLPGYANRCVADLLTHADRLDERIAEYDRAIAQAARDDERSKRLMKLPGIGPTTASALLASIGGGHDFDSGRQVAAWIGLVPGQYSSGGKARLGRITKAGDNYLRSLLVMGARAVLNSLGDKQDRFSRWARSLQERRGYWRAVIAIAAKNARLAWAVLKYGEDFRLEPGKV

SEQ ID NO: 200140 - protein, 316 aa, unidentified
MSETILGIDVAKKKLDVALMFNDRTLTHKFANSPKGFKELQGWLRSLHIERVHACLESTGIYGEAVAEFLYEKSHRVSVVNPLRIKGYAKADLRRNKTDPADARLIADFCRVKHPDDWHPLPAEVKHLQALTRRIESLDQMLVAERNRLEAATGDVPPSIERMIETLETEIRNVQTLIKEHIDNNPDLKQQHDLLKSIPGIGEKTAPFLLGEVEFRRFDSARAVAAHAGLTPRKDQSGTSLNRTRLSKLGNGRIRKALYFPAIVAVKHNQVIKQLAGRLIQNGKTPMQVICAAMRKLLHIAYGVIKHNRPFDPNTA

SEQ ID NO: 200141 - protein, 412 aa, unidentified
MDVVIERCAGLDVHRDTVVATVRVPGTGRRRRDQETRTFGTTLAQLERLADWLQSHAVTLVGMESTGVYWRPVFYVLEQRFDCWLVNAQHMRNVPGRKSDVLDSVWCCQLVEHGLVRPSFVPPPEIRRLRDLTRQRAVQVQERGRSIQRLDNVLQDAGIKLTSVTSETYSVSARLMLEALLGGTTDPAVLANLAKGVMRKKIPQLQEALAGRFEIAHHGVLVAGLLAHIDALDQAIANLEARIDIHTHPYADLIELLSTIPGVKRRAAQVLIAECGIDMTIFPTAQHLASWAAICPGNNQSGRRRNRGKTRRGDTWLRTTLTQAAHAAARSKNTYLASHYWQIRGRRGDHKAIGATRHDILIAYYYIARGRVPYRELGADWLARRNSPEHRTRRLVKQLEALGHKVTLEAAA

SEQ ID NO: 200142 - protein, 351 aa, unidentified
MSKRTNSIAVSTIGIDTGKNTLHMIGLDEKGVIVLREKVSRSRIAARLVNMQPCLVGIEAGMATHYMARQLVALGHVVKQVPPTFAKPFRQGHKNDFRDAHAVAEAVQRPSIRWVPIKTDDQLDLQALHRVRSRLIGDRTAVINQLRGFLLEHGIAVRQGHRFLRQQLPRIVATRTDVLSPRMVRIIGDLIEDWANLDERIERVTDEIEGLARADVSCGRLMTVPGIGPIIASAMVAAIGDGGAFAKGRDFAAWLGLVPRQMSTGDRTILGRITKRGNRYLRMLFIQGARAIQLHPASWAKHSFGPWLSAAARRLHCNVLTVALANKLARIALTVLLQGRNYETRIKPVAA

SEQ ID NO: 200143 - protein, 311 aa, unidentified
MSSSVGIDVSSATLAVHIRPEGVNFSVSNDLKGFQLLVEKLGGYAVSMVLLEATGGYECNVLKALQDADFPVCRINPSRARDFAKSMGKRAKTDPIDAAVLAHLAEVMPPRPCQVMTPERALLRELLMQRDRFVQQRDDDKRRLKQARAPSVCLRLEQHIAYLKGEIRALEQEIAQQAAALPDDRVKQLTQVKGIGLITAGKLMALLPELGQVDKKEIAALVGVAPFNQDSGKQSGKRSIWGGRSQVRRALYMACWVVIRHNKDFCERYKALRAQGKCAKVSVVACMRVLIVRLNAMLKTGTPWKEQIAHS

SEQ ID NO: 200144 - protein, 337 aa, unidentified
MDTSKHVFQLHGVNAVEEVVLRRKLRRKEMVTFFEKLAPTVIAIEACGASHHWARLLHSFGHTVKLIPPQLVKPYVKRGKNDAADAEALCEAMSRPTMRFVPVKTAEQQAALMLTSVRDRLVRNRTQLANAIRGHAAEFGLTAAKGMAHLVPLLERIQADESLPALARELFAAQAKEYEQLQAQIDEVDAQLLARHRADECSRRLAKIPGVGPIGAMLLTMKTPAPELFRSGRQFAAWIGLTPRDHSTAGKVRLGVITRAGDEGLRSVLVVGATAVIQHARRSGKASPWLGALLKRKSPKLAAVALANKMARIAWKLMLTGQAYTATPVPAALAGAA

SEQ ID NO: 200145 - protein, 361 aa, unidentified
MRAVFGIDVSKASSEVAILVNGEKVHGYTISNDALGFARLLGDLKTVHKPEIIFEATGVYSRRLQAFLEDNGYAYTRLNPLEAKKQLDSLRVRKTDQIDAEKLAQSQFVLNRKPTYVQEEVYQELRDLSRFYQNLTEDIVRAKNRLHKVLQVTFSELETILSTPTGEQYWNLVIAFPCKDFVLDLSKNELSKSIRQSTSKRISDKRVAYLAEKLTVLANQSYCAVKKTSPILEEVHYYAKELLRLSEQRQAVLDQMVELAQPLPEYDILLSIPGIAETTATSIIGELGDIRRFQSANQINAFIGIDLRHYESGNFLAKEHITKRGNPYARKILFKCIHNIASASHTNPCHIIVTPYQKIST

SEQ ID NO: 200146 - protein, 318 aa, unidentified
MTNKTYQFNIGVDIAKHKLDVSFSDQRVVSFENNQSAFKLLLKEIENKSQTRVVMEATGGYEKPLAHFLQDHGVAVSIINAKRVRDYAKALGLLAKNDVIDAKVIRMFADAVNPKLLPAANDTQQALDAQVHRREQLVKQRAMEKQHLETVGNKDAVRSIKRTITFLDKEIERIEKAIKALIKTDSTLTEKVDRLSAIKGIGDITALTLIADLPELGQLSNKEISALVGVAPFCRDSGTQKGKRTTWGGRIQVRSILYMAALSAVQYNPPLKAFYNRLLMKGKTKKVALVACMRKLLTVANSMLRNNTEWNPNHGKLA

SEQ ID NO: 200147 - protein, 409 aa, unidentified
MTRVIGLDIHRVFAEAVVLDTGKIVPLGKIGMTRQHLRAFAHTLTHDDHVVIEATGNAAAVSEVLAPHVGRVVIANPRQVRLIAEARIKTDTIDATVLARLYASGFLPEVWIPDERTLALRRQVTRRNQIVRQRARLKTMLQSILHAHLVPPCPFADLLGPKGRAWLLSQPLPPDETDAVARHVREHDRLSEDLRAVERELARDALASPDTKRLMTIPGIDMVVAIGLLAAVGPIRRFEGPDKLVSYLGLNPSVHQSGESRPRHGRITKQGRTHARTMLVEAAWQAVRGPGPLRAFYERIARRRGNHIAAVAVARKLAVIVWHILRRNEDYAWVRPALHAKKLRDLELRSGQPERRGQRGTAYSYNLSRVRREERRRAELAETAYRRQTEGWTRRPRKVPTGAAKEERR

SEQ ID NO: 200148 - protein, 386 aa, unidentified
MSQGSGRNDIVHSSSKNNFMQVIRYGIGLDMAMEKFDACISTIDVKQAVLVKSTRSFDNNSKGYQQLYKWVSSQCVLPVPMIFLMEATGIYHEGLASYLHSQECFISIVLPNKAKKYKQALGLRSKTDSIDAKSLSRMICEQALPAWNPMSKAIYLLRGVTRQIQSIAKDITRIKCQLHAQEFAMYKNNDVIKCLKQQLRLLQKQKDQLEEEVLKILETDPALKEKCKKICRIKGLGKLSLAVIIAETNAFSFFENIAQLVSYVGYDVVEDQSGKHKGRTKISKQGNGRIRRILHLPAFNVVRLKQQPFVGLYQRVYERSKIKMKAYTAVQKKLLILIYTLWKKDAAYQPYYQQSSGEKELALSFVKVDAFIKEKNSSAVEQSYTR

SEQ ID NO: 200149 - protein, 351 aa, unidentified
MNNATARKRTQITIGLDLGDRRHTYYVLDGAGKMAREGSLGNTRQQLATMARSYPGATVVMEAGTHSPWVSRFLQELGLRVIVANPRKTRAIYQNERKSDRHDAMMLARLARMDPTLLHPVEHGSQEAQQDMLQLKLRDSLVRARVALINAVRFTLKSLGYPVSNPSSERFHKLVLSEVAESIGEMIAHNVAAIAELTQRIKALDVSISRLAAERYPETIYLQQVSGVGPITSLYFVLKVGTPGRFQRTRDIGAFLGLCPRRDQSGETDKELRISKCGDQYLRCLLVNAAQYILGPFGTDSALREHGLRLAQEGTARAKKRAVVAVARKLAVLLLTLWKSREPYESFPTMA

SEQ ID NO: 200150 - protein, 343 aa, unidentified
MKLRTIGIDLAKNVFQVCGVNEHMKQQFNKRLRRNELLDFMRQQEPTLVVMEACYSSHYWGREIAKLGHDTRLIPAQHVTPFVMGNKNDPNDSFAITEASQRPHIRFVPIKTEQQQEISCLHRIRERLSKNKIALSNQSRGLLSEFGVVFPCGHKALVNGLTSIIDNPQHSHRIQNMVIDMLSEYETTVDRLKGIEKQLAQFVDESESGKILLSIPGIGVINASAFLAAIDKGQAFNNPRELAVWLGLTPKQHASGNMSKMGGITKRGDRYLRKQLIHGARALVSRAPKSSDPLSLWAMKLRVTKPFNKVAVAVAHRLARLIWILLTRQERYRAEPASLEVSA

SEQ ID NO: 200151 - protein, 327 aa, unidentified
MKILGIDVSKTKLDCTLLDPFTDKRKTKVVTNNPTGFNALAEWLTKQGIALSEVHAVMEATGIYHEQAALWFVDNGVPLSLANPAQVKDFARSLGVRTKTDVVDSGVLARYGALLKPPLWQAPPLEVRELKALLARLEALEADLRRERSRREIAEVSGIPSLIEDSLDRHTTLLEQEIARLQTAIEDHIDRHPYLKEDRGRLLSIPAVGEKTANRMLAVLRSRTFRSAEQVAAFLGLVPVEHQSGSSVQRRPRLSKNGDAKTRAVLYMASISAIRYNPDVKALYDRLCAKGKPKMAALGAAMRKLVHLCFGVLKSQQPYQPNYASRS

SEQ ID NO: 200152 - protein, 349 aa, unidentified
MTVYVAVDFHAREQTVSYCDLADGEIHRRKLRHQHDDVRAFYQQFTGEVIVAFEASGYSAWFEQMLAELGHTVWLGNPAEIRRKAPRRQKNDRRDADLMLDLLLKGDFPKVHGFSEESRTVLRQLRYRHKLVKVRTIAKNSLHAIGINAGLPLKRRLLTEPGIAQLQALSLSPVLTQQRDEWLQLIALMNQRIATVEAQLQQRAKDDADIALLQTHPGIGLLTSLALRYTLLPTSRFSSTRQVTAYVGLDCMEDQSAERRRMGSISKAGSKLLRFLLNEAGHTAARHDPELKKFYRRLLHRRDKPKAKVAVARKLLVRSFIMLRDQIDYAEFVRRGVAVRVARETHSLP

SEQ ID NO: 200153 - protein, 426 aa, unidentified
MSETVIDLYSRAAGIDIHQSLAVVSAIIPIGDDPFKCKFVRGEFDTFSEQGLKALVDFLRPLGVEMILMESTGVYWMAPYDALLEAGFNVAIGNAHEIRGMRGRKTDMNDADWLARVAKHGTFHPSYVPGREYRGLRSLARCSTSMRGMVSSEKNRLGKLFIAAGYRLNSVFSDMFGTGGMICVRGILNGEEPEEILKKLPSARYKYPREDMLLALGGKFEEGDLVAARAALKIIDFLDAAISEGVGELERIVREKEERKCELLQTIPGIDVLAACLILAELGGGGLEAFDSAEALCAWAGLCPSQNESGGKSRPAKSRKGSKYLRRDVCECAQAAVKTKNTTMRSKFQSFMQRGKGYKKSIMAMGRKLLTYVYYVLKKDQPYVDPHIDYQKQHAEKHFQRFVAQLRRCTAKYDIQIINRETGVAV

SEQ ID NO: 200154 - protein, 411 aa, unidentified
MDVRTDEEFITVGIDPHKNMVVAFFFNVTTNEKWIYRFPATPPAITAFAQNCLKRNMLVGIEEGPNAYAIASILKEYVDRLLIICREKRRGKVKTDEIDAEEIAVALATSTYKSRWIPPLALERLRRLIHSRDSIARKVAGQKNRIRSFLAQELIRLEANDPFSKKGIEEMKQLAYKSLPMDKGLDLLIEVLIYEFLSHILRVFDDFLRSLGKDNPVVQTLISMPGIDVIAALYLVAEMGDPSRFPSPKKLAKYAGLVPSLYQSGERSRNGRITKAGRKLLRWIMVQIANNAVRFPGHIQEFFLRLKAKKGYAVAIVATARKLLCAIWHMLTKNELYRDYVARLYKKKLRALERRKKAELPKAPNLEMLFKEIEKFLKERGIVWKAEEGLMSGLYEHIIDWEMLVPKNLYP

SEQ ID NO: 200155 - protein, 373 aa, unidentified
MKKSTRWVGLDVHAETIAIAVAEKDGTVHSVGTIPNRAEAVRRAVKKLESGGKLQVCYEAGPCGYGIYWQLAEMGIECDVVAPTLIPVKTGDRVKTDRRDAEKLARLLRSGDLTAVWVPDAEQQALRDLVRARHAAKRDQLRHRNRLGKFLLQLDVRRPDKIVAWGTKHMVWLEGQQLKHPSHQEVLVDYLNEVKRAKERIERLERSIDAGIERAPKHLQELIAALQTLRGVAKIGAATLVTEVGRFSRFESASQLMAYVGVVPSEHSSGGSTHRGSISKTGNARMRHVVGEAAWSYRHRPSNGPALKKRQQGQSEDVKAIAWKAQHRLHQRFQKLSAKGKHHGRVVTAISRELLGFVWAIGRKIESELDAAA

SEQ ID NO: 200156 - protein, 381 aa, unidentified
MQKSIRYVGLDVHAETIAVAVAETGGEVRSMGTIPNSPEAVRKLVKKLGPEKALHVCYEAGPTGYVLYWQLTQLGVACEVVAPTLVPVKAGDRVKTDRRDAEKLARCYRAGDLTAVWVPDAAHEALRDLVRAREAAKKDQTRARHRLSKMLLRQGCRHPERITPWTVTHMDWARRQKFEQPAQQAAFLDYVNEVDHAVERLERLDTALDTAIEAAPASMRAVIEALQALRGVAKVTATTVVAEVGRLSRFDHPRQLMGYSGAVPSEYTTGSKERKGAITKTGNAHLRRVIVEASWAYRRGPQLSGPLRKRQEGLAPEIKEIAWKAQVRLCSRYRRLCAKGKPEPQAVTAVARELLGFIWAIGSRVEREYEAKHPQLSQKAA

SEQ ID NO: 200157 - protein, 347 aa, unidentified
MTQYKRIGIDTSKAVFTLHGIDQRDQPTLRINLRRAQMISFFKKLPPSEVAMEACGGAHHWARVLTALGHAVLLIPPQYVKPYVKRGKNDRNDAEAICEAAGRPGMHFVPAKSLSQQAQCMVLKVRDTLIGQRTLLVNTLRGHASEFGVIAGKGVGRVGSLLAAIEQDATIPADAREMIALLGQQIEDLDIKIKALEARLNAAHKANAVSQRLATIPGLGPVTALTLATEIDPAAFASGRHMAAWIGLTPKEHSTGGRQRLVGISRAGNERVRSLLVVCATSVIKAATMPASKQMTSWLRGLLQRKPRKVVAVALANKIARVAWAVMTYGTVYRRSPTANVEVSYAA

SEQ ID NO: 200158 - protein, 345 aa, unidentified
MSTSTDHSRTDLPSDPGSPGSRMYAGIDVSKAKLDLARSGSGSGSDAVETFANDAAGVGRVVEVLAALGPALSVVVVESTGGLERPLVEALLDAGLPVALVQPGRVRYFAKGLGILAKTDRIDALVLRRFGELAAPRLLERRSKNQAELRDLVACRRQLVQTRAQQYNRRSSTFSKAALRSIDAVVGALDRQVESLDRQIRRLLEADDDFKHLDGLLRGVPGVGPALSATIAAELRELGRVDRQRACALAGVAPFNDDSGAVKGKRSIRGGRTALRCVLYMAALSAMRSNPVIRAFAARLKAGGKAGKVVVTACMRKLLTLINAMLRDGLTWDQLDVVKKLATNG

SEQ ID NO: 200159 - protein, 482 aa, unidentified
MVVPNEEPKKPTKPKKPTKPKKPAKPRKSRERSLPVPVPASAAALQVINPDAAGIDVHSDMHMVCVPADRDANPVRQFGANTADLQEIVAWLKKCRIKTVALESTGVYWIPLFELLESEGFEVNLVEPGQLSRCGARPKTDVLDAQWIQRLHSYGLLRASFRPPDSVLALRAYWRQRQMQVRYAASHVQHMQKAMEQINVKLAEVVSNITGVTGMLIIAAILEGERDPVKLAQLRDERCQHSEEEIALALQGTWRPEHLFELRQAYELYQFHHRQITECDQQVEAELANFPNRAGEKTHTVKPRKRGRKSNDVRFEATGPLFKALGVDLTLIEGIDVGTALVILAEIGVDVSRFPTEKHFASWLRLCPPQDESNKTKKRRGHRKATNRVTIALRMCAQSIGQTMTPMGLFYRRIRSRIGALGAVKATAHKFACLVYRMLKYGQEYVTQSMEEYEAKVKANILKSLKRKAAALGFELSPLPTQ

SEQ ID NO: 200160 - protein, 339 aa, unidentified
MNEVTLIGIDLGKHSFHLHAQDATGRMVFRKKLSRQQLLRTLANVPSCRVVMEACAGSHWLARQLAGMGHEPRLISPQFVRPFVAGNKNDFGDAQAICEAACRPSMRFVSPRNEAQQTVSAMHRLRERLVRERTATVNQIHGFLLEFGISLPRGAALMSRLPTVLDHETLPPRLVALVVRLRAHVHYLEEQIRQVEQDLKAALREDDKSRRLLEIPGIGPITASALAVELDDARQFANAPQFSASIGLVPRQYSTGGKPTLLGISKRGDRNLRRLLVQCARAVMQHTDSRTDAMSLWVKTLSTRRHSNVVACALANKLARIAWAVLARGTHYEARALTT

SEQ ID NO: 200161 - protein, 393 aa, unidentified
MICVGIDVAKDKHDCIVLNSEGKVLADVFTIQNNAEGFYTLLQAIRRCARPEDKIKVGLEATGHYSYNILGFLIDKGLATYVINPLHTNLYRKSLSLRKTKTDRVDARTIAAMLMSDVNLKSYTDTAYHNEELKSLTRYRFDKVRERAKLKQSVSRLVTILFPELEKLVPTLHMASVYALLSEFPCAKQVAEAHLTHLKAVLSEASKGRYGRDTAVVLRNAARCSVGSVMPAKSLELQHTIRLIRELDAEIEDIEAAIQSIMDEIQSPITTIPGIGVRMGAMILAEIGDFSHFDSPDKILAYAGMSPSTYQSGQLSLSGTYSHMEKRGSRYLRYALYNATKYVCLWDPVFAAYLAKKRAEGKHYNVALSHATKKLVRLIYAMEKSQQPYHRAA

SEQ ID NO: 200162 - protein, 435 aa, unidentified
MGRVEVCGFPAYFLRRAVAAVYFAGVDIAKKQHEVCIVNADGEQVLSMPVTNSVAGAERLLRAIHGQIGPDPGLVTFCMEATGHYWLAFYSFLTERGYTVHVVNPIQSDAARDLYIRKNKTDRKDAYILADLLRMNKTQPTSMASEPVLRLQTLSRTRFAFVDQVSNLKQRVLGILDRIFPEYPQCFSDVFIKASRELLKTFSTPEELAEVDLSELAEFLTAHSRGRLGAERARQVQSYARSTFGISIAVDAFALELKLLLDQIEFIENQISAIEQAIEEAMAELAAMNQSTDLPEGVYHVIETIPGIGRILAAAIIGETGDIGRFVSARKYVAFAGLDATVRESGQFAGTRNRMSKRGSPYLRRAIWLAAVNARRLNPELRSYYEAKRAQGKHANVATGAVARRLAHLIHAIWRDQRAFDPDFRWTPPGAEPNT

SEQ ID NO: 200163 - protein, 342 aa, unidentified
MEHYAGIDVSLERSSVCVVDGSGKIVRETKVASEPAALIGWLGSLGFGLGRIGLEAGPLSQWLYMAMKQAGLAVELLETRHVRDAFKAMPVKSDRNDARGIAQLMRLGWFRPVHCKSMAAQEVRALLTARKLVQSKLLDVENSLRGILRGFGLKVGTTTRKNFAGRIRELVKGHPNLKTIGEALLSVRAVLLGEFNTFEKQVRAMSRLNANAKLLMSTPAVGHIVALTYASAIDDPARFRSSKRAGPLFGLTPRKHQSGETDRSGRISKIGDASVRAALYEAAHIILTKPIKGCSRLKSWAMRIAKRAGTNKAKVALARKLAVILHRMLVTATPFNDAAAAA

SEQ ID NO: 200164 - protein, 318 aa, unidentified
MKTTMNQNINVGVDTGKHQLDIYIRPLNIYFSVTNNDKGIKEAIKHIKKHKVERIIVEATGRLEMPFIVACAKAKLPFVIANPIHIKRFAGAIGQRAKTDKLDAKLIAHFGEALKPELTQLKPEYMQLMSDLVARRNQLLVMQTMEKNRLQILPKSLAMTIKPILTAFKKQIEKIEKQIDELIQSCPEYQAKNILLQSMPGIGKIAAASIISNLPELGYMTNKQASSLVGVAPMNKESGIYKGQRKIQGGRHQVRTVLYMAMMSAIQSNPVFKETYQRLVAAGKPKKVAIIACIRKMVVILNSMLRDGVMWEAPKAKN

SEQ ID NO: 200165 - protein, 397 aa, unidentified
MVLKEWLEPDAGRPARPVLRGRRRSDASLLPDKDSITVAYAIDAGEVELLGKTGTTGADIDRLCTRLQSKAPHVRVVYEAGPCGYGLYRQLVQKGFDCMVCAPSLIPRKPGERVKTDRRDAIKLARSLRAGDLSAVYVPGIEDEAFRDLARAWAAAREDLRHARQRLKSFLLAHGVRYTGSANWGEAHRRWLGRCSFPSVWQHLAFDEHRRTIEDRLAQCARLETALREAVISWRFYPVVLAVQAMRGVQFVTAVGMVSEVGDLSRFEHPRQLMAWLGVTPSEHSSGGKRRQGSITKTGNSYARRLLVEAAWSYRHPARVSPEIQARLEGLPKAIIDRAWDAQVRLCRRFRRLTARGKPINITVVAIARELAAFIWDISRLAMALAIPRSKLPAPCT

SEQ ID NO: 200166 - protein, 420 aa, unidentified
MAYKVAGIDVHKEVLRVVVCEVEVPETEPERRRFGTTTSELRRLSAWLRQQGVQQAVMESTAQYWRPIWYELEPYMHLSLAQAFSNRAPRGRKHDFRDAERLIRRLVAGELILSFVPEAEQRAWRTMTRMKVQLTRDKSRLQSQLECLLEEMRIKLSSVISDLLGASGCRILRALAQGEADPKNLAALGSDRLQCTEEQLMDALSGNPQPFHRQLLALYLERQQIIVEQMEKLDRMIAEAMKRYQEAVVRLAAVPGFGADSAQQVIAEVGPEASMFPSAANLTSWVGTCPGEEVSAEQNQSSRSAKGNKYMRRILNQAAHAAVKKRGSHFQAVFRRLLPRLGYKGAIWAIAHRLCRLLWKILHDGVVYIERGTEPNPRAQRQRVRTLVRALRKLGYEVDLKLITPRIPASPSLMEIPSTG

SEQ ID NO: 200167 - protein, 392 aa, unidentified
MSQKVERVIIGVDPHKLSATIEVVDQHERLLGSGRFSTDRAGYAAMRTYANAWPDRVWAVEGSNGAGRPLAQRLLEDGEQVIDVPAKLAARVRLFDTGHNRKTDAHDAHAVAVVAVRTKTLRVLQLDGELEALRMLTDRREALTRRRIQTVDRLQALLAELLPGQAKRDLTTGQAKAMLATVRPRDIAGKTRRRIAAEELAELVAVEAKIKKSTAELKATVLARGSRLMDLHGVGPVVAARVLADVGDVTRFADRNRFASWTGTAPLDASSGEHNRHRLSRAGNRRLNHMIHIAAISQIRLDTDGRAYYRRKRAEGKKPLEAIRCLKRRISDAIYRQLVEDAQRSAADDVDAGPGGHCRASQESSAVDLPLHIDTSDQPLPGPAQKTLRRTG

SEQ ID NO: 200168 - protein, 385 aa, unidentified
MSKPDDLSKPLVALDHDSTLVCVIEMSGSSWLVAATVPGVDRRPLQKLPVDPARLLAQVERWRQEAARAGRTITRTVVAYESGRDGFWLARLLRGHGIEVYVIHASSVAVSREQRRAKTDRLDTEMLMRALLGWLRGEPGHCRMVAIPTVAQEDARRPGREREGLVAERTRLTNTIKAELALWGIQGFKPGLRKAAEHLEALRTVEGEPLPPNTLARLHRLLKRRTLISDQIKAIELAAAQAIERDPTGPNALVLLLAQIKGIGLETAQMLVHEVLSRTLRDRRAVARYAGLTGTPDESGSKRREKGIGKAGNPRVRCGMIQLAWRFLMFQPDAALVRWYRERTAGGKGAIKKTMIVALARKLLIALWSYATAGVMPEGVVLKAV

SEQ ID NO: 200169 - protein, 351 aa, unidentified
MSHQTTTEAITTIGIDLGKNTFHLIGMDARGKILLRRKIARGQLQSCLANVPVCLIGMEACAGAHHIGRQLAALGHDVRLLPAQYVKPFLKGHKNDYRDAEAIAEAVQRPTMRPVPLKSAEQLDLQALHRVRRRRIGQRTAVINQIRAFLLECGLPVRQGLAGLREALPTLLSQRTDVLSPRMIHLIEELSEDWRQLDERIETLTRDITALAREDAGCRRLMDVPGVGVITASAMVAAVGTGAAFSKGRDFAAWLGLVPKQISTGNRTILGGLSKRGNRYLRTLFVGGAQAILQHPHNWQRYRFGRWLMTAAPRLHRNVLAAALANKLARIAWSVLYRERGYDAGIAAQVP

SEQ ID NO: 200170 - protein, 348 aa, unidentified
MEKVVGVDVHKHQHVAALLDGVGRTLARLTFANTADGTQRLLAWLDTHDADGALIGIENAASYGQTLTVALAHAGLQCVDVPPWRTSQQRKTLGPGKSDAIDAEAIARVVLARGATLAPALQPELVRAMGLLDSTRDQEVRDRTKTIVRLRAVWASVDPVAEAAARNLAKPDRVRRLRRIVLPDSLVEQTVQRTIRMLAARIAEHNHRIAQLESDIATLLDEHGNPVAELVGAGPIVAAKLIAHAGDPSRFRSPAAFAAYSATAPITCGSGKTNGRHRLNQAGNRQLNAAIHRIALTQARCHPDARVYIARKISEGKTPREARRALKRHLANVVYRHLNAWADTNPLT

SEQ ID NO: 200171 - protein, 337 aa, unidentified
MTRYVGVDLHRRRSVIVVLDGDGTELWTTRIDNDPLTLGLEIEKAGPAPEVVLEATWGWYWAADVITQAGGRVHLAHPLGIAGYENRRVKNDQIDARLLADLLRMGRLPEAWIAPGTVRQQRELVRYRRKLSQLRAGLKSQVHAVLGKEGLLPPLNYLWGPGGKTWLDETEMGDAYETRVRSLRRLIKTYDTEITKLDARIASEFKGHPGYEAIQVIHGVGPVFGAIFTAELGDVTRFHSAKHVCSWAGLTPRHRESDTKIHRGSITKQGPPLVRWAAIEAVSKNHGDDPIKDLYRRVAARRGRNKGRVAAARKILTLVYYGLRDHEIRSLAPPEAA

SEQ ID NO: 200172 - protein, 347 aa, unidentified
MDHIGIDVHKMESQLCILGEDGQLREPRIRTTPERFAAVLGDRPRARILLEASTESEWVARCLEGLGHEVIVADPNFAPMYAARSRRIKTDRRDARALAEACRLGAYRPAHRLSDAQRHVRGRLTVRDALVRTRTQYISVIRALLRQHGWRVPTGSAEGFIRRVLALRVPGRLLSELAPLLAVMRQVNQQLVYSNERIAAVAHADARVERLQSVPCVGPVTAAAFVAALDDAGRFARAHQVEAYLGLVPREWSSGEGQRRGRITKAGHRRVRSLLVQAAVSILRVKNPNTTALREWAGRLAARRGRFVTVVALARRLAGILYAMLRDGTPYRPTRVRPTPSPAAVAA

SEQ ID NO: 200173 - protein, 338 aa, unidentified
MIAVGVDTHKHQHLAVAVDALGQLLAEITITATLAGYRQLLAWIAGLEGQVRVGIEGAGSYGAGLCEHLQDNGVEVFEVERPKRRERRTGKSDRLDALLAAKKVLANDGLSTPRGHGKRVALQMLLVAYRSVVSERSRLYNQLQALHVGAPGALRERVGTTRNGATLARRLTGMRTRPNASLQENTTLQVLRDIANRTRALDTQAAAYTRQIDTLTRELAPTLMDEPGVGPITAGKLIAFNPARFKSEAAFARANGTAPQPASSGKTVRHRLSRGGDRQINTAIYTIALSRSIHHPASRAYMQRRIDEGKTKREAMRSLKRYLSRDLYQHFTKTPLTT

SEQ ID NO: 200174 - protein, 354 aa, unidentified
MIIIGADYHPGFQQVAYVDTDTGELQERRLEHREDAEKFYRDLAAQEVKVRVGMEASGHARWFERLLAELQFELWIGDAAEIRTKRVRKQKTDRQDAQLILRLLLENRFPQVWVPSWENRDLRQLLWHRHRMVQARTRIMNQLQAVALNEGLRCKKKLWRDAGREQLESFRLAPWASRRRHDLLELLDRLTPTIAELTQAIEQEAEKCPAAQRLQTHPGVGALTALAFVLIIGRADRFECGKQIASYLGLVPLEDSSGQRRRLGHITKQGNSLLRFLLVEAAQVTVRSDQEWRNRYFHLVLRRGRKIAKVAMARRLAVRLYWMWRKGWIYEQLKNFGSHAGEPGHPDGVQSRPE

SEQ ID NO: 200175 - protein, 385 aa, unidentified
MEHYVGLDVSLKLTAICIVDRTGTIQREGVVRSDPEAIAAFIKSNAPHVARIGLETGATSTWLWTELNKIGLPVICIDARHAKAALKMQINKSDRNDAVGIARIMQCGWYKEVRVKDLDSHAVKALLVSRALLVKIKRDLENQIRGLLKNLGLVIGPAKMNAFALRAAELIENRPELAVAVTPLLTARVAIEQQIADLDRKVMKLARSNAQVRQFMTAPGIGPVTALCFLATIDDPTRFKRSRSVGAYVGLTTRRYASGEIDWTGRISKCGDKMLRSYLYEAANVLLTRVAKWSALKAWGIRLAKRSGLRKAKVAVARKLAVILHRMWIDGTEFRWSKETAMQTSIANYRIPADHGGIQGPCRDVGVGAIAPGFAMLKKQARFTH

SEQ ID NO: 200176 - protein, 385 aa, unidentified
MQKLNDLSQSRIVLKQDSTLIAVIEMSQSSWLVAGIVPGVERQPLKKLAVDESALLKLLNRWREEAEKAGRRIERIAVAFETGRDGFWLARWLRARGIEAHVIHASSVAVSREHRRAKTDRLDTELLKRVFLGWLRGERDHCKMVAIPTIKDEDAKRPHRERESLVGEQTRIVNRMKAALIRLGIRGFNPKLKRAAGRLEDLRTPEGEPIPPNTLAELRRDMERRHLIGGQIRQIQDARLERIERAPSDRPHAMVRLLARVIGIGIETADMLVQEVLSRTLRDRRAVARYAGLTGAPDESGAKRREKGLARSGNERVRRGMIQLAWRFLMFQKDSALAQWFGARTENSRGARKTMIVALARKLLIALWRLVTTGEVPAGVILRAA

SEQ ID NO: 200177 - protein, 412 aa, unidentified
MQHNPKRRRSGEKRPSGIALLERIQPDAAGIDCGQNSHCVAVPPDRDPQPVREFRTFTADLQRLADWLAQCGVKTVAMESTGVYWIPIYEMLEQRGFEVLLVNPRDVHHVRGRKSDVTDCQWLRELHSVGLLRASFRPAAAIVPLRSFMRQRATLVEEAATRIQRMQKALTEMNLKLHTVLSDLTGRTGLAIVRSILKGERDPERLATQRDHRCHASHAEIVAALTGNYRAEHLFALKQNFAAYEFLLRQIAECDSEIEAVLTTLAAQQPPPAATLPAPRHRAISKHQPQFDLRSPWHRLTGGADLSQVDGISSQAALQIIAEIGTDMSRGKSEKHFTSWLALAPNNKVSGGRLLSSRTAPSANRAAVILRRCAMSLAPTATALGAFYRRLAARAGKAKAITATARKLAVLV

SEQ ID NO: 200178 - protein, 430 aa, unidentified
MKYALTQVLPDVPAGRVFAGIDWATADHVACVADMAGRVIDRFSAGHDKAGIDALISRLRRGGVSEVAIERGDGVLVEALLAAGLIVVVITSRQVKNLRSRYGAAGAKDDRFDSFVLADTLRTDRARLRPLIPDAPATITLRAAVRARRNLVAHRVAACNQLRAHLAVAFPAAVRLFRDLDSPISLAFLTCFGSQDAAGQLDEQALAAWLKTLPVRGRPAPVSVLCARLRAAPGGATGQDGAAQAAITAALTATVTMLAAQVKALENEIGSQLAAHPDTHIFTSLPRAGTLRAARLLAEIGDCRARFPDPQALAALAGVAPVTRQSGTHLSHAFRWAVNRQLRDAVCDFANDSRHASAWAADIYAAARARGKDHPHAVRILARAWIYVIWRCWQAGTAYDPAKHNALQAILARQPASDPAAAGPGPQETR

SEQ ID NO: 200179 - protein, 414 aa, unidentified
MSNRRKIFQKVNKKVLIATIDIGKKSNIGYWRCYNGIDCKTFEFSNTREGFDYFWRKIFTAKVNNKADRIIVGYESTGPYGKPLTHYLKNRPVKQVLVNPMHTKRLKELDDNSPLKTDRKDPRVLADIIELGHWLSVVVPVGAAAELRELAHSRDRLMVLRTAEYNRLQNLLSVFFPEFLTVMRNVRTKSALCLLSRYPSTDDIIAAGCDSLAEILHNISRGQLGVERSRMLFEAAEHSVGVREGKESMADEVRFIIERIFLYNRQIFEKEEMIKRYLSEIPVSSNLLSIKGIGPITVGVIIGEIGNFDTFSSPRAVIKFAGLNLYEVSSGKHIGIRRISKRGRHLLRKILFFAAINVVRKDGILHDYYHKLIDNGMLRMKALIAVMRKLLKIIFSLARNKTFYMPEYSLKKVA

SEQ ID NO: 200180 - protein, 427 aa, unidentified
MAKVEHTSDARVLVGIDISKHRHEVLIAVPGKTRRRRLTITNSTDDFMRLIAILREYGLPVRIGFEATGNYHRVLMYHLGVAGFDLKLVSSVALARTREALHNSWDKNDPKDAQVILHMLQIGAVQIFQDPMVAGTNDIQELSKTHDAVSRSKTELWHRILTHYLPLYFPEADRFHRSSRTDWFLAFLEMFPSPHMISAMTKEEFTKAAWEVVGRKVEKTLMLSDIYETAKTSAGLPVAPDSDAIRMFRMMLAEGRSLIRQRNAIEDRAVELLGDRPDYQLLRTIPGIGPINALTILAETGDLRRFHHHRQFLKFCGMDLATVQSGMFRGRSKISKYGNARLRRTLWLAGQTAVLKKANSFRDKFERYIAQDRHNPDLRRKAYTAIAAKMARTIHAVIKSGEPYRPFFEGVSPGGRTPLCRAVEAAS

SEQ ID NO: 200181 - protein, 348 aa, unidentified
MDFIGFDLGKVSSQVCIITEDGELIECRIKTDREHIYEVLGSRPLARILIESGTESEWVARYLEALGHEVIVADPNFASMYATRSRKVKTDKRDARTLAEACRLRAYRPAHRTSDKQRHVRAQLAVREAMVRTRSRYISLVSTLLRRDGLRIHNSGYTPTFLKRLAQLELSEALQAEIAPLVLLLQSLNEQIKQADLRLRVLAEGDEVLARLRTVPGVGVITATSFVSTLDEAERFAGAKQARAYLGLVPSERSSGERQRRGHISKAGPGRARHMLVEAAWTILRRRSAANAALHDWAAKIMARRGSRVAVVALARKLAGILYAMWRDATSFTPRTLRSDEVCASVAA

SEQ ID NO: 200182 - protein, 316 aa, unidentified
MDRSEVFIGIDVCKARLDVSRYPDGQRWTFSNDELEIATLIDQFKTQAPALVVLEATGGLEIPLSGALCEAGFPVVVVNPRQVRDFAKSTGRLAKTDTIDAAVLAHFASAIRPEVRPLPSAQARELSGLISRRRQMVEMITAEHNRLATSCGRVSREIQAHITWLEKRLKGLNEDLSKLIRSTPVWREKDNLLQSAPGVADVLSCSLLASLPELGRLNRKKIAALVGVAPLNRDSGKFRGKRTVWGGRAEVRRVLYMGTLVATRHNPVIKAFYQRLLQAGKPKKVALTACMRKLLTILNAMLKNRTAWQSNYAFSA

SEQ ID NO: 200183 - protein, 386 aa, unidentified
MQKFDDLSRSLTTLEPGGTLIAVIEMSLSSWLVAGIVPGVERQRLKKLAIDESALLKLLHRWREEAKKAGRRIERIAVAFEAGRDGFWLARWLKARGIEAYVIHASSIAVSREHRRAKTDRLDTELLKRSFLGWLRGERDHCKMVEIPTIKDEDAKRPNRERDNLIGERSRIINRMKAALVRLGIRGFNPKLKRAAARLDGLRTPEGEPIPPNTQAELRRDMERRRLVSDHIRQIEEARLERIEQAPSNGPHAIVRLLARVMGVGIETADMLVHEVLSRNMRDRRAVARYAGLTGSPDESGRKRREKGLARSGNARVRRGMIQLAWRFLLHQKDSALTKWFRSRTENARGTRKPMIVALARKLLIALWRLVREGVVPDGVVMRPAQ

SEQ ID NO: 200184 - protein, 403 aa, unidentified
MKHVIAFDISMGKSYMVIYNAQKQCVFESEIKHSKPEFKKLQEKIHELTDKTGELPKIVFEATGIYSRQLERFMQDNQYTYCLLNPLEAKLQCDSLRIHKTDRSDAHRLALTHFTATRRVFTGTDNLFYQLKSLSRLYSELDSELSIIRGRMHKVIQLTFPELERMFTSKSDLFLNFVQLFPHPDCILGLSKTIIKNRIRANTNKKISNITAEKKAIQILEIAKTSYPAVSQNDVLCDQLKLYARRYQGLLHQKECCINKMVYIAEQRAEYNIILSLPGIGPNTAVRLMAEIGDITRFNNNKQLNAFAGIDIRRFQSGKTFFKDKINKRGNKHLRKLLFLIIQNMIKQRRYGQNHIVEYYDKLKTQPYNKCHKVASIACVNKFLKLLFHLITHDIHYDYRLTA

SEQ ID NO: 200185 - protein, 356 aa, unidentified
MNQLTTVGLDLAKDVIAACVLDLHGAVVERRVLKREAFQRWAEQLPVCTVAMEACGSAHHWGRWFAARGHTVRLIAPQFVAAFRKGGKNDAADAEAVAIAARQPTMRFVPIKTIDQQTILAWHCAREGWKEERTALMNRVRGLLTEFGIVIARSSDRFLAELPRLTEDPRLPDAMQGLLLEAREQLASLHARLARCEAQITNHARSNTAAQRVSALLGIGPITSSALAATVPDTTTFKSGRQFGAWLGLTPKQHSSGGKTRLGRISLRGNVYLRTLLIQGARSTLQSALRADLSRASRLQRWIIELYGRRGYHKTLVAIANKHARIVWAILAKDERYDASAWQRHPMAQALPAASS

SEQ ID NO: 200186 - protein, 342 aa, unidentified
MFCGVDSHKDTLAACLVDQTGRRLAAAVFPNTPAGHHELATWLDRHGPVGRVGVEGGANLGAGLARFLADQGVDVREVPCALTVRERRRLRRPGKSDPTDALAIARICARDTDLPPARQAGLAEDLKVLSDYRDELLVSRTAEGNWLHADLAILCPGYAQVCRRLTAERSLAAAEQLLADQPSVRAQLARCRIMRLRELDGEIRQLAGQLATLVAASRTRLVDLVGIGPILAARILGEVGDVARFPDADHFAAANGTAPIPVASGRTDRHHLNRGGNRRLNRALHYVALTQATWEPRAVAYLARKQAEGKTKREALRCLKRRLSNVVFKAMLAGPKPSDLAA

SEQ ID NO: 200187 - protein, 365 aa, unidentified
MLKAELSCEADSENDLGGSSEAMYYIGLDVHKKTISYCVKDAAGKVHQEGKTGSTRRDLDSWIKTLPQPRMMAMEATIFTGWIYDHLLPHAEKVKVAHPLMLRAIAAAKKKNDRIDAGKIADCLRCDFLPECHMASTEIRDRRRTLRYRGLLVKQMVQMKNRVSGLLMESGVSYNKQRLHKLGYFTDLLSTNEEISQSILPLLKLGREHIVRAQRLDSALIGSLEKDPLLSERLRRLRTIPGVGPITALTWALEIGDYTRFRSVKEAISYCGLCSAEKSSADKVMRMPISKQRNKHIQHVLVEAAKMAPRYSPELALVREREIQRGNKNRATFAVARKMVAYMLAVERRKQDFVPAEEMAGRAVA

SEQ ID NO: 200188 - protein, 453 aa, unidentified
MILRMGIDIAVRAAHQASLANEKGELLWSGHRFRTTAADLKQLWARLPECVSPGDVTIVMEPTRNAWVPLAAWFRRQGAKVVLVSAEQSADLRAYYAKHTKSDRLDSVLLARLPMLHPEGLHPERGLGPGDPLRRATKMHSTLVKRRTTSLARIDALLEILGPDWRAALSGDLANKTPLRFLAAGYADPHTVKRLGRARLARFFYRHSRGAWGEAEAEMILAAARASTELWADDLPFADLAEDIAVEARLALALTEEIKEVDERIEVLVRERDPAGIITSAPGVGAVTGAVILGRLGDARRFHSLAAVRSFSGLVPSLDSSGVSGKHGGPTKHGDALLREALFIAADQARRQDPTLAAKYHRLMVHAGKHHNSALCHIATTLLTRVASCWNNQTPYELRDTADNAVDKQQAKHIIAANYVVPDEIRRARSTTATGRRSKESQRAPSPTRPTQR

SEQ ID NO: 200189 - protein, 431 aa, unidentified
MLKINPLSTLYVGIDVSSKSNYVCALDFYKNKYINSSFANNQPGAEELALKILECLKEHPDITTIVAALESTSVYSIHIANYLSSCEELMRFKPYVFVLNPKCTANYKKSYIGLGKSDPIDAFVIADYARAGNIESEPWRGSQFLALKRLTRHRLHLVECMTREKTYLVSNLYLKFSELQMLEGDDQPFCDIYGATSSSVLMEYFSPEEILDSSEEDLIAFLAKKSRNRIKDISKTADLLKKAARDSYRLDKALYGPLNVSIASSFNCIETFKREIKVIDNAIEKEIKGLNPNAFIILQSIDGIGPVFAGGIIAEIGDITAFHSSDALAKYAGLTWKSNQSGDFDGEDTPMIKAGNRYLRYYLGEAANSMRKHNVEYGTYYRKKYNEVPKHQHKRALALTSRKFVRLVYGLLARNQLYSGVSLDTSIKDSN

SEQ ID NO: 200190 - protein, 346 aa, unidentified
MLYAGLDLSRKRLDFHLLDGEGATVEVGAAPPDADGLHSLTARLDRHGAPIHAAIESMNGARFVHDRLELAGWQVEIADAQKVKGLAPLACKTDRIDAWVLAELARRELVPAIWLPDPRVRAERERARWRLHLVRHRSSLKQRVHAVLLTHGKPCPVSDLFGVRGRRLLARLGLPEPWQGTIEASLRLIDELDREISECERELRRLGADHRYVPLLCTAPGISWVLAYTIAAEIGDISRFPAPRKLAGYSGLCPRVYQSGERDLRGPLAKQGPRYLRWALVEAATHACTAPIYRDRYQQTKARIGKQRGAKVAQIDLARRLSEAIWHMLSRGQPFAPKGATDPLAA

SEQ ID NO: 200191 - protein, 343 aa, unidentified
MSIVILGIDLGKNVCSVVGIDAAGGVVVRRSMRRQTLIDYVAKLPACVVAMEACCGAHYLGRLFAAQGHEIRLMSPEYVRPYVKAQKNDDRDAEGIAEAASRPTMRFVELKSEEQLDIQTLHRVRSRLVNERKNLINQMRAILLERGTTFPVGRRKFGQGIDAMLADEDTTLSPRLRQLMNQLRAEWRELDTRIEALNGEFVELARNDAAARRLTSIPGVGVLNATALIAAVGNASSFAKARDLGAWLGLVPRQHTTGGKPRLLGISKRGNTYLRTLLIHGARAALPSLARSETPLGRWLTGMIERGVHRNAIVVALANKLARIAWAALRKEATFERGYPVAA

SEQ ID NO: 200192 - protein, 340 aa, unidentified
MQVTTIGLDIAKNVFQIHGVDSDGRVVLRKKVRRDKLLTVFGALPGCLVGMEACATSHHWARELERLGHQVKLMPPAYVKAYVKRNKNDAADAEAICEAVTRPNMRFVAIKSANAQSILMLHRARQLLVRQRTAQVSALRAHLAEYGIIAPKGRAHVRDLIKVLGQQDAPLPELARQTLLLIAEMIDGLSQQIRRIEMELLAWHRTHPVCQRLETIPGIGFITATALVATINDATVFRSGRQFAAWLGLVPKQNSSGGKERMGGISKMGDRYLRHLLVVGATAVVRYTRRKATTVSRWASQLLERKPARLVTVAVANKVARIVWAVMTQDETYRLEPVGA

SEQ ID NO: 200193 - protein, 422 aa, unidentified
MSYCPVAGIDVSKQFSDMCILSPDNKIFAQEKIYHDETSINRANALLQKAERLFFSKPIIVMESTSHYHLILFQFFSEHGYDVIVVNPLQSNSMKDFSIRKRKTDRVDAFKLAMMYRTKTLRPSQIPQTATRALRQLCRHRAELLNDVSSYKNRLTALLDQTFPGYDKVFSDVGGVTSCAVLVRFPTPTILLMEEESELVEVIAAASKSSYSFAKKKAGLLISAAQKAQTLGIHSCADETLIVCTIQMLRTLSESVLQIETAIDDLLAQIKEMRNNVSLLQSIPGIDSHSAALLLGEIGDISLFKKPKQLAAYFGLDPTERQSGSFRGTKNKLSKRGSPHARAALHMGVVNSICKRGKDSAANPVLLSYYEKKCKNKPAKVAQAASMHKLVFIVFAVLRDQKPFELKTPEQHAVEQGFVKAA

SEQ ID NO: 200194 - protein, 365 aa, unidentified
MPELTHIGLDVHKESIAVAVLRPGTGECEERVIANTPEALRRLFARYPDRAALRACYEAGPTGYDTWRLLEDLGVPCEVVAPSLIPRRSGAHVKTDRTDARNLARLQRAGELTAVRVPTPSEEALRDLVRAREDLKDDRRVARQRVKSLLLRYGRRSPTGSGRWGVAYELWLQTLTFEEPAAQSAFDHLLGAASVRAAQLQAIEREIEAAAQSGPLAEPVARLRAFRGIDTLTAVTIITETCDFRRFPAAGAYMAFTGLVPREHSSGAVRRQGSITKAGNAHVRRVLVEAAWAYRHRPAVRGGLARRQEGLPPELLAYSWKAQLRLCGTYRKLAARRGANKAAVAVARELSGFVWGAMTGRTGAL

SEQ ID NO: 200195 - protein, 323 aa, unidentified
MSSSSPPLTPIGVDIAKAKFDVAAWVNGKYKTKVFPNTPAGFEAFLTWLRPFAPAHVCLEATGRYGEALATFLVEHEITVSVVNPAQIHAFAKAELNRTKTDKSDAKLIARFCHLHQPPAWQPLTPAVRQLQALVRRLDDLMVMRQMERNRQDGADATVQASLSRVLALLDAEIEQTRAAIHDHFEQHPGLREPRDLLDTIPGLGETTIAVLLACLGDIHRFDNAKPVAAFAGLSPAERQSGKHKGQTRLSKTGDALLRKALYLPAVVAGQYNPIVQTFCERLKAKGKAGKVIVCAAMRKLLTLAYGVLKSGRPFDSKLALAN

SEQ ID NO: 200196 - protein, 431 aa, unidentified
MAVVMIGVDPHKASHTAVAINAAEEPLGQVRVRASAVQAERLLAWAQAWPDRSWAVEGAGGVGHLLAQQLLSAGERVLDVPPKLAARVRLLATGDINKNDPNDARSVAVAALRSAGVREARRDDHAAVLKVWSKRYGDLGRVRTQVACRLHQVLCELTPGGVRGEITAGQAARILASITPAGAVEAARCQLAADLVEDLRGVDARIRETRKKAGAAVRASGTSLTGLFGVGPVVAAAVIGDVCHVSRVPSRDHFASYNGTAPIEVSSGGRKVYRLSRRGNRRLNHAIHMAAVTQIRYQHSPGRAYYDKKLADGKTRKEALRCLKRQISDAIFACLQADARRTAACAKSPGGQPGNHSSSRAAGSHPDHRRFGQATPGPATHPTTPAGADTAAPFPALLPSRASRRTGQGPGAARPRSGARRASSTRPPASR

SEQ ID NO: 200197 - protein, 364 aa, unidentified
MDVHLRSTTVCALDAETGEAVTRRFRGNPWGEVAEWMSGFPGPSLAAYESGYLGFAPQRELSGLGVDCVVAAVSKVPRSAADLSSKNDRNDAARMAKAILSHDVTPVWVPSPEIEGLRDLAAAHDDATARLAAAKQRLLAFLARRGYAYGGTTPAGNPRRYWTYGFLRWLDKVRPADDGGIRALAALRNEVEAADETREALLAEYRAAVAAGPLSAEVEALQSIKGCGFALAAAFASEVGDFSRFRSGRQVTAYFGLAPKQGSSADSVRLGGISGAGNALVRKLAVEGSWCYAQAGHQPKLMPKGSGVPLEVRMHGRKGSERLLRRREEMIARGMPQAKANAATAAELVRWLWALGAMCREAGE

SEQ ID NO: 200198 - protein, 341 aa, unidentified
MEVFVGLDVSLRSVAMCVLSPDGELIEELSLPCEVDDITGHLQAKPYLVKRIGFEAGTMSQTLFHGLTAEGFDVVCMEARQVASALSAMRNKTDKTDARGIAHILRAGWYQPVHMKSRESHEIRALLTARKTLLSKCIDLENEIRGLFKAFGIRLPAPLRRWHFDEAVREIIEGDEALSFALLPMLEVRAVLFKAFMEMERRVGAVARHDDVCLLLMTAPGVGPVTALSFKAAIDDPSRFKSSRLVGSHFGLTPRRFQSGEKDNTGRISKAGDRGVRSALYTAANSLLLRTTRGSPLKSWGMKLLRTKGRKRALVAVARKLAVILHRMWVTNEPYRMEATS

SEQ ID NO: 200199 - protein, 347 aa, unidentified
MKVLIGVDPHKTSVAVAAVDEGAGELLARASFPQDRAGLSALGRWAKCFPERRWAMENACGLGRHLAERLVAAGECVVDVPPKLSARVRVLSSGNARKNDGVDALATALAASRNDRLAAVDPEAASEVLRLLSERREDLVGERTRALNRLHGLLRDLVPGGVAGKLSADRAARILRGIRARGGASARLRRRLASENLRDVRTLDRKIADLNGRIEAEVEASGTTLTEIFGVGPILAARILGTVGDVGRFPSKAHFASYSGTAPVEASSGEVVRHRLSLAGNRKLNYALYMVATSQARSDAPGGAYYRKKLAEGKSRKEALRCLKRRVSDAVYKSLVADLQAPSRSAA

SEQ ID NO: 200200 - protein, 346 aa, unidentified
MLADELDYVIGVDPHRDSHALAVVDVRSGGVVFEVTAVADGEGYASVLRLVEQHAPGRRAFAVEGTGSFGAGLARFLADRGERVLEVGRVRRERRSGKNDALDAIRAARSVLGQTRPARPRAGGEREALRALSAAREGAVTARRAGLCQLRGLLVSAPEPLRTELRSLTRAQLLRRLAAVRPEGRHDPELRGTLLALRALARRVTALTVEERELAREIETLTRKLAPQLLEQPGVGPLAAAQVLISWSHRGRITSEAAFARLAGCAPIPASSGQTVRYRLDRGGDRRLNRALHMILVTRRRAHAPTIAYINRRIQEGKSRREATRCLKRYLARNLYRLLEHPPQPA

SEQ ID NO: 200201 - protein, 348 aa, unidentified
MKNKSFVGIDISKKVIDVSIFREDTNIKMFPHEVFNNTRKGFGDMCSWLKKSRVVLSQALFGMEFTGCYSLDLEKFLTSKNYSFCMLSTRIVKHHPMGTIDKSDKNDSAKIADFLYRYDGTECAKPYKLPSKAMQQLKQLVNERKFLVEQRTNFMNRMQMFETKEDSAMYESYIKKLNHDIEKIDQEECELMSKEEDVLDTFQNLLTVPGIGFVNATNIIAITRNFTAFDTARQYARYVGVAPCCHTSGTSVKWRARPSAHCNGQVKADLSMAALRAVEYDVEMQIFYNRKLGGRKDSDTKRKALNAVKFKLIRRMFAIGKQKRKWEVLNTSDDRKNLHIEKSKASEL

SEQ ID NO: 200202 - protein, 417 aa, unidentified
MTVNSLMQKRSAIKPNTLIVGIDVAKFNHVARTMVPGGEISRPFVFPNSREGFLALSAEIEARKPTPASAVIVGLESTGVYWINLARWLAEQGYQVVQVSGLYVHRAKELTDNSRGTSDGKDALLIADLVAQGKYLGFVRPAGVLADLRQLVGLRQRLVHERAARYNLLHQSVDLLFPEFVTVFRDVTGPGARRVLRRFPTPAAALAHPPDEMRRLLSEDGRVRVSVAKLARLQAVAKQSIGAREGTTGLEYALNDTLLELDSLDARVRQVEEEIGRLLPQVDETPILTSLVGLMTAAIILSETGGLRQYSCAAAVLKLAGLNLYQISSGQYCGDRHISQMGRPLLRQALYLAVLQHTHPGMPLYPYYAELLRRGKPKPVALIALCCRLVRLLYALVRDGRCYSPRPPDKNQQTQAA

SEQ ID NO: 200203 - protein, 436 aa, unidentified
MRRVIGIDIHRTFGEVVIWENGLTRHEGRVEMTRTALEGFGRQLLKTDEVVIEATGNCMAVSRVLSPHVKRVVIANPLQVKAIAHAHVKTDKVDAGTLASLHAAGYLPEIWTPDAATERMRRLVARRYQVVRHRTRIKNEVHAILHAHLIPKCPHADLFNRRGRDWLARQPVPDDERAAIARHVRELDRLGEDLAVLDRDIAQDALHDDAIRRLLTITGVNLAVAAGLMAAIGSIDRFNSPQKLVSYFGLNPRVRQSGLGAAHHGRISKAGRSHARAMLVEAAWAAAKAPGPLRAFFIRIRAKRGHQIAAVAVARKLAVLCWHMLTKGEDYRWARPSLVAHKHRSMELAAGQPQKKGNKRGATYAYNVKELRHQEMQIAERAQESYEHFVAAWRSHPPSKGKCAAASNRQGLHGLPGSASSRHATLRHEVDRTERE

SEQ ID NO: 200204 - protein, 337 aa, unidentified
MFMQVYGIDLSMEKFDVNFIDANGKEKHRVVKNKLGSISNFLESVPEGYVLCAEHTGAYGDLLVYLCNQLNVQIALAPGYTIRHSLGLRKGKSDPIDARRIREYGERFFDKLVFKEYDTEEIAELKSLHTLRSQLVKARKELRTGNHGRSVLPMQSVSVNKHLNQILHNLDEQIKEVEAEIKAVIMAKNELKENYELAITVKGVGPVTTTDLLIKTGNFAIIDTARKASSFTGVCPFPNASGKMVGKSKTSPFADKELKSLLYMGAKSAVKHNKEYRLYYEKKKLEGKPHFLIMNNICNKLLRTIYSVVKNKTPYRQDYICLDPREKNLTSSTEKVA

SEQ ID NO: 200205 - protein, 408 aa, unidentified
MNPLFVGIDVGSKNNVAYLMKPDGSKHSSFSVQNNLGGAKLLSERIVSALGSMQLSDVVIGLEATSIYGDSLVYALREDGSLGRFQRKIHVLNPKQVRKFKEAYPDLPKNDWVDAFVIADHLRFGRIAKEIYMDDYRYQALRTLTRARFDMIQNLTREKQRFANYLFLKCSGIAQNKDIQNTSATTIALMEHFETVDDLANADLNELTAFISEAGRGRFADPDATAKAVQAAARGSYRLPKTVNDTVNQAMAVSIASMRALKEQVKVLDKAIEQQFEIIPNTLTSIPSIGKVYSAGIIAEIGDVHRFSSQASVAKFAGLVWHKNQSGDFEAEHSQMIKSGNRYLRYYLLEAANSVRRYDSEFRRYYDLKFKEVNKYQHKRALALTARKLVRLVFRLLKDNRLYIPPEG

SEQ ID NO: 200206 - protein, 332 aa, unidentified
MTYIGIDVSKATFVVAYSPEKTSRTRTFKNTANGIHEFIRTISKDEHHCVMEATGNYSSLLVYLLSEAGIATSLENPLKVKNFARAMLSTVKTDEIDARLIALYGEKMQPAPYKLRSDAILTLKQKRTVIRQLKKQLIATKNLKGSMEVLPFFDSKCRKSIEQTIAFLAKQVKHLEDDLAVLADSEYKKQMDLLTSIKGIGVTLAAALIMTTGGFTYFGNAKQLTRYLGLSPTYQQSGTSVNFKGHINRNGDSTLRSQLYVAAFSSLRCNAECRACYDRLRSNGKPGKVAVIAVANKLVRQAFAVVKQEKPYVDGYVSTLRSTPASSETGKG

SEQ ID NO: 200207 - protein, 372 aa, unidentified
MGTPSAQTLVDMASEMFQELEEVPMTMVGGFDVHRQQITFDYVDGDGLVRCGQIRPATRTRLRGWLGEHCPDGDGEFALEGCTGWRYVSEELAAADVGVHLGDPAEIATLRGPKKRAKTDRADARLLRTLLLEGRFPESWIPPAHVLETRTLGRLYCTLMDERRAWQQRVHAQLFHQGCPPVKALLSAAGRDALAAAELSAGRQYLDTALRRIDELTAEIDPVRMQLVSFARRQPGCQALQGRQYGVGWLCAAIMWAEIGDARRFSSSDQLVRFAGLDVTVYSSDGKRSPGHLSRQGSPELRWATFEAAKCAARRGSPDYAYYQRLAARPDSGKNPTLAVERKILRRSYHTLRELGDAALAMPVPEGKGVAA

SEQ ID NO: 200208 - protein, 431 aa, unidentified
MDRVIIGVDPHKLSVTIEARDTREILRATGRFGTDARSYRQLLAYARQWPERIWAVEGANGIGRPLAQRLLASGERVLDVPAKLAARARVFDTGQGRKTDPADAHAIVMVALRDKRLRELGTDPGLTVLRLLCDRRDELSRSRAQALNRLHRLFLELIPGGAPVKKSTAQYQALLARVRPRDLAGKTRRRMAAEELADLGRLDAKLKAMKAELKAAVLASGSHLMDIHGIGPAAAARILADVGDIARFPNRAHFASWTGTAPIDASSGQHTHHRLSRAGNRRLNHVLYMAGIVQLRNDTPGRAYYRRRVAEGKTSMEAMRCLRRRLSDVVYRQLAADTQPQQAGPGGHSGATLLSSAADLPPGIGTSDQPLPGPAPATLPPSLTAPHSPAAQPGASPRRRTRGVNVERPTGRTTLTPTSAGAHSKSPGPPS

SEQ ID NO: 200209 - protein, 307 aa, unidentified
MQSSTLPKAEVSLTLGVDTHKDAHVAVALDGIGRHRGALSVPATITGYRRLLGWHRGFGLLEKAGVEGTGSFGAGLARFLRAEGVEVFEVIRPKRRDQYRAGKSDPIDAEAAARAVLAGTATGVPKGADGEVQMMRALRTIRRSALKARTQAANQMRALLITAPEQLRAEVGELSMDKLVKRAVRFRPGESPDDVATATKFALRSVSRRYRQLSEEISELGEQLDRLVAETAPELLAVKGLGTDTAVSLMNAAGDNPERLKSEAAFAHLCGVAPIPASSGKSVRHRLNRRGNRDARAEPCTWSLSAV

SEQ ID NO: 200210 - protein, 402 aa, unidentified
MNAVGIDVSKGKSMVAIMRPFGEIVSAPFEIKHTASGINSLVELINSVEGESRIVMEHTGRYYEVLAHQLLEANLFVSAINPKLIKDFDNDSLRKVKSDKADAVKIARYALDKWQNLKQYNVMDELRNQLKTMNRQFGFYMKHKTAMKNNLIGILDQTYPGVNTYFDSPARSDGSQKWVDFASTYWHVDCVRKMSRNAFINHYQNWCKRKKYNFSQSKAEEIYGKAKELVPVLPKDEITKLIIKQAVDQLNSASTTVESLRTLMNETAFKLPEYPIVMAMKGVGPSLVPQLMAKIGDVSRFTHKGALTAFAGVDPGVNESGTYEQKSVPTSKRGSSDLRKTLFQVMDVLIKTHPQDDPVYQFLDKKRAQGKPYYVYMTAGANKFLRIYYGRVKEYLSSLPES

SEQ ID NO: 200211 - protein, 461 aa, unidentified
MPAGKQRRKKRQKQKVVKLDSLKQLNLNAAGLDIGSAEIWACVPEDRAEVSVRVYETFTPDLHALANWLAACGIETVAMESTGVYWIPIYEILEERGFEVYLVNARHLKNVPTKKTDVLDCQWIQQLHTYGLLNASFRPEAEMVALRAYIRHRDNLIRYRTGHVQHMQKALDLMNLQLTNVLSDITGRTGMQIMRAIVAGQHDPVTLGQYRDGRCRSSEAEIAKALSGHYRAEHLFALQQALELYDFYGQQIQACDAEIEQKYAAIKPVFATEQPLAPPPQKKRRSKNEPVFDLHHYLYQLCGVDLTQIKGLDVLTVQQIITETGVDMSPWPTVKHFASWLTLAPHNAITGGKVINSKTQKSTNRAAQAFRIAAQSAGRSDSALGAFYRRMRAKHGGPKAITATAHKIARIFYHMLKYKQEFQDPGSAFYEQKYRDRVIKNLKRKAKTLGLELVPLQPSVS

SEQ ID NO: 200212 - protein, 377 aa, unidentified
MREKLRFLGLDVHAETIAVAIAEPDGEVRSLGTIANREESIRKLIRKLGPVEHLRACYEAGPTGFVLYWQLTQLGVDCVVVAPSLVPKKPGDRVKTDRRDALKLARSHRSGDLTAVWVPDEHSEALRDLVRQREAAKQDQLRAKHRLTKFLLRTGQRPPLGLKAWTERYMRWLAQVRYTQPAQEITRLDCMNEVEHMSARVKRLEEAILEVIQVAPAPMQEVIRGLQALRGVAHISAVTIAVELGNITSRFESARGLMGYSGAFPSEDSSGKRIRRGGISKSGNAHLRRIVVESAWSYRHLPRVGEKLRKRHQGVPAEITEIAWKAQNRLHKRYMKMMNAGKDQRKVMTAVARELLGFIWAIGIKTEAAANRQQLAA

SEQ ID NO: 200213 - protein, 401 aa, unidentified
MRSIGLDVHKRFAEVAVLEHGRKVQQRQRIETTPAALRAFARTLHSTDRVVLEASVNTWAIAELLSEHAGEVIVSNPMRTRAIASAKVKTDRVDSAILAQLLAADFIPPVWTPDPVTRALRHQVAHHQSLVQQRTRLRNRIHGVLHRNLIGHSFTDLFGKAGCRWLASVPLPREEKDQVDSALRLLTAVDAEIKLAEQRIAQAALADPQATRLMTIPGVGLITSVALLAVIGDVARFQRPTQLVGYLGLDPRVRQSGERPAHTGHISRQGQAHARGLLVEAAQSAIRVPGPLHAFYDRVRARRGRAIAIVAVARKLAVVAWHLLADRTDYKWTPPSLTAHKLRRVELTAGAPSRRGRPRKPDKTNEQTLTPAEERQVLQDAEGHYRAFVATRHGTRQREKP

SEQ ID NO: 200214 - protein, 422 aa, unidentified
MLEQTQDEQEIIARVAALDIGKAELVCCVRVPDPKGGSRRVQEVMTYSTMTRSLQLMTDRLLDLGVTRIVMEATSSYWKPPFYLLEAHGFEVWLVNARDVKNLPGRPKTDRLDAVWLCKVAERQMLRPSFVPPVPIRRLRDLTRYRIGLVSDQTREKNRVEKLLEDSQIKLSVVASDIFGVSGREMMAALIAGERNPQVLAQMARTRMRTKIPQLEEAFVGHFTDHHRFLLTKMLARIDALDVDIADLDTQIEAHLAPFADAVARLDQIPGVGATAAAVIIAELGLDMTRFPTPAHLSSWARFAPGVKESAGRKKGTGATGHGDRYLARVLGEAAVGASKTNTFLGERYRRIARRRGKKKAIVAVGRSILIIVWYLLSDPETRYHDLGSGYYDSRINPERKKRNHIRELEALGYKVTLEPAA

SEQ ID NO: 200215 - protein, 429 aa, unidentified
MNSTQNKKIEQVKETTMIVGIDVGSEKHYFRAFNWRGIELTRKPVAFSNSMEGFNSFYNSVVELMQKNELKEALVGIEPTGHYWFDLGQFMGEKNIKFVMVNPHHVHKTKELDDNSPSKNDRKDPRVIAGLVRDGRYFYSYMPTGVYAELRNASNRRFVLVEEQTRAKNRLQKWIAVYFPEYKGIYTHIDAKGGLLVLKQAPTPEEIVRLGVEGIIKIWKDAKLRGNGNKKAMLILNAAMKSIGLKAGLTEARMEIQDLIEDYELQTKRLERVNDLIKELCQQIRYADKLLEIKGIGITTVAGFIAEVGDITRFDSTKELQKLAGLELVADSSGKHNGKTKISKRGRKRLRYLLFEAAISVVGKNEEFKEIHRYYTTREKNPLKKMQSLIAVACKLIRVFHVILTKGISYDASKMLKDIRHPGEQLKAA

SEQ ID NO: 200216 - protein, 346 aa, unidentified
MMIIGCDFHPSWQQIAWLDSATGETGERKLVHASGDAKQFYQQLAAPALIGIEATGNSQWFIELVEDLGHEIWVGDAAQIRASFVRKQKTDKRDAAHILKLVVQGRFPRLWTPDREQRDLRQLVLHRHKLVEMRSRVKNELQHLALNKGMQKKRTLWSQAGQKVLRELPLKPWAACRREDLLGLLAMLNQQVGELDGAVQQAAEQNPQAKLLMTQPGVGPNTALAYVLTIGDVSRFPRGKQVASYLGLIPHENSSGDRQRTGRISKQGNRMLRGLLVEAAQIAVRFDPEMKKQYLHRCHQKPKGVAKVAAARKLAVRLYWMLRTQVGYPEIVRIESSPRVPLVGAS

SEQ ID NO: 200217 - protein, 348 aa, unidentified
MNATANVIGLDIAKNVFVAVGQDAHGKMVWKRTLSRHEVLPTFANMATTTIGIEACAGSHYWARQLQAFGHDTRLIAAQHTRAYVTGNKNDTNDAAAIAEARSRSSTKYVPINTEAQQDLQMLHRARQALMQERVALLNRMRSCAMEYGAVFPEGVARFLKGFAGWLNDENNGLSGSAMLTLHDFKAQLDEKEARLALYDARLTQAAREDERAVRLMEVPGIGKLTATALLAAVADARHFHSGRDFAANLGLVPREHSSGGKQRLYGITKRGDTYLRTLLIHGARSALLRAGDKPDKLLRWAQKLAERRGVKVALVALANKMARVVWALLAHGRSYVPVWSNGTTRPA

SEQ ID NO: 200218 - protein, 364 aa, unidentified
MTNNITWVGMDDSAKAINLAIFKGQEANPREELLIANDSTGLGRMAKKLKSLSGEVRCVYEAGVNGYYLQRFLAKHGISCDVAAPSLTPRRAGNRVKTDKLDAKALGRLYRAGELTCIVIPQKEQESLRDLVRAREDALEDQLRARHRLARFLMRRGLKYPSGKNWSMGHLRWIQSLRFEDERDQMVLDEYRLALEEQMERLKKFEEKIEAVAKQPNYQKRVSYLMALKGIRVLTAMTIIAEALDLKRFVDAPAFMAAIGLVPSENSSGDNERRGPITKTGNSHMRRVLIESSWHYQHSSIAGKTLKKRREGLPAEIIEIARNCDKRLNQKFRRMVSRGKERQKAAVAVSRELAGFVWAIGQVA

SEQ ID NO: 200219 - protein, 343 aa, unidentified
MLADELDYVIGVDTHRDEHVLAVLTAAAGAVVAGEALPANARGYRETLRFAGRYAAGRRAWAIEGTGSYGAGLARFLAGRGETVLEVSRTPRAERRLRGKDDTLDAARTARAALASDTLALPRTGEQREALRLLLVARRSAVDVRREALTQLRGVIVTAPERGLPTGKLLHRCSRLRRSNQASVDELATKLVLRSLARRIEAATLEAAELERDLLGHIRALAPALLDEPGVGPIVAAQLIVAWSHRGRLRSEACFARLAGVAPVPASSGQTVRHRLSRGGDRQLNRAIHTIVLHRRLHDAATKDYIARRVAEGKTRRDATRLLKRYLARHLYRVLNNQAPLMA

SEQ ID NO: 200220 - protein, 400 aa, unidentified
MPFYGGLDWGGAAHAVCVVDAAGQVVARIEARHDAEGLADMLARLRRIAPAAELPIAIERPSGLVVDALVGAGHPVVPIHPNVVRACRPRYRAAGGKSDPGDAFMLADILRTDGHRFRPLMPLSDDIKALRALVRGRDDLVAQRTALANQLRALLEGFWPGAAVIFAAIDSPIALAFLARYPTPDSASRLGIKRLASFLAQHAYCGRRTPAELLARLRAAPRSLASEAEADAKGELVLALAAVLERLVPEIAKLSSRIEHAVAELPDGQIVMSFPRAGRICAAGILAELGNVRERFPTEEQLAAEAGVCPVTHASGKSRGVVFRWACNKNLRAAVTCFADNSRHASAWAAGVYNRARARGCKHAHAVRILARAWIRVMWRAWQDGTQYDPAKHRAAPQSP

SEQ ID NO: 200221 - protein, 471 aa, unidentified
MGKGSGNGTTRGDRKRNARRERLRGLLPRDGAVIGIDLAEDKQAIAVIDHDVRVLARKTVRVKAFRLGEALDWAVGQARAKGFARVTVACEPTGPRWLQVQRLCAERGLPLVCIQPLMSHIAREQQDYTTHKTDEADCVLIARLAVELHCYIPEELDETWAHLRHLGRRRTQLITAATASGQRILDFLSVAWPTVTETCSDPLKSVTWLTALQVVTARCGADPGKLAVMGTEAFTAAVRGAVAGWGGKKAWGPITRRVFAALTSTEGVVVASRRGLLRRIADELGDLQRTRAQLRAVEADMAAVLGELGLSRLADIPALSAVGAAAILAETGDPRRYDSSSSLVKHAGMSPSDNASGAFYGDAHISRRGRPGLRLTVWRAVWPMLRFNPVMAAKYAAMTQAADDAAAAAGTGSRQAGAAAATARARHAKARVACAASLLRWIYCLVIHGTSWDPGAASGPASGRPALAEAA

SEQ ID NO: 200222 - protein, 341 aa, unidentified
MENCGIDLHQKSSQVTVVDEEGEVLERASIPTTRAGLERWFGRRERMRILVEASGSSPWVVRVLLELGHDVDVIDPRRVRLIAQSTLKTDRIDADILAELARLRTKLRTLVWQRSETTQRQRGHLRVRRALVGARAAFIVTVRGLLRSFGVRVASCRSDRFAARCQATAIPPELAEVMTPLLDAIRDLDARIATMDAVVEQVGQDYPAVKSLQDIPGVGPVVALAYVLSIEDPGRFRRSRDVPGYLGLRPTLRASAATVRQGHITKQGDADVRRLLVQAAHAHLRSHVDTALKSWAESLIPRIGTRKTIVALARKLAVLMHRLWITGEVYQPFPNDVSKAA

SEQ ID NO: 200223 - protein, 352 aa, unidentified
MSMVVCGIDPHKSTLTAVTADEVGRKLTQRTVPTRQESWFPLVVWARGQAEEVLWAIEDGRGLAGSLIRYLLAAGQRVVLVPPKLMARARSSARTRGKSDPIDALAVARAALREDDLPVAHLDQDALDIRLLVDHHDTLVTRRTATINRLRWHLHDLDPALEAGTPALTTARRQAALATHLHALPASVRRDLAAELLADITALTGRIRDLGQRLDALVRPMAPTLLGLTGIGVLTAAKIIGETGGVTRFPTSAVFAAHNGTAPIPIWTGNKPTFRLSRSGNRQLNAALHRMAITQLRRHPAARDYLDRYLKRRPHATRKAALRALKRHLSDVVYTALKADMTSTNNELPAAA

SEQ ID NO: 200224 - protein, 428 aa, unidentified
MITDRVPCRKFIHGGAIMDKIYDNCCGIDVHKKLIVACFRKGSRQEVREFGATTRELLELADWLRDGGCEMTAMESTASYWKPLYNILESSDLKAMVVNARHMKAVPGRKTDVKDAEWIADLLQHGLLQPSYIPDKDQRELRELVRYRKSLVGERTRELNRLQKMLEGANIKLSGTVSDINGKSARGILEYLLTGASIDGAKYDEMYERKIIAHNLKATKEQIIDDLNGVMSPLQRRMMKELLAHLDELNIHIKNLDDEIDNFMKPEEKQASQAIQDVTGIGNTSAQAVISVIGTDMGRFPTDRHISSWAGLCPGDNESAKKRKSGKTRKGNSLLRTTLITCAHAAVKNKKSYFHAQFMRISAHRGSKRAYVAVAHSMLIAIYHILKDGVAFKDLGADYYNQFNKERKINAYLKKLKALGWEVPAAAT

SEQ ID NO: 200225 - protein, 327 aa, unidentified
MTTSPENASSRIFVGIDVAKKSWDVHLLPAGKSMKLVAGESGLSKLRTELATLGSCLVVMEASGGYERELAADLVAAGHEVAVVNPRQVRDFARGVGKLAKTDPLDAAVLARFAQVVHPRPLEKLPEKQDELEALVTRRRQLIELRTMEKNRLGQTSLKSAQKSIVRILDAIRKQIRDVDKLILKLIESHDDWRTTAEIAQSVPGIGQVTGATLVAELPELGKLGRQAIAALVGVAPYNNDSGPHEGKRTIRGGRASVRCVLYMAALSGMRHNPMLKAFALRLRKLGKPAKVIITACMRKLLTLLNTLVRTRTPWNPLLHQIPLPTS

SEQ ID NO: 200226 - protein, 338 aa, unidentified
MKLYGGMDLHSTNVVTQLIDEHDRVVYRNKQDCDLVDILQGLEPFQDSIEGLAVESTYNWYWLVDGLMEAGYRVHLVNTAAVQQYEGLKYTDDDTDAFWLAHLLRLGVLPTGTICPKESRAVRDLLRKRSQLVRQRTAHILSIENLYARNTGTRLNSNAVKRLTQEQVQQHFADPNLALAVESNRVILMALSEQIEVLENAILAQAKLDPRYRYLLSISGIGQVLALTIMLETGAIERFRQVGNFASYCRCVGSEKLSNGKKKGRGNTKNGNKYLAWAFIEAANFAIRYNDRAKRFYQRKAAKCNRVVALKAVAHKLARASYFVMRDHVPFDDTKCFV

SEQ ID NO: 200227 - protein, 425 aa, unidentified
MSYRISGIDVHKKVLAVVVSDVEVDGEFRFERRMFGSNPEQLRTLAAWLVEQEAEEVVMQYWKPVWEALERYWKPIREKREGARRKSGTLHLALAQSNRGRQGRKRDFPDAERLVKRLVARELTLSFVPDAEQRLWRTVTRRKYQLTRDHVRQQNQLESLLEEAHIKLSSLVSDLLGASARRMLQALAEGETNPTALAALADERLRATPEQLCDVLGACTDLKPVYRQLLKMALEQLQFLEQQIGQLDKEMASLLSQHQGAVERLAEVPGLGVDSAQQIIAEVGPTAATFPSEKCLSSWVGVCPGDDESAGVNYSRRSPKGNRHMRRLLNQSANAAARTKGSLFEIVYRRSVPRLGHNQTIGAISHRQCRLIWLILHQGVRYEERGPAVTKQSKQKRTAKMIRQLRSLGYRIEAPNPQLSQAQAQ

SEQ ID NO: 200228 - protein, 348 aa, unidentified
MSAAPVLYQLFVGIDVAAKSFTVTWTQDRHHYARSVTFDYTQSGISQLQAALQATAVVPAKTLIVLEATGSYWITLAVNLHSAGFAISIANPAQVHAWARSLPRRGKTDPLDAHVLAQFAAERQPPRWTPPPAVYHELRQRLTARDALRELRQQTRNQRHALAQWPVVVASVMTQLDDVITDLDGRIRALEDEIGQVLAQGEWASSAALLESITGIGMLTAAWLLVLTVNFSRCASGAALSNYAGLTPLARESGTSVRGRAQLGHTGNVRLRTVAYLATLSAARHNPLIKTFYNRLRAEGKPMKVARCAAARKLLQLAYAVVTNETPFDPYYRTRQAVQEPVSDAHPG

SEQ ID NO: 200229 - protein, 326 aa, unidentified
MAEPIVKPVVKRCAGLDVHRKIVVATILVEESDETVKEETREFGTFRKHRRELAKWLTSHGIELTVMESTGIYHQCIYRDLEAAGLTVHVVNARYVKQVPGRKTDVKDSQWLASLARLGLLKASFVPPVDLRELRLITRYRFKLQSTLSSEKNRLHKVLDDSGIRLGTVVSDINGVSARAIITGLIEGKPLKDLVKCAKGRLKEKSVELEDSLEGELSARHRFLLKQIKAHIDYLEKEVTQIDHHLAEAMKPYQKEWELLQTLPGIDRISATLVIAETGVDMSLFGSAEKLASWAGLCPGTHESAGKKKALPDERVTPPYKGSCAK

SEQ ID NO: 200230 - protein, 361 aa, unidentified
MGQSSWLVAGIVPGVERQPLKKLPVDESALLKLLNRWREEAEKAGHRIERIAIAFEAGRDGFWLARWLRARNIEAHVIHASSVAVSREHRRPKTDRLDTELLKRAFLGWLRGERDHCKTVAIPTLAQEDAKRPNRERESLVGEQSRIVNRMKAALARLGIRGFNPKLKKAVERLDGLRTPEGEPIPPNTLAELKHDMERRRLVRSQIRDIEGTRLERLEQAPGDGPHVMVRLLARVIGVGVETADMLVQEVLSRNLRDRRAVARYGGLTGSPDESGKKRREKGLARSGNARVRRGMIQLAWRFLMFQKDSALAHWFYARTKNAPQTRKTMIVALARKLLIALWRLVREGAIPEGIVLRPAL

SEQ ID NO: 200231 - protein, 426 aa, unidentified
MKPNDPPEFTALIGLDWGDKSHAIALQPADGSTETSTLEHSAESLHQWLDQLQQRFGARQVAIAIETDQGAVVYALLERPWITIYPIHPATSTRHRTMFRPSGAADDLPDALVLLSLLQHHRQRLRPLQLDDESTRTLARLVEARRKAVDRRTLLLNQLVSTLKNYFPQALELVGEDLCTDMALDFLSKWPRLIDVQAAKPATVKSFYHRHNVRRPQLIQKRLDRVRSARLLTRDPAVIEVSVRVVRLLVAELRVLVEHVTAFETAIAQDFARHPEKTFFSELPGAGPTLAPRLLAAFGTIREQYPEAASMQRYFGVAPVTEKSGSRAWIHWRWNAPTFTRQSLVEWAGQTIVFCPWAKAYYERQRAKGSTHHAVLRSLAFKWLRVLWRCWQKRQAYNQEKYLQQLEKRRSPIAARARQLALEMAA

SEQ ID NO: 200232 - protein, 392 aa, unidentified
MIFVGIDVAKDKHDCFITNSDGEVLFHSFSITNNLSGFTELYQNILSVMNDVDKVKVGLEATGHYSYNLLGYLLDKGFPTYTINPLHTNLYRKSLSLRQTKTDKVDARTIASMLMSDVNLKSYSDTSYHNEELKSLTRYRFDKVKERSALKVSISRLVCILFPELEELVPTLHMASVYTLLSEFPGASYVASAHLTKLTNLLSKASKGHYGKDTAVLFRETARSSIGSVMPAKSLELKHTIKLIQELTSEIDEIETAIKQIMDEEIQSPILTIPGISYRMGAMIIAEIGDFNRFDSADKILAYAGMSPSTYQSGQLDNCHSHMEKRGSRYLRYALYNATKYVCHWDKTFGAYLEKKCSEGKHYNVALSHAAKKLVRTIFALERSGQPYKASV

SEQ ID NO: 200233 - protein, 445 aa, unidentified
MRDHSEAFIGIDTSKLRNAIAIAEGGRGGEVRYFGEIDSADAATRKLVSKLAVKYRSLTFCYEAGPTGYGLYRLIRSLGHECVVAAPSLIPKKPGVRVKTNRRDAVELAKLSRAGELTAVWVPDERHEAMRDLSRARQAAKKHLTSKRQQILSLMLRLGRHYPGKKTWGTAHMNWLTQQKLEHREQRIALEELLEGMRQEAERVERLEQAIREAVPEWSLAEVATALQAMRGIDLVAAVTVLAEIGDLSRFQSPRELMGYLGLVPSESSTGDKVKRGGITKAGNGRARRILVEAAWSYRHPARVSREKQPKVAAAPRRVREIAWKAQTRLCGRFRSLTRKGKLPSIVATAIARELSAFIWAINHEVMAPGEGLEIRNVPTARSVTPCSPPSRRGLATADEVAGAPRRPALTAAARGVPAAARVGTKKRAPRSNKETGPEAESAGL

SEQ ID NO: 200234 - protein, 421 aa, unidentified
MKFKSQDKQNQLIENITFHHIVVGVDIAQEAHVARAVNFRGVALGNPLVFSNDEDGFKSLDRWIRDLLASFKLSQVIVGMEPTGHYWLSLAGWLKNKAIEAVLVNPHLVKKNKENRDNTRSKSDKKDALVIADMVKNGYYSPVRFHSSEYEELRVLMANRETVVKRLVSAVNQIHRWVDIVFPELRQVFKILTCKGALLTLRLFPLPAELCKLSPDDVIKGWQKSMKRHSGVRRAHLLIDLAKKTVGSRQATHAYKLHLEQLLEEHDLATKQLQRIEKEAKDVVERIPYSGKILAITGISAIALAGVLGESGDLRGYAHGNALLRHAGLNITEASSGKWKGQLKLSKRGRPRLRHFLYLITMCMVMSNQEFKALHHYNVQVKKLKKMKSIMKLCGKLARLLVGMARSDVAYKPDKIFALAA

SEQ ID NO: 200235 - protein, 355 aa, unidentified
MVVVGADSHKRTHTVVAVDDVGRRLGEKTVAATSEGHLLLVQWAAQWPEVTFALEDCRHLTRRLERDLLCAGHRVVRVPTRLMAGARRGGRQPGKSDPIDAQAVAMAALRHPDLPVASLDGPTREIKLIVDHRRDLVAERTRVHNRLRWHLHELDPTLQIPSRGLRRYCVLTELAAALEGHRGVVARLAQELVERARQLTEQINALEAELRPLVRRLAPSLLAIPGCGILSAAMILGETAGAHRFRNKDAYARFTGTAPIPVWSGTSNGKVRLNRGGNRTINTALHMIAVTQSRGYGSGRAYLDKLTAAGKGRTEAVRLLRRRLSDAVFSALRIDERRHATASDNTPSEQPATAA

SEQ ID NO: 200236 - protein, 345 aa, unidentified
MKHFAGLDVSLQETAICVVDEDGTIIIEGKAASDPADLIRWLAATGLMIARLGLEAGPLSPWLHAGLRAVGLPAICIETRRMKGATAAMAVKTDRNDARAIAHAMRVGWFTAVHVKTAESQELRLLLSNRRTLLEKRVAIDNEIRGTLKAFGLKLGEVTVGTFEARVLELLAKRSRLLVMVRPMLTARAALRQQSDVLHRMVLKAVRASAVCRRLLSVPGVGPIVALTYATGVDDPSRFTHSRDLGPHFGLTPRKYASGEIDRSGSITKAGDGAVREVLVQAALTLLTRVHRWSALKAWGVAIAKRRGLRRAIVAVARKLAIIMHRMWANAAPFNWAREEAVALA

SEQ ID NO: 200237 - protein, 312 aa, unidentified
MTDDQRFVGIDVGKFRFHVHCLWNGQHADFPNTNEGHQALIATLGDERDLVLAVEPTGGCEWALWEALDAAGFMVRQVSSSHVRHFAQADGKLAKTDPIDARLIARFIAFKPSAGRCLPARKLRILSALITKRNQIIAMRKRLACQIKQRGTDILEDMDSEHMALLDTQLARIGARIAEMLEKDQEFKRKACCMRSVPGVGPVLASALIAGMPELGHISDKQAAALLGVAPIAKDSGRYQAKRTIAGGRRWIRHILYQAALVASYHNPALKIFADRLRKAGKPHKVVITATARKLIAILNAIIAQNRVWRAI

SEQ ID NO: 200238 - protein, 398 aa, unidentified
MICVGIDIAKGKSTVCFLKPGGEVLKAPYDIEHTAEEVGKLIRDIRSYDEEVRVVLEATGHYHLPMVAQLLEADIFVCVVNALRMKKFCAQDIRKAKTDKIDAAKIAAFGLTYWQDLQRAKPTDEVYRELRLLSRQYFQLTSMLVKAKISLGNLLDNVMPGIADVLQDRDPHHKLTDFVLKYLHFDKITAMGEKKFVSGYCSWAKKQGYRMYERQAEEIFALVQNSIPALPMTPSTTIVVKEAIRVVREIETSRTSILTQMQAFAKSLPEYFLIREMACVGDTLTPLVIAEIGDVRNFHSKHALIAYAGIDAPPYQSGGFSGTERHISKRGNGYLRHVGFEIMQCKLRLKPEGDPVYEFIQKKRSEGKCGKEAMVAGINKFLRIYYGKVTELYRELDA

SEQ ID NO: 200239 - protein, 437 aa, unidentified
MRRKKSKASKRVNLQSLPVIHPDAAGIDVGAKEHVVAVPCDRDERPVRTFQAFTPELHELAAWLKRCGIRSVALESTGIYWISLYEVLEQHGFEIRVVNARHVKNVPGRTKTDVLDCQWIQKLHSFGLLNGSFRPDQQIRKLRTYMRLRDNLVVNSTQAVHHMQKALFEMNVQLSNVISDIVGETGLRIIEAIIAGERDPEQLAALCSTRIKASRQTVAKSLHGNWDEALLHCLKTALETYHFNQEQIQHCDGYIHRHLGQFESRAQLPSSPKDLQGQLHRVCGVDLTKIPAIKEQSAQIIISEVGLDMTKWNTEKQFSSFLGLCPNNSISGGKVLRRATRKVYNRAADTLRLCAQSLTHSKSALGAKYRRLRARLGAPKAIVAMAHHLARLVYRMLRYGDKYIEKGIEHYEQKFRLQRIKWLKKEADSLNLQLIAA

SEQ ID NO: 200240 - protein, 412 aa, unidentified
MQTIVERPAALDVHKAQVTACARVPGGRGRREQHVAEFATTVRGLLALRDWLAGHAVTQVVMEATGVYWKAPWAILEDEFECMLVNARHVKQVPGRKTDVSDAAWLCQLAEAGLLKANFVPPKPIRELRNLTRYRKTQIQERAREVNRLHKALEDAGIKLDTVAADIMGKSGRDMLDALVAGETDPAVLAELARRQMRKKIPALREALTGHFDAHHRLWVGAILRHIDFLDEQIEQLTGMIEEQIRPFAPAVELLCTMTGIQRRGAQCVLAEIGADMAQFATARHLASWAGRCPGNDQSAGKRRSGKTRNGSKWLDFALEEAAMAAIRVKGHYLEAQYRRLKPRRGHKRALGAVKHTMICAIWHMLSTGETYRELGGDYFTNRDPERHTRRLVAQLERLGHHVTLTEEAAAA

SEQ ID NO: 200241 - protein, 381 aa, unidentified
MTTKATRNTQAKTSEGPLFMAFELSEKTWKLGFTTGPGQKPRERNVTARDQERVLDEIAQAKRRLGLPETALVVSCYEAGREGFWLHRFLEAHGITNHVVDSSAIEVSRRQRRAKSDGLDVRKLLSMLIRYHEGERQVWQVVHVPSVEAEDQRHLHRDLETLKQERGDTTRRIKGLLSSQGLRVENLTRLPEQLDALRLWDGSPIPPGLRQRVLRVYAHHQFLSEQIAAVEAERGTQLQDSNDASIEKVRQLMLLKGIGINGAWLLVMEFFAWRGFKNRREVGGLAGLTPTPYQSGESAREQGITKAGNPHVRWMITELAWGWLRFQPQSALSVWFRERYGSGGKRLRRIGIVAVARKVLIALWRFLETGELPEGAALKTR

SEQ ID NO: 200242 - protein, 324 aa, unidentified
MLPTLGIDISKDSFHVELSVNDKLHHRRFSNRKAGFAELSVWLTKHKVAGLHACLEATGPYSEALALYLHEQGHTVSVVNPARIKAFGQSELLRNKDDRPDAALIRRFCEKQQPSAWTPPTPQLRELQSLTRHLENLLETRQQQVNRLEAPNAKSVVKSLRKLVAQLQAEIQRTEQQIADHIDRHPDLKQQCQLLTSIPGIGPRTAAKLLAEIEGLNKYESARQVAAYAGLTPLNNRSGTLRGRTRLSKTGNARVRKALFLPAIVAQQHNPIVRTFCQRLAQRGKPKMQIVGAAMRKLIHIAYGVVKSGKMFDPNHELLLKSVS

SEQ ID NO: 200243 - protein, 360 aa, unidentified
MVLIEAERTRLIVGGVDTHKDLHVAAVVDESDRLLGTSSFATTRQGYRQMVTWMRSFGTLRRVGVEATGTYGAGLLRHLQAAGIEVLEVTSPDKVDRRRRGKSDDLDAEAAAHAAFTGKRVATPKRRDGMIEALRVLKSCRNTAVAARRVTLQMISSTIVAAPEELRDMLRTMTRMRLVRTLAAWRPDLTDYRNPLSAYRIALKSLARRYVELHDEIAELDTMIASIVGELVPDLVAPNAIGHETAAQLLITAGDNPERLSSEASFAALCGVSPVPASSGKIVRHRLNRGGDRAANSALHIIAIGRLRTDSRTQAYVARRIADGHSKLEAIRCLKRYIAREVFTIIRRRQRDINETQLAT

SEQ ID NO: 200244 - protein, 412 aa, unidentified
MSSAYGKVAGIDVHKKILVVVIVDSEHPGKDTATGKFATTARGLQQLAAFLREHEVRQVAMESTAQYWRGVWMELEQEFDLRLAQARSTQAPRGRKWDLSDARRIARRLLADDLTISYVPPPEQRDWRLLARTRVSLVEQISRIRGLIEVVLEQAQIKLTSVVSDALGKSGRRILKALIEGEQDPDQLAALGHRSLRASREQLSQALCGRITAAQRLVLRLHVEQIERIEQDIELLEQELAREQGEHQAVVLRLCGIPGFSTCSAQTVIAEIGPEAAAFSSAAKLASWIGASPGQQESGGVPGSTRSANGNRMLRRLFCQIAWAAAATKDSEARRRYQRLVVRKGPQKAIWAVAHYMIRVTWRILHDRVDYIAPDSSGLRRRALLQRANRLAAQMRRLGFALTISPILPSHG

SEQ ID NO: 200245 - protein, 473 aa, unidentified
MWRRRRAEVVASNGVSEPVVSLTRASKSTLYCSRRAEERPPERVIQISLNAEAHPPSPDPVEKEAAMEVLYPRSGGLDVHKDEVVACVRVAAGSEVRREIRRFSTTTRGLQRLAEWLREQAVTHVAMESTGVYWKPVWHMLEGTFALTLGNAKEMRNVPGRKTDQNDASWIADLQAHGLIRPSFVPATPIQELRDLTRLRKQLTRERSQHVQRIQKVLEDANLKLSSVLTDIMGLSGRDILDAIVRGEEDPQRLAELAQPRVKATKAAIAEALTGRVREHHRYLLRLHLGHINVLDGTLESLEGRIEEKLEPFRAKRERLCGIAGVKETVAGVILAETGGEMKAFPTEDHLVAWAGLAPGQDESAGKRRNTRTKPQRWLKGAMVQAAHAAVKKKDSYLRVKYMRIRARQGGKKAIVAVAATLLRVAYVMLRDGVEYRDLGADYVDPNNRDRAARRMRRRLEKMGYEVELRMAA

SEQ ID NO: 200246 - protein, 343 aa, unidentified
MKISRVGVDLAKNVFQLHGVDRHGETVFKRRVSRDKWISVLIKTAEPGCEIGMEACGGAHHWARLLMTKGFSVKLIPPQFVTPYVKSNKNDAKDAEAICEAMGRPNMRFIKVKTVEQQDIQATHRIRSELMCHRTAKANQIRGLATEYGLVAPLQMASLRAAIPCWLEDAENGLTERFRALLHGLWDDLLTLDQRIETLNGEIESIAKSDPLAQRLQQLRGVGPLVATALIATVGNCDQFSKGRQMSASVGLTPRHHSSGGKERLLGISKRGDAYLRSILIHGARSAVATAKNKDDRLSRWVTELAERRHPNVAAVALANKTVRMAWAMMHHDTDYDPEFAAS

SEQ ID NO: 200247 - protein, 341 aa, unidentified
MKSTTIAVDVAKEVLEVAVSVRPGQVSEQKRLSRAAFMKFCTDQPPATVLLEACGSAHYWGRRLQSIGHRVVLLPPHATRPYVFRNKTDRTDTRGLLEAFRNEDIHPVPVKSVSQQALTALHRLRSTWLATRTARINTVRGLLREFGCTIPVGAHHVLAKTWDLLADPESGLPDALRPGLAAACTEIRDMEGRIRVVEDQLQALADQTPAVARLRSIPGVGLITATALVAFVGDIQRFPSGRHFASYLGLTPRERSSGLVRRLGSISKRGDVYLRMLLIHGARAVLWAAKKRPTPDRLRVWALHLEKLRGHNKAAIALANKLARIVWAVWKHDVDFREEAA

SEQ ID NO: 200248 - protein, 344 aa, unidentified
MAIVGGLDIHRRQITFDILDTATGETRRGQLSPATRLELRAWLEQFHPQPGGFALEATTGWRFVAEELERAGFRAHLAEPADTRALRGPKRRAKTDRTDAHHLRELLRAGTLPESWPPPAHIADARTQVRLRRALVGERTAWYQRIYAILFHHGLPDRSQLLTADGRAWLTRVELPAVARQAVDLALRMIDCLDAELDLLDTQLARIARAQPGCQALQRRYGIGRLTAVAIWAEFGDVRRFANARQAVRFTGLDITISESDGKRARGHLARQGSPVLRWALHEAAMCAARPGSPDHASYLEVKQRLGGKRAALSVARKLAREAYHTLNELGDQALVPAELPTAA

SEQ ID NO: 200249 - protein, 418 aa, unidentified
MFKIFRKNCCGLDVHKTWIYACIGITDANSRTEYFQARFSSFSKGLQELSHWLDKYNCKQVCMESAGKFWIPVFNILEKTCLVTLAHPKYTKPQKGNKTDRKDAKWICDLFMCDMIKPSFIPPPAIRNLSDLVRYRGKLTNMLTGEKNRAQNCLTVSNLKLDDVFADVFGKSARSITEYILAHPGEPFDVAQFVDRRCKSPLSEIQAAVDGAISPEQAVKLRQCLGHIDQLRLLRQRLEQEILRICEPFADILQLLRTVPGLGNDPMTAIAVLSEIGGDMSVFPTAKNLCSWAGCCPRNDQSGAKVKSSRISRAGSYLKPLLVQVANALIHSRKHPEFAERYRRIKARRGHKKAIIAVCKMLLTAIWNILSKLVPYSPAGFLSTSHDLPPSKSLTVAQGLSLLRRRGFILTDDPLSAP

SEQ ID NO: 200250 - protein, 311 aa, unidentified
MNNIIGIDVSKDTLDVHRLTDGRHNNFTNDKTGHTQLLKWISLQPDTLIVFEATGAYHRRLEQFLSAKTIAFVKVNPKQARRFAQACGKLAKTDRVDCEMLAKMGAALQLTPKPISAENLYDLRELLSARRALIKDRTAAKARSATATHSLVKQQLARRLRQIESDIAKIDAAMLQSSQQDQQMSERLDILSSIPGIGTTTALMILVDMPEIGTLDSKQVASLARLATMSQSSGKWQGKAWIQGGRPNLRHAIFMPALVAIRHNADFKVKYEQLVAAGKEKKVAITAVMRKMLVLANALLRDHRKWVEKAA

SEQ ID NO: 200251 - protein, 391 aa, unidentified
MLICGIDIGKNKHEACVIDQEGRQLAKSLRFTNTTSGAESLLAYIAENNAGKDVVVIGMEATGHYWLSLYCFLYDAGFQVNVINPIQSDAIRNLFLRKTKNDAKDSFLIAETIRIGRFSKTDLADEDILSMRQLCRHRMDLVDYIADQKRKIIGVLDRVFPEYQNFFSDTFGKTSTELLSKAVTPEELLAIPTDELCKLLRENSRGRFGEAKAEELRNAAQNSFGITIGTAAFTIQLRQLLEMIELLERQLTELEAEIEQYLTKLDTPITTCPGVGNVLGAVILSEIGDITRFPEPKKLVAFVGIDPSVRQSGEFVGTQNKMSKRGSPHLRRAIWLAAMVAAFHDPVLSAFYQKKRAEGKHHYTAIGAVARKLTFIIYAVLRDNRPYVPNC

SEQ ID NO: 200252 - protein, 460 aa, unidentified
MSFFFSSQAREADPPQSRPNVMTTLPVLNPKAAAVDVGSEQMHVSIAGDAPKVFGSTTAQLQALRDYLLERGVNTVAMEATGVYWLCLYEVLEKAGLEVAMVNGRHVKNLPGRKTDMKDCQWQATLHAHGLLRGGFVPKEQIRRLQDYQRLRADHITMAATHQLHMQKALERMNIKFHDVISHLTGVSGLKVIRAVLSGERQPEALLALCDPLIQKKKAARVRESLVGTWKEEHLFALRQALAGWEFYQGQIAECDRALEQVLKEIAPGDSNKPDAPGWGRRTGINAPQIDGLSGLLCRLCGGKNPTAIPGITDYTLLQLVAETGTDLAKHWRTEKHFTAWLGVAPGSRQSGKRRGNQKRSRNRAGRIFCVIARSVGRTVDKALGGFYRRLKSRRGGLVANVALARKLAQLYWRAMVHGLGYVEDGLKKYQDRVVQTEQRWLQKLAKKHGMILQPQIKTN

SEQ ID NO: 200253 - protein, 497 aa, unidentified
MKKQRQNRTPKAASNTASPAQSKRGRSAKLRKLKAIEALEQINLHAAGIDVGSAQNFVCVPAQAVKPGQSNVRSFGAFTKDLDDLVEWLKECGITTAAMEATGIYWMSLYDKLEAAGIEVVLVDPHSVRHVPGRKTDVLDCQWLQQLHTYGLLRGAFRPEASVRRLRVLCRHRADLVCEGSSHLQQAQKALVQMNIQLPLVVSDINGETGLRIIEAILAGERSPQALVQLRDPRIKKSTVPEMAAALSGHYTEEHLFVLRQNIEAWRFYQGQMQQCDQQIEAALKAMASASKLNVPTAPPKPIPAAQPGSPGAKKKRQRPLHGNNAPTVDFSEQIRRVCGVDLMKICGLNLLSVLMLIAEIGVDMSQWRSAKAFSSWLGLCPGSKVSGGKHLSRRTRHVVNRASVLFRMAALAAGQTDTWIGRFYRRKRSHLGAPKAITATAHKIACVVYHMLKYQEEFLPLDIALYELKAQQRRMRNLRKQAQELGYELIERKQAA

SEQ ID NO: 200254 - protein, 405 aa, unidentified
MNYQKEKHLATLYVGIDISKEIFDICQMQEDGKVVKAFQITSDRSGFNQLIASIPKGENPLFVIEQTGPYSGNLEYFRDKGGYNYILCNAFEVSRLREVFSYRTKNDVIDAWVLAQAARMNVLKHSSRGFKYTYLRDILERNYDLKDRKTALLNQIQACVVESFPELPKIFKKFQCNACLAILSQYQSPEQILKAEDDEIQEVVRKNNGRISKSKIEKLKKLCAESVAWKNNKIYLQIIKSLVRELQIIKEEIEVTLILLDEYIDDTFPQEIELLKSVPGIGDITACHMLAIVGDHRRFDPENDGKGSKRVSSYAGYGVIEYSSGHRSKRYGLNKRGDSKLRGLLYMAAITAIRVDPDLAKKYGLKKDRSNGKKALVSISHLLLRRGYGVLKTGKMYNQAIPMAG

SEQ ID NO: 200255 - protein, 354 aa, unidentified
MQYIAFDSHKRYTYAVVEEKEKGRVMEKRIEHRRGEIGAFLSQCEVGSPVALETIGSWYWIVDEIEAAGMLPRLVNARKAKMMIASSKKTDRLDAKGLNTLQRTETLPTVWIPSSELRDIRELYRTRMVLTQMVIRLKNRILSCFSKYGISFDETSDAFNIKGRASLEAALEILPTQTCFAVKELLRQLDLLQEAVKEFEARMLQVQSNDPEIKLLQTIPGVGAILSYVIAYETGDIHRFPSASCFASYAGTTPSVHASGGKVRYGHTASDVNHYLHWAFIEAANVISMRHEVLRFRHTARLYERLRQAKGHDIAVGAVARHLAEATYWILTTKTAYREPNQNKQVVVVSSKEG

SEQ ID NO: 200256 - protein, 343 aa, unidentified
MKVTIIGLDIAKSVFQAHGTDANGKCLLKKKLGRSEVVSFFEKVERCQVVLEACSTSHHWARVIRETGHDVKLIPPEMVKPFVKRGKKNDAVDAAAICLAAMHPDTRFVPIKNEEQQSLLSLHSTRTLLVKQQTMLVNALRALAAEFGLIVPLGNSRLPELLAKIETSLSLPDTMKKTVSLLFEHSGKLDESIKCLEAQIQMHAQQDEDARRLLTIPGIGPVTASLVVASVTDIGSFETARHFAAWLGLVPRQHSSGGKTRLGRITKTGNREIRKMLVLGATSMLYRAQKWNSAAGVWLCKLLERRPGRLATVALANKMARIIWVLLSRKEIYRPTGRSVATV

SEQ ID NO: 200257 - protein, 410 aa, unidentified
MRIIALDVHRSFAQTAILENGKLRDAGKIDLEYSRLLQFARKLKPDDEIVIEATGNTSSIVRLLSPFVGRVVIANPILVRAIAWAKVKTDKIDAAVLAKLHASGFLPQVWMPDEETEARRRVVAERTQLVSQMTRLKNRIQSVLHANLIPPYKGVLFSQRGRAWLQAQPLAEDQRRVIVRHAGELDRLGAELAEVDKSLAQKALDEPQVKRLMTITGVNSTVALSVLAAIGDIHRFSSPEKLVSYFGLNPRVRQSGDKPAYHGRITKQGRAHARSMLVEAAWVISGAPGPLRAFFIRIRDKRGKHVAAVATARKLAVIIWHILSKDEDYTWNRPALLQWKLRKLELKAGHPSRRGGRQKGSAAAYSNKSVRDSERETIANAEDEYRRFVATWKQQSPKGRSGATKEVRRS

SEQ ID NO: 200258 - protein, 408 aa, unidentified
MQVYIGIDWSENKHDVVFMNPSGAAVARLTIPHAPEGFLQLDQTRQDLGVTAAECLVAIETAHNLLIDFLWSRGYSEVYIISPAVVKSTRGRYGHSGARSDQQDASLLADLLRTDRARFRPWHPDSLLTRQIRAKVSFIAHLTRQVTRNSNRLRAVLLRYYPAALAPFSSLRSQIALEFIRAYPTPQAVQALTWPQFRDFAAQHAYKHPRRLSAYLAQLQAPHPEATPDTVLVYQGEAVLLAEHLLLLVRAKAQALRELQVLFEQHPDASTFASLPGTGPLLAPALLAYFGDDRARFPRAENVQSLAGTCPVTDSSGKRKIVRFRYACNREFRAIAQQWAKASLSESTWANAYWHQIRTRCRSNSHAYRCLANRWLSISWKLWQAHQTYDESYHLQQRAQRSRARRPN

SEQ ID NO: 200259 - protein, 339 aa, unidentified
MKLYGGIDLHSNNSVIVLLDEEDQKVYQRRIGNDLKTILDALEPYGDSIEGLAVESTYNWYWLVDGLMEAGYRVHLVNTAAVKQYEGMKYGNDHTDAHWLAHLLRLGILPKGYIYPKEERAVRDLLRKRGQLVQMRTTNLLSVQTLITRNTGSSLSANKVKKLQSEQVAELLPCEDTALAVNSNLNIMQALQEQIKILEKEVQKKAKLKAEYAALQTVPGIGFILALTILLETGPVQRFAKIGNYASYCRCVGTTRLSNGKQKGKGNAKNGNRYLSWAFIEATNFAIRYNDNIKAYYQRKQAKTNRVVAIKTVAHKLARACYYILRDQVEFDLSKAFSA

SEQ ID NO: 200260 - protein, 375 aa, unidentified
MKEKVRFLGLDVHAETITVAVAEPGDEVRSLGTIANRADSIRKLVKKLGPVEQLKACYEAGPTGYVLYWQLAEMGVQCDVIAPTLAPMKVGDRVKTDRRDAERLARSFRSGDLTAVWVPDAGSEALRDLVRAREAAKQDQLRARHRLSKFLLRSGQRPAAELKAWTQLYMAWVRQLRFEQVAQESTRLDYLHEVEHMAERVVRLEQAIAEAVKLASPEIQEVVKDLQALRGIAQISAVTIAAELGNISRFESARQLMGYSGAVPREDSSGKRTQRGSITKTGNAHLRRIAVEAAWSYRLRPGVGPGLRKRQEGVPEEIKEIAWKAQNRLHKRHSRLAAAGKDQRKIITAVGRELLGFIWAIGIKAETAAQQRMAA

SEQ ID NO: 200261 - protein, 347 aa, unidentified
MDDHNKTGSITVVGIDLAKNVFHLHGIDASGNVVVRKKLSRTKLATFMAKLPACRVGMEACGGSHFWARKFVAMGHDVRMMGPQFVKPYVKSNKNDLVDAEAICEAVQRRTMRFVPGKGVEQQDIQSLHRARSMAVSHRTAQVNQIRGLLMEYGIVVPQKIANLRKALPWILEDGENELSPMFRDLLTGLRDEFVRLDERIAGYDAKIRGLSEQSHLCKRLMGIPGVGPMSATALVAAVADASVFTSGREMAAWLGLVPRQHSTGGKPKLLGISKRGDVYLRKLLVHGARAALRVADKKQDRRSRWAVEVADRRGHNIAAVALANKNVRTAWALLSKGEEYKTIAIV

SEQ ID NO: 200262 - protein, 341 aa, unidentified
MTIVMGLDQHRAQITAEWIDTDTGEIARTRVAPADRVGVRRFLERFTGRQLEVALEATTGWRFVVEELRAVGARAHLAEPAETSALRGPKKHAKSDRADAKHLRELLMTGRLPECWIAPDHILDLRAQVRLRHSLVDERGEWQQRIRAVLYHHGFPRRSDLDLLTAAGRDWLTALALPATAREQITIALRMIGALDSEIPALDKQLRAYARRQVGCRALITAHYGIGELTSVAILAELGDCRRFSSSRYAVRYGGLDITVHASDRRRAPGHLSRQGPPVLRWALYEAAQAATRPSSPDHAYYRQAAQRLGHNRACLAIARNLLKRSYHTLKDLGDQALALA

SEQ ID NO: 200263 - protein, 414 aa, unidentified
MDIVHDRCCGLDIHKKTVVACLIAPGPDGKPKKEIRSFGTMTGDLLGMADWLQRAGCTHVAMESTGVYWKPIYNVLEDRFNLLLANTKHLKMVPGRKTDVKDCAWIAELLRVGLVQPSFVPERAERESRELTRYRSSLVRERTAEINRLQKTLEGANIKLASVASEVMGKSGRAMLEALVAGIADPTVLADLALGQLRRKIPELQRALVGRFGAHQCFLVVEQLAHIDELEQRIERVSQEIRERMRPFETEIALLDTIPGVNRWTAEVLLAEIGFDLSRFPSAGHLASWAGLCPGNRESAGKRKSGRTRKGSPWLRVAVTESAHASGRGKTYLAAQLHRLIPRIGLKKAAIAVGHSILVIVYHVLTRHQPFQDLGALYFDHRHRASLEQRLIHRLEALGNTVTIERTQAPASAA

SEQ ID NO: 200264 - protein, 454 aa, unidentified
MPKTTSGSRPEFKPVNVRAAAIDIGSKMHMAAVDPACTDTPVRAFGTFTQDLHDLADWFKACGVTSVAMESTGVYWIPAYEILEQRGFEVILVNARYAKNVPGRKTDVSDAAWLRQLHSYGLLRGSFRPDAEIATLRAYLRQRERLVEYAAAHIQHMQKALMEMNLQLHHVVSDITGVTGMRIIRAIVAGERDPDVLATHRDVRCHSSIETIRAALVGNDREEHVFALTQSLELYDTYQAKMLDCDRKLECLIAALSNGGTKPVGKLPKPRVKTKQVNTPSFDVRTALYGVLGVDLTEIHGLGPSLSLKLIGECGTDLSAWPTAKHFTSWLCLAPGNKVSGGKVLSSRTRRSSSRAAALLRLAATTVGRSDTALGAFYRRLALRAGKAKAVTATARKIAVLFYNTLRHGMTYRDPGADHYEEQYRSRVVANLRRRAKSLGFVLHAAPGGQLAVS

SEQ ID NO: 200265 - protein, 338 aa, unidentified
MAIVTIGIDLAKNVFAVHGVNEAGKPVLVKPTVARSKLLELIASLPPCTIGMEACSGAHHWARLFMAHGHTVRLMAPKFVAPYRLSGKQGKNDAADAAAICEAVQRPHMRFVPIKTVEQQGQLCIHRVRQGFIEQRTATITRIRGLLSEFGIVLPLKATTIRREAMAHLEDLPGWANTVIGDLLSEVSHLDERVAQYDQYIAQIAKENSRTQQLMRLPGVGPATATAILAMIGNGHEFKCGRQFAAWLGLVPGQYSSGGKARLGHITKAGDSYIRSLLVLGARAVLNSAKNKSDSTSRWAVALAERRGYWRAIVAIAAKNARMAWASLTLGERFAMPA

SEQ ID NO: 200266 - protein, 355 aa, unidentified
MKHQAIHYLGLDVHQATVAATSRNETGAVVLKATVPTEAKALVGLVRSQGPRVHVAFEEGTQAQWLHDLLQPVAERVVVCNVRGKKELVNKNDEIDSDLLSERLRVGSLKGVYHGAAAVLALKEMVRNYSNLVEDTTRVMQRIKAMFRAQAILTPGKGVYGVRQRATWMSKLEGAGGRLRAESLFTQLDVLLPLRRKAKAAMIAEARRHPAFRILRSIPFLGPVRVAQIIAIVSTPFRFRGKRRFWPYIGLAVVTHSSADNEIVAGTIRRRRRAPLTRGLNRNHNRVLKNVFKGAATAAAYKDGPLKDLFTASVARGVDPDMALLTLARKIASVALRLWKKGELWDPAKLTTQAT

SEQ ID NO: 200267 - protein, 360 aa, unidentified
MAKARTVVGLDVHAAKVVAAVLDVETGELQFFGMEMDVGRVAGFCAALPGPVRAAYEAGPTGYGLARELAKRRVDCVVAAPSKIPRGSGERVKTDRRDAELLARLLVAGKLHAVRVPGDEEEALRDLVRARDGVRQDLMRCRHRLSKLLLRRGIRFDEGDAWTERHRRWLDQVVLEWPAAQATLLDAKGAIDVLAHRRDSLEREILASLASSPWRVQTGRLRCLRGIDTLSAVGLCAEVGDFERFAKAGQLMSYIGLVPCEATTGQQRRLGSITKTGSAHARRLLVEAAWHYRKAPRIGKTLTERQDGQPPAAIAIAWSAQRRLHRVWTRMEQRNKRRTLIATAAARELAGFCWAICQIE

SEQ ID NO: 200268 - protein, 342 aa, unidentified
MSVYVGIDVHRKRSQVAVIDQGGKVLANRNVPNGVEPILRVIGDLPSGTPAAFEAAFGWGWLVELLEDYGFEPHLVHPLQCKAIASARLKNDKVDAAILAQLLRADLLPEAWIAPLEVRQLRALLRHRAQLVRLRTLLRNRIHAVLADHGHGRPEGCWTGPGRAWLASLELPAVSRQVIDDALAVIDALQQPIDRLDREVHQRARSEPAVQVLTQLPGVGVFTALVLLAEIGDITRFGSARKLASWAGLTPMVRGSDRMVHHGHISKQGSAWVRWVLCEAAQTAKRHPDFAATYQAIAKRRGKKIATTAIARKLLTRAWHLLTDAQAAAPEATATAAAASPA

SEQ ID NO: 200269 - protein, 415 aa, unidentified
MTDQKQWYAGVDWASEKHLVFLTDAEGRKVGEREFKHSGEGLAEMTAWLMAASGADEPSQIEVAIEVPHGPVVEALMERGFAVHAINPKQMDRFRDRFSLAGAKDDSRDGEVMASALRTDAHCFRRLSLIDPTVIELREWSRIAEDLESEHTRLTNRLREQLWRYFPAILELGGDLGADFMLDLLQLVPKPDRVARLRESAIARLLKQHRIRRFDAAHVVEVLRKPPLWLAEGTTAAASAHVAVLIARIRPLNQQIKQARRQIDQLIARLVPTEETGPGQKKQHDVVILASSPGVGRIVLATLLAEASDPLQRRDYPALRCLTGVAPVTKRSGKSHLVVRRYACNQRLANAVYHWARTAVQNDPTSRAKYAALRSRGHNHARALRSVADRLLNVACAMLKAGTTFNPELGTQKTA

SEQ ID NO: 200270 - protein, 466 aa, unidentified
MQPNRRRSLGKPRVSPTVFDRLNPHVAGIDCGSGEHFVAVPPDRDPHPVQSFPTFTSDLLRLADWLAACRVTSVAMEATGVYWIPIYEILDARGFEVLLVNARHFKNVPGRKSDVSDCEWIRELHSVGLLRGSFRPTDTIVALRAYMRHRQTLVESAGTYTQRMQKALVQMNLQLPLVVSDITGVTGLRILRDIVAGQRDPQHLAAHRDARVRASTADIVAALTGHDRPEHLFVLQQNLELFDACQAQLAACDRAIDAHVQTLTAQRPPPVTPLPDPRVTKKPHDHQPRFEIRTPLFQLTGGVDLTQIDGVAPYTALKLIAEIGLDMTRWPTEKHFTSWLSLAPKNKISGGRLLSSRTPPSANRAAVVLRMAAMSLGRTQTALGAFYRRLAARIGKPQAITATARKLAALVYRALKGELVYRDPGADAYDIQQRARVLRRLRQRAATLGFSLVNRDTGEILAPAIP

SEQ ID NO: 200271 - protein, 338 aa, unidentified
MRRFGTFTADLDALADWLIDCGVTTVAMESTGVYWIPLFELLEARGVQVLLIDPRQAKRAPGRPKTDRLDGQWLQRLHAYGLLAGAFRPDDQGCVLRASLRHRQRLLTYAAHPMQHMHKALQQMPLNLTQVVSALTGVTGMAILKALIAGERHPQHLAKLRNPHCHHDEDDIAKALQGTWRAEHLFALQQAVALYDFSHQQLALGDRQIKAHLEPFADKSEGQPLPPKARRHKKTNEPRFDARTPLSRMAGVDLTTLEGIEENTALIILSEIGTDMHRWPSVKHFCSWLGLCPQHKISGGKVLSRRVRRGAHASPSPCALPPAVCTTRRVPWGLFFDG

SEQ ID NO: 200272 - protein, 446 aa, unidentified
MIVASSTRLNVLFGRAAARSAAAHVLRWKGAVIRVEVLVERCAGLDVGKADLKACVRVPGPRGARRQQIKTFATTTGALLELRQWLIEHQVTVVGMEATGDYWKPVYYLLEDAVGVQLLNAAHMRNVPGRKTDVSDAAWIARLVEHGLVRASFVPPPPIRRLRDLTRYRAALVGERSREKQRMEKLLEDAGIKLSVFVSDLFGVSGRAMLTALVDGERDPRVLAGLAQGRMRPKIPVWVQALTGRFGEHHAFLCRIMLRHIDDLDTAMAQVTAQIEAEIAPFQDIVDRLDTIPGINQRAAQVIVAEIGVDMSRFPTAAHLASWAGMCPGNNESAGKHFSGRTRKGDRWLRAALGEAAAAGAGAKNTYCQAQYHRLAARRGKKRALVAVGHSILIAAWYIINDGAVYQDLGPLHFLTRINPARQTRRLVTQLQQLGYRVELNPVRAG

SEQ ID NO: 200273 - protein, 309 aa, unidentified
MKQEVVYCGIDVAKKQLDVALGQERWRVPNTREGIAQLLKRFQRQRLKLHVICEASGGYEKPIVAALQKSTLAVSLVQANRVRAFARAAGVLAKTDQIDAAILVSFGMAMRPPPSAAQPEQIARLRELDAQRRHLSRLLSAEQNRLAQLSCAQLRSLSRSLISKVKKQISTLDVRISTLIAQDQNLCAKAQKLTSIVGVGARTAALLLAQMPELGSLNRAQAAALAGLAPFNRDSGSMRGKRTIFGGRRAVRTGLYMAALAAARYNHVLAPFYQRLCAAGKPPKVALTAVMRKLLLALNSALAPKLNPA

SEQ ID NO: 200274 - protein, 346 aa, unidentified
MVLIGCDFHPGWQQVCWLDLVTGETEEKKLVHAPGEAEKFYRQFPAPSRIGLESTGNCQWFVDLLTSLGHEVWIGDAAKIRASDVRQQKHDKRDAQLLLRLLEDGRFPRIWTPSSEEKDQRQLLIHRHKLVRVRAQVKNELQHLALNQGVQEKRHLWSEAGQKLLRQLPLKPWAGRRREDLLKLMAMLDEQIKLLDEAVTKASEENEKARLLMTQPGVGPVTSLAYVLTMGDVTRFPRGKQVASYLGLIPREYSSGGHQRLGSISKQGNRFLRMLLVEAAQIAVRYDPEFRREYLHRCHTKPKGVAKVAAARKLAIRLYWMLRTNTRYPEIVRIESRPRVPLVSAN

SEQ ID NO: 200275 - protein, 405 aa, unidentified
MNPLYVGIDVSSKTNVTYLMRPDGSKYSSFSVQNNVGGAKILSEKIVSAMNSMSLKDVVIGMEATSIYGDHLVHELREDGNLGCFHRKIHVLNPKQVRKFKEAYPDLPKNDFVDAYIIADHLRFGRIASEVYMDDYRYEALKTLTRARFYAVQNLAREKQRFANYLFQKYSELAQNPDFKNTSATMLNLVSDFESVDDLTNVPLEELSAYIEKSGHGRFSDPAAVAKQIHAAAKSSYRLPKTINDSVNQAMSASIATMRAMQAQIKALEKAIEQQFEIIPNTLTSIPGIGPVYSAGIIAEIGDIHRFESQASIAKYAGLVWTQHQSGDYEAERTRMIKSGNRFLRYYLLEATNSVRRCDSEFKRYYDLKYKEVNVGQHKRALALTARKLVRLVFRLLKDNRLYIP

SEQ ID NO: 200276 - protein, 368 aa, unidentified
MKKVAHVGVDYHVKTITIAVYLSDEKSFLDTTHLSNDDKVITKHMKKLSQQFDLRICYEASGSGYTFQRKMRALGLHCDVIAPSLAPRKPGERRKNDFRDAKRLAQHYAHGLLTLIHPPTEEEESVRSLVRCRFAFKETVKRVKQQINALLLSQDHFWKRSKWTYHHRLWLRSITLPTSHLQLVLQELLAHLDYLESRLHYLEEQIKQLADSEVYAPSVKKLSVLRGIGTLTAMVLIAEITDFRRFSSPRALMAFLGLIPGEDSSDGRRKPGSITKAGNRRCRTLLVEAAQHYARKPCVSYAFKQNLSQVAAPISALAVNCMQRLHKRYWFLVCKGKMRQKAIVAVARELVGFIWALMHEPTEAAVAA

SEQ ID NO: 200277 - protein, 416 aa, unidentified
MNAVGIDVSSRKSTVAVLRPLGEVVCLPFDVSHDADGLASLAEKLKALDGETRVVMEHTGRYYEAVAKALHEAGLFVCAVNPLLIKEYGANSLRRVKTDKADAVKIARYALDNWADLRDFTPMDAIRYDLKTLNRQFQLASKQRTASANNLIALLEQSFPGIRKCFDSPVRSDGTQKWVDFAHSFWHVDCVRKQPFAAFCERYRKWCKRHAYLFKLSNAEEVYALAKRAVVLTPKAKVVKVLVQEAANQLISISRSVEVYRAEMDRLAAMLPEYPVVMAMYGVGKSYGPQLMAEIGDVRRFERKQALVAFAGIDPMPNQSGDKNVRSNKSSKRGSPYLRKTLFNVIRTYLQCAPQDEPVFQFLNRKRAEGKPFYVYMLAAANKFLRRYYAKLRDYFASLDTLQSVDPIPATLKASL

SEQ ID NO: 200278 - protein, 413 aa, unidentified
MPYTVAGIDIHKKVLMVVVVQQIGGRTEQLQRRRFGTASSELQCLRIWLQEQGVEEAVMESTAQYWKPVWYELEPHLRLQLAQAFSNRAPRGRKHDFKDAERLVRRLLAEELILSFVPQPEQRAWRMLSRAKVQLSRDRVRLHNQLEGLLEEMRIKLSSVLSDLLGVSGLRILRALAAGESEAKKLAALGDDRLHCSEEQLVDALHGTFQPMHQKLLTLYLDRLQLLDKQIAELNGAIAQAMSEHGEAVARLAEVPGFGADSAQQVIAEVGVQASTFPSAAQLASWVGTNPGRQESAGQNQSSRSAKGNKYVRRILTEAAQAAVKTKGSHFQVVFRRLLPRLGYQQALWAIAHRLCRLVWKILHEQVRYIEQGVQRDPKALKKRLQSMARSLRQLGYNVSLDIAPTNSASATS

SEQ ID NO: 200279 - protein, 371 aa, unidentified
MVKAVKYVGLDVHKETIAVAVAEGERGGEVRFVGTVANEDDAVRKLVKRLTSPGVTLNVCYEAGPCGYGLHRLLTKLGQNCIVIAPSMMPRRPGDHVKTDRRDAMTLARLLRAGELTAIWVPDEAHEAVRDLIRARRNAQDDAIGAKQTVRSFLLRHDRRFGGKAAWTKMYWPWLSEQRFDFPHQQLAFEEMQKRVLEAQARVGRLEAALAEAVDAWCFAPLVRNLQVLRGIRLVSAATLVAEVGDLTRFDNPKQLMAYVGLVPSEHSSGARTKRGRITRAGNAQARTMLIEAGWSYRLPAREERRYRERVIEMPEDIQEIGWKAQVRLCQRYRRLAAAGKPQPKVTTAIARELVGYAWDIARRVSPAVAG

SEQ ID NO: 200280 - protein, 416 aa, unidentified
MNTLSNQSFTAFVGIDWADRKHDVCIQEANCNRREFAVIPHKVELINEWVQSLVQRFGSPIAVAVELSKGPIVYALQKFDCFVIYPINPSTLAKYRETFTPSGAKDDPTDAEFAVDLLLRHPDRFKPIQPQSVEIRTLTTLVEQRRNMINDKVRITNRLRSALKQYYPQALEWFDHIDTPLFCDFIEHWPTLTQAKRARKNTLTTFFHEHNMRFAQVLEERLTAIKNATPLTMDDAVIIPHRLQAQVLIEQLRVTLAGIKQFDEEIERVAHKHTDYALFSSLPGAGPSLAPRLLVAFGEDRTRYRNAADLQNYSGVAPVTERSGKKHWVHWRWQCPTFLRQTFTEWAAQTINKSFWAGQYYRQQRAKGCTYQAAVRALAFKWIRILYRCWQTGKPYNESTYLKALEHRGSPLLKQA

SEQ ID NO: 200281 - protein, 433 aa, unidentified
MKRARPILVRLTRIHPGVYRMSDENPAPSRYFGLDIHKHYLVAVAVDPNGIKVYGPRRVVWADLEAWRLKTLTPQDAVVIEMTTNTWQVYDELQAHVHSITVVHPPHVALITRSQVMTDKIAAFNLALLLAKGLLKGIWVPTEEVRQRRTLLAQRNKMTRLATQAKNRLHALLHRHHLLPPEGDLFHTKRRDWWLGLPVSMVEKVCMLSDLDTLNFARQQIANLEECLIQIAASEPRLTWLVQLPGFSLINAMTVLAAIGDIKRFPDAKHLVGYAGLGARIHDSGQTTRSGKITKAGRKELRAALVEAAQSAANSHPHWQAELARLEPRLGRNKAIVAIARKLLIAVWHVLTFQTADKYAEPLRVARKLMQTTYKLGKANRPQNQSTAACVRTQLDRLGLARELSNIPWGAKKKPIPLPPSGLPQPGSQPPAG

SEQ ID NO: 200282 - protein, 314 aa, unidentified
MDARWVGVDVAKGWLDAVADGDERVRRVGNDADGIAALVAGLAVGPVAGVVVEATGGYETALVEALQAAELPVARVNPRQVRDFARSLGRLAKTDRLDARVLAAYGRACTPAPLPPVAASAREREALVVRRRRLVALRTAESNRLLTAAPAVRDGIARHLGWLSGEIAALDEEIARATEADAPCAARARLLRTAPGVGPVLAATLTALLPELGRLDRKRIAALVGLAPFNRDSGTRRGTRGVWGGRAPVRAALFMPTVAAMRCNPAVRALRERLQAAGKPPKVVIVACMRKLLTVLNAMVRADQPWTARAAAPA

SEQ ID NO: 200283 - protein, 335 aa, unidentified
MIKENYIYVGIDLHKETHTAVMIDCYNQKLGEITFPNRPADFPKLVAKVKKCNTDGKTIVFGLENAYGYGRALAVWLIDKGYLVKDVNTAISHRQAKHRGAMYRKSDSDDAEAIALATLNMLDKLPDACPNDAYWSLGQLVHRRDNIMKQRTRLVNQLHEQLCIAYPSYKQFFNDISRPTALYFWEHYPSRKYLKGKSVEDLRTELVPVSHNRCSTKNCEKILDAVASDKVKNNAYQDARDMVTLSIVSDLQHYDSQLAEVDKMLEQMYKMLGCTLTTIPGVNVITAVKILAEIGDIKRFSNANKLAQFAGIAPLHLSSSGKGKDVATKQGNRRL

SEQ ID NO: 200284 - protein, 331 aa, unidentified
MKIKEALGIDVSKKTIDVKLHLTGVHNKFDNTVKGYKALLVWVDKQTGFSLGQIVVCFEHTGLYSLPLAVFLSEQKIIFCMESALQIKRSLGLTRGKNDKIDAMRIAEYAYLRREQLKPFVLPSKNVLKLQKLLSLRERMVKQRAGFIGSMKEYKAILKQKEHKLMFSVHNKTIHFLSKQIDSLEKEMIKLIQADQVMKELYNLMVSVKGVGLILASNLLVVTNCFRSFEDSRKFACYAGIAPFEKQSGTSLKTRSRVSHFANKKIKALLNLSAFSAVQADPELKAYYHRRVGNGKSKMSTLNIVRNKIVHRIFAVVKRGTPYVLLYQHAA

SEQ ID NO: 200285 - protein, 366 aa, unidentified
MKKHTTINQSLSADVSTCMNVAVDLAKKVFQVAGEDALGQVIFEDRIKSREAFQAFLQKLPASVTVLVETGPGAQAWARLLQAQGNPVCILPAQHVANHRSGPKNDRNDALAILRAGRDCTISAVPVKSAAAMAMQALHRARQGYIRRRTAVGNQMRGLLLEQGVSMAQGETAISQRVPRILEDATQPLPDLLRELIAELLGEWDQLGERVNVLTGRLETAAKQNETAKRLMTVRGVGPIIATALLAKQTEPERFANARQFAAYFGLVPSQHSSGEKIRLGKMSKQGDAYLRSLAIQGAHAVLRQVRPDSEQPDDQRLQRWISRLGRREAAVRLANRNLRILWRLLQNDQTYRRQPGNSQEATMSH

SEQ ID NO: 200286 - protein, 331 aa, unidentified
MKIVGCDLHARQQTIAMVDTETGEFTEKTLFHEGNAVREFYAALEGPVVVGIEATGAMQWFLELLEELGIECRVGHPAKIRAKETRKQKHDRRDARLILELLIEDRFPEIWMPSTEQRDVRTLLRDRHQWVKMRARLQHTLQAIALNHALRQGHALWSAAGRGALQALALPPYTSQRRTELLSLYVQLQKRIQELDQVVEAQARQRPQARRLLTHPGVGAVTALATEVFLGDPSRFATANQVASYIGMIPCEHSRGKRQRLGKLTKQGNSLLRYLWTEATLHAVQKDPELKRFYRRNLIQKGMGEASIAARKLGIRVCATSAKMGQFETRS

SEQ ID NO: 200287 - protein, 316 aa, unidentified
MKTSIGIDIAKRNFVAAIKGHEKEKLKTFSNNEKGFKQFLAWVKKFSEHKCHFCMEATGKYGDKLALFLYNNKYMVSVVNPAKIKYFAKSQLLRNKTDAVDAKLILNYCELYNPHEWQPEPLEIQELQELVKRLDTLVSAELQERNRLENADEIIKESITSHIKYLQQEIKKIEEKIKNHINKYLHLKEKADLLNSIPGIGDKTTNKVLAFLGNINAYDKAKQVAAFVGLNPQQAQSGTSLNRSRLSKTGDSELRKMFYMPALTAIQFNPVIKLFYERLIAKGKPKKVAICAVMRKLVHIIYGVLKSNKPFDKQLV

SEQ ID NO: 200288 - protein, 411 aa, unidentified
MRIIGLDIHRAFAEAVAWQDGKLKRIGRIDMLRDQLTAFAASLSDTDVVVVEATGNAAAVAAVIGPHVKRVVIANPMQVRVIAHAKIKTDTIDAGVLAQLYASGFLPEVWIADEATQALRRQITRRNQVVRQRSRLKNIIQSILHAHLIPACPAADLCGPKGRAWLSEQALPDDERFAIERHLREFDRLADDLRVIERDLARSALADESVARLMTIPGIDMVVALALVAAIGDVRRFEASQKLVSYLGLNPSVRQSGPGPAHHGRITKQGRGHARGMLVEAAWAAARAPGPLQAFFLRVSSRRGQHVAAVATARKLAVLIWHLLRKGESYLWARPALHAKKMRELELKAGYPAVRGQKGAAHAYNLKSHRDQERRWVEQAEAAYTRFVAGWSPRGPRSGKVRTGALNEERR

SEQ ID NO: 200289 - protein, 342 aa, unidentified
MEIDLLGIDLAKRVFQLHGADVRGRAVYRNKVSRTALIETVRALHPHVIAMEACGSAHHWARRFQEAGIEVRLISPHYVSPFVKTNKNDRNDAEAIVEAASRPSMNFVAVKSVEQQDMQAAHRVRELLVQQRTAIINQARGLLGERGIAIARSPAAFRKAIPEILVQSEGELTRFCQSLILALVQHLRVLEEEIAVAEGWIRSFMNRSALCQKIAAVPGIGPITATAIVAAVGCADGFRNGRHLAAWLGLVPRQHSSGGKSQLYGISKRGDKYLRTLLIHGARSVLIRVSGKLDARSRWLQELIARRGYNRACVALANKNARIIQVLLSTEATYKPIALADA

SEQ ID NO: 200290 - protein, 340 aa, unidentified
MVHVGVDLHKRMSQIAVLTADGELTQHRLPNDPARLEPFFAQLPTPSPIAIEASGTWWWLVDLLERLGHQPVLSHPKETKAIASARLKNDKVDAQRLALLLRGDLLPTVWIPPAALREARELLRHRVGLIWLRTQVRNRLLAMLARRNLQPTHTKRWLTVRGQRELQTLALTAAPTTIREDCLALLPVLDTQIRRLDTELVRQWGSDPRVQRLLTIPGIGPFLAILLVLELGDVQRFPSAKHLASYVGLTPRIRASADRIRSGHISKEGNRLLRWALVLAATQAARRPGPLRAWFRAVQQRKGKKIARVALARRLAEIVYHVWKEELDYFVVQRRGVVRG

SEQ ID NO: 200291 - protein, 421 aa, unidentified
MGKLIERCAGIDIGKRFLVCCVMTGAAHEEPRSETRRFDTTVPGLTRLRNWLNEERVTDVVMESTGSYWIPVFNLLEGHVTVVLANPEEVKNRKGHKTDRKDAGHLADLLRHNHVKSSYIPTEPVRQLRDLTRRRVQLTQDATRERNRVQKLLEQVNVKIGSVLTDVFGVSGLHMLLALLDGRAAPEEIAGLARGSAKRKTPQLIEALEGNRMSDHVRFLIRGCLRHLACLEEEVEELDAEILRRMQLSTFQKAFTLLQTIPGVGQLSAATILAETGPDLDSFPTIEQMASWAGLCPGNRESGGIQKGPQTTHGNPYLCTALVQCAWAATRKRDSVFRSRFQRLAPRRGEKRAIIAVAHHMLIILYYMLKRGVPFLGAEHAPKQRRRERRAHHHLRCLRRLGFSVEIRQSSEATPPDTISR

SEQ ID NO: 200292 - protein, 341 aa, unidentified
MLEVNTIGLDLAKNVFQAHGADGSGAVLFRRKLRRDQVLRFLADQPACTVAMEACAGSHYWAREIAKLGHEVRLIAPGYVKPFVKRQKNDAADAEAICEAAQRPTMRFVAAKSEEQQAAAMVFRVRDLVVRQRTQTINAIRGHLAEFGLVAAQGLFHVAKLVMAIEQMDPTIPEAARPILSLLVEQLRSLDARVAKLDREIARRAREDAEAKRLMTIPGIGPITATALAALAPSARTFKRGRDFAAWLGLTPLQRSSGGKQKLGETSRMGERTLRRLLIIGASASVRWAMRKGSTADPWLSRMLERKPPMLVIVALANKTARIVWALMAKGGTYRTPVVAG

SEQ ID NO: 200293 - protein, 342 aa, unidentified
MSVYVGIDVHRKRSQVAVIDAKGEVLANRNVPNGAEPILKVIGGLPPGTPAAFEAAYGTSWLVELLEDYGFDPHLVHPSRCKAIASARLKNDKVDAAILAQLLRADLLPEAWIAPPAIRQLRALLRHRVALVRLRTRLRNRIHAIVADYGYDRPVGEYWSGPGRAWLASLQLPAVSRELVEDDLGLIDALQDRVDRLDWEIRQRARSDPRVKVLTQLPGVGPFTALVILAEVGDVSRFASARQLASWAGLTPTVRGSDRVAHYGHISKQGSVWLRWVLCEAAQTAKRHPEFAATFQRIAQRRGKKIATTAIARKLITRAWHLLADAEHAAAPQPAAPQTAAR

SEQ ID NO: 200294 - protein, 321 aa, unidentified
MNPILGIDISKKTFDVALLREDKFKHRKFCNNTSGFKALSLWLVRFEVTKLHTCMEATSSYGEALAEYLHAAGYDVSIVNPARIKGFAQSELIRTKTDKSDASLIARFCLAMKPSLWAPEPVEIKLLRDLTRRYESLLEMRQQEVNRLDVSSAALKADIKKHIAYLDKAIARTKKNIADHIDNHPDLKHKKKLLETIPGVGEATINVVLSEFAEVSRFASAKQLASFIGLAPRHRLSGSSVRGKSSMSKIGNAQVRKSFFMPALVAMKYNPILIEMKERLLKAGKPKMLIVGAIMRKLIHIIYGVLKNGIPFDPEFLAKKA

SEQ ID NO: 200295 - protein, 356 aa, unidentified
MIVIGIDPHKRTHTAVAISRATGELVAEHTCRARDAGHGQLVAWARSLASERVFALEDCRHVSGRLERFLLARGERVVRVPPRRVAGARRAGRSGGKSDAIDALAVARAFLREPELPSACLQGAEREIRLLVDHREDLVAERTRLQNRLRWHFHDLDPSLQIPASALARSCWLDRLERWLGRADHTRAQVRIAHEELARCRELTRRIRELERELAHLVADEAPALLELPGCGSLTAAKLLGEIAGIGRFSDERKLAKHTGTAPLEASSGRHQRHRLNRSGNRQLNCALHRIAITQSRMHPPARAYLERKQAEGKSRREALRCLKRHLARTIYRALDATREQKTTSTHGPDTVPALT

SEQ ID NO: 200296 - protein, 387 aa, unidentified
MLSRTDNTETETSIRTDLRAIFVSLELSRTTWLVTSLSPGTREKMSKHSVPAGDIGGLLVRLRSLQERVRARRKQLPPLVVIQEAGLEGFWIHRVLTENGIESHVVDPASVATSRRRRRAKTDKLDGDTLVRTLLAYKRGEPRVCAMVRPPTHEEEDRRRLSRERRVLLKERVQHSNRIKGLLFGQGVTGYEPLGRDRRQRLVGLQTGDGRPLPPHLKAQIDRELDRLEMVIEQTKAIEDELRHAIVAADTVTPVPRMLIELKGIGNEFATVLWTECLYRRFDNRRQVAAYAGLAPTPWQSGSIDREQGVSKAGNPRLRAMLLQLAWLWLRHQPDSVLSRWFLDRVKANGGRLKKPTIVALARKLLVALWKYVTSGVVIEGAIVRAA

SEQ ID NO: 200297 - protein, 417 aa, unidentified
MDTDCKTNFKENTMNAIGIDVSKGKSTVAVIKPFGEVVKMPFDVLHTTKDLAELTSLILSLDGESRVVMEHTGKYSDPVVAALCNAGIFVCVVNAKLVHDYGGDTIRRVKTDKVDALKIAGYCLDKWVNLKPHTPVDEHRKMLKAHNRQLSAYTKIKSVLKNNLISLLDQTFPFANELFSSPARPSDGHEKWIDFVAQFYHCECVSSLTLPTFTKVYEKWCRKNGYKFSLSKAEEIYALASKHFATLPKNDFTKTLIVQTVKQLNSLCETVAIVKSEMEQIASFLPEYETVLAMHGVGKTLAPQLIAEIGDIGNFPKRSSLTRFAGIEPPENQSGVYNQHSRRISKQGSPHLRRALFQVMCCVLQLSHENEPTFQFLDRKRSEGKPYKVYMIAGANKFLRIYYARVKECIDIPKKTA

SEQ ID NO: 200298 - protein, 405 aa, unidentified
MEIIIDRGCGLDVHKGTVVACIMGTGIKKEIRTYTTVTNDLLRLKEWIQEAGITHVAMESTGVYWKPVFNILEDNFEVILVNARHVKNVPGRKTDVQDSEWLCRLLRSGLVRGSFIPPRDIRELRDLTRHKRKLIQAITAEKQRVEKVLEDANIKLSSIVSDTFGASGKRIIEELIKGKLQAEEMAELSKGRLRQKRGDLKEALVGQVREHHKFMIKVSLKHIRAMEKILSDIERKIQEKIDRQYQEEYALLQTIPGVKGEASTLIAEMGVDMERFPSEEHLSSWAGMSPGNNESGGKKKPGSTTYGNKCLKTMLTEFAWVASKTKGTYLRSKYHSLVGRRGKKKALVALGHKILIMCYHILKHRCAYKELGVDYLDHRRKDKIARSYIKRLHHLGYEVILQEAA

SEQ ID NO: 200299 - protein, 310 aa, unidentified
MNSLKETSPVVHTGLDIAKATLQLDLLGRAHTLPNTAAGHRQLVKLLRAVPGAHVVCEATGGYERAVVTALQAGQIPVSVLNPALVRHFALAQGQRAKNDPLDAGVLTAYGAALRPAATPLPDAALAELRGLVQWRGQLQEQRNALRNHAEHATLDFVQKRLGKLEAHLEKQMEAVETEMAAALERAPQWQEPVAQLEALDGVGRLTALSVLSQMPELGQLNRGEAAALAGLAPWTRQSGPWEGQRHIGGGRAAVRRALYMSAVALARMKQSTLGKFYARLRAAGKPAKVALTAVMRKLLVQMNHELKLA

SEQ ID NO: 200300 - protein, 387 aa, unidentified
MPQPNDMSRSLVTLEQDSTLIAVIEMGQSSWLVAGIVPGIERQPLKKLAADQDGLLQLLHRWRKEAAQAGHPIKRIAVAYEAGRDGFWLARWLRAREIEAYVIHPSSVPVSREHRRAKTDRLDTELLKRAFLGWLRGEPKHCSMAAIPTVEDEDARRPSRERESLVGECTRIVNRVKANLARLGIRGFRPRLAHAPKRLETLRTPEGTAVPANTLAELQRDMVHLRFVKQQIKEIETARAKRLEQASGGGRDAMVRLLARVVGIGIETADMLVQEVFSRKLRDRKAVARYAGLTGAPDESGQKRRERGLAKAGNARVRHAMIELAWGHLLHQKDSALAEWYQKRTVDARGGTRKTMIVALARKLLIALWRLVTTGEAPAGLLLRPAA

SEQ ID NO: 200301 - protein, 377 aa, unidentified
MSKMRFVGLDVHAETIAVAVAETGGEVRSLGIIPNRLEAVRKVMGKLGPAAQLKCCYEAGPTGYVLYWQLTQLGVACEVIAPTLVPTKAGDRVKTDRRDAEKLARCYRAGELTAVWIPDAAHEALRDLVRAREAAKKDQLRARQRLGKFLLRHGKRPADAGKAWTQKYMDWIQTHARFDQPALDVTVAHYLHEVEHAAEQIHKLETAIDEAVAQAGPEVRAVIESLQALRGVAQMTAATVVCELGSLTRFRSPRQLMGYSGLVSREHSSGNRIQRGAITKTGNAHLRRVLVEAAWAYQHRPTVKGLLLRRQKSLAVSEEVKQIAWKAQQRLHKRFTALAARGKNKNQIVTALARELLGFLWAIAVHTEAQFKLAKAA

SEQ ID NO: 200302 - protein, 354 aa, unidentified
MSQKLESAIAVIGIDIGKNSFHVVGHDERGAIVLRQKWSRGQIEARFANMPPCLVGMEACVGAHHLSRKLNSLGHDARLMPAKYVRPYSKGQKNDFRDAEAIAEAVQRPTMKFVATKTADQLDLQALHRVRERLVSQRTGIINQIRAFLLERGVAVRQGLRFLRAELPRILATPPDVLSPRMLRIIEDLAGDWRRLDERVEGLSKEIEAIARQDAGCERLMSVPGIGPIISSAMVAAIGAGDVFTKGRDFAAWLGLVPKQISTGDRTILGKISKRGNRYLRVLFVQAAWVVLIKPQSWERHGLKSWIEAAKKRLHRNVLAIALANKLARIAWSVLAHGRSFEASKLAAAVTQPA

SEQ ID NO: 200303 - protein, 406 aa, unidentified
MDVVYTHVCGLDVHKKNVVACVITPETKEIRTFSTMTDDLILLVDWIKSNGCTHVAMESTASFWKPIYNLLELEDIQTLVVNAKSIKNVPGRKTDVKDAEWIASLLRHGLLQGSFIPNRDQRELRELIRYRRSLIDERAREVNRIQKVLEGANIKLSSVASDVLGKSGRAMIEAMIAGEENPELLSELTQRRLKNKKAELQRALNGLMGNHQKLMLAAQLRHIDYLDDEIGRLDEEIKRRMLPFEEDLELLDTIPGVARRTAETIAAEIGTDMDQFPSAAHLCSWAGLCPGQNESAGKRKSGKTRKGNKRLRSALVEAARAAARTKNTYLSSQYHRIAARRGANRAAVAVAHSILMIAYYILKRRQPYMELGPTYYEERKRDTIIRQSIKKLESLGLKVTVESAVS

SEQ ID NO: 200304 - protein, 362 aa, unidentified
MTDPIGVTHFDITDIAGSGEVVGGVDTHLDTHTAACLDHLGRLLAHAQFPATNAGEKQLLTWLRGFGDLAVVGVEGTGSYGAGLARLLTSEHVRVVEVSRPNRQNRRRRGKSDPIDAEAAARAVLAGTATGTPKTRTGIVESIRVVRTTRSGAIKARTAAINTLRQLVTTAPEPLRGQLAGLTTDQLIHATSALRPTTDLTDPVQATKTALRRLARRCQHLTEEVTDADTQLRTLTHQAAPALLERCGLGPETAGQLLTTAGDNPHRLHSNAAFAAVCGASPVPVASGRTHRVRLNRGGDRQANTALHTIVLVRMRHHQPTRAYVARRRAEGKTTKEVIRCLKRNLCRELLPLITQALTTQT

SEQ ID NO: 200305 - protein, 340 aa, unidentified
MSEITTIGLDLAKHVFQVHGIDAQGTTVLRKRLRRGQVLAFFSRISRCVVGLEACATAHYWARELGALGHEVRLMPAQYVKAYIKRNKHDAADAEAICEAVQRPTMRFVPVKTTEQQATQLLHRGREQLVRQRTMLVNALRAHLAEFGMVAAQGLRNVRELIAIVRDDGDTRLPDVARQVLQVLADQIEQIETAVAGLERQLLAWHKTNPVSQRLASIPGIGPIIATAIATTVADPKVFRSGREFAAWLGLVPRQNSTGGKTRLGGITKRGNRYLRRLLINGASANLLRSKATKADPWVIGLRRRRPPLVVAVALANKTARIAWAVMLRERQYQPRAVAA

SEQ ID NO: 200306 - protein, 390 aa, unidentified
MLGRGFPGLAGQSLKQGGRVVGHHNGAFIGIDTSKLRNAIAVAEEGRGGDVRFLGEIDTTEAATRKLVAKLATKYRQLTFCYEAGPTGYGLYRLIRKLGHDCIVVAPSLIPKKPGDRVKTNRRDAMGLAKLSRAGELTAVWVPDERHEAMRDLSRAREAAQKDLQGKRQQVSSFMLRLGRHYPGKKTWGRAHMNWLMQQKLEQREQRIALEELLGAVRQESDRVERLEQAIRDATPEWSLAEVVTALQAMRGLDLVAAVTVLAEIGDLSRFQTPRELMGYLGLVPCESSTGDTVNRGGITKAGNRRARRILVEAAWSYRHPPRVSLKKQIKVAASPQAVRETAWKAQTRLCGRFRSLTRKGKRPNVIVTAIARELSAFIWAINREVMAGR

SEQ ID NO: 200307 - protein, 345 aa, unidentified
MEIRTIGIDLGKTVFHFVAVNARGEVVVRKKGSRAQLLRFTSNLRECLIGMEACGGSHFLGRALREQGHDVRLMPAQYVKPYVKTNKNDYIDAEACAEAVTRPTMRFVPIKSDDQLDLQSLHRVRERWVVRRTAVINQIRGMLLERGITIRKGRHHIEESLPGILEDPDNKLSGALRVLLTQLRSEMQYLHGQIGETDKLIARICGEVEQCRRLVAIPGIGPITATATVAAIGNGAAFKKGRGFAAWLGVVPGEHSTGGKQKLTGTSRRGNKYLRKLFVQGAHTVLLQKTKQSSGLSMWLVNLASRKRKQVATVALANKMARMAWAVLFKGEAYRPPTAAQVIAA

SEQ ID NO: 200308 - protein, 314 aa, unidentified
MFKKRVPNHLEQILQTLEPFLDQIKGFVVESTFNWYWLVDGLMDAGYSSAHLANPSAIKQYEGLKHSDDQYDAFFLAQLLILGILPQGYIYPKKDRPVRDLVRKRMFLVRHKTAHILSLQSLLQRCCAMKVRANDMRHLTVEELEMWLEEEHLVLSAQANLDSVNFLKQKIKQLEKAIIQKVKLNKAFKYLLTVPGIGNILAMTIMLDVGDINRFSKVGNFTSYCRCVPSQRLSDGKSKGYGNRKNGNRYLSWAFTEAAQLGRRHNERFRRYYNRKVAQANTSLATKALGNKLARICYYIMRDQVPFREELFCQ

SEQ ID NO: 200309 - protein, 379 aa, unidentified
MARFSDSTSNEDTIHAALELSKAGWLLAIQVPGRDNPSLHRFKGGDAHGLLAKLEAAREGLAKARGRRGQVVLCYEAGYDGFWLARHLEARGIRCLVMEPSSLRVNRRARRVKTDRVDVENILHTLIAWCRGERHVCSMVVIPSVEEEDLRRSHRERQRLVRERTAHINRIKGLLFAQGIRGINVKARHKTLRPTDLVTGDGRPLGPRLVREIMREIGRLALVAGQIAEIEGERDDAGTDCAESERKRLDLLRMKGVGPTFSSVLTREVYYRRFTNRRQVASYLGLAPSAYDSGEARRSQGISKAGNGLARYTMIQAAWLWLKHQPQSALSQWFRRRTEGHKGRIRRIMIVALARKLAIALWRYLETGLIPDGAVLKTG

SEQ ID NO: 200310 - protein, 346 aa, unidentified
MTHSTTVGVDLAKNVIQVSVVSARGKELSNRSLTRKKFAEFLAKQKPSLVAFEACATSHYWARAAQRHGHVVRIIPAKFVAPFRQGHKTDSNDALAVAEAARRPSIKEAPMKTVEQQGLQAIHRSRQLLIQECTALSNHLRGLLMEFGVIIPPGFASLLRAVPEALEDGDNELPDLYRPTLHRMYTRLLELREDIEAMTREVEVLVKQHPICSRLTALEGIGPIGALLLYATLGSGTAFSGGREFAAYLGLAPRQYSSGGKTNIVGLSKKVGNCRLRSILILGARAYTYRLKEPKSAKDRWLKNAIDRNGHSRAAIALANKNVRTAWAMVTQGTEYQRRGQLKVAA

SEQ ID NO: 200311 - protein, 408 aa, unidentified
MTVVGIDVSKGKSMVAAMKPGGELVAAPYEVRHSDIELSHLALDVLCMEPDTRVVMEATGRYHEPVAALLHSEGIFVSILNPLLIKQSGAGSLRKVKSDPKDALKIAKYGLDNWSTLREYTPMEAIRQQLKLCARQCDLYNKNIVMLANNLISLSDKTLPCVNELFSSPEKADGHLKWVDFYRSFWHCDCINRMSPDAFEERYKKWCKRKGYHFSTDAADALYAASCGSYTTLPRDNNAKLLVTVAADQLIALRENQSKLEAEMLNVCKQLPEYETVMAMYGVGKSTGPHLMAELGDVRRFPHRSSIVAFAGVDPGVVGSGKMQLSSVTTSKRGSPQLRKALFQVVSTYVKCKPENEAVYQFYAKKRDEGKPFFVCTTAAANKFLRIYYARVKECLNAAESATQVEEG

SEQ ID NO: 200312 - protein, 341 aa, unidentified
MDNIKVLGIDLAKNVFQLHGTDSNGEGVLRKRLSREKLVEFMSNLSSCLVGIEACGGAHYWARLFEEMGHTVKMMSPQFVKPYVKSNKNDANDAEAIAEAVTRPTMRFVAIKKMAQQDVLLLHRAKELAVKQRTAQANQIRGFLAEYGIIVAQGIHRLWKLPEILDSNEDKISSCSKRIFLQLYEQLKIYDEQAKYYDKEIREQAKTDPRCVAIQSIEGIGPITASAIVATIGDPTVFRNGREVAAWLGLVPQQRSSGNKTVLGSITKRGDRYIRTLLIHGARTVIKTCGNKTDKKSQWIIEKKLRIGFNKTAVALANKNARTIWAMLATGESYRKPLAIV

SEQ ID NO: 200313 - protein, 343 aa, unidentified
MKEISIIGVDLAKNVFQLHGAAADGTVLFRKKLSRPQFQRFMAEHPQCLLVMEACGGAHHWARELVRVGHEVKLIAPRYVKPFIKRQKNDAAEAEAIGEAALRPTMRYVEPKTGEQQARSILFRTREQFVKQRTEAVNALRSHLYEFGFTAPEGIGYLPRLGAVLEDPSSNLPPLAREICRELLEQIANLSDRINAMKKRLDAFAREGETSRRLQTMPGVGPISALAVETFAPPMEQFKRGRDFAAWLGLVPRQASTGGKQRLGKTSKMGQRDIRRLLITGAMAVIRWALRRGAPQNPWLERMLERKPPMVAAFALANKMARGLWAMLPRAEDYRDPVIASAA

SEQ ID NO: 200314 - protein, 349 aa, unidentified
MGEVSTIGVDIAKSVFQIHGVDAGGTVVIRRRVGRARVLEFFADLPPCLVGMEACATAHQWARELKKLGHDTRLMPPTYVKAYVKRGKNDAADAAAICEAVTRPSMRFVPIKNVEQQSVLMLHRTRDLLIRQRTQLINALRAHLAELGLVAAKGREGVHQLVTVVTECGGERLPSNARFACQAIVTQLHAVQIEISGLDKRITQTHRVNADSKRLDTIPGFGVILSTAVVATMTDPKAFKTGREFAAWIGLVPRQNSTGGKDRLGSISKQGDRYLRRLLVVAATSVINSARARPYKYPWVIELLGRRPTKVVAVALANKMARIAWAVLAKGEPYRTPTRSSNAVVPAAA

SEQ ID NO: 200315 - protein, 410 aa, unidentified
MTVIAITQNTPVLVAIDIAKARHEVLIAVPGKKRRRRLTVLNELADFTRLITALKDYGRPVRAAFEATGNYHRALAYHLATAGFEVKLVSSVALARTREALHNSWDKNDPKDAQVILHMMEIGNEQFYHDPLVRGTNDIQELFKTHDIVSKSKTELWHRILTHYLPLYFPEADRFHRSSRSDWFFAFLERYPSPHFISAMSKDAFTADAWDVVGRKVAKERLLADIYETSKVSVGLPVALDSDAISMFRLVLGEGRSLIAQRNQIEARAVALLKDLPDYQLLTSIPGIGPINALTILAEAGDLRRFGHHRQFLKFCGMDLATIQSGTFRGQTKLSKYGNARLRRTLWMAGQVAILQRTNSFRDKFERYISKDRQNTHLRRKAYTAIAAKMARTVHGIIKNGEPYRPFFEG

SEQ ID NO: 200316 - protein, 415 aa, unidentified
MKKGQDTRGYERYLALDIHREYILVGGWNEKKEWVLTPRRVSIEKFPEWAKKNIRHRDIVVLETTTNVWTIYDIVVPLASWVMVANAVEVWELAGARVKTDKEDIKRLLKLLVGGIVPEVWVPPLHVRELRAFISYRARLVTTATMIRNRLQSLLHKHNLLLSENGLLDAAWWQRQAISRLERIQIEQELSLLQEVEKRKASVDQELELQSTGSTWGKPALQLMQLPGVGYIVAMTVLAAIGDISRFENAKQLVGYAGIGAGVHDSGKTHKEKKITKKGRRELRWALVEAAWRAVRMSPFWKAEYEKHLQRMRKPNQAIVVIARKLLIAIWHVLSKDETDIHASEEDLAYKMLLLSWSLKEDTRRGLTYKEFAKYALMKLGVETDITRFVRKKVPRRLASRDEVLMRMTELGLSA

SEQ ID NO: 200317 - protein, 340 aa, unidentified
MTITTVGIDLAKNVFAVHGVDQNGRTVLVKPKVSRAALPELIASLPPCVIGMEACSGAHYWARLFRQYGHEPRLMAAKFVSPYRMAGKSGKNDAADAQAICEAVRRPHMRFVPVKDESQQAMQCLHRTRQGFIEEKTATYNRLRGLISEFGVIAPQSTDALRHMVSVQKSSLPLQVQQCVDDLMEHVDRIEANITEYDRILSHIAKTDHRSQRLMELKGVGPTTACALVASIGNAHDFKNGRQLAAWLGLTPSQYSSGGKSKLGRITKAGDSYLRTLLVQGARSVLIGAGKRTDSFSRWVCMLVERRGYWRAVVAIAAKNARLCWASLHYGDDFRLYSVN

SEQ ID NO: 200318 - protein, 343 aa, unidentified
MAKDTLVAVDLAKSVFEVAVSHRPGQVATQRRYSRQQFPLALAQLPPATVVMEACGSAHSWARRIQSLGHEAVLLPPHAVRPYVRRNKTDRTDTKGMLEAYRNEEIRHVPVKSVAQQTLASLHRVRSGWLGERTARINTLRGLLREFGIVIPLGASHAVPSAWAQLEDAESEIPDPLRPALGEICSEIKGLERRIKMIEHQLAALAVQTPAVAQLMTIPGVGLLIATALVAFVGDIQRFPSGRHFASYLGLTPRESSSAFRRRLGSISKRGDVYLRTLLIHGARSVLLAAKRRTPDRLRAWALAREAARGHNKAATALANKLARIVWAVWKHDRPFHSVPNAV

SEQ ID NO: 200319 - protein, 374 aa, unidentified
MGDYSEAFVGLDTSKLRNAVAIADASRGGEVRFLGEIENTPAATAKLVRKLSARYERLTFCYEAGPTGYGLHRQIKDLGFECVVVAPSLIPKRPGDKVKTNRRDALSLAKLLRADELTAVWVPDGRHEAMRDLTRARETAMLDLRTKRQHVSAFLLRLGRPYPESRKTWTKAHASWIASQKLEHPQQRLVLEEMMLAIRQAQERLQRLEQAVAAAVPEWSLAPVVTALMAMRGIDLVSATTLLAEIGDLSRFQTPTELMAYLGLVPSENSTGDTVKRGPITKAGNRRARRMLVECSWSYQHPPRVGLAKQPRVDAAPPAVREIAWKAQCRLYRRYRTLIRKGKLKTVAIVAVARELAGFIWAVARAVTTAPVAA

SEQ ID NO: 200320 - protein, 429 aa, unidentified
MNYPPVAGIDVGKNFSEMCILSPNNEVCYRIKIYHDSLDSIKKAIDLLQKTEKDFAIRPVVVLESTGHYHKILFHYLHDSGFEVSIINPIQSDSIRNIGIRKVKNDKIDAHRIALLYRFSFIKTTVVPDEDLDCLRSLCRQYYKLSDELTTYKNRLAGIVDQVMLNFTDVFQNAYSKTALAVLDKYPSPTHILKASKKSLISLIEKSSKKGLAWSTQKYESLVLKAKEFNELSISNSGNIAILKVNISMVRTLQESRKDILDAINEIILEDSLKDIPILSPIIDLLCSIPGIGLLTAATILAEVGDFSAFSKPNKLVAFFGIDPSVNQSGEFTGTRNKMSKRGSKLLRRVMFTTALANIRCKRNGEKTNPVIYDYYHQKCINKPKKVALGAVMKKLVNIIFAVLRDKKPFELRTPEEHKEFILTKSLVA

SEQ ID NO: 200321 - protein, 354 aa, unidentified
MSAKANTTIPSLTSIGIDIGKDVFHLVGFGEDGQIAFRRKIKRLALAETFRQLPPCIVGMEACLSAHFVSRTLRALGHEPRIIPAIYVKPFVKGQKNDYNDAEAIAEAALRPNLRVVKEKTQDQLDLQACHRVRARLVSRRTATINQIRAFLIEQGITVRTGARSLRNALFEVLRNREDEISPRMGRLIVGLYEDWLWLDERIETITRQIEEISGSEINCQRLMSVPGIGPIISTAMVAAIGTGEAFERGRDFSAWLGLVPRQYSTGGRSVLGRISKRGNRYLRTLFIQAANVILMRPHNWPKFSFGPWLEQATSRLHRNKLATALANKLARIAWSVLRNGRRFDTHRHEVSAI

SEQ ID NO: 200322 - protein, 457 aa, unidentified
MGRRGKRTGEQEEAHPFTGMSRVNPKAAGADIGAVEIVVCVSGDENTQIVRAFGNYTVDLQAIGKWLKEYHVKTVAMESTGVYWIPLFEELERQGFESLLISSRSMRRVSGRKSDITDAQWIQTLHTYGLLESSFRPQAELIALRTMLRHRNQLVEHRSPHIQHMQKALLQMNVQLSQAVTDITGVTGQTIIRAILAGERDPQELAALREPGCKKSAEEIGKALTGTWREEHLFILKQSLEMFDFYTKQIQACDEEIERVYGQTRPDEEAGEVKPLSQRKRNAHSKNRPHNPEAIRKHLKRISGVDLSVVDGFGVSLAQTVIMEVGTDMGKFPSEKHFCSWLGLAPKHEISGGKVLKNKTLKTKNRAGQAFRMAAQSVKQADCVFGVTYRRMKARLGPAQATVATAHAIARVVYRMLKYRVEYETISVEEYEKKYQAQQLKYMRKKAAKLGYQLIPA

SEQ ID NO: 200323 - protein, 339 aa, unidentified
MDKISTIGLDLAKSVFQVHGVNEAGKVVVERTLRRGQMLAWFARLPACLIGVEACGTAHYWARELARLGHEVRLIPPAYAKAYVRRNKNDAADAAAICEAVSRPSMRFVAVKSEAQQALAGLHRVRDLLMKQRTMLRNQLRGLMAEFGVVAAQGRRGLNELLAVVCDGEDQRIPALLRAALLANAEMLHGLERTLEAIDRQIVAAGRENATYRHLITAPGYGPILSSAMAAMVTDPAAFRSARDFAASLGLVPRQEGTGGKVRLGPISKRGNGYLRRLLVNGAASLIISGRAKRDPWLERLLAAKPRKVAMIALANKLARVGWALMARQQDYRFVPAAA

SEQ ID NO: 200324 - protein, 429 aa, unidentified
MEYVDGIRLCEFRQIKKEIRGSEEYLIVGIDVAKERHNAFFGTAIGRTLHKGLIFDNTVEGFRKLLTLTEALKVQHDLTKVVFGVEPTANYHKPLGEHLIKCGYQLVLVSAAAVKNNRSLLDGRWDKHDTKDSANVADLISQGKCLYYEYPDPRVRDMRNLLSLKRRLKKEEHGLRVRIRNQLLAQYFPEMDSWFGPAVSLAVISRCLDPSVIAGMEYDDFCRSVVPGKLTIAQQKRLQAIWRMAPESIGCRLGDAVPFEAKVMVSKLHQVRETIKAVENKIEDICVQFPEYPYLLSIPGFGPDVSSKLLGAIGDPFRFSSGKQVLKMAGFDLCANRSGKTSYSATPVISKQGKADLRYALYQAALVASYSNKDFTYYTNKLRGRQREKGIGTKMRVKLAAKLLIIAWTLMKKKEPFDSKYLNKGDTQV

SEQ ID NO: 200325 - protein, 410 aa, unidentified
MGYETLIRRAHVMTRKNTLKSLPTDTEFRVVGLDLAKSDVSVAAIPVDDNTPSLVDRMTYADLLDWAGKISPTLFAMEPCNGYSLLCLQLENLGHEIKVISGSTVSMWINNHLSGQKTDLNDAIALARLAVSDAELTPIRHKSITEIRIQTVQAVRQQLMSQRSKSIVSFKALAQQWGIPCAAGHRNLKKLRESIEAKVDLITRPVANAMLFLLDAVKSLDRQIGQLNQTLQELVMSDERGRLLQSVLGVGTQISARVITVVGNVERFNSPRSLVAYVGVAPRNFITGHKNLTKKKHGNCPDLSHKGQGKISRRGDKLLRSLFIQGAACLYMQFCKDQLPECQLKRWILKQLASQKPYGKLIVSLAAKLIRIVWAVLTYGEKFNIQKAGMTRSMWSEMALETPLNKEVPA

SEQ ID NO: 200326 - protein, 347 aa, unidentified
MLYAGLDLSRQRLDVCVLDSEGRTIEVTAATPEVFGLRELVARIARHGDEVTAVIESMNGARFVHDQLELYGWDVEIADALRVKGLAPLAAKTDKIDARVLAELARRDLVPAIWLPDPSVRAGRERARFRLHLVRHRTALKNRIHATLIAFGHPVPVSDLFGTKGRELLASLAIPEPWATTLATSLHLVDELTLEIDACERDLRAAGADHPYVSLLMTAPGIAWVLGYTIAEEIGDIGRFSNPKKLAGYTGLCPLVRQSGRRDDRGPLAKNGPKYLRWALIEAAVHAAHHEAYREHYERTKKRLGRQRGSKVARVEVARELASAIWHMLAKGEPFNPGRSHVPPLVA

SEQ ID NO: 200327 - protein, 343 aa, unidentified
MEHFAGLDVSVNKTSVCIVDETGRMVREAKVASEPEALLQVLKSGGYRFKRIGLEAGPLSQWLYSAFAEAGLPAICVETRHMRAVLKAQINKTDRNDARGIAQMMRAGLYRPVHVKTLRSQKLRMLLTHRKLLQSKAIAVENDLRGTLRNFGLKVGMVGTVRFEARIRELVETFPDLAVLVEPLLVVRRVLREQIAVLHRRLLAIVKDDAVCRRLMTVPGVGPVVALTYRATVDVPTRFRNSKAVGAAFGLTSAKYQSGEINRSGAISKCGDDMMRVMLYEAAQIMLTRTVKWSWLKAWAMQIARRRGMKRAIVALARRLAVIMHRIWVDGTEFRWTREVTAA

SEQ ID NO: 200328 - protein, 392 aa, unidentified
MYIVGIDIGKNHHEASIVSPEGKQIGRSLRFATTHKGADSLMSFIFKNIGNSPCVFGMEATGHYWYPIYSFLKAKGYTIYVINPIQSDSLRKMYIRQTKNDSIDSFLIAEVIRFGQFGTTSMADENILAMRQLCRYRDSVISSRTEIKLRIGTIMEQIFPEYEKQFSSLWVSTSMGILEKYLTPENIENAPIDELFEIIKDKSHNRLTRAKAISIKEAAADTFGIKIAQDAFSFQLKQLIDRMNFLDKQIEALDIEIMKYYEQFDCYLHTIPGIGIIGAATILAEIGDISRFKNSSSLIAFAGIDPTVRQSGEFNSTHNHMSKRGSPYLRHAIFLAATTCSFHNSPLNAYYKKKRDQGKHHLTATGAVARKLTTVIYAVLRDSKPYEPKKFC

SEQ ID NO: 200329 - protein, 392 aa, unidentified
MLICGIDIGKNYHEACVIDETGRQLAKTLRFPNTTAGAGTLMDYFHGCNPDKQTIVVEATGHYWLSLYCFLFDQGFQVNVINPLQSDAVRNLFLRKAKNDAKDSFLIAETIRIGRFSNTELADEDILALRQLCRHRMDLVDYIADQKRKIIGVMDRVFPEYQHFFTDMFGKTSKELLDVAVTPEELLAVPTEELCAILKKASRGRFGEAKAEEIRAAAMLWLWELRDIGITSAFALQLRQLLEMIDLLERQLNELDFEIEQRMNKLNTCITTCPGVGKVLGAVILSEIGDISRFPEPKKLVAFVGIDPSVHQSGEFTGTQNKMSKRGSPHLRRAIWLAATVAAFHDPVLSAFYQKKRAEGKHHYTAIGAVARKLTLIIYAVLRDKKPYVPNC

SEQ ID NO: 200330 - protein, 394 aa, unidentified
MILVGIDIGKNKHTFSIIDKNSGEILLSPSDFSNNLKGFLFLIQKLSSYTKSELLIGMEDTGHYHFALLKYLLDRRYTVALINPTTTDLTRKLQGGITKNDPLDSLTICDVISSNHRNKPYRVTTLNRFDLYEQKQLTRHHHNLKEELNTYKNRLQKCIDIVFPEFNSLFHSKYGIVYMNILKAFSSAKAIANADIRSIRKCFEFKGQGKRISLFAEQLKLTAKSSIGIPSVAEEIQIRHLVSQIELLEKQLSEIDKRIEEFSLKNNSPILTIPGISHFSGTSIISELGDICNYTKASQIIKFAGVAPYHYESSQFTAQHTAITKKGSKYLRKTLYQIILPVISNNEVFYAYYTKKLNEGKGHRCAQGHCIRKLLRVIYHLLCTRQPFNPKLLL

SEQ ID NO: 200331 - protein, 340 aa, unidentified
MRIIGCDLHAAQQTIAMLDRETGEISEQTLKHDGETVRAFYRALPAPVVVGIEATGSMGWFVRLMEELGITCRVGHPAMIRQAETRRQKHDRRDANLLLTLLAEDRFPAIWMPAAECRDLRALLLHRHQWVRIRTRVQNALHAIALGQGLRRGPTLWSQDGQAVLASLPLPSHAAHRRDELQALYRHLDAQVDRLDAQVKQVAGQRPQATLLMTHPGVGHVTALATEVFLGDPSRFRDGKALASYVGMIPSEYSSGARQRLGGLSKQGNPLLRFLWGEAAMHAVRRDPELQRFYRRKLVQKGLGKSRVAAARKLGIRLWIMMRDQIDYTEFCRRGPARQS

SEQ ID NO: 200332 - protein, 324 aa, unidentified
MKKIFIGIDVSKSKLDVTLLCDSSILEQITILNRESSIKDYFDYLFENYPSSLFYIGYEATSNYMITLQKILKDLNVKHKLLNPYLLHYYFKSKGFKNKDDKVDSYVIALYLSEQKESFFTKDEYHYRYIFKPYIAALEQLKKQRVALKNMLHSQKDVIDKDLREQISDIEKKILEVQKEIEKRAKDKLQKEIPEFKKIKDELKGVGDTTLLYVLPYIADNYQVKSAKQFVSFFGLNPVHFQSGSSVYKSPRISKRGNKNVRKLLFLSSLSAVRTNEVIKQKYNRLLQNGKSKKQALIACASHLLRAIYYKYIHFHQGLNLETA

SEQ ID NO: 200333 - protein, 339 aa, unidentified
MVEIITIGLDIAKSVFQVHGVDASGSIVVRRQLRRAELLKYFGSLPPCLVGMEACGSAHYWARQIVALGHEVRLLPPAHVKPYVKRGKKNDAADAAAICEAVTRPQMRSVPIKSEASQAVLLLHRARDLLVRQRTMLICSFRSHLAEFGVIAGQGKGNFAKLVASLDRHGLPAPALVALRLLAAQIDDAHAKVDALEQEIVTQHRREAASRRLASIPGIGPIIASAIAASVPDASVFKSGRQFAAWLGLVPRQNSTGGKERLGGITKAGDRYLRRLLVIGATGLIRYKRKTIPGGLAWVSALLAKKPVRLVTVALANKMARIAWAVLCRNEVYREAPVA

SEQ ID NO: 200334 - protein, 351 aa, unidentified
MSMLADVVDAVIGVDTHRDVHHAEIAHASGAVIATCSVRNTSAGYAQLLGWAREHAPGPRLAVCIEGTRSYGSGLARAAGATGLLVIECEQPNRKARRGRGKSDPIDAHLAVLTALQLDPGKLPTPRADGDREALRILLCARQELTTTATAQTNRLRALLRDGDDQDRQLARARLSDTVLAGLARRRQPRDASRALAVRQGEIRRLALALRDASRALKANRADLDVIVGDLVPGLTSRPGIGPVSAAQAIVSFSHAGRCRHEAAFARLAGTSPIEASSGQVTRHRLNRSGDRALNRAIHVIACTRMRCDPATIGYVARRRAQGKSDREIRRCIKRYVARQLYRALTAALAT

SEQ ID NO: 200335 - protein, 486 aa, unidentified
MSRQRKHPRKAGGEKTQSGQGKRGRRAKGMCLGDRPILEPNAAGIDIGAREIHVAVPPDRDENPVRVFSTFTADLQKMAEWLVSCGITTVAMESTGVYWIPPYDVLEQHGVKPCLVDARGMKNVPGRRTDWHECQWLQFLHSVGLLRSAFRPDGGVCAVRSLMRHRSEQVLMANQHIQHMHKALTQMNVQIHHVISDITGLTGLAIVDAMIQGERDPEALAKLRDPRIRASEETIRKSLEGNWREEHLFTLKQSRESYQHYQEQISTCDEEIERLLLAFEARVDPEQRPLPPDRKRKQRGRKQKNDPKTGFDVRTESYKLFGVDLTQIPGLMAMVLTLFSEIGRDMSRWPTAGHFVSWLALCPDNDISGGQVLWRGVRKVHNRAGDLFRLAAYSLHHDESALGDYLRRMKSKLGPAGATTATAHKIAIIFYTMVKNQQEYDPTIWAQRDSERKKRFEAKLQHQAHQLGYKLVPIKEKPAAYETQSK

SEQ ID NO: 200336 - protein, 356 aa, unidentified
MSYDVKYIGMDVHKEAIVIAVLNDSGKLVMESVIETKASSILQFLHGLRGELHVTWEEGTWAAWLYDLLQPQVQHMVVCNPRRNALLKEGSKSDKVDARKLADLLRTGMLRPVYHGENGVRTLRELGRSYQTIGKDLTRVMNRLKALYRGWGIPCAGTQVYAVRTREEWLGKLPQAGVRRRAELLYQQLDGLQALRREVRPELLAESRKHKAAKLLRQIPCIGPIRAARLIALMQTPHRFRSKRQLWTYSGLGVETHDSAQYRFVRGQLQLSKKPQQLRGLNRNHNHEMKEIFKSAATRASCGRGPFHDFYAALLAKGMKPEMARLTLARKSAAITLTLWKKEERFDAEQLKTQAA

SEQ ID NO: 200337 - protein, 394 aa, unidentified
MTATYADCITRSRPVLYLAFELGAKDWKLGFSIGLGVAVRLRAIGAGNLAMLRREIELAKKKFKLTDDVLVCSCYEAGRDGFWMHRWLVEQGIDNVIVDAASIEVNRRYRRQKTDSLDAAKLVAMLIRHHAGEKLWSVVRVPAREEEERRHLHRDLEEMKAEVTQHRNRIRGLLAGVGARVAEINAGFVELLPTVQTADGREVPGALRERLVREFERLRFVQQQIGSLEQERKRKLRDDGHEEHVVKARKLMQLRAIGPHSAWVCMLELFGWRRVHNRRQLASLVGLTPTPYSSGEDEREQGISKAGNRRLRTLLVEIGWCWLQYQESSALSQWYRRRFAGGGKRQKKIGIVALARKLLIALWKYLERDEIPEEATLVDWRAKLAGFSARPLPA

SEQ ID NO: 200338 - protein, 349 aa, unidentified
MNFYTKQHQFYAGIDLHARLLAICILDQAGQVVCQTKIPADKQILLDTLAPFRADVVVCVECLFAWYWVGDLCKENGIPFVLGHALYMRAIHGGKTKDDDIDAEKIGRLLRGGNIPTAYVYPKGMRETRDLLRRRNHLVRKRAQLIAHIQITNAQYNLPPFPKKLIYAHNRAEMQVAQRFPDGPVRKSIAVNLAVVDALDGQLADLELYLERTVKVEQPQSYHLLKTIPGVGKILALILLYEIHTIRRFPTAGDFLSYARLVRCLHKSAGKTLGTGGKKIGNAHLKWAFSEAVCLLVRCCPAVKGWQQRREKKHGKKKTLGILAARLGRAVYHMLRRGTAFDLGKFLGQ

SEQ ID NO: 200339 - protein, 342 aa, unidentified
MAAIGIDTHKATLAACAIDELGRPIGEATFANDPPGHAAFITWARSMAPDATVGIEGSSSFGAPLARSAQLAGLAVREVPPHLSRVERRRTRRPGKSDPGDALAIARVTAREANLPPIRLPDRSTELRLLLEAREDLVGEATRTRNRLHAHLLVLVPGYGGTVANLVAACHRAKVAGLLRGNATVQAELARSLLVRLARLEREIEVLKRRLGARVAGHPLLGLPGAGPITVARLIAEVGDIRRFRSADALAALAGVAPIPASSGQVQRMRLNRGGNRQLNRALYVIALSQSRFHPPAKAYVHRRMEADGKTWREAIRALKRQLVRTVFRLLVEGSEVQLAAA

SEQ ID NO: 200340 - protein, 413 aa, unidentified
MAYQPITAVGIDVSKGKSTVAVRRPGGEVVLTPFDVCHTTEDLKQLAATLRSVGGEMRIVMEHTGMYWRPIALELKRAGFFVSVVNAMLIHDFSDNSIRKVKTDKADSLKIANYALTYWAELREYTSEDETRQMLKIQSRHYERTMNTSVALRNGLISLLDQTFPGANSLFGSEVRTVSGHIKWVDFVKRFWHKDCVATVSLSSFADTFQKWCKRTGYRFSFADAERIHSIARNSVATFPKNDSTKLLITQAVDSLNAVYDALQMIRKEMLRLAALLPEFDVVMSMFGAGNITGPQLMAEIGDVRRFTHKGALVAFAGVDAPPYQSGMFDSKTRHVSKRGSPHLRKTLFTVCSVILQHSNTNDPVYLFMDKKRSEGKHYYVFMVAGAAKFLRIYYARVKEALLAQETEDTSAA

SEQ ID NO: 200341 - protein, 345 aa, unidentified
MHYVGMDCHITTLDFAVVDDAGRLVKSCKVDTSAKNFMEFVKSVAAPRIVYTEESALAAWALETCIRFGEKLVITDPKQNHWIGSSTQKDDPLDAFKLAQLGRGGFIKEIRHPVGDRRRFRELMDCYHDTVKSTTRIKNKIKSKFRQNGIHCTGMTVYSETYREEWRHKLPQDQTLLLIVEGLWNQLKESEQTEKNLLKAARNFAKHYPEIKLFEDIPGIGFISAATISAILETPHRFANKRKVWMYAGLGITIRSSGGKTYSEKLSKDYNRLLKYTLKQVAETAVQAKDNPFRQKYLAMTTLRGIAPHRAKLTISRDLLATMWAMWKNGEKYNPEIRRSLVLNK

SEQ ID NO: 200342 - protein, 372 aa, unidentified
MSELIRIGIDTSKSVFVLHGVDEKEMPVLRKKLRRRDVVGFLSKLTPTRIGIEACGAAHYWGRTIVALGHEAVLLPPQLVKPYIARNKNDRADAEGICEAMSRPRMRFVPIKTAEQQAAQMLIGLRDRLVRQRTQLSNAIRGYAAEFGLVAAKGLDKIEPLLTRVASDAALPDLAKELFALHGKEYAQLMARLRQVEAKLMAWHRHNELSRRLAAIPAIGPIGACALAIKVTDPRVFSCGRDFAAWIGLTPKDHSTAGKQRLGVITRAGDETLRSLMVVGATSVIQQARRGRASPWLLDLLKRKPAKLAAVPLDNKTARIAWKLMVSGERYNPHHANPSRSTPSSPPAGSVAPCSRRQGRFAPPSAVPCGQP

SEQ ID NO: 200343 - protein, 367 aa, unidentified
MSMSVIYIGLDVHKDSIVIAIARHGRDAAVVWKRIPYDVVRLRKALKMLAKDGAILKVCYEAGPTGFGLCRRLREAGIDCVVVAPSLVPGKPGDRVKTDRRDARKLAHFLRSGDLTEVYVPDEAVEAIRDLERARDDAKCAERAARHQLGKFLLRHDRHWEGTNWTRKHLDWIRAQRFPHAAQQRVLEDYLKTVEDLAERVERLTCQVEELVQETTLAPLVNALQAFRGISVVNSVTIAAESGGKLQRFPTATQFMSYVGLVPSEDSTGTRRRQGSITRCGNAHLRKALVEAAWHYRHAPLMSKELRRRNKGLPPEVQRIAWEAQKRLNKRMYHLLQAGKSIQKTVTAMARELAGFIWAVGQLVEAP

SEQ ID NO: 200344 - protein, 366 aa, unidentified
MLRKAELSREADSENDLGGSSETMYYIGLDVHKKAISFCVKDAAGRVHQEGKIGASRRELDSWIRTLPQPRTIAMEATIFTGWIYDHLLPHAEKVKVAHPLMLRATAAAKKKNDGIDAGKIADCLRCDFLPECHMASTEIRDRRRTLRYRNLVMRQMVQMKNRVSGLLLEGGVSYNKQRLHKMGYFTDLLSTNEEISQSILPLLKLGREHIVRAQRLDSALIGSLEKDPLLSERLRRLRTIPGVGPITALTWALEIGDYTRFRSVKEAISYCGLCSAEKSSADKVMRMPISKQRNKHIQHVLVEAAKMAPRYSPELALVREREIQRGNKNRATLAVARKMVAYMLAVERRKQDFVPAEEMAGRAVA

SEQ ID NO: 200345 - protein, 361 aa, unidentified
MDVSRDEPHTTAGLDIGDKYSYLCLIDQQSGEVIEEGRLRTSPEAFKRRFASERPPMRIAIEAGTHSPWASRMLEECGHEVLVANARKTRLIYANKRKTDEVDAENLARLARLDPKLLYPLKHRGEDSQAHMAIVRSRQVMIGCRTQLVNHVRGAVKSFGARLPKCPARSFHKRAAAHIPEALRPALEPILQQIASLTERIRDFDRRLVAVSEEHYPHETELLRQVEGIGPLTALSFVLTLEDPYRFERSRSVGAYLGLVPARDQSGDRDPQKRISKEGDEMLRRLLVGSAHYILGPFGSDSDLRRHGEKIASRGGKNAKKRAAVAVARKLSVLLHHLWVSGEVYDPLYNAHRRQEQKEAA

SEQ ID NO: 200346 - protein, 384 aa, unidentified
MKKIITVSLRSARPKTSRTKLVGKVTRRKKEIPGKITVGIDLGDRSSCYCALDDQGEIVRQGSVATTKKDLNRIFGALAHSRIALEVGTHSPWVSRHIRSLGHEVIVANPRRTRLIGASSNKSDRLDAETLARLARVDPRMLFPIQHRGETAQADLTVIRARAGMVESRTALINAARGLSKSFGERLRKCDAKQVDRELAKDLPEALRAGVEPLLEEVASLTERIRAYDERIEGMARERYPEVALLRQVYGVGVLIALTFILTIDDRSRFPRSRDVGCYLGMRPRRRQSGGSNPELGITKEGDSYLRKLLVQGAHVILGRHGTDSDLRRWGQKLAARGGKGAKKKARMAVARKLAILLHHLWVTGEVYEPLRASQSRAAQLKVA

SEQ ID NO: 200347 - protein, 441 aa, unidentified
MKMMIEKVASFLYNQILNKVSIERRHYMNRRNIVLKRASVKNVVVIGVDIGKFWHFTCAFLPSGEFTKPFKFFNNAYGFAEFIGFITRLKSTLQRDVIVGIESTGHYWENLAYFLDSKGVKLVQVNPAHTKKSKELLDNTPNKADPKDSIVIADLVAQGKFLSLILPKGDYAKLRRLAKARERVTKELTALSNAINYIIDMVFPELTQIFPDVKSKTVLYLLSNYPRPKDLLTISLEELTKQLKKVSRGQARKDKIEQLYRAASNSVGITQGNEQLELILEPYLSRIHDLTLHKISLEKVITEVVERLPETKHILSLKGVGIITVAVILSETGDLRLYHNAWEVIKLAGLNLYRLSSGKYQGQVKITKRGRPLLRWVLFFAALRQARLGMPLYSFYQRLRNNGVHKMKALIAVARKLLCIIFALVRDRRDYVLERSGNLAA

SEQ ID NO: 200348 - protein, 411 aa, unidentified
MEAAVITAVGIDVSKSKSTVAVRRPGGEIVLRPFDVRHTNSDLKKLTSTLKKLGGDIRIVMEHTSTYWRPIALTLKEAGFFVSVVNAMLIHDFSDNTIRKLKTDRADALKIANYALTFWDTLPPFNNEEETRLLLKMQSRANERITATATALRNGLIALADQIFPGVNIAFDPNTKNANGHEKWVDFFLRYWHKDCVCQYSMEAFTESYRGWCKRKNYKFRTDTAHKIYLLAQEGVATLPKCESTKMLITQACKSLNAVCEAKQSTQLEMQRLAAMLPEYEVVMQMEGAGPITGPALMAEIGDVRRFKNKKALVAFAGIDAPPFQSGAFESKSRHVSKRGSPHLRRTIFIVSNIILTRSNPENAVYCFMDKKRSEGKHYYVYTVAGSAKFLRVYYARVTEFLRSQPSPGAC

SEQ ID NO: 200349 - protein, 410 aa, unidentified
MNGNGKRYIGLDVHKHYLIALGVDKDLNVVLPIRRVELSRLESWMKKTLTEQDEVVLEMTTNTWQLYDELCEYAGSVMVVHPPHVALITRSQVMNDKIAASILARLLAKGLLVGIWVPPVEVREMRGLVAQRSKMTNLGTQAKNRLHAVLQRHHLVPPEGNPFGASNKEWWRSLSIGKLEKLNLQSDLETLQFAERQVERMTEIMEGMAAEQEPIGHLLHLAGFGVVTAVTVWAAIGDIRRFAEPRYLVGYAGLGARVHDSGMTMRTGKITKAGRRDLRTVLIEAANVAANSHPHWKAELARLEPRLGRNKAVVAIARKLLVSVWYVLSQNEADRFGEPKTIAQKMLRFAFQVGKEHRPQGQTAAQFARIRLDRLGLGSELTSISWGSKKPIPLPPSSLKKERSDVPDTN

SEQ ID NO: 200350 - protein, 320 aa, unidentified
MYSLFVGIDISKDSFSVAALDEKAKTVFSMDPLMNAEGFSDFLKMLSSHRKDFSTVVVALESTGPYHLNLYSFLLSKGITTIIVNPLIIANFNRLSLRKTKTDRKDAFTIARYLYLNRDSICNLTSSQVTTDLRDLARERESILKMVASMKNDIRRILQSTFPELEHRVDVLCVTMLRFLKGFPSARLINQATCREVAEGFSQRGSGRRISMPYTRIIELAKSSVATTSPSKELILPGKIETLFHLTKRADEITKMLVELCKSIRQEEFSILTSIKGIAAKTAAPFLAELGDHQKFQSYKKMLAFSGLDPTTHQAGQSAP

SEQ ID NO: 200351 - protein, 358 aa, unidentified
MVDKVTEAAVVGGVDTHKDLHVAAVVDQNNKVLGTQYFSTTRQGYRQMLAWMTSFGTLKRIGVECTGTYGSGLLRYFQNAGLEVLEVTAPDRMERRKRGKSDTIDAECAAHAAFSGIRTVTPKTRDGMIESLRVLKTCRKTAISARRVALQIIHSNIISAPDDLREQLRNMTRMQLIRTLGSWRPDASEYRNVTNVYRISLKSLARRYLELHDEIADLDVMIAAIVDELAPELIKRNAIGYESASQLLITAGDNPQRLRSESGFAALCGVSPVPVSSGKTNRYRLNRGGDRAANSALHIIAIGRLRTDAKTKEYVAWRVAEGHTKMEAIRCLKRYISREVYTLLRNQNRRINSIPITA

SEQ ID NO: 200352 - protein, 389 aa, unidentified
MKIYVGIDIAKLNHFAAAISSDGEIILEPFKFTNDADGFQLLVSKLDSFDKNSIIIGLESTAHYGDNLVRYLVTELYQVCVLNPIKTCQMRKNNVRKTKTDKVDTYVIAKTLMMQDNLRFVSFFDLDMMDLKALGRFRQKTIKQRTRLKIQLTTYVDQVFPEIQYFFKSGLHQHAVYALLKEAPSPKEIASMHMTHLANLLKVNSHGHFTKEQAKELRVLAQKSVGANDSAISIQITQTIQQIELLDSQLEKIEAEMTDIMKFNDSVIMTIPGIGYINGGMILGEIGDIHRFSNPNKLLAFAGLDPSVYQSGNFQAKTTRMSKRGSRVLRYALVNAAWNVVRNNATFKAYYDAKRAEGRSHYNALGHCAGKLVRVIWKMLTDEVEFNLE

SEQ ID NO: 200353 - protein, 461 aa, unidentified
MSVKKKAGQPHRAGRKRVDWKALEIVHPDAAGIDVGGSEHWVAISPDRDPEPVRRFGCFTADLREISRWLIEKGVRSVAMQSTGVYWMPVFEVLERQGLEVYLVNAQHTKNVPGRKSDIQECQWLLKLHAFGLLNNSFQPTDEIRIARTLWRQRSNLVAEASSVIQRMQKVLTEMNVQLSNVLSDLSGLSGMKIIGAILEGERDPWKLATFVEPEVQATAEDIAKSLEGNWREELLFVLRQHVEFYRIYQQKITDCDLRLRKHLESLGSKVDLKTQPIGHRPKGKKKSKNAPGFDLRTELYRITGIDWTQINGIDVLTAQTVIAEAGADLSAFPTEKQFASWLGLSPTNEQSGPRILNRRTRKVVNRATVAFRNAALTLLRSQSYLGAQYRRLRTRLGAPKAITAMARKLACLFYKLIKHGQPYVDKGTEYYEAKYREQQIRSLAKRAQKLGLQLVIPKTA

SEQ ID NO: 200354 - protein, 453 aa, unidentified
MSDIWRRCCGIDVHKDTVVVCVLAAAGGSEKIIRKTYGTFQGELIRLRIWLKQLRVTHIAMESTGVYWMPVWNVLEDPVFTLLLANPQQVKAIRGRKSDQRDAKRIAEYLQDKRLDPSFVPPLEIRQLRMLTRHRVSLLEQRNEVHNQIRDLLETAGIKLSSVASDIMGVSGQRILRALAAGEQSAERLSWKVRGRLRKKADRVREAMKTEFSVFQRELLTLYLRHYDFLTGQVGLVEAKIRTHMEPFTPQVALLSTIPGMDYIVAWNLLAEMGADMNVFPDAAHCASWAGLCPGSEESGGKRISGRTKKGNRYLRRILTQAAWANSHRKDGYLRALFHRVKARRGWGRAVIAVAHKLIVIAYEMLKNRVPYRELGGDYFDQKNPQRVGKRLIGRLERMGYTFPVPPVAPVVAVAPQPAAWPAAAPNDPPKKKRGRPRKLPAVGIINPEISIG

SEQ ID NO: 200355 - protein, 351 aa, unidentified
MKQPPQPEPSTIKIITIGIDLAKSVFQIHGVDAGGAVAVRKKLRRAEVLKFFEGLPPCLVGMEACATAHFWAREIGALGHDVRLMPPSYVKAYVRRQKNDAADAEAICEAVTRPTMRFVPVKSAERQGVLVLHRTRDLLVRQRTMLINAIRGHCAEFGMIAPQGAYRASDLIEQVRDAEGSVLPDLARSALLMLAEQLDALAVQIHALERRLLVWHRQAEASQRLATIPGVGIITATALAASVTDPHLFRSGREFAAFLGLVPRQNASGGKDRLGRISKMGDGYLRKLLVVGATSVIRRAGDNTSATGAWLRTLMERKPARVVTIAMANKTARIAWAVLSRREDYRASAIT

SEQ ID NO: 200356 - protein, 379 aa, unidentified
MTSTDATADTRETVYAAIELSKKTWVLGIAPPDRDRPSIHRIGGGNIAELVSRLRVASRNNRRIVVCYEAGYDGFWLARALVKIGIECRVLDPASIQVNRRARRVKTDRIDVLALLRALIATDRGERHVCAVVRVPSIEEEDARRSHRERQRLVRERTGHINRIKGLLFAQGIRDIKPKLRRTRIDFATLETAEGHSLPGRLRRELEREYARLALIETQLREVENERDTADSQDPVVEQKRQMLVALHGVGGTSAAILAREVFARSFASRRQLGSYLGLTPSAYDSGSTTRCQGISKAGNSWARRILIEVAWLWRKYQPASPLSNWYIQKTTGQSSRIRRIMLIALARKLAISLWRYVETGLVPDGVLVARAEPRCVPA

SEQ ID NO: 200357 - protein, 391 aa, unidentified
MGIWVGIDVGKEIHFALALDADGGEILAREFTNTEEAIERLRCDVHRLGEPVFAVDMTEGPVALLLAVLVGAGEDVRYVNGLSVNRSRLMLAGESKTDRRDALTIAENLRLRGHSLPCFGTGDDTMQTLRLLMRRRADLVADRTRAINRLRDTLLSYFPGLERSFEFTKKGPLLLVMRHNTPDGIRRSGLSRIERHLKNAGAVKARGLAEKAVAAAKAQSMRIAGQDTASLIVSELASEILRLAERVAETDERVSEAFFSLPQAEIITSMPGFGPRLGAELLVEVGDISRFPSAGHLAAYAGITPVSRDSGKSTGNRMRSRGGNKRLKRVMYHAAFVSIRCDDRARAFYDRKRAEGKRHHQAIIALARRRTDVLYAMLVHGSLYASEPVAA

SEQ ID NO: 200358 - protein, 412 aa, unidentified
MDVIYTHCCGLDVHKKTVVACLITSAEGLEPVKEIRTFRTMTADLLALADWLQQAGCTHVAMESTGVYWRPVYNLLEGQCELLVVNAQHIKAVPGRKTAVKDASWIAELLRHGLLRGSFIPSKPQRQLREFTRYRSTLVQDHARTLNRLQAVLEDANLKLASVVTDIYGVSARAMLEAILAGQRDVEALADLARGRLRAKRDQLKEALEGRVTAHHSFLLSEHLSTLEYLDEAIERVSGEIDQHLTAEQEAIALLDTIPGVGQRAAEILIAEIGTDMSRFPSAKHLASWAGMCPGNHESGGKRLSGKTRKGSRWLRQILVEIAHVASKTKNTYLAAQYRRIAARRGKKRALIAVGHTVLTIVYTLLTRKQPYQDLGTAYFDQREQHRVERRLVRRLERLGYEVALQPRALAS

SEQ ID NO: 200359 - protein, 376 aa, unidentified
MISIGIDVSKGKSTVCILSPYGEMIRKPFSVIHTKESLNELADFINTLNGEKRIFMESTGIYHLLIYEHLLKMNFSVFTINPLVMFKYAGTNIRPGKNDRLDAITIANYGIDNWFKPIEIQHETSLQYKQLRLLSRHYNQYICMRVKSKLTLLNLLERTMPQIGTLLENDSQNIKRDKLNAFVVEFMHYDNKSNMTENHFVAKYKEWAKKEGYQASELKAKQIYALASASIPTLSSKDPSVKMLTLESIRMYKELCSSTDKILAQMVEIAKELKEFSILTSIKGIGNNLASRFIAEVGDIHRFYKASALIAYAGIDAPSYQSGQFTSTKRSISKRGSKALRKVGYEIMASFTRQKPIDNSVFDYIKKKEAEGKPKK

SEQ ID NO: 200360 - protein, 391 aa, unidentified
MNKLIKYVNGIDIAKDKLDACLMSVDVELNYKVKATHKFSNNASGFKELLQWMKKHCTEKIPVQTLMEASGVYHEKLAIWLTEKKQQVMVVLPNKARKYMQALGLKSKNDKIDAQGLALMCAQHKFDVWQPVAKFYYQLRLLTRHYQSTQEARTIFFNQHHALQHSGYSSKQVSKQLEKTIALFEKQVKENKQLIIEHINTNAEVKRKVNQVCKIKGVDILTVATILAETNGFELFKNIGQLVSYAGYDVIENQSGNHVGKTRISKKGNSRIRRILYLPAFNVVRFKQTAFVNLYQRVYGNTKMKMKAYVAVQKKILVVIYALWKKDQEFQIDFNQKITSGNDEPRALFPFFFGEKISENLKEVVLPISSTTQDELRYKESPEALFPLPQT

SEQ ID NO: 200361 - protein, 386 aa, unidentified
MQKLNDLSRSLTPLNPDSTLIAVIEMSQSSWLVAAIVPGVERQPLKKLAVDESALLKLLHRWREESKKAGHKIGRIVIAFEAGRDGFWLARWLWARDIEAHVIHASSIAVSREHRRAKTDRLDTGLLKRAFLGWLRGERDHCKMVAIPTAKDEDAKRPNRERESLVGEQNRIINRMKAALIRLGIRGFNPKLKKAAERLDGLRTPEGEPIPPNTLAELRRDMERRRLVSDQIRQIEDARLERIEQAPSGGPNAMVRLLARVIGVGIETADMLVQEALSRNLRDRRAVARYAGLTGSPDESGKKRREKGLARSGNARVRRGMIQLAWRFLMFQKDSALAQWFRARTENARGTRKTMIVALARKLLIALWRLVREGIVPEGIVLRPAP

SEQ ID NO: 200362 - protein, 415 aa, unidentified
MNVFCGIDWAEQHHDVALVDITGQLVIKRRISDNLDGFVELLDILAGAGDSPDDPIPVAIETSPGLLVAALRATRRDVYAINPKAVARYRERHSMTRKKSDHFDAMTLANILRTDAQAHRPLPADTELAQAVTVLARAAQDAIWRRTKATQELRAPLREYYPTFLEAFAGAVHTNLAKPEARAVLAMALTPEQGATLPKTRIITALRRAGRQRRLDQTADRITQALRRPQLRQPPLVESAMGRQAQALLATLDVECANADQLSATAVEAFQQHPDYRIITSFPGLGDTTGARLLAEIGDDRSRFADPRGLKAFAGAAPITRASGRSISIRRRQVKNNRLAAVGFVWAFATIPRPGPTKDLYDQRRAHGDRHAAALRKLFNRSLGQLWHCLQTRQLYDQAKAHPTTDQPPPEPVAA

SEQ ID NO: 200363 - protein, 482 aa, unidentified
MEKRNIYQNQSQELLHLFEKAGSNDKVMCVPMDFAKKDHLVMFCNGNGDILRKPFSVKNAPEGIAYINDQVMRSCRKRGIKKEHVFFGGEDANSFAKNFVSTLRSKGFIVANVNAHDAKKQRSSVQASTDRIDLLGIASMLLNCRANCSPAQSGIYRNLRILVRHRRRLVKMLTEVKNRVHGIVDELFPGFLKESNTGIVPFTQSSLYLMENRFSPKQIRRRKRQTLIETLKRLNTSKAEKTAAKLQQYAGKVLHAPVEYVDTMQVSLAQHVKHIRCLKESIVQMDKQIALNLAQTQGSFLTSVRGIGLVLAAGVTAEIGDISQQKPLNNLSSYAGIIPRVKQTGGVDGKTYTGPVAKRCNRILKDYIVKSAYHLGLHGPDDLMADYKRRDASGQHADFGIGRRYLRLAISLMRTSHVYLPPYLREDEYSLKDRAGYYLTAWPYFRDKWKKVGALEDAFANDRPLGIWRQIVQQLYDIELKL

SEQ ID NO: 200364 - protein, 394 aa, unidentified
MPELFVGIDVAKDTSSAQGIDRNGKGRFSLTFAMDSEGFMQLWKAITAHRKDLLEVSAAVESTACYHINLYTFLTAKGISTVVINPLLIANFVKLSLRKTKTDKKDAMSIAQFLLVHRETISQLSLSQDLQDFRDIARERESVGNLLSAHKVEIKRLLQSTFPELERIGDLSTRVMQEFIAAFPSARLVKAAKPKAIQKILQRKGVGTRLTYTAEDLIQAAKQSVATISPAKELILQGKVRTHEHLRERYEELTKILTEYCKSSMLEDFEIITSIDGISKCTATTFLAEIGCIGNYASYKKLIAFAGIDPTVYQSGKFEGSSRISKRGNRHLRRVIWLMTTCVLQHNATFRAYFMKKRSEGQPFKKAVFATAHKLVRVIFAMLTQRTMFREVCA

SEQ ID NO: 200365 - protein, 343 aa, unidentified
MQDVATVGLDIAKQVFQAHGADASGETLFNTKIKRENVLEFFSKLKPCLIGMESCATSYYWARQLLEFGHDVRLIHTRYVKPFVKRGKTDANDAEAINVALTQKTMRFVPVKTLNQQAAITIFRTRSLFVSQRTQLVNALRGHLAEAGLVAAKGIQNYSKLLKLMESAADTVLPTVMKQALTDICDQIHRLNDLVTKLDKEIERRVQHDENACRLLTIPGVGPKTAMCVIATIPDIHRFPSGRHFSSWLGLTPRTHSSGGRSVLRRITKMGNSELRRMLYLGGTVIMMRDKKTPIGRWAARLRARRPYKVAAIAVANRLARIIWALLTNGGVYDLTHGREASA

SEQ ID NO: 200366 - protein, 384 aa, unidentified
MRSVCGLDVHKDSVYLCILSEDGELIEKVFGVLTFQLHQMRDLLLAHHVEKVSMESTSVYWIPIWRILAPHFHLQLANPYFIKQLPGHKSDVADAQWIAECTMKNLISSSFVPPEDIQQLRQYDRRIFDLDEEIVRKLSKLDAVMQRCNIRLSNYVSNVDCKSYKDVVRKISEGVTDPEILIEEIHGRIIKHHGRETILASLTGVVSQAEIDVVRQLREELDLAEEHKQECLERMLDICKEKYPDELRRLQTIPGVKERTATSLIAEIGTDMSKFETANHLAAWSGLRPRNDESNRKFKSRRITHGNVYLRKNIIQCAWAASRTKNCFFSRFSYHQTQVRKKNKMKVIVAVARKLLVAAWHVIHDKTDYVDFQKQDRQSPASNG

SEQ ID NO: 200367 - protein, 354 aa, unidentified
MTSTKYIGMDVHKESISVAVMNAAGKIVMECVIETKASMILQCIDGLRGDLHVTFEEGTSAAWLYDLLKPHVTELIVCDPRKNASMREDSQNDKIDARRLAELLRIDHLSPVYHGEHGLRTLKELVRSYLTITKDLVRVKTRVKAIYRSWAIPCNGKEVYTACHRAEWLEKIKELGVRRRAEFYYQQLDALRVLRQGVRRELLAESKKQKAWKRLCQIPAIGPIRAAVLLGILQTPHRFRSKRPLWKYSGLAVETCSSADHRSVNGQLRRSKKTSIRGLNQNGNHDLKNLFKGAAVIASSKPGPFQEFYTALLAKGMRPEMARLTLARKIATIVLIVWKKGVCFDAQHLKPQTA

SEQ ID NO: 200368 - protein, 439 aa, unidentified
MINRIPEMVLAVDFSLDRLDVSLRGDDRDWLWAHQAYPNNWSGWQHLKQDLLVELNQAAPVRLTAVGESTGPYWWHAFYQFSHDDDLRSFSPELALLNPARVKGYRKALSERDKADPDDARLIDQYYRAVGVEHPHQFHDRYLRLRTFTRAYSRVTHTLASEKAYFLSVLYLWASEYSRKKEKPFSNLFGATSLYILDEFIDIQAVADIPLQELTDLLNQRSRNSFSDPQANARKLHNVACHSYPIPDYLTDALHQVIHHTLAHIRLLSDNQLAYRQLIEQELDTLPEAKLALDVKGLGTILVAGCLSEIQDTSRFVTGTKFDRRRKQHRPRTYRDGQAAVAKLAGLWWPKHDSGRVQGLQPYLARERNPYLRYWLVQSAHTLHRYQPDYCQFYWKKYHEARSHHHKRAIVLTARKAVRLIFALLHKGQLACLEEGLLT

SEQ ID NO: 200369 - protein, 335 aa, unidentified
MEVKTIGLDLAKNIFQVHGVDAAGEVRITKRLRRHQLRDFFAGLQPCLVGIEACPTAHYWGRELKSLGHDVRLIPPQYVKPYVRRNKNDAADAAAICEAVARPAMRFVPIKAPEQQAALMLHRTRDLMVGQRTQLLNALRSHAAEFGVIAPKGSQNVATLLEACEEAQLPALALELLRVLHRQINEAAERIEEVETQISAWYKANEVCRRLSSVPGIGPLTATAIAATVPDPGVFKSGREFAAWLGLTPRQNSSGGKDRLGRITRKGNQHVRRLLIIGAHAALLNSRVLKTTDWVQGLMQRRPRQVVAVALANKMARIAWALMARGTSYRVAVAA

SEQ ID NO: 200370 - protein, 383 aa, unidentified
MDNGTRWVGIDLHRRRSFLTAITEEGEVEFRRRIVNEREAFLECLGDPNGTHVALEATYGWEWLADLLEDAGYELHLAHPLRTRAIAAARVKTDAVDATTLAQLLRAGLLPEAYIAPRELRDVRELLRHRVALVAMRSAIKNRVHAILAKHGVTHQHADLFGKAGRELLATVELRDAPRQRLNSLLALLEDFDREIDTAAKEIDRQAKADKRVKLLCQIHGIGRYTAMLIIAEIGDVRRFPSARHLCAWAGLTPTVRSSDGKARLGNISRQGSSILRWAVVEAATHVATRGGPLRQQFERIAKRRGRKVARVAVARQILTLCYYGLRDGEIRYLKASRPGEPHESLGDPAPPEPASALDRAPGTGTKPCAHSGELAPMSGLPT

SEQ ID NO: 200371 - protein, 340 aa, unidentified
MPSMQIGVDLAKSVFEVAVSTVPGQVHERRRLSRAALGPFFAARPPAEILLEACGSAHHWGRELQRLGHTVTLLHPRDVARYRDGNKTDRADAKALLEAARNTALSRVPVKSLEQQAVVALHRLRQGYLQTRTARINAVRGHLREFGCVIPLGPQQLLRQAAAALEQETVPALLRPALHIVLEEIVALEDKAEAVRTELTRLAEQMPDAQLLLTVPGVGVLTATALVAFVGDIHRFRAGRHFAAYLGLTPREASSGLVRRLGAITKQGNSYVRMLLVHGARSALRAGAVTQHPDDLRTWARALAARKGHNVAAVALANKLARVCWRVWRDQRPFERRDAR

SEQ ID NO: 200372 - protein, 308 aa, unidentified
MAQNYIGVDLSSDWIDIHDPIRGTSRIANSNAALARWMGAFAPEDFLIFEATSGCDRAILQEAEARGITMRRINPLHGWHFGRSLNLPKTDRVDARMLARYGAERQPEPQAPSSPARLALAELETRREQLKVMEVQEKNRLRKATLEAVRADHLTMLRNLAARTAKIETHIRDHLKAHPDLARAAHLLQSIPGIGSVAATVLIAHLPELGTLDRRAIASLAGLAPKARESGKWHGNRPIGDGRRHIRRALYMAALSALRSSSCFATSVAALRAKGKPGKVIAIAMARKLLVIANAIISKQEPFRAAKQ

SEQ ID NO: 200373 - protein, 345 aa, unidentified
MEEITTVGIDLAKNVFQVHAVDAAGQLVVSKAVRRSGFLALISKFPACLIGMEACGSSHHWARELIKLGHDVRLIPPAYVKAYVRRQKNDAADAAAICEAVSRPSMRFVPVKSEDQQAVLMLHRTRALLVGQRTALICALRAHLAEFGLVSPTGPRNLAPLLAILADEADASVPALARRALAPLVQQIGALETQIDHLEQQIQTWHRGDETSQRLAAIPGIGPLTATALAASITDPKMFKSGREFAAFLGLTPRQNSSGGKERLGRISKMGDHYLRMLLVVGATAVLRHAKAKGSASRIWAKELLTRKPFKLVAVALANKTARIVWAVMARGEDYRATQALEAAA

SEQ ID NO: 200374 - protein, 354 aa, unidentified
MPHNTSRLEAVATIGIDIGKNTFHLVSLDRNGAIVLRQKLSRRQIEARLANTPPCLIGMEACVGAHHLSRQLKAYGHDARLMPARYVRPYSKGQKNDFRDAEAIAEAVLRPTMKFVAIKTVEQLDLQALHRVRERLVCQRTSVINQIRAFLLERGIAVRQGPPALRSEIPIVLSMTDKLSPRMIQMIEDLCADWRYLDERVETVSDEIKTLSEQDDGAKRLMTVPGIGPIISTATVAAIGNGDAFSKGRDFGAWLGLVPRQMSTGGRTVLGPISKRGNRYLRMLFVQAAHAVLLHPKCWERHGLKSWIAAAARRLNRFKLAIALANKLARIAWGVLHGGRSFEVRSMKPAAQCL

SEQ ID NO: 200375 - protein, 343 aa, unidentified
MKDRTVIAVDIAKNIFEYVKFENDVQLGKTKRIKRIQFIKLIASKECRYKFVMEACSGAQHWARLAKKYGHRAVLIHPKLVAGYRHGQKTDANDAFAIYEASKRPKLKESVQKTVEQQGLSALESVRSHYQNRKKRLSNAMRGHLAEFGIVMPKGYKTLRNQIPRILEDAENDLPMTIRIALNEYWNDWLHANQTVLKLAKQIMAELRQSATAMELLKIEGIGPVVASGLICVLGDGSAFNRGKEAAAYIGTSPKQHSSGDKRKIGGISKTTGHKTLRSALIQGARSIIQILMARGKPSSEKERWLLQLIERQGENRAAVALANKNVRTAWAIIAHQRQYIAA

SEQ ID NO: 200376 - protein, 331 aa, unidentified
MVVVGADVHKRTHTFVAVDEVGRKLGEKIVKATTAGHAEAVMWARECFGAQLVWAIEDCRHLSARLERDLLTAGQQVVRIPPKLMAQTRASARTRGKSDPIDALAVARGFLREPDLPIASHDEISRELKLLVDRREVLVAQRTATINRLRWRVHELDPERAPKAASLDRAKHRQILGAWLITIPGLVAELACEELADITRLTEQIDALAKRISERVRAVAPALLAMPGCGDLTAAKLVGETAGVTRFKSEAAFARHSGVAPIPVWSGNTAGRVRMTRSGNRQLNAALHRIATGDSTPEALRCLKRRLSRIVFSRLHTDHHNRIQPCQPAAA

SEQ ID NO: 200377 - protein, 357 aa, unidentified
MSIVGGLDIHRKQLTFDWVDEQNDKWERGRIAPADREHLAGWLTRFDPATVGPVAFAMEGCTGWRYIAEEMDKAGVDAHLAEPAETAARRGRKRRAKTDKADAKLLRELLAQGRLPECYIPPAQVLEWRALLELYQDLRSQHTSWAQRIQAVCFHQGTTAPGQAGIIRGDRARLRAIVDEQLSISGRLQVNTALAIMDVLADHLERLRRRLLSTARGVNGARALMHDIYGVGPMTSLALCAWLGGPDRFSSSRKAVRFVGLDITVHSSDGKRSPGRLSRQGPEVLRWLLFEAAKTSARACAPGYGYYTQVKERYDANRACLSQARRIVRQSAHILTGLGDDAFTVVAQPAAPTTIAR

SEQ ID NO: 200378 - protein, 462 aa, unidentified
MARRNAKRRAPSARKAAGSLPITNPNAAAIDVHSDNHVVCVPADRATPNVRTFGANSCDLLQIAAWLKQCGITTVAIESTGIYWIPIFELLEAQGFEVCLIEPGQASRCGARPKSDVLDAQWLQRLHSHGLLIGSFRPPDVVIALRAYLRQRLMLISLASMHIQHMQKALEQMNVKLTEVVSTITGLTGMRIITAILDGERDPARLAAFRDARCKNDEAVIARALQGTWRDEHLFELRQAYELYRTYQMKVTECDAQIEQSLAKLPDRSAGAKLQPKVKKCHRKPNTLRFEATEPVFRAMGVDLTAIDGIEDHTALVILGEIGVDVSKFPTEKHFASWLGLCPNHQESNGKRKSRRVRKGKNRVAIALRLAARSLQRSHLALGAYFRRMNSRLGFKGAVTATAHKLARYVYAMLKHGEAYVSQSLEQYEAATQERIERTLRKKARALGYDLVPRQPLSPAVP

SEQ ID NO: 200379 - protein, 412 aa, unidentified
MRVLHERCCGLDVHKKTVVACVLLTQGDGSVQRRVRTFGTMTGDLLALSDWLAGLEIAQIALESTGVYWKPVFNLLEGEGRAIVLVNPQHMRAVPGRKTDVNDAEWLADLLRHGLVKASFIPPAPIRELRELTRYRKTLVRERGQETQRLQKLLESANVKLSAVATNVLGASGRDMLAALLEGEEDPAVLAELARGKLRAKLPALRQALEGRVKPYHRVLLAELLGHIAYLDEAIGRLHDEIERHLAPFSEAVERLQTIPGVSATAAAAIVAEIGVDATRFPSAKHLASWAGVCPGNRQSGGRRLSGKPTKGNVWLRAVLGEVAWAASRTRDTYLRAQFERLARRRGRKKAVVAVGHTILVIVYHLLRTGRDYRELGADYFATLDSDRVTQHHVQRLSQLGYEVTLTSKEAA

SEQ ID NO: 200380 - protein, 419 aa, unidentified
MFKIYRFNCCGLDVHKTWIYACIGITNKVGLTEYKQQRFSSFSRGLRELAAWVQSFGCKEVCMESAGKYWIPVFNILEKANLWVTLAHPKYTKPLKGNKTDRKDAKWICDHFICDLIKPSFIPPRDIRELRDLVRYYRKLTNILAGEKNRALNCLTVSNLKLDDVFSDVFGKSARSITQHILDHPGEKFDVTPFVDKRCKTPVAEIQAAVDGAISSEQAVKLREVLAHIDELTAHKERVKAELLRLAGKYEAALNLIRTVPGFSADPLTAITVLSEIGADMSVFPTAKNLVSWAGVCPRNDQSGGKVKSTRISKAGSWLKPTLVQVANAVVKSDKHPEFKGRYRRIKAHRGHKKAIIAICRMFLTAIWNILSKLEPYTAQGYLDTSPPRTREISAVDALKMLKSRGYIIKGALPVPTAA

SEQ ID NO: 200381 - protein, 382 aa, unidentified
MIIGCDYHPGFQQIAFVDTESGELQERRLEHREEAEKFYRDLGAQGVKVRVGMEASGHARWFERLLAELQLELWTGDAAAINAKRVRKQKTDRQDAQLILRLMLKDDFPQIWVPSWENRDLRQLLWHRHRMVQARTRIMNQLQAVALNEGLRCKKRLWRDAGREQLESFKLAPWASRRRRDLLALLDRLTPTIAELTAAIEQEVERCPAAQRLQTHPGVGALTALAFVLIIGRAERFQCGKQIACYLGLVPLEDSSGQRRRLGHITKQGNSLLRFLLVEAAQVTVRSDPEWRSKYCHMALRRGRKIAKVAMARKLAVRLYWMMRKEWDYAQLSKFGSYAGKPGHRDGVNKTSQMSGHPAPLHGEFEVVIMIERVTEEMHGSD

SEQ ID NO: 200382 - protein, 372 aa, unidentified
MDRVCGLDVHKDSVFMCILTANGEKIEDVFGTLTPELDRLRDTLVSHGVGKVAMESTSIYWVPIWRILECDFDVKLVNPYFIRQLPGRKTDIKDAQWIATVLQKELIKGSYIPDSKIQELRQYSRRIFHLTRRKQQAESAIDLTLQRCNIRLSNYVSDIGCKSMRKVVNALICGETDSEVLALLVHKRIRNKHCHEVIKSSLTGIVSSSDRDMLKMSLEEVELYDRQLLECKEKMRIICEGHYAEELEILQTAPGIKEESAMRIIAEIGVDMKAFLTASALVGWAGLRPRNDQSAEKIKGRKTLHGNKYLRVMLTQCAWGACRTQTSKFYSRYHTLKKRMNHNKALMANARKLLVVIWNLLAKKQPYMPLVN

SEQ ID NO: 200383 - protein, 342 aa, unidentified
MKKASIIGLDLAKRSFQAHGALADGSVAFRKKLTREKVLGFFAEQPRCIVAMEACGSAHHWGRAIRDAGHEVHLIPPAYVKPFVKRQKNDAADAEAIAEAASRPTMRFVAVKTAEQQARAMLFRTRDLLVRQRTQLINALRGQLSEHGVVAPQGPANVAILAQAIDEMTPSLPLLVVELARVYLDQIDGLSEKVAGLEKAIACEARRGDTTRRLQTMPGVGPITAMAIETFAPPIEVFRRGRDFAAWLGLVPLQHSTGGKQVLGKTSKMGQRDIRRLLITGAMAIVSWACRKGVQEGTWLHRMLRRKPRMLVAIALANKMARSIWAMLTKREDYRAPVAAAP

SEQ ID NO: 200384 - protein, 313 aa, unidentified
MNDNLPQTIGIDISKSNLDCHVYPAAAERQFANTAKGHKALIAWLQQWKVERIAYEATATYHRALEAALADWPCVKLNPERARRFAQATGTLAKTDRIDAMLLARLAATLQPPMRPAPSASQAQLAELINARDGLVRDRTALKNREKNITIALLKRQCRQRLEQIERHIEALDAEIASLITADAALARRHEILTSIAGIGTLTANQLIATMPELGNLDNKQAASLAGLAPVARQSGQWKGKSFIRGGRANVRQALYMPALVAARFNPDLKAKYQQLVAAGKPAKIAITAVMRKLVVTANALLKADRCWQQSLA

SEQ ID NO: 200385 - protein, 402 aa, unidentified
MTSYSYFAGIDWASQSHSVCVLDAAGGVELRLDVPHNKEGIERLIRQLRSFAGIVIAIERPSGLLVDALVEAGLRVVPIHPNVLKASRPRYRSAGKSDPGDAYMLADILRTDGHRFRALEPQSDEIRALRALVRTRDELVDSRVALANQLRSLLESFWPGAAEIFYEIDTPIALAFISRYPTPQSAAHLAEKRLAAFLAQHSYCGRRPVAALLERLRAAAIGRAGELEAEAKGELARSLASVLEPLVAEIAKLSARIEHTVANLADGQIIMSFPRSGRICAAQILAELGSVRERFPNQEQLAAEAGVAPVTYESGKHRSVAFRFACNHRLRRALTCFADQSRHANRWAADVYQRARSRGCDHPHAIRVLARAWARVLWRAWFSRTPYQPHLHRSAAAFAATG

SEQ ID NO: 200386 - protein, 347 aa, unidentified
MEQIIRVGMDTSKHVFQLHGVNAAEEPILRKKLRRKEMVDFFGKLPPTVVAIEACGGSHHWARALQSLGHAVKMLPPQYVKAYVKRGKNDAADAEALCEAMSRPTMRCVPVKTAEQQAALMLVGMRDRLIRNRTQLTNAIRGYAAELGLAAAKGIRHIAPLLDRIAADEMLPEMARDLFAIHAREYVQLQADIEKVETRLMAWHRADECSRRLAQIPGVGPIGASLLMMKTPAPELFRSGRDFAAWLGLTPRDHSTAGKVRLGIITRAGDEALRSTLVQGATSLLQQVRMGRSNHASPWLVELLKRKPPKLVAVALANKVARIAWKMMMTGESYKSRSAAPAVALAA

SEQ ID NO: 200387 - protein, 412 aa, unidentified
MADKTFRWFAGVDWGSAKHQVCLLDEAGMVVGERAFAHGGAGLAALCDWLVSIAGEAGRVAVAIEVPHGPVVDALLDRGFAVHAINPKQLERLRDRVSLAGAKDDRRDARVAAGGLRTDPHLFRPVEAGDPAVIALREWSHLAEELQQERVRLSNRIRQQLWRYYPQLLEVSDDVTAEWVLDLWTLAPTPAKAARLREATLARLLQEHRIRRLDAEQVVGLLRQRAITVAEGVTEAAVLHLRSLVARLRLANREFHQAGRKLNELCTALSEGAAAAGGAPRDAVILSSLPGVGTVTLAILLTEAAGPISRRDYAALRTLSGVAPVTKRSGKSCIVTMRYAAQVRLRNAVFHWARVAVLNDPKCRSRYAALRARGHSYGRALRSVADRLLGMACVLLQRQVLFDPDYGSSAAA

SEQ ID NO: 200388 - protein, 356 aa, unidentified
MPSITPDQAVIEVAGGVDTHLDTHTAAVIDAVGRVLGTEQFPATAAGYTALLAWMRGHGRLSRVGVEGTGAYGAGLARQLRDEHVEVIEVDRPNRKTRRLQGKSDPIDAIAAAKAALAGERTGTPKQRDSRVEALRNLRVARRSAVEQRADTQRQIKTLIVTAPDELRARLRGQAVKQLITTCANLRPDRADAASPATAVKLALRSLARRHQQLSVEITDLDELLEPLVAAINPDLVAAHGVGTDVAGQLLVTAGENHDRLSSETAFAMLCGVAPLPASSGKTTRHRLNRGGDRQANAALYRVVLSRLRWHRNTRAYMQRRTKDGLSKKEIIRCLKRYIARELYQIITTNDLDLTA

SEQ ID NO: 200389 - protein, 343 aa, unidentified
MDHFVGLDVSVKETSVCIVDDTGRIVREVKVASEPEALLQVLTNPAYHVKRIGLEAGPLSQWLFSALAETGLPVICVETRHMRAVLKAQINKTDRNDARGIAQMMRAGLYRPVHVKTVRSQKLRMLLTHRKLLQSKAIAIENDLRATLRNFGLKVGMVGTVKFEARIKELVENLTDLAVLVEPLLIVRRVLREQIGILHRRLLTIVRNDDVCRRLMTVPGVGPVVALTYRATVDVPTRFRNSKAVGVVFGLTPSKHQSGESNRTGGISRCGDEMVRMMLYEAAQILLVRSAKWSWLKAWAMKIAKRRRMKKAIVALARRLAVIMHRIWVDGTEFRWTREVAAV

SEQ ID NO: 200390 - protein, 290 aa, unidentified
MDTIGIDLHTRESQLCRDHDDGTVAERRIATTRERFTAVLGARPRARMLLEASTESEWVARHLESLGHEVIVADPHLAPMDATRSRRTKADRRDARTLREACRLRADRPADRLSDARRHIRAELAVREALVRTRTRYIALAKALVRRDGPRVPARESHLIAQRIVALELSESLPAELLPAHHRAAFLGVVPGEYSSGEKRRIGRITKAGNARARYLLVEAGWRILRSKDSDTEALRAWALTIAARRGTRIAVVALARRLAGMLYAMWHAMWRDQRPYDATRRRLPRSRAA

SEQ ID NO: 200391 - protein, 400 aa, unidentified
MVAGRRALYVPAALPGWLQYELSAGRFHRRGVARKRRERNDPNQECPPWFTTERKASAMTIMIGIDPHKASHTAVAIDSNEHVLDELRVRSSTTQADRLRCWAAGFENRTWAVESAQGLGYLLAQQLVAAGEVVLDVPAVRASRVRTLSSGRSQKNDPNDARSVAIAALRADDLAEVRADDHARILRLLVKRHRDLGRAKNQACCRLHALFLEIVPGGATFRMVSVTRANALIDSFEPINAMGRQRLEIARELVAEIAHYDERLKASKQRIERAVRASNTSLTSICGLGAITAAMIIGHTGNIGRFPTKHRFASYNATAPIEASSGSRVRHRLNPRGNRQMNWAIQVVAISQLRHDTSGREFYDRKIAEGKSSKEAIRALKRRLSDVIYRHLVNDARQRN

SEQ ID NO: 200392 - protein, 374 aa, unidentified
MKGATELKKQIINTANSNQIDQVIIGMEATSIYSFHPAMFFQEDIDLKAFNTQSVVVDPKKTKRFHDVFAEDKNDQIDAYYIADYLRVGHYSIGIVRQENYIALQRLTRSRYEIVQSLVRAKQHFIENLYYKLNKLVISDELNTSIFGSTMMQLLTEDLTTDDLLNISINDLTDYLAEHGRGRFADPEALAKTIQKAIRSSYRLDKVVANSVNAVLSVYAEEIKAFQKMIKDLDKSIEKVVKVTDDEQILRSIPGIGPVYAAGILAEIGQIDRFDNEAKLAKYAGLSWREKQSGSYTSDNTPLKRTGNTYLRYYLVEAANLVRTHDPVFGEYYQRKYKEVKHTPSKRALVLTARKLIRVIYFLLKNHQIYQEKR

SEQ ID NO: 200393 - protein, 340 aa, unidentified
MNKSVDFDPCGIEVSARTLVVQRRRPGQSDAVREFSNTAAGHQALLRWLESAGRAVRVCLEATGLYGLDLALTLEAAGVALMVANPRAVRHFAQAMMKRSKTDRLDAAVLTEYAARLPFQPWRPPSPSALKLLAVARRLEDLTEMHAAEKNRLHAASVSAALPALLRRDVQRSLETLERAVERLTRAAQEFIVADPLLAERYQLLLSIPGIGATSALHVLAELMLLGPHLDVRQWVAYAGLAPRQYTSGSSVHKKARISKAGNKHLRRALYMPALVASQHDAHLGGFYQHLVARGKTKMQALVAVMRKLLHAIFGIFKHHQAYDGAQLFARPSPQEVTCT

SEQ ID NO: 200394 - protein, 395 aa, unidentified
MSSNVCHQIIYLAIELSSSSWVIAYRVPRNDKAKLHRLEAGDGAGLLAFIAGLRHRLDPPDDASTLVVSCFEAGRDGFWLHRLLTAHGVINHVVEPTSILVTRGARRAKTDRLDAVGLLRVLAAKFAGDPGACRTVVVPSAEEEDAKRPHREREFLVQERVRIENRIAALLATQGVRERPSLRSWDADMRALRTGDGRPLPTHLVAELNRLRRRLSLTLEMIRELDAVREQALEAQHDSASRMVKALCTIRGIGVNFASVLTREVFYRTFDNRRQIASYLGLAPTPFQSGGMDRDRRINSTHVRKPQIHQGHVRLVLAKSLNAISAAGGFRYHHHVGLIANNSRKALVQQRMIVDAEDTDFLRGNHLSNSLLGDRLRKSAVPVVQHSKGFGCRFA

SEQ ID NO: 200395 - protein, 452 aa, unidentified
MKKEKMALDVVNPQAAGIDVGSRSHYVAIGQRDEDVKEFGVYNEDLITLAQWLLDNEVKTVAMESTGTYWQSLFTTLQSVGLEVILCNGKFTKNIKGKKTDVKDCQWIQKLHTLGLLSGSFLPDEATEQLRTYCRHRANLLEQAADTSRKMQKYLRLLNLRLDVVVKDVTGLTGLSIIDAICKGEMNPEKLASLRHGNCKKSEQEIAKALQSNGRKDLLFSLTHEYELYQIFQRKIGECDKQIQKLLNEQINNDDNKKQHHIDGKVHKRLNKNNPDININLLSYQYFEGVDLLAIEGVSHSTVLTLMSEVGHGISKFESAKQFTSWLRLAPNNKISGGKILSNKMPKGSNRLKIALRQAANAVGNLKDTALSNFFKRIAFRKGRTSAISATARKLAVIIWNMITKKIPYKTDTQYEFLDQKRKRRVMEMKKLIHKFDITPDDLGLQLNINNL

SEQ ID NO: 200396 - protein, 429 aa, unidentified
MKWSSDVLLVGIDWGREEHAVCVLTVEGAVSAEWTIKHSGSALQTLTDRLTDLAGGEADRVYVCIELTRGSLVETLMERGFHVYALNPKQSDRYRDRHFPSGTKDDQRDAFVAADALRTDAHRLRELRPDDSLTIQLREHVRIYGELNADENRVTNRLRDQLQRHFPQLVTFNAAISDPWMLDLIEQAPTPAFARALKAGDISALLRKHRIRKFTVDDVLAMLRERDVFVTEGTVEAAADHIRLLIPQLRLILGQKRQVTRRLDEFLERLSAPERAEDSSSPEKVEHRDAEILLSLPGAGTIVVATMLAEASWALRERDYHALRAHSGVAPITKASGKRTGRRATVHRRMACDDRLSNAMYHFARVASQVEPAAKAHYAALRARGHTHGRALRGVGDRLLGMTIAMLKNGALYDSNKRRPAPPADRIVA

SEQ ID NO: 200397 - protein, 296 aa, unidentified
MNIVFLGIDLAKNVFQLCGLNQAGKPVYTKRTGRKELLQTLANIPACLIGIEASTGAFYWQREFEKLGHKVKVISPQYVKPFVRGQKNDGNDAQAIAVALMQPTMQFVPPKSPEQQDIQALHRARRRIVNHRTATVCQIRGLLLDRGIPIGSAVSRARRAIPLILEDAENGLSSRMRRTIAELYDLFNDLGRRIHFFDKEIETVFRQSEACQHIAKVKGIGPKTATAVAAAIGKGTEFKNGRHFAAWLGLVPRQHSSGDRQVLMNMTKKATSICGHFLFMVPALSSGVPRITMMVI

SEQ ID NO: 200398 - protein, 409 aa, unidentified
MKHVIAFDVSKGKSTIVIYNEDRQCEFEGELHHTRFDFEQLHQRIEKMTALDGQPPEIVFEATGVYSKPVEEFLRDHGYTYYRMNPLEASLQMASMRRHKTDSSDAHELAKTHFKVERETTYVQDTYYEQMRAITRYYDEVDKEIILLRSRMHAILHGSFPELEQLITPSSALFLNFVQLYPHPALLLAHSKTIIKNRLKSNTRKKLSLERAEKKAIVLLEAAENSYPSIKPTDIRCIQVSDYARRIADLMETKDKLVKQMVTMSEDKKEYKVLLSIPGIGDTTACRLIGELGDIRRFQNAKQINAYAGIDIMRYQSGNTQYRDRINKRGNKKLRKILYFMVCTMLMAKGKGEENHFVDYYYKLKTQPQKKHHEVAIVACMNKFLKVAFHLITHGILYDYESALPALKS

SEQ ID NO: 200399 - protein, 367 aa, unidentified
MTAASTPTKTRRKVNETRYIGIDVGKRRCQACIIDDEGSVRDEFNFNNASDGIQTLLDRASSTGCKAVLESTGNLWIRLYEVLEDRGIEVKLANPCKTKAIASATIKTDKLSARILAHLLRANLVAECYVPPRDVRLVRALLRQRESLIRIQTMVKNQVHALLDKYGFKSEWSDLFGMHGMESLRNMQLDQVDRCILDTHIRHLECLKSEASFLDSKIASHTIRSEDAKLLMTLTGINYHSALLIAKEINDIRRFPSPKQLVSWIGLCPSLHQSGNSLYMGRMKKDSNKKVRWILTEAARVASKTDPRMKQLYERAASRSGENKAIVRVANKMATIIWHMLTKRQPYHQMKHELYQSKLKRIHAIAS

SEQ ID NO: 200400 - protein, 358 aa, unidentified
MTDLTRMVTGGVDTHKDIHVVAAVDELGRTLGTESFPTTTAGYRRLLRWLGSFGSLELVGIEGTGAWGAGLARFLSARDVRVVEVHRPNRQHRRRYGKSDPADAIGAARAALSGEANGAPKAANGAVEAIRLLQVARRSAMKARTQAANQLHAVVTTAPEPLRASLTGLGTTDLVERAARLRPGAITDPTAAAKLTLVTLARRWLGLTAEIARLDGHLDELTTTTASTLVALNGVGTQTASALLTAAGDNPDRLAREGSFAALCGSSPIDASSGRQQRHRLNRGGDRQANAALYIIAISRLRWDPATKTYMQRRTAQGKTRKEVIRCLKRYIARQVHRAILNDLTRPQHAATPDLRAA

SEQ ID NO: 200401 - protein, 349 aa, unidentified
MIWIGVDAHKRIHQAVAIDERGIRGERRIANTPEAWAELHAWAMQWPARIWAVEGAWYLGRGLAQYLAAQGEPVHEVSGRITARRRGGMVRRGKSDRLDAHAVATVLREDAARLPRVLPEDDASATVQLWSRMQAEVTKDLTRLMNRLHDLLLLCDPEYKGKLPALTSKAAIAALRTSVAPGSTTLARERELVIRQTAEQLALLDAHDRELRRKLERASRSTFRALRQIEGVGTVISCGLVAEVGRPRPGFGEEQLAALAGVSPLEASSAGALRHRLNRGGNRRLNMFFHQIVLTQGRMYPPAQTYLARRRAEGLTEREARRALKRLVVRRVFRALCSCFDRSLERVAA

SEQ ID NO: 200402 - protein, 350 aa, unidentified
MMIIGCDYHPGFQQIAFADTETGECGERRLQHREEAEKFYRDLAAQGMKVRVGMEASGHARWFERLLSELQFELWIGDAAVIRTKRVRKQKTDRQDAQLILQLMMEDRFPQIWVANWENRDVRQLLWHRHRMVQARTRIMNQLQAVALNEGLRCKKRLWREEGRAQLEAFRLAPWASRRRSDLLELLDRLNPTIAELSQAIEQEAEKCPVAQRLRTHPGVGSLTALAFVLIIGRAERFQCGKQIASYLGLVPSEDSSGDRRRLGHISKQGNALLRFLLVEAAQVTVRSLPEWRSQYFHLAMRRGRKIAKVAMARKLAIQLFWMMRKGWDYEQVRRFGPHAGQPENRRGVQ

SEQ ID NO: 200403 - protein, 435 aa, unidentified
MARRNAKLTQLREQVRKDLAIVAVDLAAGEQAAVVADHDSRVLGRRKFRGPARRIEAILDWAAPIAASAGFAGVMVACEPTGHRWKVVLQAARGRGLPMVCVQPMLVARAREAEDYTGNKSDYGDAVIIARLVAELRCYIPYLPAGPWARLRHLGVRRAQLLDRVTAARQCLLDLRECAWPSVLGAAAQPAESLTWRAALTVSASPRVIAAMSRGEFTAAVRRQLPAAAGKRISQRIATAIHAAAAVPGGIEAEQEALAERAGFACADWLAALAELRRVEAHMVQILDELHLTHLVTTIPGISAVGAAAILAETGDPARYDDPRAWVKHAGLAPRANESGTFRGATRTTGRGRPRLRTAAWRAIWGALPHNPVYTSRHAHLTGRGHNKLNDGKARSALAAALLRQLFVVITQRVPWDPVIASGAALPGQVTATAA

SEQ ID NO: 200404 - protein, 360 aa, unidentified
MAMTIVEAAPAITGGVDTHLDTHVAAALDSLGGLLGTASFEVTPAGYRALLDWLEGFGELRKVGVEGTGSYGTGLARYLRSRGVEVIEVDRPNRAERRRSGKSDPLDATEAARAALGGRAKGLAKSKDGAVEALRVLLVAKRSARQARVKAITQMRHLGITAPDELRERLHGLTAKALVSEASGMRPGRSVDVVTKATKTSLTSPAHRVQALDEEIAELETMIEHLVAETAPELLERFGIGPDTAASLLVAAGDNPERLRSEAAWAHLCGAAPIPASSGKTSGRHRLDNGGDRQANSALWRIVMVRIAHDPRTTAYFERRVKDGLSKRDAIRHPEALRRPRGVSLPASRLAPRSWAWLSP

SEQ ID NO: 200405 - protein, 338 aa, unidentified
MRSYAGIDLHASNSYLGIIDTDDNRLFGKRLPNQLDTIRSALKPFGKGLAGVVVESTYNWYWLVDGLQSVGFKVHLANPSAIKQYEGLKHTDDQSDSFWLAQMLRLGILPEGYIYPRKDRPIRDLLRRRLLFVKQRTSQILSLQSMATRNLGINISSNEIKKMKEASAQDLFDDPDLAFTAMNNISTINFLKTKIKNIEKRILSKTRLSPQIEVLTTIPGVGNILGLTITLEVGDIGRFVKAGNYSSYCRCVKSERTSNKKKKGEGNRKNGNKYLSWAYVEAAHLATRFCPEAKRFYQRKMAKSNGAVATKALANKLARASYYMMRDQVPFDKDKLFC

SEQ ID NO: 200406 - protein, 338 aa, unidentified
MVVIGIDPHKGSHTAVAIDEDETKLDEVRVSADRRQLEALRSWATAFPERSWAIESANGLGALLSQQLVSAGEEVFDVPPTLSARVRVLGTGKSQKNDPNDALSVAIAALRSDRLRLVVAEDHLAVLRLLWNRHKNLTSLHTQAVCRLHALLAVIVPGGTRRRLSAEKAAAGLSGFRAKTAVEKARKPQAHDLVGGVRRLDALLKASKRTIVEALAAVPTSLGELSGVGPVATCIILAHTGDVGRFGSEDNYASYNATAPIDTSSGPRKRHRLNPRGNRQLNHAMHNIAFSQLSHAGPGRDYYERKIAEGKTQKEAVRALKRQISDVVYRQLVRDGQR

SEQ ID NO: 200407 - protein, 334 aa, unidentified
MDKVWVFVGLDYHQDSVQVCVLDSGGKMLGNRVCDNDPRRVAEYVATHGRVRGAAMESCEGAADFAEGLIAAADWSVDLAHPGYVRRLRQNPDKTDYSDARLLADLERVGYVPKVWLAPQAIRELRRLVRYRRQLVNERRNVKLRVRALLRAHRRGCAAPRWGVAWFQWMRAVELPEQSRWILDRHLERLQQLNGEVQAVEERLDAATKDDPVVQKLMTLPGVGPVTAWVLRAEVGRFDRFRSGKQLARFCGLTPWNASSGSRQADAGLIRACNHDLRSVLIEAGHRLKRCDPRWSALAHQLRQAGKPGSVIAAAVANRWMRWLYHEMTSAQAA

SEQ ID NO: 200408 - protein, 337 aa, unidentified
MNGIAARFGVDTAKNVFAIYGVDKFDKEVVSKVVSRKKVLAYFANISPVIIGIEACGGSHYWARELSNLGHEVRIISSQFVVPYRHKGKNDINDAQAICEAIGRPGMHFVAHKSEDQQSILMAHRIRSLSIGRRTALINQIHGYLHEFGIVVSKGRHKLKRDLHEVLASDKLPDIVIELLHGLLIGLIREEENIEHLDSMIESWAREDERTLRLLELEGVGPLTASAVVATVGDPSMFKNGRQMAAWLGLVPSQHSSGGKSRLGSITKRGDRYLRMLLIHGARTVLLKSSRGTAKHQDWIESLRLRRPDNVVAVAYAAKQARMMWAIMMGKQQLTAS

SEQ ID NO: 200409 - protein, 335 aa, unidentified
MSNYSLIIGCDVSKSVIDVSYQPIGVNTSTYLGQLANSKDGFKEAINLLKLKTKSPTSKWFFCFENTGSYSSNLFKWLVAQGIPCKQESPIQIKLSLGLRRGKDDKTDSISICQYAYEKRNVLVPSELEQSAITKLKKLLSRRELLVKHRVALKISLKEQKGNIDDDLFDLLSQDNIELINMYDIKIKSIEANIKTMIDADEKMENNSRLLNSVIGVGFITSSYMIAYTNNFKAFTDAKKFACYCGVAPFPNSSGTKRGRTQVSHMANKKIKSILSNCILSSINYDPEVKRYYKRKKEEGKATGIVLNAVKNKLLHRMFAVVKRGTPYVKLMSYA

SEQ ID NO: 200410 - protein, 365 aa, unidentified
MTSFIKQCVGVDCAMEELVVTVAGLTESLFVQEIGFTKVANNKTGFLKLFSWIKSLTSKGIKPVFVIEATGVYHESFAHFVVDYGYDISVVLPSKIKHFRKSLDIKTDNDKTASFGIAHFGLSRKLDLWKKPDPTFKALRSLIRERNQLLEESTSANNQLHAVNHSDEQNPRVIARLQARITFCKKQISEIEKDLITAISDNQSLKSRLENLCTIKGVGLLTTIAIIAETDGFALIRNKRQLVSYAGFDVVEKQSGISVRGKARMSKRGNKNIRKALYFPSMSAVRHDPGMKNDFARIVSRSGIKMKALVAIQRKLLVLIYTLWKKNEPFDPDYNQNEDFENKSGWSSLTNPTELAIAALEDKNN

SEQ ID NO: 200411 - protein, 369 aa, unidentified
MVSSRFLNGVKCATMEGVTHHLNEAQEETEMNITTIGLDLAKNVFHIVGLDEHGHEKMKKRLSRRQVLKHFAQCPACVIGMEACASSHYFARELRQLGHTAKLIPPQYVKAYSRGQKNDTNDARAIAEAVRVPSMRFVAVKTVAQQDLQALIRLREGAINARTAGANRVRGLLGEYGLVTGKSLGALHRALPLILEDASNGLTEVFRRLLNQQRQHLLELDAHIAMLTAELTALSKQDDRVGRLQTVPGYGPIVASVFASVMGDGAQYRRGREASASLGLVPRQHGSGGKNVLLGISKRGDRYLRSLLIHGARAVVYAARKKDDPLSRWINRRRETRGMNKATVALANKLARIGWAILRHGTTYQPAPA

SEQ ID NO: 200412 - protein, 337 aa, unidentified
MNIKALGIDTAKHVFELHGMDETGKTVLKKRLSREKLPAFIAQLPTCLIGIEACGGSHNWARKFKQLGHDVKLMNPQFVKPYVKSNKNDSHDAQAICEAVQRPTMRFVGIKNIEQQDIQAIHRIRERLVKQRSALVNQIRGLLAEYGVVIAQGIGHVRKRLPEILEDMTNELSDMGRQLFNDLLIQLYDADNKVEEYDIRVDVICKQNEICQRLIKLKGVGALTATALVASIGDASVFKNGREMAAFIGLVPKQRSSGGKQTLLGISKRGDRYLRCLLVHGARSVLTRAKNLPPKKAAWLKSLEERRGRNRTIVALANKNARVMWALMAKQESYKQD

SEQ ID NO: 200413 - protein, 347 aa, unidentified
MTQAQIYIYGIDLGKNWFHLVAMDRMGHVLTKQKLTRSQLKQFISTTPPCRVAFEACPGSQYWGRLFQQAGFEPKIIPAQFVKPYLKSNKNDFNDATAIAEAGSRGTMRCVPLKSHEQLALQATHRVRQRFIVERTATVNQMRALLLEYGLTVPVGRKVFERSLPRILEDAENGLPDFIRALVLRLRKRWQQLDIQIDDMSLMLGQASSASGLCQKISTVPGIGPIVSTALIAAIGNGSQFKKARDLSAWLGLVPRQYSTGGKSSLGGISKRGNSYLRQMVIQGAKALKIHMKRDKSSLGEWVARLEAGHHHHVVLIALANKIMRICWKVLTSGRDYQPYPNASAAV

SEQ ID NO: 200414 - protein, 372 aa, unidentified
MVWTAPYGIALCQDEAVERSQTREPSVNQIIRIGMDTSKHIFQLHGVDAAEQPVLRKKLRRSEVLTFFAKLAPTVVGIEACGAAHYWARMLIGLGHQVKLMAPQLAKPYVKRNKNDGRDAEGLCEAMSRPTMRFVPVKTPEQQAALMLIGVRERLVARRTQLSNAIRGYAAEFGLTAAKGLDKIEPLLAEIAANEALPKLARELFAMHGKEYAHLQAELKKIEARLMAWHRANADSRRLAGIPSIGLIGATALVMKAPDPHLFPSGRHFAAWIGLTPKDHSTAGKLRLGKITRAGDEMLRSVLVAGATAVIQQAKLGRGRPSPWLLALLSRKSPKLAAVALANKTARIAWKLMVTGESYHAERMPMASANAA

SEQ ID NO: 200415 - protein, 428 aa, unidentified
MTQSIYNMGSVVLVAIDIAKARNDVLVQFPDGAKRKFKVANKLADYQEFTSYLKSLDLPCLIGFEATGNYHRPLAYYLESEGFALRQVSSLAAAKTREALYNSWDKNDSKDAQVILHMLKTGVSQTYCDPMIHNFNEIQELSKAYYQVSLRKVRVQHSMMTHYLPLYFPEAQKYFHSSRAEWFSNFLLRFPVPASVIKHSKGQFISDAWDTVGRKVSKTAWLTDFYETAHHSIGLPVVEDSEAVRMFRLILQEHIDLCKMRQQIEQQADRYMGDNEDYHRLQTIPGIGPITALTVLAETGDIRRFSHHKKYLKYCGLNLSTERSGRFRGITKLSKRGNSRLRLAFWLAATVAIRMRENTFRQKYENYIKSDPSNKDLKRKAYTAVAAKMARVAYSVIKTNIDYRCFYEAAIPSGKIPSPRAVEASLTS

SEQ ID NO: 200416 - protein, 387 aa, unidentified
MPQPNDLSRSLVALDQDSTIIAVVEMSQSSWLVAGMLPGIERQPRKKLEPSAERLLGLLHRWRDEAVRAGKKITRIALAFEAGRDGFWLARWLNARGVEAHVIHPSSVAVSREHRRAKTDRLDTELLKRGFLGWLRGERGHCSMARVPTIAEEDAKRPNRERECLVGERTRIVNRMKGSLARLGIRNFKPTLRKAAERLATLQTPEGSPLPPNVSAELQRDMARLRFVISQIREIEEARQKRLEQEPETGSHAMVRRLARVVGVGIETADMLVHEVLSRPIRDRKAVARYAGLTGSPDESGAKRREQGLARAGNARVRRGMIQLAWRFLLFQKESALARWYRARTADSRVGTRKTMIVALARKLLIALWRFVTTGETLEGVILRPAG

SEQ ID NO: 200417 - protein, 387 aa, unidentified
MEHVVIGMDPHKRSVTIEVMTGTEQVLAKQRFDTTTAGFKQLLTYARQWPDRLWAVEGCNGIGRHVASRLVVAGEQVVDVPPKLSARLRMFDTRQGRKTDPDDAHAIAMVAVRMNGLRPVVNDEQHDLLRILADRRRALGEDHTRMTSQVHQLLLELIPGGAKKDLSAAQARVLLAGVRPRDLVGKTRKRVALELVGDLEKVYQRSKALDKEIKQLVIETGSSLMDLHGIGPSSAARLLIEVGDINRFPDRNHFASWNGTAPLDASSGDNTRHRLSRAGNRQINRALHVMAIVQLRNPTEGRTYFDRRKAAGKTSMEAMRSLKRRLSDIVYRTMVADAIAVGAGPGGQRGNDSDSSAAGLPPHTGTSEKPQPGPATPSLRPALPAAS

SEQ ID NO: 200418 - protein, 367 aa, unidentified
MKKVSTAAMKQSRNISRQTLTIGLDLGDRNSWYCVLDETGQIQLEQRVRTTAKALQEVFGAMPRSRIALEIGTHSPWISRLLSELGHEVIVANARKVRLIGERRKKDDRLDAQTLARLARIDRELLYPVKHRSVQAQADLMTIRARAGLVRARTALVNTARGLAKSYGERLRGCNVRDMNPEKAESLSPELQAALEPLLNALESLSERIVEYNDRIEKLAQQSYPQVALLKQVKGVGTLIALTFLLTLEDPHRFRKSRDVGGYLGLQPGRRKSGESEPQLHISKEGDPYLRTLLVQGAQHILGPFGIDCDLRRWGLKLAERGGRNGKKRAIVATARKLAVLLHHLWVSGEVYEPLHNSSRVKLTAAA

SEQ ID NO: 200419 - protein, 337 aa, unidentified
MSAQVYVGADIAAEQITIDWLDTQTQTGEQLSLEQSERDYARLLKRLTRQAQPAAIHVVMEATGNYWMAFASFLHAAGLIVSVLNPSQARHFAQARLQRAKTDPVDAALLRDYGRLLQPDPWVPPPPICQQLQQLLNRREDLLQIRTAERNRLHALHHHPLADPVLRRQLQHHIAYLSRQIDALKRAIQQLLFSDHDWAEAVKHLRTLKGLGDLTIARILTATHAFARCASPDEAASFAGLAPHPRDSGQHKGKRSVGGGGHAPLRQSLYMAALSASRFNPVLKVFYSRLLQRGKLKPVALCAVARKLLHIAWALVVKHCDFDPDFYFKSLEAQLPT

SEQ ID NO: 200420 - protein, 373 aa, unidentified
MYYNTLFVGMDVHKETFSLCCYDLQQDRIFHAQKMEADYKKVLNYLNAVRKAIGKDVQFVCGYEAGCLGFTLYHQLTRYGVNCVILAPTTMLKPAGKKKVKTDKRDAENIARCLAYHTYSPVHIPSEQDEQVKEYIRMRDDHKLALKKVKQQILAFCLRHGYVYTATKHHWTSAHLEWLQALKPEGLYGEILSEYLLTYQTLAEKLERLDRRIEELAKDDAYEASVKKLCCFLGVKTQTALATIVEVGDFKRFPSAERFASYIGLVPGEDSSGGDQNRLGITKAGNRHVRMLLVEAAQSFSRGQVGYKSAALKQRQAGNAPEVIAYADRANERLRRKYYKMVLGQSKRSNVAKTAVARELACFIWGMMTGNVA

SEQ ID NO: 200421 - protein, 431 aa, unidentified
MKYKHARKQNQRIQQITESTLVVGADIAKKTHVARAVDFRGIELGKDCVFGNDHQGLTKLVTWMKELQRRHHKTEIVLGIEPTGHYWFPLAEYLQREGVRVVVVNPHHVNKSKELEDNSPTKNDYKDAKVIADLVRNGKYSEPKLPMNVYADLRILMNLREKVMVNFGQVQRRIQNWLDRFFPEYGQVFKDWEGKASLITLSEFPTPSEIVALGVGAIVRRWKEDVKRAVGPKRASQLLETARTSIGLKQGLAAAKIELKTLLEQYEMFAKQLEDIMMEVERLLAQIPGTKEMLTIPGVAIVTLAGFLAEVGDLSGYDHGQQIIRLAGLNLKENSSGKKKGKSTITKRGRSRLRALLFRAVMPMVAKNAEFKALHQYFTKRSHNPLKKKQSIVALCGKLIRVLYTIGTKRIPYQPSDVLGPVRQAQLQMAA

SEQ ID NO: 200422 - protein, 339 aa, unidentified
MNIVTCGIDLAKNIFQVHGVDDNGDIVAKKQLKRAKVLSFFVKLKPCLIGMEACGGAHYWSRELTKLGHTVRLMSPQHVKPYIKGNKNDANDAAGICEAVSRPNMKFVGVKTQEQQDILMLHRIRSQKVKNRTALVNQIRGLLSEYGIALTKRIEPLRRELLVLLSESVDDKLSELAKRNFYQLYEDLLVLDDQIERVENELKETTKNSNDCQRLLTLPGIGWITASALVAHIGDINQFKNGRELSAYIGLVPRQNSSGGKNVLLGISKRGDAYLRTLLIHGSRAVLMHVGKKTDKDSEWLAEVAARRGSNKAVVAQANKTTRKVWALLSKQTVYKIAA

SEQ ID NO: 200423 - protein, 368 aa, unidentified
MNSVKFIGMDVHKKTITIAIAEEGSRDSARVYGTINNDLDALDKFCRKMLSTASQPHFVYEAGPCGYSIYRHLTRKGFDCIVAAPSMIPKKNGDRIKNDHRDAKALARLHRSAELTAVYVPDTQDEAMRDLCRAREDAVIATRKAKQRLNAFLLRHAIIYSGKTNWSKAHFNWLSDLTMPHCAQQIALQEYIDAVHENLNRVQRLTGQIQQMVPEWRLAPIVNALQSARGVSLIVATTMLSEIGDLGRFQNPRQLMAYLGLVPSERSSGCTIKRGTITKTGNKHARKVLIEAAWAYRMQPRVSRALKKRQETLTDPIRQIAWKAQLRLCARFKKLMARGKSNKLVVTAIARELSAFLWAIAKHQQLMT

SEQ ID NO: 200424 - protein, 345 aa, unidentified
MQNMYYIGLDVHKRTISYCVKDGSGTIHAEGTIPATRFDLDRWMKTLPQPWIAAMEATVFTGWIYDHLQPHAVALKVAHPLMLRAIAAAKKKNDRIDASKICDCLRCDFLPECYMASTAIRERRRTLRYRNLLVRQMVQMKNKIGMLLMEAGVSYNKQRLHKAGYFRELLATNPDIDEGLCSLLRLCRETVVRLQRTESALVRLLERDSLLMDRVERLMTIPAVGPITALTWALEVGDVQRFSSIKKAISYCGLCGAEKSSANTVQRTPLSKQRNKHLQCTLIEAAKMAPRYSPDLAMLYDREKQKGNANRATLAVARKLVAYLMAVDRGQRNFQVMETSSGIAA

SEQ ID NO: 200425 - protein, 371 aa, unidentified
MKQYSTFVGMDVHKNSIEIAIAQRGRNGEVHNYGNIDGTLEALDKVVRKLVSKSGPLHFVYEAGPCGYEIYRHLTAKGYDCAVVAPSRIPKKSGDRIKNDRRDACMLARLDRAGELTPVYVPFAEDEAIRDLTRAREDAKTDEKKSKQRLLSFLLRSGLRYTGKKAWSKAHIRWLSDIKMPHPSQQIVLQEYIDTITECSLRVHRLTEQIRQTLPQWRMFSVVKALQALRGVSLIVSATTIAEVGDLKRFENPTELMSYLGLVPSEHSSGEKTRRGSITKSGNGHVRRVLVEAAWAYRLAARVSRVLLKRQEGLSKEVCDISWKAQVRLCSRYRRLWAKGKPKQVIVTAIARELCAFMWAIANEIQVSAAT

SEQ ID NO: 200426 - protein, 344 aa, unidentified
MDITTIGLDLAKSIFQVHGVDANGRVVIRKSLRRAQMLPFFARLPSCLVGMEACGTSHYWARELIKLGHEVRLMPPAYVKPYVKRSKTDAADAEAVCEAVTRPTMRFVPVKSPEQQATLSMHRARDLLVKQRTQLVNMIRGLLAEFGINIPKGLERALLMARRIVDDEAPDVPIEAAKIVGTLSQQALDIHVRLRQIDRDLLVWQRGNDVARRLMTIPGIGPVGATALAASVTDPHQFRSGRQFAAWLGLTPLQKSSGGKERLGRITKMGDKYLRKLLIVGMTSLVRRAKDNPPTIDPRLANLLVRKPVRVATVAMANKTARIIWAIMTRGETYRASHQPALAA

SEQ ID NO: 200427 - protein, 326 aa, unidentified
MFFIGIDVSKAKLDCCLLLDVASNKRRAKVVANSKTGIIDLLAWCTKQQVPVHELHAIMEGTGVYHEQAALALSDAGATVSIVNPAQVKDFGRSLGVRTKTDGVDSFVLARYGALLKPKSWTPPAQEARTLQALLSRREAIAQDLQRERNRLEKADATDTPSLIRQSIDDSIDFLEKQLTKLQQDIDDHINKYPNLKDDRGLLMSIPAVGPQVSNHILSVMHNHDFQSAEQLAAYLGLVPVERQSGTSVQGRPRLSKAGPARIRAVLYMAAIVATKHNPHVKALYQRLQERGKTKMSALGAAMRKLVHLCFGVLKTREAYQADYAI

SEQ ID NO: 200428 - protein, 421 aa, unidentified
MKTWNEVTHFAGFDWAKEHHDLLVLDAAGRIAAEFRFDHTPDGWEVCRKRLAEFPHLAIAVESGQRLALERLVSMGHRIYPIHPRSSKSYRTRKLPSGTKTDRADCWALADAVRLEGEAWTPLQTPEPLVQQLRLLCRDEVALIEQRTALVNQLQQALYEYYPAALAAFDNWCAPSAWAFVEAFPTPQALVQAGQRQWQKFLFAHGLRRRETNEKRMTIFAQADQFCGPTPVIAAKSALAVALAKLLHTLELQLTRYRTLIDECFQAHPAHTIFASLPGAGTKLAPRLLSELLVLPALAEQPQTWQCLAGMAPVSYQSGQVSVVHLRRQCNRFLRHAVHLWVDLSRHSCDWAQIYYAAHRQKGQSHACAVRCLGMRWLKILAAMIRNQTPYDAALHARNQLQHGSWVLQLQPDQPVANHAA

SEQ ID NO: 200429 - protein, 410 aa, unidentified
MTESAYQIFVGIDWGNQTHQVVVLDAARRPVDERVVAHDGLALQTLARWVAGLAPPGTVAVAIEVPHGAVVDTLLEHGVPVYALNPRQMDRFRDRFTAAGAKDDRRDAQVLAAALLTDQPAFRRLQPDDPVVVQLRELTRMAAEVQEDIRRLANRLREQLLRFYPQALALCPAADEPWFWTLLALLPTPAAAARRRRGTVATLLREHRIRRVTADEVLTVLRRPPLTVAPGTIDAATAHIALLLPRLDLAAAQRRACAAQLDTLLATLAALGEQQGHRDVTILRSFPGVGRTVAATMLAEASQLLATRDYHRLRAYGGAAPVTRQSGTRRSVHMRYACNQRLRNALYYWAFIAARHDPVTRQHYQLLRARGQSQGRALRGVVDRLLLILIAMLRTQTLYDAGRRQPQAVA

SEQ ID NO: 200430 - protein, 419 aa, unidentified
MGKRRNRVCGADIHNELIVATIQCSDDATLREEFGTTRSELERFKAWVISNGCEQVAFEATGAYWFPVYDVLSPSIDTVVGNPWMIKGLPKDKSDDLDSKSIASFCLNGQIKRSRVFSTDDRDLRTMTRARSGYVKTRTQFRNRIHKYLALRGIKLRSGIRGIFGKSGRHVLNGLVDGESTDTILDGIPSGRIRKKREIIKDGISIGFDDTTKLLVKDALEVLDNLEGRIENMSREILRRTLNKSKDLAIVMSVPGISFVSGSQILSEIGDYRDFSTPEQLAKWCGIVPGLNESAGKKRSCGITKQGSKHLRTILVEVAQVVSRMKNSKLTRFFKRLEARKNRNVAIIALARKLICLIYHLLVNQELYEDGLQKATKSKSKKKAQAQEPSSEDQLQDKVAAIVDAYYRLDAKNVSKGGG

SEQ ID NO: 200431 - protein, 362 aa, unidentified
MPQQSSWLIAGIVPGVERSPLKKLAVDESALLKLLNRWREEAEKAGHRIERIAIAFEAGRDGFWLARWLRARDIEAHVIHASSVAVSREHRRAKTDRLDTELLKRGFLGWLRGERNHCKMVAIPTLAQEDAKRPNRERESLVGEQSRIVNRMKAALARLGIRGFNPKLKKAVERLDGLRTPEGEPIPPNTLAELKHDMERRRLVRSQIRDIEGTRLERLEQAPGDGPHVMVRLLARVIGVGVETADMLVQEVLSRNLRDRRAVARYGGLTGSPDESGKKRREKGLARSGNARVRRGMIQLAWRFLLFQKDSALAHWFYARTKNAPQTRKTMIVALARKLLIALWRLVREGAIPEGVVLRPAL

SEQ ID NO: 200432 - protein, 405 aa, unidentified
MNAVGIDVSKGKSTVTIRRPGDVVLMPPCDIPHTQSAINALIEQIKNLDGETKACMEHTGRYYEPVANWLSDAGIFVSTVNPILIRDFGDDSLRAPKTDKADSKKIARYALDRWAKLKQYGSMDKTRNQLKTMNRQFGFYMDQKTAMKNNLISLLDQTYPGANDFFDSPARSDGSQKWVDFVYTYWHVDCVHCKSLQAFTEHYQKWCKRNGYNFSASKAEEIYQSSSDLIAVFPKDDSTKTLIRQAVTMLNTASQTVEALRLKMDQTAATLPEYPVIMAMNGVGPSLGPQLMAEIGDVTRFTHREALTAFAGVDPGKNDSGKRNQKSVRTSKKGSPSLRKTLFQIMDGLIKRSPIDDPVYAFMDKKRSEGKPYYVYMTAGANKFLRIYYGRVREYLASLEESKES

SEQ ID NO: 200433 - protein, 344 aa, unidentified
MTYFAGIDVSLKDSSICVVDADGKIVREVKLASEPEALVAFFGKVGFVVSRIGLEAGPLSQWLHDGLTRAGFEVVLLETRHVKAALSAMVVKTDRKDARGIAQLLRMGWFQPVHAKSVGARDVRALLAARKLLQSKLIDVELSIRGILRGYGLKMGKISKGRFEARVLKLVEGHTMLEEIMAAMLRAREALRAQFAVLHRQILTIVRACPISRRMMTAPGVGALVAITFKSAVDDPHRFAKSKSVGAHFGMTPKKYQSGEADVTGGISRVGDVAVRTALYQAAHIILSRATPFSSLKSWAMQVAKRRGLQRAKIACARKLAIILHRMWIDETDFRWGRETTAAA

SEQ ID NO: 200434 - protein, 358 aa, unidentified
MLHLGIDLHQSQITIVLLDEAGEILRRATISTKPPAIDQFLASINQQAKDLGGYRAIVEECGFTHWLIERLKMHECDMIVLVQPLKRDRHKTDRRDASKLAEILWVNRDRLQAGQRLHGIRQVMIPTEDDRQNRLITSARVRLGRDRSRVITQIKALLRQFNLMHDCPTKRLDTKRARAWLLEIELPRSDKLILDLAVERWNMLNDQIGRLDEDIDHRAEQSTAAQLIKTIPGAGNLTALCLASRIGSIERFPRPSSLANMFGLTPSINDTGESTGRLGAITKHGHPHARFLLGQMATHVTRRDPRLRAIRRKIRKRRGAKTAIVAIMRRLACCIWHMYQTGEAYRLGTAPRANTPGA

SEQ ID NO: 200435 - protein, 400 aa, unidentified
MRNNAFVPSDYDVFSGLDVDKRSISATFNNQQGHIRSLRMPNSVEHLVNHVRKHFPDQKVAFVYEAGPTGYGLYDGLVAQGYRCLIASPSMIPKAPGQRVKTNRLDSVGLAENLRGGQLKSIHVPSPVYRELRHLTQLRDTFVSAMVGMKQRIKSLLLLEGIEFPPAPAGSQWSIVVKHKLRKLPCSCTVRFKLDQLLDSLEFNEKQVVKTTQQMRRFCQNDPELSRCMGYVMSVSGIGRIVASQLLARIGDWRELKNVRQLGGFLGLVPTEHSTGDRTDRGSITQTGDGRLRSKLIQASWSAIRQDSELREFFASVCKTHARHIAPRVAIVAVARKLSVRISVVLMKQRPYVVREKVHSAPLTQEETSPQGTTRRKPEPGEPKLLTVRPLRQRSRGLVP

SEQ ID NO: 200436 - protein, 365 aa, unidentified
MEHIAIDLGAKESQICVRSADGEILEERRIATRPEKLRRYLAGRPKSRVILETGAEAFWVAEIARECGHDVRVVASMLAPSLGVGRRGLKSDLRDARVLSETSCRVDLPSVHIPRVETRRLQSRLAMREALVRNRTQLVNVVRGYLRTIGERAPVRSAERLITELRQKLTYAAEHLQPVLESIEVLNRSVDKFDEELEKLASRDELAKRLQTVPGVGIVTSLRYMATLDVANRFANGAAVGSYLGLVPSDHSSGQTQRRGSITKAGSPAMRAVLVQASWAALLSRRHRNDPMISWALEIARRRGKKIAVVALARKLSGILFAIWRDGTEYDAGRAAKAIPTAAPRRLALCQGSRRLPRPDSVPAV

SEQ ID NO: 200437 - protein, 382 aa, unidentified
MQTIDTVNPTILLAIELSASTWLVAARVPGLEKPHLHRIDGGDTAALLALISSLRARAARGLDATIGVVCCFEAGRDGFWLHRLLTAHGVACHVLEPTSILVNRRARRAKTDRLDAEGMLRVLAAYLRGDHQACSMVRVPTPEEEDAKRTHREREKLVQERLRIENRIEALLFTQGIRKRPSLRSWERDLAVLRTGDGREIPRHLRAELGRLRRRLVMTLELIREVEAERDQAANTKPQDQTCHKIANLCRIRGIGENFAAVLTREVFYRSFDNRRQIASYVGITPIPYQSGGMDRDRRISRAGNPRARTTMIQLAWLWLRYQPGSELAEWFRERVGTLAGRTRRIAIVAMARKLLIALWRYAETGVIPAGAEIRAETTVAA

SEQ ID NO: 200438 - protein, 368 aa, unidentified
MNTFQTIVGLDVHKNSITVAVLKPGEGTRMEHWTIANEPAEIRKLVQGLARKGSPNFCYEAGPCGYPLHRQITDMGWPCAVIAPGMTPIRPGDRVKTDRRDAEKLARLYRAGELTVIHVPTKAEEAVRDLIRAREDALVDKLRARHRLMKFLLRQGRAYRETKSWGVNHRKWLNAQTFELPALQMTLETYRQTLSETESRLISMDQRIDAVADQESYRTPVSYLRCLKGVNTLSAMTLIAEVQDFERFKKPTGFMGFTGLVSSEYSSGQRILRGSITKTGNRHIRRILIEAAWHYRRPYTHSQPVAERRRGCPIEVIHIAHRAEDRLRRKYWRLIQRGKSPQTAVVACARELAGFVWAIAQRFPKKAA

SEQ ID NO: 200439 - protein, 422 aa, unidentified
MPSPPFSLFYHIFFLPGDFISGYLSKCSREGYLPSNSVATGPKYGTLKIVHERHGPDRCVHYPQQPGGSNILLGKILACSTPQDSIKVGLEATGHYSYNILGFLLDNGLATYVLNPLRTNLYRKSLSLRKTKTDRVDARTIAAMLLSDAGLKPYTDTAYHNEELKSLTRYRFDKVKERAKLKQSVSRLVCILFPELEKLVSTLHMASVYALLSEFPGAKQIAAAHLTRLKTLLADSSRGRYGRDVAVEIRDAAKCSIGSRMPAKSLELQHTIRLIRELDAEIEEIEAAIQTIMDELHSPITTIPGIGYRMGAMILAEIGDFSRFDSPDKLLAYAGMSPSTYQSGQLKNCYPHMEKRGSRYLRYALYNAAKYGCHWDPAFAAYLTRKRAEGKHYNVALSHAAKKLVRLIFALEKSRQPYCPAA

SEQ ID NO: 200440 - protein, 341 aa, unidentified
MQYLGIDWGTRRASWCALDEHGALREGVIPADQDGLARLALTVGTDEQVRGCIEMMSGAVWVRDQLARVGWDLRLADARKVKSIAPLACKTDRVDARVLADLVRRDLVPEVWVPDLDERANRERLRRRSHLIRLRTSAINRSFGLLTQWGLRRNLTALRKPDAIAELAGHGVPGVWLQSITTLLAVIDDLDRQLAVLERELRPVARADVRVKLLMSIPGIGELLGLTIASEIGDIARFPSARKLVGYSGLTPTIKQSGQSSRTGRLSKAGPDMLRWAAVEAAQQAWRPTNPWHRLYSDTKHRHGKSNPAKAAVARKVLIAAWHVLALQQPFKPAAGAIAAP

SEQ ID NO: 200441 - protein, 362 aa, unidentified
MAKAMTFAGLDVHARQTHAAVFVPATGELGVSKLRMAPEQVASFLVGLGPGVRAVYEAGPTGFGLARAAREYGIDVRVAAPGSIPRGSGDRVKTDRRDAVRLVRLLAAGELSFAFVPSVADECFRDLVRCIEDARGDLMRARHRLSKFLLRRGERYPGPGGAWTAKHLRWLRAHELGEACSQATFVDYLAAVELLAGRRGGLLATLERAIPESSQAPVIARLRCFRGIDTLSAAGLCAEIGDFARFPQPSRLAGFLGIVPSERTSDQKRRQGSITKAGPGHARRLLVEAAHHYRYPPRIGETLARRQHGQDARVLEIAWRAQRRLHQRWQHLHQQRRKPSGVVAIACARELAAFLWEAATLD

SEQ ID NO: 200442 - protein, 392 aa, unidentified
MVCVGIDVAKDKHDCFILSSEGEVLADVFTIENNREGFDTLLRQIRSCTGPTDKIKVGLEATGHYSYNILGFLLEKGMPPYLINPLHTNLYRKSLSLRQTKTDRIDARTIATMLMSDVDLKSYTNTAYHNEELKSLTRYRFEKVSERAKLKQSVSRLVNILFPELERLVPTLHMVSVYAMLSEFPGAKQIAEAHLTHFRTVLSDTSKGRYSREKAVEIRNAARRSIGSVMPAKSLELRHTIRLIRELDKEIEEVEAEIFSILDTLQSPITTIPGMGPRMGAMILAEVGDFSRFDSPDKLLAYAGLSPSTYQSGKLNATGAYAHMEKRGSRYLRFAIFNATKYVCIWDPTFKAYLARKRAEGKHYNVAISHAAKKLVRLIYAMQKSGRPYQPA

SEQ ID NO: 200443 - protein, 499 aa, unidentified
MEWDWRASEVGARRKTKQKPAMVEPVEIPDAEHELVVDQGAAIDVAKAAGKVCVRLPGKSGRRFSRVWDVPARTGAITELAEQLVELGIEKVTVESTSDYWRIWYYLLEDAGLDVQLVNSRDVRNVPGRPKTDKLDAVWLAKLTEKGLLRPSFVPPAPIRVLRDYTRLREDLIRERTRYWQRLEKLLEDAAIKVSAVASKLDTLSTRDMVEALIGGERDSRRLADLARGRMKTKRSELITALDGRFDDHHAELARLLLGQIDALTAQIGALSARIERLIDAMDESDHPTGDRGRSGGGGPQVTGAPSTGGQATAPARRTTTAIGVDSDTATVVEPQRLTAVERLDEITGVGQCAAQTIIAEIGLDMARFPTPEHLVSWAKLCPRTIQSGPVIRGGKTGKGNPYLKGALGEAAAAAARTDTFLGERYRRLVKRRGRLKALVAVARSILVIVWQLLSDPTARFHDLGPDYHTSRGVTERKIRNHIAHLTAMGFHVTFQPAA

SEQ ID NO: 200444 - protein, 465 aa, unidentified
MDGWYAVGGERGRSSPMNRKVYSAAGIVHVKLDLILKSRQKAEPVVIGVDVGKHELTAVLRWSDGCFERPWRVSNPNQIGLLRGLIVSLSQGRQLTVAMESTGTYGDALRQAMDDAQIAVHLVSGKRAHDYAEVFDGTPSQHDGKDAAVAAELCALGKRSVWKLDRGEDRSQRIELLVDQMAAAVECRTRWTLRMEGLLARHWPEASAVLGCSAGTMLKAMKHYGGPEALAKDPQARTQLRHWSSQKLSEQKLGELIESARTTTGVRLTRTDVQRIRWCAGEGLTASMEASRCRRELIDLAKDHDLIARQGEAIGVATACVLWRYLGDPRRYHCAAAYRKAMGLNLKERSSGKYQGQLKISKRGSGRVRQWLYLSALRLIRNEPRASKWYRRKLRKGGGGKRRLIMGLARKLALSMWAVSKSQQLFDVDRMLGPTGKKSVRKKAAGKQINRKQIHAKGAIKAKVH

SEQ ID NO: 200445 - protein, 410 aa, unidentified
MERVIERGCGLDVHKKTVAACLRVPGSHGERVQEVRTFGTTAAELLALRDWLEGHGVTDVAMESTGVYWKPIFYVLEEAFTCVLANAAQIAQVPGRKTDVKDCAWIAQLLEHGLIRGSFVPPAPIRDLRDLTRYRKGLIQERTRQANRLHKVLEDAGIKLASVATDVLGVSGRAMRQALVTGTRDPEVLADLARGNLRKKLPALRQALAGRFRPHHGFLVAQILAHLDYLDEAIDAVSQQLDVVMAPFADEVARLDTIHGVNKRTAEVIIAEIGVDMRVFPTAGHLASWAGLCPGNNESAGKHRSGTTRKGDPWLRAALVEAALAASTRSNRSAFGARYRRIMPHRGHKKAVVAVARAILETAYHLLARQTTYQEPGRDYYERRHAEHVRRRAIQALERQGYRVTLEPAA

SEQ ID NO: 200446 - protein, 335 aa, unidentified
MKFKAFLGIDVSKLVLDLCLISEDGSVESFKINNRTSYLRKFFDDLAKICSLKDVLVCAEYTGHYSNPLRAFCTENRISLWLESGAEIKHRSGIQRYKNDKVDAERIAEYAKRHQDRARLQTANEKVVRIAKLLTTEREMYIRDRAKYKAQLKDFKEFIEQDCYKRKSIRLKRQIRALTKLIEQIEGEIKGLFQENDKLSEQKKVLMSIDGIGEQVATQTIIATEAFTKFNRGRKFACHVGVAPFSFESGSSQRSRRKVSHRANKDLKRLYHMAALSAIKMEGEFREYYLRKVEEGKNKMSVINAVRAKLINRIFAVIRDNRKYSNTYINHLTNP

SEQ ID NO: 200447 - protein, 433 aa, unidentified
MNTPHPHDLVIGLDRSDKKADLHLITTATGQRRSQTIDTAPEALWEWLLELRQQHPQARVGLCLEQPAVHLIAFLESYDWITLYPINPITLQKFREAFVTSRAKDDAKDAQYQAELLLTHHDQLRPWAPEDSATRAVQQLVFHRRAVVDERTALTNRLIALLKQYFPQALVLCGEDLWRPLATRFLLKWSSLQAVQKAKPATLQQFYHLNGSRSAKLLEQRLALVAKAVPVTDETALIESFGLRVQLICRQLQLVQQTLRSYEQQMASAYAAHPDHELFASLPGAGPVLGPRLLASMGSQRERFEAAADLQQYTGIAPVTKRSGGSCYIHRRYLCPKFHKQSFHEYAKESILWSRWAAAYYLQQRTKGCPHHTAVRALAFKWQRVIFRCWQNRTPYREEIYEAALKKSGSPIVALFDQVELGKSPFKNPAKKS

SEQ ID NO: 200448 - protein, 372 aa, unidentified
MEERTKFHVGLDVHKESISVGAAELGRSPARLIGKVAHDVNKLLKVLARIGSAEQLHLVYEAGPTGFGLQRALKAKGYSCEIIAPSQIPKRPGDRVKTDGRDCLQLAECSRAGQLSAVWIPDPGDEAIRDLSRAREDAVNSRVQARHQLKGFLLRHDMRYTGKTSWSLAYYRWLSTLNFDAGAAQTAFTEYWHAVESADKRVERLTKALQSSITGWRFERVVRALQALRGVAAITAIGLVAEIGDLARFSHPRKLMGYLGLVPSEHSSGERTRRGSITKTGNAHARRLLTEAAWNYRFKARIGREALARQEALSEPIRTAAWKAQLRLTQRFAALRERGVQINKACVAVARELAGFIWAIGLHAQQEEAQAS

SEQ ID NO: 200449 - protein, 411 aa, unidentified
MVKENFIYVGIDLHKETHTAVMIDCYNQKLGEITFPNRPADFPKLVTKVKKCNTDAKEVVYGLENAYGYGRPLAVWLIDKGYFVKDVNTAISHRQAKHRGAMYRKSDSDDAEAIALATLNMLDKLPDACPNDAYWSLGQLVHRRDNIMKQRTRLVNQLHEQLCIAYPSYKQFFNDISRPTALYFWEHYPSRKYLKGKSVEDLRTELVPVSHNRCSTKNCEKILDAVASDKVKNNAYQDARDMVTLSIVSDLQHYDSQLAEVDKMLEQMYKMLGCTLTTIPGVNVITAVKILAEIGDIKRFSNANKLAQFAGIAPLHLSSSGKGKDVATKQGNRRLQATIYFLAIQMVQVSSKGTPRNSVVRAYYEKRKAEGKTSQQALICISRRLISIIYGMLKHGTEYRMPVVESAGEKL

SEQ ID NO: 200450 - protein, 405 aa, unidentified
MNAVGIDISKGKSTVTIRRPGDIVVMPPCDIPHTQSAINCLIKQIQSLDGETKVCMEHTGRYYEPVATWLSDAGIFVSAVNPILIRDFGDDSLRTPKTDKADSKKIARYTLDRWAKLKQYGNMDKTRNQLKTMNRQFGFYMAQKTAMKNNLIALLDQTYPGANDFFDSPARNDGSQKWVDFVYTCWHVDCVRSKSLNAFTEHYQNWCKRKGYNFSADKAEKIYHLSSDLIAVFPKDDITKMLIRQAVALLNTASETVESLRLKMNELASTLPEYPIVMDMNGVGSTLGPQLIAEIGDVTRFTHREALTAFAGVDPGKNDSGKHIQNSVRTSKKGSPYLRKALFQVMDSLIKRSPIDDPVYAFMDKKRAQGKPYYVYMTAGANKFLRIYYGRVREYLSALPENEEI

SEQ ID NO: 200451 - protein, 474 aa, unidentified
MVCASPLISWTGGASITPNGAKEQQCSGSTFLSFLFNEVPHAGGKPRENLMEVMHERVAGLDVHKETVVACVRIVAGRKVSRECRTFETTTAGLEALLAWLTQSGCTHVAMEATGVYWKPVWNILSDGKFEMILANAAHIKNVPGRKTDVNDATWIADLAAFGLIAGSFVPEEKIQELRSLMRTRKQLLREQTRHVQRIQKTLEEANIKLGSVISNIVGVSGRRIIEAIIAGVRNPQKLAKLADRRIKASPKALYEALHGRLTGHHRFMLQLHLGQYDALASSIEQIDAQVETAIRTKIDDEAASGQPPFHSLTGLLCTIPGIASLAATSILSEIGSDMSRFATDGHLISWAGLCPGQNESAGKRKSSRLRKGAPWLKTLLVQCAWAAVKKKDSYYKAQFNRLKSRGGPKKAICAVAASMLTAVYHMLKNGVEHQDLGAGYFDRRPATQKAKRLVAQLAKLGFKAELNPLAEAA

SEQ ID NO: 200452 - protein, 451 aa, unidentified
MLIQGSSDPPRLVRVGIDAAIVAQHEVCIRATDAEGRVRTDRFHVQPTLAGLRSLTDRLAQMPGVVAVAEPTSMTWLGLSVALAEAGCDLSLLGARHAARLRGAISGKHKSDVIDADVLARAGEVFDLHPLRPVDPAQLALRRACVRRGTAVIDGNRHLRRLISLARWAFPDVWNGFGGSLPTAVAVLQRWPHLAQLAAARRSTLTGVVALHTRGVSDVPERVEVIRSSAAAWASFWEGHVDLDALAFDVTEHLSDMATAKARIERATTQARRYWEQLYGDDELLMSIPGVGPVTACVIRGFLADGSAFPSAKAAASYVGLNPSTWSSGTVSQPSRAITKEGPAVLRLAFFQAANAARRQDPQLAGFYHRLMTAHGHCHTQACVAVARKLVERTWTVLHRGTPYQLRDSRGQPISHLEAKQVVKDRCTVPDHVRASARAHSAATNRGKLTR

SEQ ID NO: 200453 - protein, 360 aa, unidentified
MASATLTQPRPDSDFDAVIGVDTHRDFHVAVAVSPNGARLDEYQIPTNPRGYQALLGWSELFGNKPVFAMEGTNSFGAGLCRELLAAGFVVVEANRPDRSTRRRLGKDDGIDAEMAARAFLAGTAMAVPKSGEDQVEMIRMLKVAKDSAIDARTKAINQMRALLVTATPTLRERLDGLSRGELISTCAAFRAGALVGPLAAAKRALRTLARRVQVLDAELDELLKDLDVLTQEACPGMRQTYGIGVDGAAILLTAAGDNPERLRSEASFAALCGASPLPASSGNTRRHRLNRGGNRQANAALHRIAVVRLRYHQATKAYAERRRGEGLSNKEILRCLKRFIAREVFHLLMGRDPMRTAAT

SEQ ID NO: 200454 - protein, 311 aa, unidentified
MYYIGIDVSKKDLSVFDGKDLNFINKEGLKSFKKYLKKKYRLSEIAIIFEPTGIYSQYLKEFCAENSIKAYIVNPKQSHNFARALGIRPKNDKIDARTLYKFHKLIDLKDIKVPKIDQQAKTLSGYLVSYEFALKQRVALSNHLESLRDQELIALMKKDLKRAKKLEDKLFHDILEYVRQNQNLKEDYQRLLTISGVGDKTAIALLTLFKTYQGTNRAQITALAGLDPVKRVSGTSVKYKVKISKNGKGIYRKIFYLPTVCATVHNQKIRVFYQRLLANHKIKKLAIIASMRKMLLIAHAMYRDKTEYVSA

SEQ ID NO: 200455 - protein, 384 aa, unidentified
MSQDGVYAAGTPQRELGAIFTSIELSKKTWLLTSMSPGAGEKMSRHIIAGGDITGLFAQLTMLRRRAYDRTGSDYPFVIIQEAGLDGFWVHRALTAEGYESHVVDAASIATSRRKRRVKTDRLDGESLIRALLAFKRGEPRVCSMLRVPTPDEEDRRRIVRERKVLMEERIRHSNRIKGLLFSQGITDYDPLRRDRREQLETLRTGDGRALPLHMKRQVLREMTRMELLIDQIKEVEAERDDMLAEERQSAREVVLLSKVVGIGPEFAAVLWGEGLFRRFDNRRQVAAYAGLAPTPWQSGSIDREQGIGKSGNPRLRSTLLEMAWLWLRHQPASTLSRWFNERVAQNGGRFKKVMITALARKLVVALWKYASAGVVIEGAVVRP

SEQ ID NO: 200456 - protein, 418 aa, unidentified
MNNDDYAACVALDWGDKTHAFARQLAGAERIERGAIAATPEALHAWLEQLGKTCGGRPVALAVEAGRNALLHALLEHPWLTVYPVPSATSARFRTAFTPSGAKDDGPDAVVILTLLRLHRRQLEPLVLDTPATRELTALVVARRSAVDQRTRTTNQLGSVLKGYFPQALTLAGDDLTKPLARAFLRRFPELATVQKARPATLRAFYRAHNGRSAERIAARLELAARARPLLQDRALIAPALLEVALLVDLLAVHARPITLLEARIAEAFAAHPRAALFAALPGAGPALAPRLLVAFGDNLERYPDAQSLQKYAGVAPVREKSGGKSWTHWRWAAPKFVRQSFVEWAGQTVVHCAWAHAYYDQQRRAGKAHHAILRALAFKWTRILWRCWHEQKPYDEPHYLAALRHQGSPLTVALQKT

SEQ ID NO: 200457 - protein, 430 aa, unidentified
MMEEVDDAELVVERIAALDLGKAGLEACVRVPSPHRPGRRMQELRGYGTTTAQLLEMVAWLRHWGVQRAVMESTSTYWKGVYYLLEAEGFECWLVNAREVKNVPGRAKTDRADAIWLAKVAERGMCRPSLVHPAEIRRLRDLTRYRRALVQDRTREQQRIEKLLEDAQIKISSVLSELHGVTARAMMDALIAGQRDPRALAQLAKGRARKKTGQLEEALRGFFTDHHAAILRMMLDNTDRISAQIAALDARIEKEIGPFSHQAARLAEIPGVDAVAAAELIAEIGVDMTRFPSDAHLVSWAKFCPQTHESAGKSKSKGRGRGNPWLAGTLGRIAFANSRADTFLGARYRRLARRRGKQKAIVATGNSVLTVVYYLLSDPTATFCDLGPGYYESRINVHRRARDLVTQLQALTGQHIVIRDGKAVITDAAA

SEQ ID NO: 200458 - protein, 315 aa, unidentified
MDESRRVTTCVGIDVSKDRLDVHMLPSGEAFAVARDGKGLESLVERLTALDVSLIVLEATGGFETTVAAALAGAGLPLAVVNPRQIRSFAKALGRLAKTDAIDAEVIALFADKVRPQARPLPTSDARALGALVGRRRQIVEMIGMEANRRRHAADKRLAKTIDRHLAFLEKELAAVDADIDTDVRGSPAWREMEDLLASVPGVGPVTARTLIAELPELGDLDRRKLAALVGVAPFNRDSGAWRGHRMIGGGRTSVRNVLDMAALAAIRHNPLVRATYQRLVNRGRPKKVAIIACLRQLLTILNAIVRTKSPWKIA

SEQ ID NO: 200459 - protein, 344 aa, unidentified
MILIGCDFHPSWQQVCWVDTETGETEEHKLVHTPGEAEKFYRRFAAPALIGMESTGNSQWFVEMATAAGHEVWIGDAAKIRASDVRQQKHDRRDAALLLQLLVEGRFPRIWTPSSQQRDLRQLLIHRHKLVRVRAQVKNELQHLALNQGVQKKRRLWSAAGQKLLREIPLQPWAGRRREDLLKLMEMLDQQIQLLDQAVQDAAWHDSQARLLMTQPGVGPVTSLAFVLTMGDVSRFPRGKQVASYLGLIPREYSSGGHQRLGSISKQGNRFMRMLLVEAAQVAVRCDPQLRSEYLHRCHQKPKGVAKVAAARKLAIRLYWMLRTQKPYPEIVRIESSSRVPLVG

SEQ ID NO: 200460 - protein, 348 aa, unidentified
MARKATDQVTTIGIDIGKNTFHLIGLDGAGNIVLRRKLSRSQVIVRLANLPPCLIGMEACVGAHHLSRQLQALGHDARLMPAQYVKPYLRGQKNDFRDAEATAEAVQRPRMRFVATKSVEQLDLQALHRVRSRLVRHRTAVINQIRALLLERGIAVRQGYRFLRAALPDILGRETNLLSPRMVRMIADLSADWRHLDERLEAVTSEIEALAMADEACRRLMTVPGIGPIISSAMVSAIGEGAAFARGRDFSAWLGLVPRQMSTGGRTILGRISKRGNTYLRTLFIRGARVILLRPENWPKHSFGPWLQAASRRLHRNVLAVALANKLARIAWSVLAGERHYEARRTTA

SEQ ID NO: 200461 - protein, 347 aa, unidentified
MAVTIVETRAITGGVDTHADTHVAAALDPVGGLLGVEEFPVTAAGYARLLGWLGGFGTVCLVGIEGTGSYGAGLARHMAAAGVRVVEVDRADRQDRRRQGKSDSLDAVSAARAAQSGRARGAPKGRDGAVEAIRALMVAKRSARSERIQTINQARALILTGPADLRARFAKHTVTALVAETASLRPRPGDVVGYATRIALRELGRRAEFLGSQLERLDELIVPLVTARAPGLLDLYGIGAHTAALLLIAAGDHPERLRSEAAWAHLCAAAPIPASSGKTIRHRLNPGGDRQANHALWRIVFTRMGSDPATRAYAERRTAEGKSKAEIMRCLKRYVAREVYPHLRPAG

SEQ ID NO: 200462 - protein, 327 aa, unidentified
MKKTTAPVYVGMDVAKATLQVHLQGRQIQFNNDPAGHTQLCKKLSGLGTAHVICEATGGYEDAVARAFASAQIPVSVVNPAQVRHSAQAQGKRAKTDPLDAALLTDYGQRFQPKATPPPTAVQRQLEELTLWLTQTIQARAVAKAQAEHQTNAFVCAQHQQRLDHYSAQIKTVEAQIRALLKQDQTLAQRVECLDRIVGVGPRSAWLVLAHLPELGSLNRQQAAALAGLAPWPTDSGEVKGARHIRGGRHEVRRALYMPALSAARTNPVLEKFYQRLIARNKPAKVALTAVMRKLLVHMNAELKKLAAQPVEEKVEKCITTKKSLVK

SEQ ID NO: 200463 - protein, 372 aa, unidentified
MIVPIMTCERSTLVNSEKYIGLDVHQATISVAVMDSRGKLVMESILETKATTILDFFAGLRGTVAVTFEEGTWAAWLYDLLKPHVAKLVVCNPRKNALLKHGNKSDKIDARKLAELLRLNDLEPVYHGETGVRMLRELARSYLTIVKDLSRVMNRLKALYRSWAIPCAGRDVYYTRHRSEWLGKIPEAGTRRRAEQLYQQLDMLQHLRQQARRELLTESRKHAITAKLRKIPSLGPIRSALAVALIQTPHRFRTKRQLWAYSGLALETRTSGEHCYVHGQLRRSKKQISIRGLNQDHNHDLKGLFKAAATRASVQPGPFQDFYQRSLTKGIKPTMARLTLARKIAAITLSMWKKGENFDAEKLKSQPLERLR

SEQ ID NO: 200464 - protein, 388 aa, unidentified
MLPVIDALEVQKGRPAMKQNTTELENPRRRVVRKNKQRELTIGVDLGDKTSRYCVLDREGNVLFERSTATTKKGLAQAFASMGASRIAMEVGTHSPWVKRLLESWNHEVIVANAHRVRLITESTRKDDRLDARKLARLARVDPELLSPIRHRSEGAQAHLVMIRARAVLVEARTKLVNSARGVTKSFGERLASCDPDQMRVKCLVGLPSSLQSALQPLVTAVESLTRQIHEYDNKIAQIARSEYPETARLRQVTGVGELIALTYVLTLEDPQRFRRSRDVGGYLGLRPKRRDSGASRPQLRITKEGDVYLRMLLVQGAHYILGWHGVDTDLRRWGLKLAARGGKNAKKRAVIAVARKLAVLLHRLWVTGERYEPLRHSQIASSLQVAV

SEQ ID NO: 200465 - protein, 392 aa, unidentified
MQTLVERGCGLDVHQATVVACLLIVLQNGKVQKQIRTFGTTTRELLSLREWLLSEGCTHIAMESTGVYWKPIYAILEGALEIVVANAQHVKKVPGRKTDVKDAEWIADLLCHGLLRSSFVPPKPIRELRDLTRYRRKLVESQTAERNRLLKLLETANIKLASVATDVFGVSGRLMLEALVEGKATPQEMAELAKGRLRQFLLRLQLDRLEAAEKDLAVLEQRLQEKLKPYAEQLTLLDEIPGVDWTLAAVIIAELGVDMSVFGSVSQLASWAGVCPGNNESAGKRKSSRIPKGNVYLKTALVEAANSAAKAKGTYLRDKFYRLKARRGYKRAAVAVAHKILVAIYHMFSDRVCYNELGDVYLDKLNKHHLTRNLVHRLERLGYTVTLEQKAA

SEQ ID NO: 200466 - protein, 340 aa, unidentified
MFTNCVGIDVSKSKFDLALIKGQDKDHVIQGVFDNTRNGIKSMSKFLEKEHHVQLSETIFCMEFTGVYCYPLTDFFVKKECHVWIEMPVNIIRSLGLQRGKNDRVDAHRIALYAYKNRDDVKLWKPQREAILKLRDLLALRERLIVAQKSLQMPINEKISMGDKKGAEMLRKGCQKSMYSLENEIGQIDKNLDDIIKDDPQLKELFQLATSVPGVGKLTALFIICFTNEFSMYTNPKQLACYCGVAPFEHSSGSSIRGRTRVSHMANKVLKRMLHMGAMSVISKDPELREYYQRKVAQGKNKMLVINAVRNKIIHRLCAVIKRGYGYQSEIIFKERLVLS

SEQ ID NO: 200467 - protein, 378 aa, unidentified
MIQRFHGLDRHKKHSTISVLNREGQEVEFVSKCPDLRGYIEELGPEDTVVMEAATGSFFWADLIESTGATCHILHPYKFKIIRDSWNKTDKHDARNMAKALWVYLVTGEFGIPTVYKPSVAVRELRRLFCQYNLLNRQVTALKNTIQAILADNGVSLTCRQKTMLSSETDAKEVLNAYDLSPASLLSIQINLEILWKVEEQKNNLKKEILLAGEPFAAEVKLLITVRGITPLAALAFLADVADIRRFKTLRKMNAYLGLVPRVKESGGRSRTGHINRESRRLTRTLFTQSVMHFAAASPYLRLCYSNLVSRRGVGRARIALIRKICGMMRRMLLEQEEFRWMQPSNFERKLKRYENQLKKIKKIKEEEEEEEEERKSA

SEQ ID NO: 200468 - protein, 506 aa, unidentified
MNTKKQPQRKKEIDLKPLNMNTRQRKKFKQIFREKNEEKAFQLFKEECSGFEMLNKNAAGIDIASEENWIALPEDRAKTNVYRFGATTPELLKIRDILLKNGITTVAMESTGVYWICLYDILEEAGIEVYLVNASQLKSVSGRPKTDQLDCRWIQRLHTYGLLNNSFRPDACYVEIRSLARYRQKLIEDESTHVLRMGKALTEMNVLLGKAVSDITGVTGLRIINAILAGERDPHVLATHRDPRCKHTEAEIAEYLTGLYKEEQLLILKISLSLYQSISQQVLKLDAQLNRLFKALEKITKASSKQKKENSKAKNAHIKKDHNAPDIDVYTYSYELTGVDLSQIPGFSFSVILGAIAEVGTDMSHWQSSGHFRSWLGLSPKPKISGGQKHGQTKLNQSRAALHFRLGAAALSRSNTYLGDFYRRMRARNCGRHAVTATAARLATIYYEMVKHKKEYKGIDPQMYKKIMEERNYKSILRRAKQCGFKLVPENEQARSIVEISESLAQ

SEQ ID NO: 200469 - protein, 369 aa, unidentified
MEKSTKVFVGMDVHKESIDITLAEQDGEVRRLGQIGGDRGSLLRMVRKQQSQGGERVFVYEAGPCGFWIYREITALGERCMVVSPALIPKRAGDHVKTDRRDSERLASLARAGELAAIHVPDIRDEAIRDLVRGRDDAVIAQRRVRQQLKALLLRNDIRYVGKTSWTGAHRRWLAELKLPEPAQQITFEEYVDAIAVATGRIERLTRAIATEVIAWRFAPVVAALQALRGIQFVHAVTLIAELGDLTRFGSARQLMGYLGLVPRENSSGEHRRQGAITKAGNSYARRALVEAAWAYRHPARVTRIIATRQTGLPKAACDIAWRAQLRLSAKYRRMNARHLNHNKIVVALARELSGFVWAIGQCVKPRVN

SEQ ID NO: 200470 - protein, 428 aa, unidentified
MKKHSKSSQRSEPTLKWTKARGPVQRDAKEVLAEVLGKLTGKLDAPAVSTSAKENRRGNTVGPNRDRLTVGVDLGDRWSQYCILGLEGETLAEGQLRTTQEDVREFFQALTVARVVMEVGTHSAWMQDVITEWGHEVLVANPRLMEGSKRRKRKSDRIDANKLARLGRVDPQSLYPIRHRSREVRQDLVVLRARDALVSVRTELINTARGLVKSMGTRLPRCSSPSFAQKVKDAIPVEVGEALLPLVQLTETVNDCIARYDQKIEELGQKKYGHTTLLRQVKGVGPITSLAYVLTLEDPQRFSSSREVGPYLGLVPKQEDSGDSQPQLGISKAGDRMLRRLLVGSSQYLLGAFGPDTDLRRYGLRLCERGGKNAKKRAVVAVARKLAVLLHHLWVTGDVYEPLHHTGAETRTQPQRLHKPDPTMFHNR

SEQ ID NO: 200471 - protein, 385 aa, unidentified
MNTFIGIDVAKSKSSFCILDPETGKMPVKEFQMSRGGFDSLMEQIKDFGHPAFFMESTGRYHLTLLQYLLNHGKETFIVNPVLIKNYSKAHTLRKTKTDIVDARLIADFSLHNSDKLRKAEFGLIEEVRSLARRREQLAEEVAKAKTQLKADLCVAFPELLTVDVFTKGMLNLLSHYPSPKFILAASSEDISSALNDGSKGRRSTVTADRVKLMAQDSIAIEAYGPMVRDSAKNLIFIQEREKAITKTFLELIKKDHKTESDILESIPGVGKITAAHFLAEVGDISNFSRYQKLIAFCGTDPGIYQSGTILKQGHITKHGNKSLRKYVYLMAFGTLKFCPFFRAYYDKKKNEGFSHRKAMVALMNKLLKTIFALLTKGENFVVPK

SEQ ID NO: 200472 - protein, 337 aa, unidentified
MTKQTYVGIDVGASELVVVIIRNGKPGKAKNFSNTPEGRNALIKYLNPKKRKVKVCLEATGTYHFDIAVELSNTNNIEVMVMNPKAVKNFAMALLQRNKTDAIDAQLLADIASMLDFKEQFIAWQTPSKEVIDLRSAGRRLNELTRQKAAAKNQLHALQATESTPQFVLDSVKQTIANLEQQIKELQQHVIELVDNNDELSQVLELLLSIAGVGKTSAIYIMGEILILPKDMTVKQWVAHSGLDPREFTSGTSVNKQPRLTKAGNRHLRCALFMPALSATRHNANVKAFYNHLLDKGKKKMQGICAVMRKLLHAIYGILKTGQPFDGTKFYVIPQPI

SEQ ID NO: 200473 - protein, 576 aa, unidentified
MVETQPISGLYHYRTSNFLCHVFSRKREVLPEDFKYIVLLEVFGGIAPHFSSAPFWPLSINGTKNNAVSMSLQESVVPGILILLGQRGRLEACGERDGRLSLWDLKPVTLFDCPPRLYLTGIAAERSPYRCVYTTALKNTLSREIKLAMTSQGKQGKETGGIMSNSPICSRFVALDVHKQYVVVGALDAQQHIVLSPKRMSFDQFEEWSPTHLYSTDAVVLEATTNAWDLYDRLQPLVASVTIAHPLLVKLISAARVKTDARDTLNLARLLAAGLIPAVWVPPEEVRELRALVAHRRRLIVQRTQARNRLQSVLHRHNIAPPEGGLFAAKQQQWWNGLPLSVSEKLRVRQDLTILTNLIPLLEEVEVELSRLSSTEQWANQVPYLVQLPGIGILIAMVLLSAIGDVTRFPSAKHLVGYAGLGASVHASGQTYRTGAITKQGRRELRMAMVEAAWTAVEHHPHWKAQFDRLSTRLGKNKAIVAIARKLLVVVWHVLTHHKADRYAEPEKVALKFVVWSRKIGAQNRAGLKTREFVRGELVRLKMGEDLETIGWKSTKPIRLPSQEEGKAFLQAAAGG

SEQ ID NO: 200474 - protein, 355 aa, unidentified
MESVKYLGFDVHQSTISVAVVNADGKLVMQSVIATHAATILDFIHGLRGTLHLTFEEGTHSAWLYDLLARRVARVVVCNPRQNALLKAGNKSDTGDARKLAELLRAGLLAPVYHGEGSTRTLQELVRSYAALTEDTTRVMGRVKALYRSQAIACAGKKPYGRRHRREWLSKLSEAGLHRRAERLYEELDALQGLRRAAKRELVLESRKHAAAKLLRTVPLLGAIRAALLIGRVQTPHRFRSKRQFWAYCGLALETRSSADYRFEDGQLVRAKKPVFIRGLNRNHNHDLKNLFKSAATTASVIHGPFREFYEGLLAKGLQPAMARLTLARKIAAITLSVWKKGESFDAEQLKPQAA

SEQ ID NO: 200475 - protein, 350 aa, unidentified
MKITAIGLDLAKEVFQLHGVDSDGRVVLKKQLKRAQLAAFFANLEPCLVGMEACAGAHYWARKLRAMGHDARLIAPQFVKPYVKSQKNDAADAQAICEALTRPSMRFVAPKSVDQQSVLALHTSRSGFVKARTALVNQVRGLLAEFGVVLPKRLAAFHAGVPQAVQDLGNELTVLMRQLLSSLHEQVRHLDELVGKIELQIRQWASRDDSAKRLQQIPGIGPITASALVASLGDVQQFDNGRQVSAWLGLVPRQHSSGGKNVLLGITKRGDSYLRTLLIHGARSAMQAAQRKKDGPPAWLQALLGRKHPNIVAVALASRNARIAWALLAHKRDYKVGYESPNPLSLSASA

SEQ ID NO: 200476 - protein, 364 aa, unidentified
MLYLGIDQHRKQLTVNFRNEQGDIVLRRQVSTQWKRVREFFDAIRRQARPEGGFVAILEVCGFNDWLVTMLEEYGCRETVLIQPEKRSKKKTDRRDANALCETLWVNRQRLLAGKTVHGLRRVLPPTPEDAENRELTALRRRMGQLRTRTINKIQHILLKHNLQQECPTKGLQTKTARRWLKKLSLGEMDRFEMDLLLAQWELWESQLGAIEKQIKIRQKSDETAVIVASVPGAGAYGSLALSSRIGAIERFARPGSLSNYWGITPGCRNSGDAKDRLGSITKQGSSMARFILGQMVLHVLRDDPYMRAWYGRIKKRRGSKIARVAVMRRMACILWHMVKYQQPYVRGGPSRVKQVKEMFYGVA

SEQ ID NO: 200477 - protein, 343 aa, unidentified
MESIHYVGLDVHKKTIAYCIKTVSGKMVRQGVVGAERKALRQWLTELPGPWMGAMEATIFAGWIYDFLRPHAVELKVAHPEMLKAITAAKKKNDRADAEKLADLLRVNLLPECTMMPTELRELRRILRYRTMVVRTAVTMKNKMAGLLMEVGATYDKRRLYGRKYFAQLMERVEDVPESVKELLQLSRGNLELFTVVQKKLIKALRENSLIRERVERLMSIAGVGEIMALTWVLEIGDSERFRSSRQAISYCGLCSAQRESAGKEQRGPLSKKRNKHLQTMLIEAAKLAPNWNPQLAALHEKELAKGNRNRATLAVARKLVEYLLAVDRRGMPFAAEVPSQVA

SEQ ID NO: 200478 - protein, 321 aa, unidentified
MMTEPAKIQSILGLDVSCDTVALFDSRTHRSITIANDPDALRAALQPYQASATLAVCEATGGHEDTVLGVLLELSIPAHRADPAKVKAYIQSFGKRAKTDPIDARWLARYGQDRAEALPQWQPKDPIRQRLTLLVARRLDLVAMRVQEQNRLKAPRGSFLADDINAHLDELNRHIAALNAEIDSLITQDHDLTLRAKALRSVPGIGPVLMPMLLALMPELGSLNRRQVASLAGVAPHPKDSGKGSWHRATFGGRRTIRPALFTAALTACRGDGPLATAYKAMVKAGKPKRLALTALMRKIITIANARVRDALKPKTEKMPA

SEQ ID NO: 200479 - protein, 342 aa, unidentified
MENVSIIGLDLAKRSIQAHGARADGGVAFRKKLSREKVRAFLAEQSRCIVAMEACGSAHHWGRVIGDLGHEVRLIAPAYVKPFVKRQKNDAADAEAICEAASRPTMRFVAVKTQEQQARAMLFRTRDLFVRQRTQLINALRGHLSEHGVVAPQGPAHVKVLSQAIENETALLPLLVVELARVYLEQIDCLSKRIDALDKVVAHEAARGAMTRRLQTMPGVGPVTAMAIETFAPPMTVFKRGRDFGAWLGLVPRQHSTGGKQVLGKTSKMGQRDIRRLLISGAIAVIRWACRKGALEGTWLHRMLACKPRLLVAIALANKMARSIWAMMTKDEDYKVPVAVIA

SEQ ID NO: 200480 - protein, 391 aa, unidentified
MIHQFKSREHRILVHQFPIVYSVDTHDYNCYGYMVNTKTGELLDDCNVAGQPSVFIKYIEKHHRAKKDAMVIIFEAGALGFSLHRKLTKLGYICKMIAPSSIPRRGKKQKTDRQDAMDNLGYYVGGNLRFVTVPAEQDEQAREILRYRQELNHNVTKQKQRILGFIKRLGCEFTETKTTWTRAHYRWLRSVQIADLPRQLLDVELENLAYYEDQMAKIDRMLDACFKANTDYQQMSTVYQCLAGIGRVGAMTMVLEGGDFSRFHHPNAMMNFYGMVPQKHSSGTSDPAMHITKAGNTYMRLALVTAARAYRDPRLLRRKKQIESLPQPLQDFINRMQERLYHRYRDLKQKGKHGNKVKCAVARELCGFLWELATKVLPQIDQSLPLLNKAA

SEQ ID NO: 200481 - protein, 369 aa, unidentified
MPHVTSIGLDVHARSVAAAAFNPFTGEVVHRDFGTDAAEIAEWALGFEEPRACYESGPTGFHMARELRALGLDCAVAAVSKMQRPAADARRKNDRRDAEFIARMLATHNIVEVPLPDMAVEAARDLDRALDDATRELRRSRQRLNMFLIRLGHVWDERNADGARKKAWTRAHWRWVSEIRLEGPQRDALEYYVTAARCAESDRRQLERRVVALAGTDRWRPAVEALSCIKGVDTLTAFRLAAEAGSFSRFRSAPAFASWCGLTPSEHSSGESERRGGITKAGNALARTALIESAWHYSTCSPRPKAPAPGTDVPPAIRSRADDCTARLHRRREALAAAGKSACKANAAVARELACWVWEIGCRSEGTVL

SEQ ID NO: 200482 - protein, 322 aa, unidentified
MRSAVPTHYERVPLPKPRDFGPGYSPSGSIPAEPYYRISAIMKKRSFDDKVIEPSKPKSSKERPMNTSKYIGMDVHMATTVIAVLNSAGKTVAEAVIETTASAILDFLRSQRGNLHVTFEESPQAAWLYDLIRPHVAEVVVCNPRQLPPKDDKADKSDAKRLAELLRTNGLKAVYHRDHRTQALKELSRSHGTIVSDSTQVRNRLKGLFGPLRAAVILAFTITPHRFRTKSQFWKYCGLAVTSKITGEYVIVDGRAARSRKKPLVRGLNINYNHTLKEAFKGAAATAAIGTWKPHYDTLAASGTRPSLALWKKGELYDSNKM

SEQ ID NO: 200483 - protein, 403 aa, unidentified
MNAVGIDISKGKSMVCIMRPFGEVVVSPFEVLHTTQAFDELAKMIEDLDGETKVIMECTGTYYLPVAYALHEAGLFVSTIHAQIIHNFCNNTIRRAKTDKKDAVKIANYGLSVWLKLPKFVPEGDIRRSLKVFSRQYNKYIKLRVTLKNNFISLTDETFPGVNELFLSYRRKRDGYEKWIDFAREFWHAECICNLLQKRFTPKYKKWCKANNYRFSEEKVEEIYESSAGHFCVMPMDETTKLLVNEVVNQLNYISETIAIFAGEMKRLAEMLPEYPVVSQMGGVGDILAPQVMAEISDVFRFYRKSSLVSFAVLEPVDNKSGKFQGNESVSKQGSPHLRGTLFLVMRSLLQHKTVNDPVYQFIDRKRSEGKHYYCYMTAGSAKFLRIYFARVREYLLNLEETG

SEQ ID NO: 200484 - protein, 317 aa, unidentified
MNAQNNQNEINVGVDTGKTQLDIYIRPLDIYFVVSNDELGIKEAIKTIKKHKVTRIVIEATGRLEQPFIMACAKANLPFVIANPVRIKKFAGAINQQAKTDKLDAQLIAYYAEIMKPDLCQLKPEDIRLMSDLLSRRRQLMEMQTMEKNRLQIMPKEITSSIKPLLTVMKNQLDKIDNKLQKLINSRDEYKIKNDIIQSVPGVGKVVAFNLISEMPELGYINNKEASSLVGVAPFNRESGSYKGNRMIRGGRSQIRTAMYMAMMSAIQCNKTFKEYYQRLVAAGKPKKVAIIACIRKLVITLNSMVRDGVYWDPKMS

SEQ ID NO: 200485 - protein, 346 aa, unidentified
MYSRKDIILVVDYHAENTEVRWFNCGSGEERCLNIPTTRAGVLRLVEKAVVEATQVGGQVIWIMESTTGWARIRELIGSRVEFVMANVLQMPLPPKAYRRKSDKIDTGRMLREFVNGSLPRSYQADSWWREVRRLVDSRQDLVERQTAVKNWIVHFLHHETWYDRQGLWTQKGMRRLHSLKLSPSDRMMLDLKLQELDELAQRRERMEAAMQGVYEQWPQAQRVDEVRGIGMVTAVSILAHIGPIERFPTAEDLISYAGLAPGHRQSDQSSHNGKIGGGGTDSHLRYLLIESMQWVCQIPRYRDAYERASAKHGKNIARIIVARMLLRSLFKMLKDQVRFNQVSAA

SEQ ID NO: 200486 - protein, 371 aa, unidentified
MGKHRLAFVAFDSAKNKHAVAIADSGRGAEVRYLGEIDNSPDAFRKLVAKLTRQYERLHFCYEAGPTGYGLHRQLTELGHVCDVVAPTMIPKRSGDRVKTNRRDSVALVKLLRAGELRAIWVPDSVHEAVRDLTRARATAMVDLKTKRQQLLSFLLRHGRGFPDGRNWTKTYERWLAKQTFAHPAQQIVFQDQLEAITTAQARLAALEQQLREIVPTWTMAPVVAAYQALRGVSFLVAITFVAEVGDVRRFATPQQLMAFLGLVPSERTTGDTIRRGSITKTGNHRARRVLIEGAWTYRFSARVSETLRTRLKDLPSSVRAIAWKAQVRLCARYRRLIARGKKTPVVTTAIARELSAFLWAIGQQVAPQTR

SEQ ID NO: 200487 - protein, 449 aa, unidentified
MAQGSGLTRGDRNRNRKIGVLRAVVARDRAVLAVDLGEDKQVAVLVDHEGRVLARKIVRAKAHQLAGLLAWGAERAGRAGFAGLVVACEPTGHRWKALMGLADAAGHGFCCVQSLAVARAREGDDYTRDKTDHRDAYLIARLVIRLDCYLPERADEAWARLRHLGARRFALVADVTSGMQQAGDLLGCAWPAPLAAAARPLESVTWLAGMAVITDRCCGQPGRLRKRGYDKFLAAVRRELPRWGGKYVRHSIVKGLWEALADTGGVAAQRPGALERLHLLLGDWRALRARLADTEARMTAQLDDLGLTELVASIDGVSALSGAVMLAETGDLNRFTSGRAVVKHAGLNPSEHTSATIAGQTRISRRGRPGLRAAAWRAVWGALRHNKVLAARHARWTGRDGNRLADGQARTACAATLLRWLWAVITTRTMWDARIAAGQIPAVTAAAAA

SEQ ID NO: 200488 - protein, 313 aa, unidentified
MECFVGIDTSQERLDVYVEPTQEQFSHRNDDTGIAELVKRLKALSPTLVVIEATGKLEIPFMNGALEACLPVVVTNPQRIRDFARSVGQSAKTDTLDARIIAQFAEKVRPELKSLPDHDQQKLVELVVRRDQIVAMLAAETHRLHRVSPFMRTEIQQDVAYLMSRLNEISERVQQLVRNHPVWKERRRLLESVPGVGPATSACILACLPELGRCSNRQIAALVGVAPFNADSGTRKGQRFTRGGRSRVRKALYMATLVALRYNPVLTAFYTRLITAGKRKKVALVACMRKLVVILNTMIRHQQPWRTQTAMQT

SEQ ID NO: 200489 - protein, 349 aa, unidentified
MKRTTIGLDIAKHIFQAHAVNSETAEVTRTKLRRAELLAHFAQLQPSVIVMEACGSAHHWARRFARLGHEVKLIAAQFVRPFVKTNKNDAADAAAIWTAAQQPEMRFVAVKTEEQQAVLALHAIRERFKKNRTAAVNQIHGLMGEFGVELPKGWRTMLPKATAALDDATSSVPTLLRSQLRRQIEEIRRLTEQISEAERQIASWQRRQEDCERIASIPGVGLLTATAAVATVGETAMTFRSGRQFAAYLGLVPRQNGTGGRVQLLGISKRGNTYLRTLLIHGARSVLVTSKAGKDPTSWLGRLSQRRPHNVAAVALANKMARQIWALLAHKRTYDPNHGLTAVAPAAPA

SEQ ID NO: 200490 - protein, 377 aa, unidentified
MKKELYLGLDVHKDCIATAVAEAGRRGEVRDTGVISNDLHAVEKLLARLRKAHGRETLLHACYEAGPCGFGLARRLRQLGVECEVVAPSMTPTRSGDRVKTDKRDARKLARLLRAGELTPVYIPEATDEAIRDLCRARSDAVDDRRRSRHRLKGFLLRHGYRYQGKSAWSAAHERYLRELVLPHPAMKVILEEYLQAIAAGDERIERCEAGMRELLEKWRLAPAVRALEAMKGFQTVAAMILVSELGEVHRFAHPRQVMAYLGLVPTENTSNDKRRQGRITKCGNAHARWLLVECAQHYAAPPKVSKELSRRQQGQGQEVRAISWRAQNRLHSRYTRLLARRLQRNKAMVAIARELCGFIWELLRTQPCYHVQATSV

SEQ ID NO: 200491 - protein, 486 aa, unidentified
MGVDDTLRRIFMRNTLRVEARARDVSRGGWDNFRTSILFQKLALFAIEGHTVSENTDVKLTFEANPLSTPEVCRRMKEKACGLDLHKKFILAAIIDQGGTTVEHLFSRAQADLLALRDWALFHGCEVVACESTSDYWIQVYDLFAGKIPVIVGNARDIKAISHKKTDTIDAVWIAKLALHDLIPASRIPDPETRDLRSLVRLRKFLVEKRTDLKNQVHHILDSCLFRLSTVFSDIFGKSGMLILTGVTEGKAVEEILATLPVRTRKRSEEIRSTLETTLPELALIRMQCCLNLIMELDTQIETLMQRVHQCVARQTRLLQILMSVPGIGYIAAVTLIAEIGNFTNFSSGDKLASWVGLVPTVNQSADHLRMGAITKRGSRTARWILVEIAQAAVRTRSSRFHAFFTRKVGVIGFSKAIVAVARKIVTILWHLVVNDEEYEEAEGNRKQEIRIPKAKQPKFLTLNEMLRILAEANIFLKQSDPHGGG

SEQ ID NO: 200492 - protein, 336 aa, unidentified
MSHYCGIDLHSNNHLVVVIDEDDKRVLEKRLDNDLSLTLETLSPFRESLHGIAVESTFNWYWLVDGLQEQGYDLHLVNTMAVKQYDGLKYSGDRHDAFHLAHLMRLGILPTGYIYPKEQRAIRDLLRRRLFLVHSASAQLISVQSQIWRTTGRRIRSADLRKPDFIASGVEGYTLQAVEAGLAVYQAVQREIDALEQSAQQAVRLSNDFKILQTVTGIGKILGLTIMLETGTIERFAGPGNYASYCRCVDSRRDSNGKKKGEGNAKAGNKYLSWAFSEAAHFAVRFEPLAQRFYERKKARTNGIIAIRAVARKLSRATWMLLKHQVPYDARLMFPG

SEQ ID NO: 200493 - protein, 431 aa, unidentified
MNDVTRFVHFNEFRNGIRGSRTHLIVGIDIAKDKHHAFFGTAYGQTLWRRLIFTNDLIGYSRLIEQVQAVSSQHQLEQVVFGMEPTSNYHKPLAHWLIKQDYLVVLVGGKAVKDNRELLTGRWDKNDTKDSANVADLISQGKCLFYEHPDDNVVSVRNLLVLRKQLKKEEHRLRMRIRNGLLAKYFPEMDRHWGNSLEENLAIVRWYLDPRKIANTEFDQFFNHVTTTDRGLRQIRRLKAIYQAAGESVGLPVDASAGYEAQMLVERLKLVKEQVSQTMQRVESVCQNIAGYQLLQTIPGFGPYIGAVVLTALANPFRFNSRKQVIRLAGLDLNASRSGKKSRDSVPVISKKGDADLRYALYQAALVASYNNNCFRRVYHRMLEGRHAERGIKTKARVKLAAKMLVVAWTMLKNNEPFDAMRMLGESVQQR

SEQ ID NO: 200494 - protein, 350 aa, unidentified
MLIIGCDFHTRYQQIAMMDDATGELLERRLEHENGEAEAFYRGLPKPVRVGIEATGPIRWFERLLTEFGHELWIGDAAKIRASEVRKQKTDERDAALILDLLLANRFPRIWVPTPAERDLRQLLWHRHKLVCLRTLLGNQLHALALSEGLCRKKKLFTKKGRRELGNLELPPWASRRRAKLLELLGQVDPPIAELDKAVFEQAQRREDTVRLMTHPGIGPVTALAFVLTIGPVARFACSKKLVSYLGLNPSEESSGGRRRLGAISKQGNTLVRWLLVEVVHQAVRQDPELRQDYQRLKFRRGHAVAKVAIARKLAVRMYWMLRSGADYARLVRRQGSPGATLVDASSSLG

SEQ ID NO: 200495 - protein, 416 aa, unidentified
MKKHSYHSKKINKINWNTVKETLSGEEIALAIDLAKQRQYAMLFNEDASLSVLFHWQHPEETPMMLKTLKSLGCPVVVILESTSTYGDALRYQFRKLGFTIHQASAKRVHDAREVYDGVPSLHDAKAATIIARFYRDGLTKPWQELSVNERTLGALRREYEIHQSQYQRNKNRLEAYLSRHWPEVLYLLDLDSVTLEQLLINYGSAKEIAANAEKAAREMKCTSKGKLSQDKINKIIESAVNTLGVPCIEGERIFLHVLAKEMKHSRLHGHCAKKALEAEVDSDEELFELGCLIGKVTTAVLLSYHLDPRKFNCAHSHQKAMGLNLKEKSSGRYVGQLKLTKRGNSKVRQYLYYAALRLLQRDAIVRQWYLRKVDPKAKNKTVIAVMRKLSKALWHVARVKKYDASLLFSVTQKAG

SEQ ID NO: 200496 - protein, 495 aa, unidentified
MNNSAAGHNVVGGRPALARSRSLPLNPKRVTERLPAEPAALAPTSNRKAPQEGHYIRAVDSRAKGRKSEKQQDKTMNNSEQWQQHRAFGALDWASEEHFVIVVDQAGKVIEEFEIEHSALGWKKFREKLQPYGSIPFAIETNQGAAVEQLLEAGMIVYPLNPKSAQAYRERKAPSGVKDDRLDAWSSADALRVDGQDWKALRPEEPLIKELRLLCRDEVALIEQRTAFIQQLRHALAEYYPAALEAFEDWTSVSAWIFLQRFPTPEALAQAGKRQWQKFLHSRRLWGSDQGPRRMEIFAHAGEFVGSPPTIQAKSLLALSLVQMLFAIEKQLAIYRQRIEELFARHPDHDLFGSLPGAGPKLAPRLLSEIGDDRQRFDAEAQALQCLGGTAPVTKRSGKGRKYWHVHQRWACDKHLRHAMYLFAEQSLSRCVWADIYYQHHRQKNHSHANAIRRLGHRWLKIIHRMWMDRTPYDPELHHRNQLQHGSWIFRLKEC

SEQ ID NO: 200497 - protein, 417 aa, unidentified
MEIVYERVAAIDVGKKIIAVAVRTPGERPGQRRQQVRKFNTYYRTLIEMVGWLVTEGVTHVTMESTGVYWRPVFHALCEAERPLEVLLVNARHVKNVPGRKSDARDAVWLAELTECGLLRGSFIPPREIAVIRELTRYRKKLIESRASELQRLAKVLEDGGIKIDSVASTLTTCSVRDMIEALINGERDPAVLANLARGRMRSKIPDLTPACAGRFGAQHALMHFAPGAHRPSHGHDRPTGHPYRQACLPFAHQITRLATIPGIGERAAQVIISEIGVDMTRFPTAAHLASWAGLCPGNNESAGKHRSGTTRKGNKELRAVLTECAWSAGRTSTYVGAQFHRFHRRFGKNGGKKAATATAHTLIVIIWHVLTQSTAYRDLGADYFTARIDHPEARKRRLIRELEALGHKVTIEPTAA

SEQ ID NO: 200498 - protein, 352 aa, unidentified
MVDKVTEAAVVGGMDTHKDLHVAAVVDQNNKVLGTQYFSTTRQGYRQMLAWMTSFGTLKRIGVECTGTYGSGLLRYFQNAGLEVLEVTAPDRMERRKRGKSDTIDAECAAHAAFSGIRTVTPKTRDGMIESLRVLKTCRKTAISARRVALQIIHSNIISAPDELREQLRNMTRMQLIRTLGSWRPDASEYRNVTNVYRISLKSLARRYLELHDEIADLDVMIAAIVDELAPELIKRNAIGYESASQLLITAGDNPQRLRSESGFAALCGVSPVPVSSGKTNRYRLNRGGDRAANSALHIIAIGRLRTDAKTKEYVARRVAEGHTKMGNDSNLLIVFYVQIMPDDLVMQLHRF

SEQ ID NO: 200499 - protein, 392 aa, unidentified
MVISVGIDVSKDKHDCFIVSSEGEVLADVFTIPNTMDGFHCLLQRIRDCTAPQDKIKVGLEATGHYSYNLLGFLLDNGLATYVLNPLRTNLYRKSLSLRKTKTDRVDARTIASMLLSDAGLKPYTSTAYHNEELKSLTRYRFDKVKERAKLKSSVSRLVCILFPELEKLVPSLHIVSVYALLEEFPGAKQIAAAHLTRLKALLETASKGRYKRNTTLEIRNAARNSIGSWMPAKSLELQHTIRLIRELDNEIAEIEGQIQAIMDELNSPITTIPGLGFRMAAMILAEAGDFTRFDSPDKLLAYAGMSPSTYQSGQLKNCYPHMEKRGSRYLRYALYNATKYVCHWNPVFADYLAKKRAEGKHYNIAISHAAKKLVRLIFAMEKSRQPYCTAA

SEQ ID NO: 200500 - protein, 403 aa, unidentified
MEGCFAGVDWASEEHACCVVDAGGRIVEGRRYRHDERGLRALCARLLGLGVELVAVERPDGLLVERLLDAGLSVIAVHPNQVAAMRPRFTAAGGKSDSFDSFVLAELARTDSHRYRVLVPDSDETKALRALSRAREDLVRTRVALANELRAQLECYWPGAVKVFAEIDSPIALQFLKRYPSPADAQGLGEQRMARFLARNHYCGRKPASELLGRLRGAAQGRAQALESEARRQIVLALVAALEPIVARISELESEIRSALTDHLDGPTFRSLFKDPKSVVTAASLLSEMGDCRDRYPTNAALAADGGQAPVAVESGKFKRARFRWACDHRLRAAICTLADASRHHNPWAADIYTRAIARGCTHQHAIRILGRAWCGVIWRLWQDRDVYDPARHTGLQRLLAAS

SEQ ID NO: 200501 - protein, 309 aa, unidentified
MNTQKNTIVAIDIAKMSLQIQIGKSAFELLNTPRGFDALIKRFVKLSKPLVICEASGGYERALVRALHDADVPVAVVNPARVRAFAKSEGVHAKTDPIDAKMLLRFAKNKDLRLTERPDEAKEELSALMDRRNQVSATLTREKNRLEKEPLYTRKFIEESIDFLEKQLADLDTCIATIIENDVALKSSVEAMKAVKGVGEVTAHAILAYLPDLTDISRGQLVSLAGLAPFNRESGKTKIKAHIHGGRAKVRKCLYMAAQSAARFNDVIKEYVARLVAKGKPYKSALVAAMRKLLIHLQSLLKKQKLELV

SEQ ID NO: 200502 - protein, 343 aa, unidentified
MDMIRVGIDLAKNVFQVHGIDRSEKAVWRRKLSRSEWLEVLQQTVPLHAEIGMEACGSAHHWARRLQALGYTVKLIAPQFVKPYVKSNKNDANDAEAICEVMSRPAMRFVAVKTIEQQDVQAVHRVRSGLMEQRNAKANQIRGLTSEYGVVAPREIAQLRRAVPVWLEDINCGLIDRFRRLLVGLWEDLRSLDDRIHELDREIMEIAASDPVARRLQQLRGVGPMVATALIATVGNAKQFANGRQMAASLGLTPKQNSSGGKERLLGISKRGDAYVRCLLIHGARAMIQMARRRTDALSVWVMCIAGKRHPNVAAVALANKTARIAWAMITRGTDCQPEPSAC

SEQ ID NO: 200503 - protein, 353 aa, unidentified
MRKMQEFIVKDNRIFVGLEDSKKTWKLCVRSEGMIVHQTSMPTKYENLRSYLTHRYPGCRVKVIYEAGFQGFWLHDLLKEDGFECIVTPPNKVVQEKDNRVKTDKIDASRLAKNLEHGDYRSCHVPDKELREDRQISRTLDQIQKDIKRTKSRLRMMLYYHGLHTDLPDETWKPSDYERLREISVGDSLKIAFDATLDLLEKLGALRNRLMKAMQRLCKKERYEKSAALKASSPGIGWLSAIRFTLEWGDMSRFANGKKMGSFSGLTSGEYSTGDTVRRGRITKQSSPRVRAWLIECAWRAIKLDPVLLHKYRQVWKHSGSKKKAIVAVARKLAVRMRIVEVRQTPYCIGVSE

SEQ ID NO: 200504 - protein, 318 aa, unidentified
MSQELFIGIDVSKATLDVAVLPTKESWSVPNTDKGIGDLVERLRQMPTPTLVLMEATGGLERQALAAIAAAGLPAMAVNPRNVRDFAKSLGVLAKTDAIDAHVLALFADRIRPAWRPLPDEDTQALEALLVRRRQVVEMITAEKNRLGATPSRRVKKDILEHIKWLQRQLHITDYDLDQTIKNTPVWKQKVDLLNSVPGVGRVMIATVLSQLPELGTLDRKQIAALVGVAPFNRDSGTLRGRRSIWGGRAAVRGVLYMSALAATRFNPIIRSFYERLRKGGKLPKVALVACMRKLLTILNAMLKDRTPWTHAISEVSP

SEQ ID NO: 200505 - protein, 312 aa, unidentified
METKFVGIDVNKLTLDFDCLPVSAAQPFTNDAVGIAAAVALLQGSGVERIVIEATGGHETAVVSALAVAGLPVVVVNPKQVRDFAKAMGHFAKTDRLDAKVLALFGERIKPDLRTLPDEAQRALADLLSRRTQLVVMRAQEKTRLATVAPIARKNVERHIAWLDKCIGKLDADLRQRLRKSPVWCHKVALLESTPGIGSVTTFSLLAKLPELGTLNRQQIAALVGLAPFSDDSGKRHGIRYIRGGRADVRCALYMATLSAKTHNPPIKAMYERLTQAGKPFKLAMTACMRKLLTILNALLKKNEAWKIQPAT

SEQ ID NO: 200506 - protein, 435 aa, unidentified
MSSKAYRATRVNEVNWEQIARGKEGLGVTVGIDVGKFDLSVICRWADGRFERPWRVRNPWEIPTLVGVLMQVKADRKLVVALEPSGTYGEALRQALGDNGIDVQRVGTKASHDYAEVFDGVPSQHDGKDAAVVAELAALGKAKPWAYQAADSWEEELAYWVEEMVAQRQMLTPWQGRLEGLLARHWPEASQVLKLSSGTLLRILKRYGTPQALAADACAATQLARWGRSLLSAAKIDKFLAGARSSVGVRAGPWERRQIQEYAERVLAARQQANRAQRRLRQLAEGHPVLEAQGKVVGVPTACVLWTSTGDPRHFDSAGAYRKAMGLNLAERSSGTYQGRLRISKRGRARARQWLYFAVLRLVQRCGVRPWYEAKKARHEGEARRVLVAVMRKLAVALYHVGVRNEGFHPRRLFGRIGRRSGRSARRSGASKQRA

SEQ ID NO: 200507 - protein, 389 aa, unidentified
MKRVCGLDVHKDNAFVCILGENGEKIEFKTGVLTVELDSFRDRLVELGVGEVAMESTAVYWMPIWRILESDFRLYLVNPLSIKQLPGRKSDVKDAEWIATCLQKGLIRGSFVPPLAVQQLRQYNRRLFDLNKQAVYVQNKMDAALQRCNIRISNYVSNIDTKGYREVVELLSEGTTDPELLTGKIHKRTINKHGRDTIKAALTGVVTDVDSDLIRQYREELDLIKQHKQKCQSRMREMCEELYPDELKRIEEIPGVSAQSATQIIAEIGTDMKMFLTARTLVAWAGLKPRNDGSNGKIKSRRITHGNKYLRKLLIECSWAASRTKDCFFSSFSYRMVTVRKKGRLKVQVAIARKLLVVIWNLLAKGVCYSDRLAQAEETKEESSDAPQG

SEQ ID NO: 200508 - protein, 432 aa, unidentified
MFGCDAGEGVVLEEDPQVEEIVARVAALDIGKAELVCCVRVPHEGKPGRRLQEVATYSTMTRSLLAMSDHLRCLGVSRVEMEATSDYWKPVFYLLEAQGLDPWLVNAKDVKHLPGRPKTDKLDAVWLCKVAERQMIRPSFVPPPAVRQLRDVTRYRIDLVGARTAEKQRVEKLLEDAQIKLSVVASDIFGISGRQMMAALIGGQTNPKALAQLARGRLRAKLEALEEAFTGHFTDHHAFLLATMLARIDALDADIAALEAKIQEMIAPFAAAVDKLDEIPGVGATGAHIILAEIGLDMSRFPTAAHLSSWARFAPGVKESAGRKKGSGTTGHGNRYLARVLGEAAVAASKTNTFLGERYRRIAKRRGKKRAIVAVGRSILVIIWHLLSNPAARFIDLGSDFYENRTGPDRKKRNHIRQLEALGYKVTLEPAA

SEQ ID NO: 200509 - protein, 340 aa, unidentified
MTIVMGFDQHRAQITTEWLDSMTGEIGRARIGPAHREGVRRFLARFAGQELEVALEATTGWRFVVEELRRVGAGVHLAEPAQTSALRGNKKRPKNDRADARHLRELLMLGRLPESWIPPDHLLDLRSKVRLRHTLVDQRGEWQQRIRAVLYHHGLAHRRELHLLSGEGRAWLQDVELPDAAREQITVAITMTEALNAQIAPLDRQLRLYARRQAGCKALMGHYGIGELTSVAILAELGDCRRFSSSRQAVRYAGMDITVYESDKRRSPGHLSRQGPPALRWALYEAAQVARRAGSPDRGYYDQASERLGSNRACLAVARKLLMRAYHTLRELGEEALQPA

SEQ ID NO: 200510 - protein, 430 aa, unidentified
MHNKNYISVGIDVGSAFSFMTILAPDETVILKPFKITHNNKDSLERAVSEIKKAEELYSLESRIFLESTGIYHFPLFCYLVDCGFNASIINPIITHSTKNGNIRKVKNDKIDSKGIAKLGLSKDIPVSQFPAKLVLELRSLTRKYYDLTDERSAHINKLKGDLHTVFPQYLDVFCDVTGKTSTMILRQYGTPDKILRGHKKTMIEKISKASRKGLAKASERHEKLCAAANAAKTFGCQIDSIYFNIFLTLDLVEKLDSALDSILNRIRQLITFNKNEKFIQQIKLLNTIPGVGFLTAVTIMCEIGDFSAFRNPKQLFAYFGLDPEVNESGKFVGTQLHMSKRGSRIARRAIFAVALASIRTKRNGEGINPYLRKYYELKSGQKPKMVAIGAVMHKVCNIVFAVLRDEKAFELRSPEEHCKQYQRPALAAA

SEQ ID NO: 200511 - protein, 351 aa, unidentified
MPRTTTLHAVTAIGIDMGKNTLHLIGLDARGAIVLREKVARGRIALRLANLPPCLIGIEAGMATHYVARELAALGHDVKQVPATYAKPFRQGHKNDFRDAHAVAEAVQRPTTRFVPAKTNEQLDLQALHRVRSRLVSERTAVINQIRGFLLERGIVVRQGLRFLRQQLPDILAKRADVLSPRMVRIVAELAGDWRRLDERIETVTDEIEALAKSDDSCRRVMTVPGIGPIISSAMVAAIGNGAAFARGRDFSAWLGLVPKQMSTGDRTILGRISKRGNGYLRTLFMQAARVILLRSANWPKHGFGLWLVRAAQRLHPNVLAAALANKLARIAWTVLAQERSYEARVTKAAA

SEQ ID NO: 200512 - protein, 412 aa, unidentified
MQDILTCAMGLDIHRDVIVACLAKGELGADPEIEIRSFSTLIPEMRKLRDWVLEAECHHVAMESTGIYWQPIYEMLEPCFDGQISILVVNARHMKNVPGRKTDMRDAQWIATLLRAGLLKGSFIPDKTFRELRHLTRYRKSIVHDITAQKNRIDKFLQSSGFRFTAFLSDAFGASGRNIIRHLMEYGSISREALDRCLKTQTRKRIDEILIALNGSLSEHQRNFLRMIFGHLEALEQHRHTVEDAITEEITKHEEALRLLCSIPGIDVTAAAAIIAEIGTDMSAFPDSQHICSWAGLSPGNNESAGKRKSAHINKGNPYLKSMLCEVGWVISGKRSLYLSGWYWRIKQRKGAKRATIALARKLLALIYTMLKTGSPYSEECFETRRKQSERKRAYRMVNELQKLGYFVVAPG

SEQ ID NO: 200513 - protein, 403 aa, unidentified
MNAVGIDVSKGKSTVAVLRPFGEVVASPFDVIHNDNDLKRLVKLIRSLPGESKVVMEYTGTYFEPIAQFLHNNGIFVSVVNAILVHDYGGNSIRRVKTDKKDAVKLANYGLDRWLTLPRYVPEEGARLLLKNCYRQYRQYSKVQTVLKNNLISLLDTVFPNVNRLFSSPAREDGSEKWVDFVAEFWHCRCVSEKSEKAFTNKYQRWCRKYGYNFNEAKAHTIHAEASGHIGVMPMSETTKLLVEQAVAQLRATSTALAALKHEMQALTSMLPEYPVVMDMFGVGPTLGPQLIAEIGDVRRFYSKKALVAYAGLDAPPNDSGDVTGRHKSMSKIGASSLRRTLFLVMSVYLQTAPLDEPVYQFMDRKRAEGKPYRVYMMASANKFLRIYYATVKAYLESLEHTA

SEQ ID NO: 200514 - protein, 408 aa, unidentified
MEAIVERCCGLDVHQATVVACLLVGSAERHPRKVTRTWGTSTSELEELRAWLLAEGCTHVGMESTGVYWVPVYNVLEDCFELVVGNAAHIKNVPGRKTDVKDAEWIADLVRHGLIRKSFVPPKWQRALRDLVRYRRKLVESETAERNRLLRLLETCNIKLSSVASDVFGVSGRAMLRALIEGTATPEHMAKLARGSLRRKTDRLTLALRGQLEEHHRFLLRLQLERVERIEADIAVVMARIDQALAPYLEQLERLTQIPGVDRIGAATIIAELGIDMSVFPTARHAAAWAGVSPGNNQSAGKRAGNAKRRGNVHLMTALVQAAFGASRKKGSYLKERFWRLKARRGERRAAMAVAHSILVAAYEMLRRHAQYRDLGAAYLDHIARAVTEKRLVRRLEALGYRVTLQTA

SEQ ID NO: 200515 - protein, 362 aa, unidentified
MNYVGVDIHKRYSVLCAVDEQGCRLREGRVEGNAADGFARFFSGLSGPSKAVVEASWNWGVIHDELEELEQVEEVVLAHPYKTRLIADAQIKTDRLDAYALSTLLRGNLVARAHVPRRLTRARKNLLRQRLYWARLRTMLRNKIHALLDRQRDLELPQCSDIFGVRGLGFLRRLKLSEPDATLLQEQLALHDLIGQQMKAQEKRIAGEFASEAMHRRLMSVPGIGATLAAVIACEIDAIERFSNADRLCAYAGVVPTTHSSGGKVAHGRLLPFCNKWLRWALVEASWVAIGCSPYFGTLYKAHRARCKKANHVILIVARRMCRIIWQLLHHQRDFEKRSLSSRVNFPGCSALALTVNPATAP

SEQ ID NO: 200516 - protein, 337 aa, unidentified
MKYSGIDLHSTNSVIVVSDETDRIACKRRVPNELGAVLATLAPYREEIAGVVVESTYNWYWLVDGLQAAGYRVRLANTAAIKQYEGLKHSGDESDAAHLAQLLRLNILPSGYICPPQERALRDLARKRLQLGRSRTSHILAVENIMARQTGARIASREVKALTEEALQKWDQPEDVRLAMSANVAVIHTLSAQIDKIEARLRERVKPRAEFKLLTSAPGIGEVLATIIMLETGTIERFAAVGNFASYARCVDSKRLSNGKKKGEGNVKNGNRYLAWAFVEAANFARRYCPEAKRFYERKRARTNNIVATKALAHKLARACYHMLKETKPFDVKRCFA

SEQ ID NO: 200517 - protein, 334 aa, unidentified
MHYIGIDFHKESTHVVVLNEAGRLLERTRIPTRREELVRFFGNRPEPAKAALEATRNWYWAYDTIEPLVEELKLASPPKIRIIAESTVKTDHIDAKVIADLLRSNFLPTCYVPDAETRQKRELLRHRAFLVQIRTKVKNRIHIILDKLGIEHPFDNLFSKRGLEFLRGLELPWAYQKELADSLEMLEFLNGKEKEQNKVIEKLCRESEEAALLMTIPGIAYHNALLIMSEIGDVNRFATGTKFCGYCGLVPTVHISDKTVRYGQMTQVGNKWLRWVFIEAAHIGRRKSLRFSRLYERVKVKRRPQVAIGAVAREMAVVSFYILKYRKPFRDAKW

SEQ ID NO: 200518 - protein, 347 aa, unidentified
MIDVGVDLHKTQFTVCGLNDGEEVLQKEYRTGKEGYLAFLSDLKALEVPKKKVRLAVETTGNVWHFMHVMESHVKEVQVVNTMKFKVIVQSSSKTDNRDARTIAFYLWKDMLPTVTLPDAESRKITKVVKIRSKVVGRMTSLKNEIHALYMEEGIQIKKSQLTSVKQLEALKNTEADEHIIFLATGLIDELIRLKKTETSLENKLKEMTAQDMGVKTLMTIPGTGIVTACAVRGVLADIERFDNPKKVTSYAGLAPWVSNSNETIRHGHITKRGSNILRNALVQMAMGMIRLWGKSQKNGSKSLGKWYRQLASRVGGGKSKIALARRLSRIVWAMLQTNTPFRCEMI

SEQ ID NO: 200519 - protein, 476 aa, unidentified
MDAAIPGAVVYYDDPSVVSGDVQWYGGVEVHELVLVAAVYGRMGEARVLGPIYREDTTPQGLEVLRGYLASFKVKRYLMETSGIYHIPAAWHFQEWFPDAQVVVMNSTDLSNYVRGTRKNDLVDATKLAQVASFDELIKPSYVPNRSQYILREMARYQHRLGWEVTRQKNRVKKVMAALGLPWDINLNSAAQCRCLVSFLQQSQAFGDFVRAWPGRLGKKVRDQIAPWGTVVLGEAGRQILLSLLRDLAVMAELEKLAEGRVETQAREHAEIEKSASALVEFPGLGYLESLGLLAEIGDVARFPSAGHLLVYAGIAPSGGTSGVSTLGATVETVVAQDVPNKKCNKRLKGTLTRIAVTILRDCVRTQRDDDLYLYARELRGENMAKKKRIFKVAAKVGRKLYHVLATGESYCGNAEKAGEATVAGGVLSRSAKQRQRYRKEREARILADRKVGTLVEKLRECGVEEETIRTILEVA

SEQ ID NO: 200520 - protein, 342 aa, unidentified
MNIKIVGIDLAKNVFQICVLLKDNTIQRNYKVSRAKFLHSVRQFPIGTLIAMEACGTSHHWARLFQELGHKVKLIPAQHVKPFVTNQKNDANDALAICEAAFRPGIHYVPVKSIEQQDIKALRCVRTRLVQNRTATVNQIRSLAAEYGVTFPLGRVKLYGKLQDVLEDATNGFSFVLRELLNRLGDDLKFLDMSVDSIDCEIKALCKLHPRYKALLSIPGFGPIVAASFMSEVGSGEQFKNGRQVSAWCGLVPTQSSSAGKIRMGNITKNGCSELRVLLIHGARAVSRFAAKRDDTLGKWFNSLSLRRGKNKAIVALANKLARIAWHILTGKNEFIASKAFA

SEQ ID NO: 200521 - protein, 417 aa, unidentified
MFKIFRKNCCGLDVHKTWIYACVGITDEQGRTIYKQKRFTSFSKGLRELAQWLAAFDCRDVCMESSGKYWVPVFNVLEQTCSVTLAHPKYTKPQKGNKTDRKDAKWICDLFMCNMIKPSFIPPPDIRHLRDLVRYRFKLTNCLTGEKNRAQNCLTVSNLKLDDVFSDVFGKSAMSITRHILEHPGKSFDVAPFVHGRCKTPVEEIQAAVDGCVSPEQATKLREILSHIDELKIHKQNIESEILRLAAPYQSHLELMRTAPGLASDPMSSVAILSEIGAVMSVFPSAKHLCSWAGCCPRSDQSGGKVKSTRISRAGVYLKPLLVQVANAVVHSDRYPECKERYRRIKARRGHKKAIIAICRMLLTAIWNMLSKQESYCAKGYLVDRQTGQSKIITNAQGIHLLRQRGYLIKDDIPAPA

SEQ ID NO: 200522 - protein, 415 aa, unidentified
MRIVHENVAGLDVHKKVVVAAVIVKQADGNWLEEKHSFGTMTVDLLELSDWLLLHGVIHVAMESTGEYWKPVFNILENNFEVIVVNAQHISKVPGRKTDQSDAQWIAELLQYGLLKASFIPPLGQRELRELTRYRSSFVRERATLVNRVQKVLESANIKLSSVATNVMGVSGRAMLEALIAGSASPEQMAELAKGRMREKREQLTKAMEGRVQAHHRFVLTELLCQIDSIEETITRFDQEIEAYCSPFEEVVELLDTIPGVGREAAEIIVSEIGNDVSRFPTADHLAAWAGVSPGNNESAGKRRSGRTRKGNQALRTVLNQAAHAAAHTKNTYLSAQYHRLAGRRGAKKAIVAVEHSILVIAYHLIERKEPYKELGGDYFDKRNVEATAKRLTKRLERLGYQVSLELQQPVGAPV

SEQ ID NO: 200523 - protein, 440 aa, unidentified
MIDLRLRRRHPGESIPCIPHRKEEFTLKLFVGIDVSSKELETCFMNANGDKVQTLNVKNNLDGASYLRDRIVALADQLACSEIHIGLESTSVYSWHPAMYLHQDDSLRKRNTKVFTINPKLVSKFREAYPDLDKTDRLDAWFIADRLRFGRLTTTIIMQEQYVALQRLTRMRFHLIHNLTREKQFFLQNLFYKCNAFTTEVESSVFGHALMEMLSEKYSLDDIATMDIAELADYLRDKGRNRFPDPENVARCIQKAARASYRLSKVVEDSIDIVLGTSIQAIRSIQSQLKELDKAIERILEGIPGSQCLRSIPGIDKVYAAGILAEIGDIDRFSDQAAVAKYAGLTWRRHQSGLFEAEDTKRIKSGNRFLRYYLVEAANSVKNRDEEFGEYYRKKYYEVPKHQHKRALVLTARKLVRLVDVLLRNGQLYTPRRKVKATKE

SEQ ID NO: 200524 - protein, 392 aa, unidentified
MFFVGIDIGKNNHVASMMDQTGKVVFKAFSFPNTSDGGNALFSKLTSYSSSTDDFEIGMEATGHYWLSVYSFLFEKKFLLHVINPIQTDGWRRGTEIRKRKNDIIDSVLIADLIRYGQFVETRLADEDLFSLRTLTRFRTYLVESISDLKRKVVCVLDQVFPEYQSIFSDIFGKTSKEILLQFSSPIDFESVSSQTLAELLAKLSRKQVGSAKAEQLKAAASCSFGVTFAKSSFTFQLKALIEQIAFIEKQVKETETEIAGIMEKLESPITTITGIGNVTGAAIISEIGDISKFDSPRKLVAFAGLDATVTQSGEFEAAHNVMSKRGSPYLRKAIFQAALVAAFKDPVLSAYYQKKRAEGKHHLTCIGAVARKMCNIIYAVVKNNQPYVPKA

SEQ ID NO: 200525 - protein, 337 aa, unidentified
MKYCGIDLHSNNCVVIISDEKDRIVFSKRLPNDMGQIRRALEPHREELTGLVIESTYNWYWLVDGLMAVGYRVHLAHPSAIKKYEGLKHSGDFADAAYLAQLLRLGLLAEGYIYPREQRGVRDLARKRMQLVRYRTAQILSIENIVTRQTGARLKGEAVKRLTAEQVDEFAFAPDVALAVEANRAVSQALGQQIEALERRLKERVSLRPEYRLLKTVPGIGETLATTIMLETGCIGRFAQVGNFGSYCRCVDSLRESNGKKKGEGNSKNGNKYLAWAFVEAANFALRYCPQARRFYDRKKSQTNRVLAIKALAHKLARACYHMLRDQKPFDVSRCFG

SEQ ID NO: 200526 - protein, 337 aa, unidentified
MNSNQNNQKHFVGTDVSKETLDVTIFFNFSKHFHQQFSNDSKGFKQLQKWLETYPEFSFENALFCMEHTGIYTRQFVEFLLSKQAKVWMESALHLKRSMGMTRGKNDKIDSLRIARYAMTHQDQARLVNLSNKTLLLIKDLMSARERTKKAYQSIKVSIDEMQRVDAATAKELLRINKPALTGLLKSKMALEKRMMELIAMDPELNELFELVTSVKGVGNVLATELIVYTHAFKRMDEAKQLACYCGVAPFSHTSGTSVHGRNGTSNFANMGLKSTLHLAALSSIRYVPELKTYYQRKVAEGKSKMSVINAVRNKLLQRVLAVVKRGTPYKENYLVN

SEQ ID NO: 200527 - protein, 459 aa, unidentified
MSRKPKKAKRAGQGGAVPSLSCIEPNAAGIDVGATEIFVAVPQDRDPGPVRSFETFTEDLHRLKSWLQHCGITTVAMESTGVYWIPLFQILERAGLEVCLVNAQHVKHVPGRKSDVIDCQWLQYLHSVGLLRASFRPEERICAIRSLLRHRDSLVQMAAAHVQHMQKALTQMNLQLHHVLSDITGQSGLAILDAILAGERNPAVLAQLRHARVQASQEVITKSLVGDYQREHLFTLRQSLQAYRYYQSLITTCDQEIAEQLQNLDSRTPPDASPLPPEPYPHRPRKNEFRFDMRSELYRIYGTDLTAIPSINALTGYTVLAEVGTDWSKFRNGDAFASWTCLCPQNKKSGGKILSAHTRRSANRVNRALRLAAQTLERSTSYLGTYYRKMRARHGAPAAITAAAHKLARIIFHLVTTGQAYDESLFAAEEQRQRKRLENKLKRSAQQLGYQLIPLGQTA

SEQ ID NO: 200528 - protein, 340 aa, unidentified
MKHTVVGIDIAKRVFQLHWVDSDTGEILSVQLRREKFLAHFVNRPACLIGMEACGGAQHWARELIKLGHQVKLLAGKFVKSFVMGNKGDAADAKGIWMAVQQPGIKPIAIKTEQQQAMLALHRMRQSLVKVRTMQTNALRGLLTEYGEVMPQGKVGIRNGIAAALARLELRLPKIVIEALHEQWLRITELSSQISQIEHKLQSWLKTDVAAKAIADIPGVGLLTATAAVATMGDPKAFKSGREFAAWLGLVPRQTGTGGKTKLLGISKRGDTYLRTLLMHGARSVLTHAKHPGQWTQELMKRKHTNVVVAALANKMARMIWAMLAHERAYQGDWPSAKPA

SEQ ID NO: 200529 - protein, 396 aa, unidentified
MFQKVKVWLLIMRPFGEIVSTPFEIKHTSSDINSLVKLIKSIEGESRIVMEHTGRYYEVLAHQLSEANLFVSAINPKLIKDFDNDSLRKVKTDKADSVKIARYALDKWQNLKQYSVMDELRNQLKTMNRQFGFYMKHKTAMKNNLIGILDQTYPGVNTYFDSPARSDGSQKWVDFASTYWHVDCVRKMSINAFIDHYENWCKRKKYNFSQSKAEEIYGKAKELVPVLPKDAITKLIIKQAVDQLNSASTTVESLRTLMNETASKLPEYPVVMAMKGVGTSLGPQLMAEIGNVSRFTHKSAITAFAGVDPGVNESGTYEQKSVPTSKRGSADLRKTLFQVMDVLIKTHPQDDPVYQFLDKKRAQGKPYYVYMTAGANKFLRIYYGRVKEYLASLPES

SEQ ID NO: 200530 - protein, 399 aa, unidentified
MLPSSVDAVIVSAAASSGERSEPGEAAGRRRGRAAAADRRQLGAPDAVLQLDRRRRAALPLGPTPNSRQTGRTRARSHLQERPAVKENDIPPVVAGIDVSKDRLDVHLWPSAESFALDNTPAGIAQLVKQLRPERVALVVIEATGRYERRAAFALMDAGLEVAVVNPRQPRDFAKASGQLAKTDAIDARVLAQFGAVIGPRPTEKPAENQLVLDELVARRRQLVEMITMERNRIEHALHMRLRRQIEHVVKALQKQLEQIEAEILQLIDRDDDWRRRFEVLKSTPGVGDATAATLVAELPELGSLNRQAIAALVGVAPINRDSGRERGQRHIAGGRHSVRRMLYMATLTARSWNPVIKAFAARLAAAGKPFKVVMTACMRKLLTILNTMVRNNETWRTA

SEQ ID NO: 200531 - protein, 314 aa, unidentified
MDVTNEINVGIDTSKTQLDIYIRPLDEFFSVDNNAQGVKEAIKHLKTTKPTRIVIEATGRLELPFVIAAKKAKLPVTVANPLHIRRFAGAAGQLAKTDKLDAQTIAHFGAALKPEPTELKPQNVRLISDLLARRSQLLDMSTVEKNRLSILPKPLHTSLKRHIKYLQTEVKRIEQQLDKLIDQTPLWQEKRDLLMSVNGVGKILTYTLLSDLPELGQLNRREIAALVGVAPMNRESGNYKGKRRIRGGRARVRTVLFMAIMSATQSNAKLKKKYLALQDAGKPKKVALVACMRKLLTILNVMMKTGQHWNPALA

SEQ ID NO: 200532 - protein, 342 aa, unidentified
MSEVTIIGVDIAKRVFHLHGAQADGTPAFRKKLSRAQFLPFLAKEPSCVVAMEACATAHGWGREIAALGHTVRLIPPTYVKPYVKRQKNDAADAEAIAEAASRPTMRFVAVKTEEQQERAMVFRTRQMFVRQRTQTINALRGHLAEYGVVAPKGPANITKLLYTIEDDSGSLPNTVRELARTYIDQIEIIGGHIADLSRKMRTMASDSEVTRRLQTMPGVGPVTAVALETFAPPMQSFRRGRDFAAWLGLVPRQHSTGGNPRLGRTSKMGQRDIRRLLIIGAMAMVRAISRRTEQDSSWLARMLKRKPRMLVAIALANKMARGLWAMVMKGEDYRDPVVVAA

SEQ ID NO: 200533 - protein, 436 aa, unidentified
MRGCRCSMIMGFTKPIEHFNLQRKKVITMNTLYVGIDVSSKSNVIYLMLPNGDKHSNFSVANSHEGSTQLVKRILSALTSHSLDTVLIGLEATSVYSDNLVYFLREDATLAPFNRKIHVLNPKQVKKFHDSYNDLPKNDYVDSFVIADCLRFGRINKEVYLGDYRYKALQNLTRARYFAVQNLTKEKQRFINVLFKKYSTMTQEKVFSNAFSTTALAVYDEFESAEALANMDLQELTDFIIEKGKNRFPDPDAVAKAIQKAARSSYRLPKTVNDSVNQVLSISITSMKALESQIKEFDKAIKAQMELLPNVLISIPGIGPVYSAGIMAEIGDINRFDNQAALAKYAGLAWKQHQSGGFESEVTRLIPSGNRFLKYYLCEAAFSLVRCDKEYSDFYHLKYKEVNRCQHKRALALTARKFVRLVFRLLKDNRLYCPAK

SEQ ID NO: 200534 - protein, 519 aa, unidentified
MSRARSASRRSRKTVLVQKPNGVLSGRVQAVGPQCFGIVGIDVAKQRMKMMLCDFFGKCLIPPTEFDQTNGGLRTAIDAVRRAQQQAGLKDLVIAIERTGEYHRPVQRAFRQAGFEVRLVHPLATKQFRQIADPGDKTDDTDLAGIHRAAVNGFGLIEPELPPDYLQLQMLIRHRRDLVRKNSALCCQLREHLHAAMPGYTACFDDIWLSQTAWVVAHATGCANAVCTAGIAGLQRFVDQAGVHCKQSTLHKILAWADTAPPCHPQIESLRRIIRDLDDDRTAKTRQILALERSSAHLLVRTPYIRLLVIPGINVVSTADLAGEMGPIAHYASANAITGRAGLVPSRYQSDLVDHANGSLIRSGNRRLRTALLQIADNLVMCNHYFHAKADLWRVRGKDPRWMRVKVAKSFSRIAYAIVAGNGPFAHRCLQDRHYVLHKLQAFHREHDTPMATLLADLQAAIGQLPKVEYVNEAKPLQEELDSLPRRRGPQPLSEIIPIVLARLGMGTVQSTPEGQDLS

SEQ ID NO: 200535 - protein, 477 aa, unidentified
MVMTREPEEILDEPHEQIMERVCAIDVAKDSGKVCVRLPAESGSGRRVSKVWDVPARTKAVIELGDHLACQGIQKVTLESTSDYWRIWFYLLEARGLDVQLVNARDVKNVPGRPKTDKLDSVWLAKLTEKGLLRPSFVPPKQIRVLRDYTRLRVDLTAERTRYWQRLEKLLEDALIKITAVASRIDTLSVRDMVEALIAGQRSPRILAGLARGRLKLKHADLVEALTGQFDDHHAELARMILDQIDTLTARIDTLTARIDTELATMPGTADPGPDPDPDDPGPRPNGQAEPAPVTSVGHDTASTTVGQWTVPRSALDLVDILDEIPGVGRHNAQAIIAEIGLDMSRFPTAGHLVSWAKLCPRTIQSGAKSSAGKTGKGNRYLRAVLGDAAAGAAKTQTFLGDRYRRIIKRRGKLKALVAVARSILVIIWNLLAHPGLPYHDLGVDYHDKRIDTERRTHNHVRQLEALGYTVTLTAAA

SEQ ID NO: 200536 - protein, 404 aa, unidentified
MIFVGVDWAETHHDVCVMSEDGQVLEQRRVSHSVAGIGELHALAAGHAGEGEPVAAGIEVDRGLVVTALLAAGYQVYAVNPLASSRYRDRHATSGAKSDRGDAKVLADLVRTDRHNHRQVAGDSDLAEAVKVLARAHQSAIWSRQRQVNALRSALREYYPAALAAFGTDLAASDAVAVLALAPTPDAGRSRSRAKIASALRRAGRQRNTEQRAAEIQAALRAGYLQAPPAVAGAYGAAARSAIRLISAYTAEITELEEALSGHFEQHPDVKIVRSLPGLGTILGARVLGEFGDDRTRFASPQCRKNYAGTSPITKASGRSHVVLARHARNRRLADALEQWAFCSLTPSPGARAYYDQLRARGKTHRQALRQLANRWVGILHICLERGCTYDETAAWHHLQATAA

SEQ ID NO: 200537 - protein, 297 aa, unidentified
MQADFPNSQQGIVALAAFCRAHQVELVAMEATGGYEQQPFALLWAEGLSVAILNPRQVRRFAEGMGVIEKTDAIDAGLIAWFAQVRSCAPSPAPAPDQQHRRALVMRLRQLTNTRTAQRNQRRLVTEPVVLVLIDELLALLDRQIQSIEQQITVLIAHDPLWRELDQTFRSIKGVANRTVARLMAEMPEIGTLSNKAISKLAGVAPLARDSGKYQGKRITRGGRASVREILFVVASVVARYEPDFTLFHQRLTAAGKPAKVVRIALAHKLLVRLNAKARDVRRQIDLAANRLQIAST

SEQ ID NO: 200538 - protein, 418 aa, unidentified
MEQARNTREGEVRFIGLDVHKHYITVGGMNIKQEIVLRPRDVEMERFKIWAEQNLEKTDDVVLEATTNTWEVYDTIAPLVRRVVVAHPAEVKQIANSRVKTDNQDVIRLVRLLIADIVPEVWVPPVEVRELRALISYRWRLVKMSTAIQNRMHSLLHRHNIQAPEGKIDTGENREWWEKLKLSPLETLRLKQEIKTLRLVREHIVEVEAELGKLSTSQRWGDQAVYLMQIPGVGVIVAMTILSAIGDHERFASPKKLVGYAGLGAGVHDSGQMHREKGITKFGRKELRWALVEASWQAIRANSGWRAQYDALCKRKHPNQAIVAIARKLLVTIWYLLNGQEAYDRSSDEELAYKMLTWAWHIEKDALNGMTRQQFAKYGLMRLQRGENLTRILRGGSPRRIASTEEVLALKPELQKPQ

SEQ ID NO: 200539 - protein, 441 aa, unidentified
MATNLVNLNAAGIDISSREHVVAVPEDRAKESVRTFQGFTRNLHQLAKWLKKCNIETIAMESTGVYWYDLYTILLDYGFEVYLVNAYHVKNVPGRKSDVSDARWLQELHTFGLLRASFQPDNLTRSLRNYVRQRKNIVRQMTKETQRMQKALEQMNIKLNNVIRDLNGKTGTQIITKILEGERDPKILAQYRDWRIKASEQTLEKSLEGNWREEQLFNLQLAYNHYCFLQGQLEECDLESEKTIKKMSTLSNSKEVVKIKKSKNNPNFNVSQYLYEALGVEVTKIYGIKEITALTIFSETGVDIKEKFPTEKQFLSWLNVVPNNKITGGKVISSRVRRKKNKAGQAFRDAASALWKAQNPIGDYLRRKKAKSGGKQAVVATARKLAAIYYKVVTEKVEFDPKYITRDKEDYLKNKLIQLEKIKQKTENLLLDYQNTAKLVI

SEQ ID NO: 200540 - protein, 363 aa, unidentified
MFTERTSIGLDVHARSVAAAAIDSVTGEVFRTVLTPSYEHIRSWISELPGPVAVAYEAGPTGFGLYRALTGVGVRCEVVAPSKLQRPAGDRVKTDARDALHLCRLLRLDEVTSVSIPTVSQEAARDLVRAREDCRGDLMRARHRLSKLLLRYGIVYYGGKAWTGAHDRWLRTDAAPRLTVPATRMAFDADYDQVLTMQARRERLDAAIEDLAADCEFTPLVRRVSCLRGVSTLTAFGLAVEIGDWDRFTGNTIGSFVGLTPSEHSSGSSRAQGPITKTGNTHVRRLLVEAAWHHRPRYHAGAVMRSRWDLAPAAARARGDEGNRRLHARWVGFLERRKRPVVANVAIARELAGWCWSLAVMTD

SEQ ID NO: 200541 - protein, 369 aa, unidentified
MSDDRCRLGSDDVVIGLDLASAEHQAVVVTAAGKRLTRFRMPHTRAGLEELLRRTTPAALGRPGGARVFAFEATGHLWEAVAYVLRARGEPYVVVNPLATFRVREARQLSREKTDLTDAEQIAELCRIGLVTRTQLEARPYLALRRAWGEYVRLREERARLKVLVAHQLYGLFPEFLRVWADLLQPGALAVLRTGLTHAAMAALPLTEFVAQARAHGAGHRLWRDTLAQVHRAAAQTMACPDGLDVLAREVQRAVARIDMLTAHMTAVAAEIDSMLAELEEVPSLRPIPGLGWTSVAGLLAPVGAITKYHHGRQLIKLAGTNPSRRDSGQTVGHGQRMSHRGRAGLREVLYLATISCLQHNPRIRAGRA

SEQ ID NO: 200542 - protein, 310 aa, unidentified
MDHYIGIDVSKATLDIAALPDGESWTVTNDAAGLADLAPRLVALAPALVVLEATGGFEMLAALTLAKAGLPIAVVNPRQVRDFAKAMGRLAKTDALDAGILAEFAQRVRPEPRPLPDEAALLLESLLTRRRQIVDMLTAEKNRLGFARGPVKRDISQHIRWLEKRLADVEGDLQDAVTASPLYQAKADLLRSVPGVGQVTTLTLLATLPELGHLSRHQIPALVGVAPMNRDSGTRRGKRMVWGGRAPVRAVLYMATLVGLKHNPVLRVFYERLRAAGKPFKVAATACMRKLLTILNAMLRQRRRWDPQHA

SEQ ID NO: 200543 - protein, 321 aa, unidentified
MTETTVSIFVGVDISKASLDFYLPYSKEAIRIENAIAPIDALCAKLKKKRKLMVVMEATGGYEHLLRSRLGKHGVPAAVVNPRQVRDFAKGIGIDAKTDPIDAIVISTFGSVVKPRPTAMKSDNDEKRSALVTRRSQLLELMNQEQNRIKQTRDDEAKQSIREMLEFMRKQLKIIDTRLAQMIANDKENARIIEILDSVAGVGPVMISTILAQLPELGKLNREEIAKLVGVAPINRDSGKSTGKRYIGGGRSYIRRVLYMSTLAAIRCNSKFKAVYKHLRTMGKERKVAIVACMRKMITTLNALIKNNELWQNERSVSAKS

SEQ ID NO: 200544 - protein, 347 aa, unidentified
MVTIGIDPHKASHTAVALDPSGEMLGELRVVADASMLRRLRRWASSWPQRVWAIEGATGLGRLLAQQLVAAGERVVDVPSALAARARVLARGHGRKTDGIDARSVALVAQHRSDLLTVAADDHTTVLRLLSDRRDELTGERRRTVNRLHRVLRDLRPGGAPRQLSADRATRLLTAIRPASAVDLERKAIARQLIADVRRLDRALLENRRRCEQAVASSGSTLTDIFGISDVLAAKILGHTGDITRFASAHHYASYTGTAPVEASSGEQTRHRLSRAGNRSLNHALHMAARVQTMHPGPGRKHYQRKRAEQKTPTEALRSLKRQLAKVVYRQLRNDHTSQPLTQSGLT

SEQ ID NO: 200545 - protein, 399 aa, unidentified
MISVGIDVSKGKSTVCILKEYGEVISEPHEINHTEADLKALVESISELNEETRVVMEATGAYHLPLLTYLKNNGIFVAVINPLIMKKYSAIGLRKGKTDKLDSIKIANYGIDNWFKLTDYEATDEVYSELKLLGRQYSHYIAMRIESKLVLSNLLDRTMPGIKNLLKNRSDKPEKDKLNDFVKEYWHYDNITKKNEKQFINSYFKWAKNKGYHQSETKAKQIYALAQEGIPTLSSSTPSTKMLVLEAVRVLSEIDRTLSMILSQMQELASSLKEYNVVRNMPGVGDTLAPRLIAEIGDLKRFYNKKALIAYTGIDSPPFESGQFVANKRRISKRGSALLRKTGYEIMKCIKSAKPKDDPIFLYMLKKEAEGKPKKVAKIAALNKFLRIYYARVKEVYNT

SEQ ID NO: 200546 - protein, 370 aa, unidentified
MVKRSMFVGLDVHKDSIDISVAEEGRQGEVRRYGVIAGNREALATVVRALRAPDRRLRFVYEAGPCGFDIHRYLTAQGEECAVVNPSSMPKRSGDRIKTDRRDGDALARLHRAGELTAIYIPTPEDEALRDLVRAREDAVGVSTQAKQRLKAFLLRHGRRYTGRAGWTIAYRRWLADLSFPFAAQHIALQEYRDTIDETERRVERLTDQLRALTPIWRWAAVVDALQALRGVSFITAVGLVAEIGDIRRFEHPRHLMAYLGLVPSEYSSGPRVRRGGITKAGNPHARRLLAEAAWAYLGLPRIGRRMLQRQEALPTAVCAIAWKAQLRLTARFRRLVARGKAKPTVATAIARELTGFLWAIAREVPAPLA

SEQ ID NO: 200547 - protein, 364 aa, unidentified
MKKVYYIGLDVHKDNTQMAVLETRGKEPVAVKVMDSDPTKVVKAIYPYHKKGIVHAGYEAGCMGYTLYRVLTEMKIDCQIIAPNKVFRGGNNERIKTDKRDAVSIAWMLRRDEGAGIAVPDRDDEAARDLLRCRGDMQDDLKRAKQRLLKFLLRHGHIYENTRYWTGKHRKWMKTLGFDMPLEKAVFEQYLYTIESIEERMIRVDLQIKEIAESPRYAQRVRRLRAFKGVDYIIALSLVCEIGDFKRFPTAGAFMSYIGLVPSEYSSGKKRKQGGITKTGNGHIRRLLTEAAWHYTRPAQVSRRLAERRVGTDEAVIAYADRALNRLHGKYVKLLFKGKSKQASVTAVARELSGFLWGVMTAAA

SEQ ID NO: 200548 - protein, 366 aa, unidentified
MGAIYIGVDFHSRQQTICYLKTETGELVITELKHQDKEQVGAFYQQFQGQVIIGLEASGYSFWFEALLERLGCEVWLGDATEIRRRARWRQKSDRRDAELIWDLMVHDEFPRLHQPAAESREVLRMLRYRQKLIKLRTMSKNSLQAIALQAGLAKGKQLFTRVGQEQFQALPMSPVLQWQRDHWFELLKPLNQQLLETMVWCKAQSKDDVNIQRLRTHPGLGLLTSLCLQHTLQPISRFRNQRQVVAYAGLDPVVRSSAERALHLGISKGGSRMLRYLLVEAAHTAIRYDEDLKRFYQRLVERRGRPKAKVATARKLLIRAYIMMRDEIDYAEFRRRAVAARLARTGQGPTTVPVVLIGQSASPGA

SEQ ID NO: 200549 - protein, 515 aa, unidentified
MRYREGAGGPVEADVFLAPLWPVWEAGPDVLAAFSVAQPTVAFAAIGRRAREGKSSNFPGVLRSPAKGRFPVQLLHSRCAGLDVHKKSVSVCARIQQGNKTIIETAVFGTFTRDLERLRDWLSAHKVRQVAMESTGVFWIPVWNVLERAAAGFELLLINPQHAHALPGRKSDRMDSDRIAELHQYGLLRGSFIPPVEVRQLRDLTRRRTHLQQDRNRVVNRIARLLETVNIKLGSVVSDLTGKSAQLILNAVAKGNYEPEELVKLAQASLKNKRELLIGSLEGFSNEHFRWLLSQALSDLKQLDDTLAQVDQRLGAALQPHKELLLRLCTIPGFDFTAAAAVLSEVGFDMKRFADPAHLASWAGLCPGCNESAGKRSSSRMRKGNRYLRRLLTQCAWSLLRKKNCALTRLFFRVAARGGKKKAAMAVAHRILAIAWHIIAEGGVYNEKDAVGNPNQAGRAARRLARRLADLGFEVELKPRTTPTPTTPKQLEPNPEKPVKPPKPKFQKTLVRRKP

SEQ ID NO: 200550 - protein, 331 aa, unidentified
MRNYYVGIDTSKKTIDASIVNSNNQDLFYDSFLNKPFGFKKLLSWSKLKSKGSKVYFCIENTGHYSRNLCKFLEQKNQEFSIINATEIKLTLGIKREKSDKKDSELIALYGLKFPERLQTETMLNDQLLGLQLLLGQRKLLQNKELDFQRNIKMMKHCLSNDNVAKSIVRKNTSLKKFLHKNREDVELKIDQYIQDNPLLKTNYDLLTSITGIGQIIALNTIVQTHNFTMITDARKFSCYCGVAPFKNESGTSIRKGTRISFYGHKGLKKILNFGAMNAVKTDPQLKEYYQRKVEEGKNKMSVLNAVRNKLIHRMFAVIRRGTPYIIQRTF

SEQ ID NO: 200551 - protein, 365 aa, unidentified
MDIHKDSITVAIAADGRAPVLYGTIQSTGAAVAKLADKLSGPGAPLRFCYEAGPCGYGVYRQLRALGHECAVVAPSLIPRRPGDRIKTDRRDALSLARLHQKGELTSVWVPDEEQEAIRDLERAREDFKHAERRVRQRLNGFLLRHGRVYTGGRRWTQAHYRWLETQRFAHPAQQIVFQEYVDEVKHAQTRIKTLEKELEQVLCDWTFSGQARDLMALRGVDTLTAITVLAELGDITRFDTPRQLMAFVGLVPSEHSSGQRRQRGAITKAGNAHVRRVLVESAWCYRFPARKTRHLQRRAERTAPAVQAIAWKAQRRLCGRYRRLSARGMPKGKVCTAIARELLGFMWAIAWEHRHPGSMIARAA

SEQ ID NO: 200552 - protein, 345 aa, unidentified
MNKVVAGMDLHSNNVVIGIMDLDGKRVASRKVPCELKEVVKFLAPYKKRLENIGVESTYNWYWLVDGLEAQKYPVVLANPAGMEQYNGIKHADDTNDAFFLAELLRLKILPTGHIYDAQLRPVRDLLRRRLKLVQHRTALMLSFKSLYTRTTGQEMTLSQLKEMQIKEAQQLYTHPANQLIAGMQIKHIEQISESIAAIEKGVLASARELPFYAKLLTLPGVGRILGMTITMEVGEIKRFADPGNFASYCRTVEAKRTSNDKSKGANNSKCGNKYLAWAFVEAANFAKRYDEQCRKWYDRKAAKTSNVIAIKALACKLAKAAWYLMAEETTYDPARMFGQPAKTK

SEQ ID NO: 200553 - protein, 369 aa, unidentified
MTIYTLKAAPAASAVELKNNNKSTKAKRILVGCDVHLRGYQAARKIDDGAIGVVDNFRSEEALLLSIEKQRQQAEQVVVVYEAGPLGYTLYRKLRATGVLCYVCAPDSSQQRKNRRKNNKIDARSLASKLFNYLNGDQHALQLARVPSEAQEQQRMASRQHDQLVEERKRLGAKGNAMLLSQGLGSWSNWWRPKAWSQLSRVAPQWLLERLQIWVDVLKILDEKISQAKAALARACSGPRPKGVGALSQMQLQSEVLDWSLYSNRRKIACLAGMVPSEWSTGDKASRGSITKVGVPALRRIIVEMVWRMVLFQPQYKPVQKWQAVLKGPNPALKKKAVVAIGRQLMVDLWRLQTGRVTAQDLNLIMVEN

SEQ ID NO: 200554 - protein, 376 aa, unidentified
MEKDSRFVGLDVHAETIAVAVAEPGGEVHALGAIPNTPEAVRRLVKKLGPPETLRVCYEAGPTGYVLYRQLTALGVPCAVIAPTLVPVKAGDRVKTDRRDAEKLARSYRSGDLTPVWVPDPGHEALRDLVRAREAAKKDQLRARHRLGKFLLRQGRRAPTGSKAWGVKHRAWLQTIRFAHAAQDATLLDYLTEIDHAADRIVRLERAIATAADLAPAPVRAVIAGLQALRGIAKLSAVSVVTEVGALSRFAKPRQLMGYSGAVASEHSSGPHRRRGGITKTGNAHLRRIVIEAAWAYRHRPAIGGTLRTRQEGLSEEVKALAWKAQHRLHGRYARLLAKGKAPTQVVTAIARELLGFIWAIGVHIEQHTAGGAPAA

SEQ ID NO: 200555 - protein, 352 aa, unidentified
MGVYIGVDLHVRTQTICWCDTGTGETAERTLDHTQDDVRSFYTQWAAPATVGVEASGYSLWFHRLIEEAGHRLLVGDALAIRRFARRRQKNDRRDAQLLLDLLLHDEFPAVHVPPPASRDVLALLRYRHRLVRIRTMLRNGLQAVAINHQLRLGPRLFTVRGQQQFAALALTGAFSAQRQHSLTLLASLAEQVRAVEEELDRRAQPDPRVQRLRTHPGVGLLTALAVVHTLEPVTRFDRARRIAAYCGLDPREHSSGDVQRFGHISKQGNRLLRFLLIEAARTTIRDDDDLRRFYFHLQSRKNSAIAIVAVARKLVLRLYRMLRDEIDYHEFRRRGRDARRAREVTSQDRSG

SEQ ID NO: 200556 - protein, 438 aa, unidentified
MSNKVIFNLDELFISVGIDVGADFSWMSIALPNQQFVGKPYKILHNSIDSLTTAVSKIKEAEELYSLESRIFLESTGIYHYPLFCYLRDKGFNCSVINPIITKNSTNINIRKVHNDRFDSKKAALVGLKPDLKVSLMPSDLALNCRNLCREYYDLMDNRSAYVNKLQGELRMAFPQYLGIFSKVTINTSLTLLETYTSPSAFLEADKQEIIDIIKSTARFGLTYAQNKYNAIIQAATDANQFGYIIDSNIKRIRLYISFIRKYDEEINSILESLHELVDANEDADFVKQIHLIETFKGAGFLSAVSIMGEIGDFSAFSKPKQLFAYFGLDPAVKQSGKFEGTKVQMSKRGSAIARRVIHMLTLQSISISRNGEAKNPVLREYYLKKCDSKPKLVAMGAVSHKVCNMIFAILRDNKPFKIIAPQEHIKQYNAAKCDIAA

SEQ ID NO: 200557 - protein, 361 aa, unidentified
MVETMTVVGLDVHARSTQAAAIDLLSGELRRERFGAGTERVVEWLSGLEGPVRAAYEAGPTGFGLARLAAAAGVEVMVVAPSKTPRARGDRVKNDRKDAELLARLLMAGGLHPVTIPPDWLEAIRHLARTREQVRRDLGRARQRVSKLLLVEGRVYPGVTTWNQEHRRWLSRQQFAFEETGLAVIDLLAAVDGLAARRQVLDERLSRLAQDERLWPTVSRLRAFKGVDTLTALCLHLELGGDWQRFRSPRQLGSWLGLTPSLEQSGESRTQGGITKTGSGIARRLLVEAAWHYLREPRIGVTLQNRQAGQPDHILQIAWRAQRRLHRTHQRMRGRGKLANVTTVAVARELAGFLWAAATAP

SEQ ID NO: 200558 - protein, 388 aa, unidentified
MDVMVERVAGLDVSKADVKACVRVPAESGARGYRQEVRTFGATTRQLLRLADWLAHSQVSLVVMEATGDYWKPVFYLLEQQFEVRLVNARDVKKVPGRKTDVKDAEWLAQLAQHGLVLASFVPPPPVRRLRDLTRQRANLVRERVRALNQLEKVLEDAGIKVSLVLSKTLTQSGRLMIEALVDGERDPYTLADLALGKARAKIGDLREALVGRFSDHHGFLARQALRHIDLLDAEITVFSSRIEQELRPSRHHQQLLITIPGVSDRVAEIILAETGGDMTRFPTAATLASWAGVAPGNNESAGKHLSGATTHGNTWLLGALGNAAAAAARTKNTYLGAYYKRLAKRRGPQRALVAVMHKIILAVWHMLTHDVAYHDLGPDYFRNPQPA

SEQ ID NO: 200559 - protein, 414 aa, unidentified
MLKIVYPICCGMDVHKSFVVASIASTNEQGVTTYKIKRFSTFTGDLRRCATWLAKNNCKDVCMESTGKYWIPIYNILEPTCNIVLAHPKYVKSIRGKKTDKRDARWIADIFKHDLVAGSFIPPADIRQLRDLVRYRRKLTSFTTGEKNRAQNCLTVSNFKLDDVFSDVFGKAASAITARILENPTEKITDISGFRTKGMKATNEQVLAAVDGEMCEEQAEKLRIIRSHIDSLELCKLNLESLILSTVEKYLPQLNLVMTVPGIQSFAAIGIISEIGVDMSVFPTSKHLCSWAGLTPQNNESAGKKKTTRISRAGAYIKPLLVQCALCAIRAKRFPEVRNRYLALKKRRGHKKAIIAIARMLLTAIYNMLKKNEPYNPELYRSADRPPAHREVSVEEAVFILQRQGYLVTAPPTA

SEQ ID NO: 200560 - protein, 367 aa, unidentified
MADVFTIANNRIGFETLLSRIQSCSQGESKIKVGLEATGHYSYNLLGFLLDSGLATYVINPLHTNLYRKSLSLRRTKTDRIDARTIAMMLMSDVDLKSYSNTAYHNEELKSLTRYRFDKVKERAKLKSSVARLVNILFPELEKLVSSLHIAVVYALLSNYPGASYIANANTEELAETLCTASKGRYTKSKAAKIQVAAGVSIGSKMPAKSMELKHTIALIRELGKEISEVESAIDKITSQMDSPIFTIPGIGRHMGAMILAEVGDFSNFASADKLLAYAGLSPSTYQSGQLQNCYAHMEKRGSRYLRYALFNAAKYVCLWCPTFSAYLEKKRSEGKHYNVAISHAAKKLVRLIFAMQRSGKAFLADY

SEQ ID NO: 200561 - protein, 342 aa, unidentified
MNISTIGIDLAKNVFQVHGVDAHGDVVVVRKLRRAQVVAFFAKVPVCLIGMEACATAHHWARELTKLGHTVRLLPPAYVKAYVKRSKNDAADAAAICEAVTRPSMRFVPIKTEEQQASLAVHRTRDLFIGQRTQLINALRAHLAELGLVAETGRDGFTNLVEMVWDEDNVSLPPAMRQALLAVVDQLEALSQQISKLDRVIMAQHKASDVSRRLESIPGIGVIGATAIVATVADPSAFKSGRDLAAWIGLVPRQHSTGGKEKLGGISKQGDRYLRRLLVVGATAVVRQARLHPEKYLWVMKLLAKKPAKVVAIAVANKTARIAWAIMAKGGHYRAPELAAAA

SEQ ID NO: 200562 - protein, 364 aa, unidentified
MKRKVYVGMDVHKETIQIAILPSNTKALVKEQQIKHEEGQIKKFIQKLKSEGTEIHCCYEAGVTGYPLYRYLKTLGVNCIIAAPGKIPRQSSDKIKTDKRDAIKLARLLRSGDLESIHVPSEEDEAVRDYLRSRDSLRLDLGRNRQRLMKFLLRKGIKYSTTKYWTVSHYKWLNNLHFENEILQATFNDYYSRVRVQEENLKAMDQKIQEIAKSEPYREKVGILRCFRGVDYLTAMFLLSEVNDFKRFKTAGSFMSFLGLVPGEYSSGPKRKQTSITKTGSPRLRRILVEAAWQHRFPGTGSKVVAARRVGQSALVVSLAEKASLRLHKKFKSMQLRGKTPQVMITAVSRELSGFLWAAMNLVA

SEQ ID NO: 200563 - protein, 410 aa, unidentified
MEVLYPICAGLDVHKDTVVACVRYMSQGKVSTQVRCFQSTTEALLELSSWLAQESVTHIGMEATGVYWKPVWHILSDGEFQLVLANAAHVKNVPGRKTDVKDAEWLADLMAHGLIRPSFVPDEPTQQMRDLLRTRKQLVRERTSHVQRIQKTLEDANIKLDSVISDIVGASGRKMLAALIKGETAPELLASLASSRIQASEKQLRAALRGRVTKHHRFLIKLHLDQIDAFDSAIGSIDKEVDGNVESFRQAAQLLSDVPGLGPLAVMIVLSEIGLEMNRFPSAAHLVSWAGLCPRNDESAGKRRSSRLRQGAPWLKTALVQCAWAAARTKDSYFQAQYHRLRSRRGSKKAVCAVAASLLTTIYHMLKNGTCYQDLGPDHFNKQAKEKHAKRLLSRLENLGYEVQITLKAA

SEQ ID NO: 200564 - protein, 316 aa, unidentified
MNTFQNNEINVGIDTGQAQLDFNVRPTGESFSYPNTPKEALAAAKRLAGLNPTRVLIEATGRLEANFVRAARKVGLPLVVCNPSQVRNFAKSTGRVAKTDTLDAQDIAHFGEALKPRLTLVKSAKLQEVSDLIAVRSQCLSMSTMQKNRLTRMPKSVHGPIRRILKAIQSEVAKIDQQLDKLIDRCPQWAEKRDLLLSAKGVGKVLAFTLLSELPELGQLNRKQIAALVGVAPMNRDSGKFEGKRIIRGGRHKVRTVLFVSIMSAIQCHPKLKPMYERMVAAGKPKKVAMVACMRKQLTILNVMMRDGTHWQENMI

SEQ ID NO: 200565 - protein, 421 aa, unidentified
MTVYLERGYNRKEYQWFYKQYQNIYSKEIFMIYVGIDVAKDKHDCFITNSDGEVLFKSFTIPNNREGFETLFQKVQSVSDDLTKVKVGLEATGHYSYNLLGFLLDKGLPTYVINPLHTNLYRKSLSLRKTKTDKVDAHTIASMIMSDVNLKSYSDTSYHNEELKSLTRYRFDKVQERAKLKTSVSRLICILFPELEKLVATIHMASVYALLSEFPSAHAVASAHLTRLTNLLSESSHGRYGKDTAVMFREAARNSIGSNMPAKSLELKHTIKLIQKLTSEIDEIETEIKSIMDEVNSPILSIPGINYRMGAMIIAEIGDFSRFDSPDKILAYAGMSPSTYQSGQLDNCYSHMEKRGSRYLRYALYNATKYVCHWDESFGTYLAKKRAEGKHYNVALSHATKKLVRTIYAMEKTGQSYSSAS

SEQ ID NO: 200566 - protein, 338 aa, unidentified
MFYVGVDLHKQIIKLCVIEVLRGKRKIVTRRGFSCAEPRAIRRFFEELGPFRVVVEATAAYEWFFLLIEELANRLILAHPKKLRVIAESTRKTDKIDAEVLATFLALDMIPEAYRPSPRVQQHRVLVRHRHWLQGRITAVKCKIRNKAAHYNADVPDLFRRQDYLDGLAMNAADRFETNVLLEQLGSLYLQLNEADGQLRQFAAVAPAAEREARAVLASIPQVGTVTVDVVLSELGDWRRFRSAQAVVAYAGLDPGVRQSAKKRLDLHITKEGSRLLRWALIEAAWRLVARLPRWKHLFENLCVNTGSKKKAIVGVARHLLRAMFAMLRTGRAYRFAA

SEQ ID NO: 200567 - protein, 358 aa, unidentified
MEKARSQVGKINTFSRERLTMTTFQSFVGVDIASTSFMACVGTMPWKLTVKPVQFDNQEDGFVSFLGWLQEHNLSPKHTVVCMEATGVYSEGLAYFMYASNYTVAVEPPLNIQRKFPVSASKTDELDCQYIAEYACRYVDKLSFWQPRAEILEQVKVLLTTRQHFSVQLTGHKNALHAVNRKKVSSTLAKQAHQSMIEQIAKQITAIDKEIRRLIDSDPTFKQTLLLLLSVPGIGLQLAAHLLIHMQTTLDPKVLAAFIGICPIQHKSGSSVFSTPTSRHYGPSVLRKLLYLAACSVRTHKKQFQQYFFRKVAQGKHKKLVLNNIQNKILKIACAVVRSNQPYIPNYISVNPLVFKNH

SEQ ID NO: 200568 - protein, 356 aa, unidentified
METAYDGRQIVGMDLHRRRSVLVRMTEDGRRLETARITNSPRELRAQIARAGKSPKVVLEATYGWYWAADMLEAAGAEVHLAHPLGVKAFTYRRVKDDQRDAAGLADLLRMGRLPEAWIAPLPVRELRELTRYRTKLVGLRTSCKDQVHAVLAKLGVPVTCTDIFGTAGSAWLDGLRLPQPYAGKITSLRHLAGELTTEITMLSQVTCDLLAGDRGYQVIQQLPGIGPVHAAVIIAEIGDATRFTSAARLCSRAGLTPRHRESDAKVVRGHITKQGSPILRWALIEAVQHVPRDSVIGAAKQAIIDRRGKQARSIAKVAAARRLLTLIFYGLRDGQIRCLSRSAGQPPDSQPDQDD

SEQ ID NO: 200569 - protein, 378 aa, unidentified
MRAVCGLDVHKDSVFLCILCETGEIIEKVFGVLTHQLREMRRMMQSHGVSEVTMESTAVYWIPVWRVLEPHFHLKLVNPYFIKQLPGRKSDVKDAQWIAECTLKDLVRGSFVPPERIHQLRQYDRRIFDLDAEIVRKLAKLDAVMQRCNIRLSNYVSNTDTKSYKDVVRKLCEGVTDPEELIKVIYSRITNRHGRETILAALTGVVSDAEKDTMRQLRDELDLAEKHKQECMDKMMYICKTYYPEELRRLMTIPGIGERAATSLIAEIGVDMTKFQTAAHLASWSGLKPRNDESNKKIKSRRITHGNIFLRKTIIECAWGASRTKDCFFSRFSFHQTQVRKKNKMKVLVAVARKLLIAIWHVLNDETDYKDFTVKKRL

SEQ ID NO: 200570 - protein, 399 aa, unidentified
MRASSWNQISMGLRVARLPRWALSVAGKFYGMARPSFSISATLSGTLSGEERTMSIAMLGIDLGKNSCSVAGLDETGRVILRRRLTRDSVVRLAAKLPACVVAMEACCGAHHLGRVLREQGHEVRLMSPEYVQPYVKAQKNDERDAEAIAEAATRPTMRFVELKTEAQLDAQILHRARSRLVGQRTALINQLRAVLLERGVVVAKGRRRLEKYLLELLDGTGKPPAFLSPRTCLLIQDMRLEWRELDRRIEALTAEFVARAREEAAARRLATIPGFGALNATALVAAIGTGETFRRARDLAAWLGLVPRQATTGGKPRLLGITKRGNTYLRTLLIHGARAALPSLSASSSPMGEWLRGLMGRAHKNKVVVALAGKLARIAWAILRSGDRYAKEGRPAMV

SEQ ID NO: 200571 - protein, 383 aa, unidentified
MKKTQETLRNKDSIKEPVLYIAFELSNSKWKLAFSDGSKIRHKAITAGNLAQLHAEIDLAKRKFKMIEDVRVVSCYEAGRDGFWIHRYLESQGIENLVVDSASLEVNRRKRRAKTDRIDAGKLLRMLLRYWGGEKQVWSVVRVPSEQDEDARHLHRSLEDLNKERTMHRNRIKGFLVQQGIKVSNPSQKRFLELLEKLRSWDGRPVPRDLKFTIVREYERLQMVEDQIKALEKEKKERLKNPDTVSLQKVAKLATLYGIGSVSSWTFVMEFFGWRQFQNRREVGALAGLTPTPYDSGKSLREQGISKAGNQRVRALAIEISWAWLRFQPQSKLSQWFMKRYANGGKRMRRIGIVAVARKLLIDLWRYLEYDKIPEGARLKSAV

SEQ ID NO: 200572 - protein, 345 aa, unidentified
MQLHTIGIDLGKTVFHLVGLNPRGEVVVRKKFSRKQLLLFTANLQVELIGMEACGGSHFLGRALREQGHEVRLMPAQYVKPYVKTNKSDYIDAEAIAEAVGRPKMRFVPIKSDDQLDLQSLHRVRERWVMRRTAVINQIRGLLLERGITVRKGRRHIDAALPGILEDASNQLSGALRVLLLQLKLELDHLQMRIDEVDATINKTAGENEVCRRLVAIPGIGPVTATAIIAAIGNGAAFKKGRGFSAWLGIVPGEYTTGGKQKLLGISKRGNSYLRKLFVQGARAVLQQSAKQSSGLSAWLAQLTTRLHSNVAAVALANKLARMAWAVLAKNEPYRPPIVVGAATA

SEQ ID NO: 200573 - protein, 350 aa, unidentified
MVVVGADVHKRTHTFVAVDAVGKKLAEKVVRATSSGHHQALRWARERFGAEVVWAIEDCRHLSARLERDLLTAGQQVVRVPPKLMAQTRASARTRGKSDPIDALAVARAFLREPELPVASHDEVSRELKLLVDRREDLVAQRTSTINRLLWRVHELDPERAPKPRSLDLAKHRNLLSQWLATQRGLVAELARDELADITRLTETINALAKRISDCVRQVAPALLALPGCGELTAAKLVGEVAGVNRFKTEAAFARHAGVAPIPVWSGNTAGRVRMTRSGNRQLNTALHRIAVTQIRLDGLGQAYYQKRIDAGDSKTEALRCLKRRLARTVFHHLHTDHRNRLQPCQLAAA

SEQ ID NO: 200574 - protein, 352 aa, unidentified
MNTLATGGTTYSAGIDLHKSPLQLHVVDAAGMTVCQQTITHDKRRQLLAALAPYGKDVTVGVESTYNWYWVADELRRQGIPCVLGHARDVHAQRQGKHKSDGKDAANMSQMVRMGTFPEAYACLPEWRATRDLLRKRLRLVEERTQHMQHSGCVADQYLLGEDRMADAGYGRAVIADVDKAVDIDFKAQEMLTTLIDSLDKWILERAKISDKPLYELLTGTRGIGPVLSLTIMYETADITRFVRAQQFASYSRTANPEYSSAGKTLGPGDRKRGNPYLCRALHMLAVQSIKFYPEVKAFHRAAVKRKGRRTARRILAHKWALAVYYMWKRREPFDVTKFLGTAYAARAQSSH

SEQ ID NO: 200575 - protein, 386 aa, unidentified
MSRPSNILLPAINYDHTLVLAIELSNKSWVLAAQAPGLPQTKAQRTIEPNKNALLAAIDGYRARAAAVGYTVDRVITTYEAGWSGFWLARWLVAQGVEVHVVQPSSVPVDRRLRRAKSDGIDAELLLRTLLAWLRGEPRVCSMVPIPDEADEDARRCVRERTELLSDRVGLTNRIGAVLATLGVNDYNPLLQSRRRRLAELRTGLDEPIPPNALAKIERLLARLELVLAQIAELERERDEVAAADAPDRPGKMIQQLASLRGIGVQSATVLVREAFVRHFPNGKALGSYAGLTSTPYSSGGIDREQGIGKAGNRRLRTVMVELAWLWQRYQPGAAQVAWFRDRVGSTGRRIRKVMVVALARKLLIALWRFVIDGVMPEGAVMKPSI

SEQ ID NO: 200576 - protein, 318 aa, unidentified
MDSSGQWVGIDVSKTHLDVFVGGRHRRFRIADQFDEAVSWVSESKPRGIVLEATGGYEQRIAKALEAIHCVAVVNPLHVRNFAKSRGRLAKTDKLDARLLAEFGEVNQPRATRTLSDVEVRLRAAVQRRDQVADLRQVAKQHLEHTDDLTMLRHARKIVAMLDKEVRGLDAVVAKIVNEDAALKARAKRMRTMPGIGAIIAAALLVYLPELGSITKGQVAALAGLAPMNCDSGMMRGQRHIRGGRFRVRKALFIAATVNQRCKISRFKDQFLALTARAKPPKVARIAVARKILVALNSMLKNGTDYAHASPSQSEKAA

SEQ ID NO: 200577 - protein, 341 aa, unidentified
MQITTIGLDIAKNVFQVHGIDAAEKVVVRKQLRRGQVMKFFAALPPCLIGMEACATAHYWARELTRLGHEVRLMPAKDVKAYVKRNKNDAADAEAICEAVRRPTMRFVEIKSAVQQGRLMQHRARDLLMRQRTQTINALRAHMAELGIVAAQGREGLKQLLTIIADEKDERLPIDARASLIVLAAQLQALQTMIGSIEKRIIAQHRANEESRRVATVPGIGTLGASAITATVTDPSVFRSGRDFAAWIGLVPRQDSTGGKQKLGPISKQGDRYLRRILVVGAHSVLRRAKQEPQKYPWLAQLLARRPFKVVAIALANKMARVAWALLARGGAYRVPALAAA

SEQ ID NO: 200578 - protein, 355 aa, unidentified
MSGLKHQKEKRSMDHFAGLDVSVKETSVCTVDDTGRIIREVKVASEPEALLEVLRNPAWHFKRIGLEAGPLSQWLYGALAEAGLPVICVETRHMRAVLKAQINKTDRNDARGIAQMMRVGLYRPVHVKTLRSQKLRMLLTHRKLLQAKAIAIENDLRSTLRNFGLKVGMVGNVKFEGRIKELVENLPDLATLVEPLLIVRRVLHEQLGILHHRLLDIVRNDDVCRRLMTVPGVGPVVALTYRATVDVPARFKSSKAVGAVFGLTPSRHQSGESDRPGGISRCGDEMMRVMLYEAAQVMLTRTNKWSWLKAWAMKIARRRGMKKAIVALARRLAVIMHRIWVDGTEFRWTREVVAA

SEQ ID NO: 200579 - protein, 374 aa, unidentified
MIATTRPEISVSEPTLYVALELSKKDWKLAMTSGFGVDPWLRTVRSGDWPAVERAITTGRTRFGVGAGAAVVSCYEAGREGFWIHRALQQRGVQNRVVDSASIEVNRRARRAKTDRLDALKLVRMLVRVCCGERRVWSEVHVPTVAAEAARQVSRERTALTQEQTRVVNQMRGWLATWGTTLPRRTGAWWTRVRDWAGMALPLAVQGRLERAAARLAVVEAQIAALEAQQQAALTIAAPASALRQLVRVKGVATTSASVLLDEGLVWRAFRNRRQIGGFLGFAPTPYNSGESVRDQGISRAGNGRLQAISIQLAWNWVRWQPTSALTQWYRAHFGTGKRARRIGIVAVARRVVIALWRYVTAGVVPAGAILTAA

SEQ ID NO: 200580 - protein, 372 aa, unidentified
MRNLDKYVGLDVHKDTSVIAVADGGRSGEVRPYGEISADLGALEKALRKLGGAGVTLHVVYEAGPTGFVIYRRLRQLGIDCIVVAPTKTPQEKGPRQKTDRRDALLLARLHRAGELTAIHVPDAVDESVRDLTRARADAVHDLTRAKQRLKSFLLRQGYRYTGKANWSEAHQRYLRELVLPLPALKAVLEESLLAVEQATQRVVRLEELLAVQVPLWRMFPAVEALMTLRGFQLTAAAVLVAELGDVRRFAHPRHLMAFLGLIPREKSTGNSRRLGAITKAGNAHARCILVEAVQHAFLPPKVSAALALRQQGQPAAYRTLSWKVQVRLHKRGWHLLHRGVMKAKVTVALARELSGFVWDLLRQVPPPAPTG

SEQ ID NO: 200581 - protein, 325 aa, unidentified
MNKYKHYYGIDISKDVFDVMDDQGMHYEFENTITGFKKFKKKLPSESCCVMEATGVYQVQLADFLYEQGVFVSVVNPLVIKRFIQMNLRRIKTDKADAEMICKYGQMNDLKEYKPAPVYVKESRIIVENIDLLIKSRTMIKNRLHAMEFKTSHPRLILVNPLKRTIKDLTIQIKKLEEELKKLIEEHEPDLFIRLQSIPGIGKSTAMFMIVMSDGFKKFESAKQFTCYVGLTPVERRSGTSVRGRSRISKQGNGKLRNLLFLCSFNACKSNSACKSLYDRIVAKGKSKKLALIAVANKLLKQSFAIAKSGLVYDTEYRSVRPSIG

SEQ ID NO: 200582 - protein, 354 aa, unidentified
MPRKTTSLEAVATIGIDIGKNTFHLIGLDKMGAIVLRQKLSRGQVDTRLANMPPCLIGMEACVGAHHLSRQLKALGHDARLMPARYVRPYSRGQENDFRDAEAIAEAVLRPTMKFVAIKTVEQLDLQALHRVRERLVCQRTSVINQIRAFLLERGIAVRQGLRALRTEMPIVLAMTDKLSPRMIRMIEDLCTDWRHLDARIATVSNEIKTLSEQDDGAKRLMTVPGIGPIISTATVAAIGSGDVFSKGRDFGAWLGLVPRQMSTGGRTVLGPISKRGNRYLRMLFVQAARAVLLRPQSWEKYGLRSWIEAAARRLNRFKLAIALANKIARVAWGVLHGGRNFEVRSMRTAPQAA

SEQ ID NO: 200583 - protein, 394 aa, unidentified
MKLVGIDVGKNSHHFCVMDKETGEFNVTPTSFSNNKEGFDFLINSLKPYSKKSILIGMEDTGHYHVALLKFLLSNGYTVALINPKTTDLTRKMEGGITKNDKLDTITICDVLDTPERKKQYRITKVDRFDLYEQRQLTRHHHNLKEELNVYCNRLQKSIDLVFPEFNTLFSSKYSIVYMNLLKTFGSAEAIASTDIRTIRKCFEIKGRGNRISLTPEKLKECAKNSIGISSEVETIQIKHLVSQITLIKEQIAEIDKKIEEFSITNNSPILSIPGISHFSDTSILAELGDIGNYSKPSQIIKFAGVAPYHYESSQYNAQHTGITKKGSKYLRKTLYQIILTVINNNPVFKKYYLLKISQGKGHRCAQGHCIRKLLRIIYHLLETGQSFDPALLR

SEQ ID NO: 200584 - protein, 344 aa, unidentified
MEYYAGLDVSLRSVAVCIVDEKGKTVLERSVPFEISDVEACLRGWPHPLKQVGFEAGAMSQHLFFGLKEAGFDVVCMEARQVNAALSAMRNKTDRTDARGIAQILRSGWFSPVHMKSREAHATRALLTCRKAIQRKCIDLANEIRGLFRVFGLRLPPRVDQGSFDERVRAIIEADPDLSRALLPLLDARAVLYKTYRELDRRVKQAASRDEVCLRFMAIPGVGPVAALTFRAAVDDPSRFTRSRTVAAHFGLTPRRYQSGEMDNPGRISKAGDPEVRTALYAAANAMMMRAVASSGIKSWGLRLMRRKGRRRALVAVARKLAVVMHRMWTDGTEFRRDLSEGVA

SEQ ID NO: 200585 - protein, 341 aa, unidentified
MQITTVGLDIAKNVFQVHGIDAEERVVVRKQLRRGQVIRFFESLSPCLVGLEACATSHYWARELTKLGHEVRLMPAKDVKAYVKRNKNDAADAEAICEAVRRPTMRFVQVKSAEQQAQLMQHRARDLLMSQRTQLINAMRSHLAELGIIAPQGREGVKELLAIVANDATSHLPNDARASLLVLAAQLQALQTTIGAIEKRIVVQHRADKQSKRLQTIPGIGPIGASAIAATVTNPKIFRSGRDFAAWIGLVPRQMSTGGKLKLGPISKQGDRYLRRLLVVGAISTLRRAKQNPQKFPWITRLLARRPFKVVAVALANKMARIAWALLISDKTCRSAWFAAA

SEQ ID NO: 200586 - protein, 393 aa, unidentified
MVFIGIDVAKNKHDCCILGIGGEVLKDSFTFANNRSGFDELFTAIQSAMQGKQDNEVRVGLEATGHYSTNLVAFIRGSGIEPIILNPLSVNLFRKSQTLRKTKTDKVDARYIAAMLMTLNPSLPRTPISYHIEELKVLTRNRSRLVGYCAKLKLSLTRLLDVVFPELPSIVWSRNQKSVHGLLLELPNARSIANCRIDRLTNILKDASHGRYGRERALVIRKAASDSIGSHSPAMAFEIQQTIRLIQNAQAEIKLLDKQIAIFIKSTKTPLLSVPGIGNTLAAIILSEIGDIRRFETPAQLLAFAGMEPSAYQSGNFNANNTPMVKRGSTYLRWAVLQAARLVAMRDKTFKAFLKKKRNEGKHYNVALSHVGKKLIRVIFHMLLTDRVFIPQT

SEQ ID NO: 200587 - protein, 403 aa, unidentified
MNNVAGIDVSKGKSMVSVLRPFGEVVAKPFSIGHTGSELKELADYLKSLDGETRVVMEHTGRYYEPVARFLHDEGVFVSAVNPKLIKDYGNNTLRKVKTDKADSRKIARYGIDNWAELRQHTPMDTIRMQLKTLNRQQSLYSKTKTMMKNNLIALLDQTYPGVNALFDSPVREDGSQKWVDFATTFWHVDCVRNMSLTAFAERYRKWCKRHGYNFSQSKAVEVHAGAQDLIAMLPRDALTKTMVRQAIDALNAISASMERLKAEMQALAAQLPEYPVVMAMHGVGDSLGPQLVAELGDVTRFTHRNAITAFAGVDPGADQSGTHEAKSTRVSKSGAPELRRALFLVMDCLLKTQPQDDPVYRFMDKKRAEGKPYLVYMTAGANKFLRIYYGRVKEYLASLEGN

SEQ ID NO: 200588 - protein, 348 aa, unidentified
MAQTIVEGGRTVVGGVDTHLDVHVAAALDPIGGVLGVESFAATPQGYAAMLKWMGAFGAVFKVGVEGTGAYGAGLGRFLARAGIEVVEVDRPNRQIRRTKGKSDPADAVEAARAVLSGRCTGAPKSRDGNVEAIRALLVAKRSAREGRLRAVHQMRQLSYTAPDQLRCRLKGLTTTEFVGEAAALRVRAGGEPVVSATKMALASLGRRVHTLEEEAARLDERLAELVEATAPKLLELFGVGIDTAAVLLVAAGDNPERLRSEAAWAHLCGVAPIEASSGKVTRHRLNRGGDRSANAALWRIVMTRISKDPRTRAYLERRTKEGRSKREVIRVLKRYVAREVFKVLPRA

SEQ ID NO: 200589 - protein, 344 aa, unidentified
MQITTIGLDLAKSVFQVHGVDATGQVVVRKSLRRSQMLAFFTKLPPCLVGIEACGTSHHWARELIKLGHEVRLMPPVYVKPYVKRGKTDAADAEAVCEAVARPTMRFVPVKSPQQQAALSMHRTRDLLVKQRTQLINMIRSLLAEFGIDIPKGFERALLMARQIVDGKAPDVPIEAAKILGTLSQQVLTTHVRLREIDRDLAVWLLGNEAARRLMTIPGIGPVGATALAASITDPHQFRSGRQFAAWLGLTPLQKSSGGKERLGRITKMGDKYLRKLLIVGMTSLVRRAKYNPGKINPRLADLLTRKPTRVATVAMANKTARIIWAIMARGETYRAGHRPTLAA

SEQ ID NO: 200590 - protein, 322 aa, unidentified
MNEIKEFIGIDISKATFDVYGSEVGFHKFENTDVGFKSLLNLIDSDDCCVMEVTGGYHNRLAEYLHAHQIKVSVVNPVSIKRYGQMRLKRNKSDKADAQLIWSYACNQGVKLWEPLPAYLETCRSHQSVISLYLKQSTQLKNKLQYLENRSLDKGAVARSIKLQLSRLTIEIQRLENEIEELIKQHDPQLLTCLRSIPGIGKKTAMFLIVFTNGLSEFDNAKQLISYLGLAPTERTSGTSIRGKSRISKAGNPKLRSMLFLCSFTAYKHNESCHRLYERLLNKGKTPKLALIAVANKLLKQAYAISKSRIPYDATYCSPKPV

SEQ ID NO: 200591 - protein, 387 aa, unidentified
MGKTMSLASSAAAVDYDATLILAVDTSNKSWVVAAHVPGFGHIKAKQTTAPTADALAIAIEGYRRRAATSGRVIDRVIVVYEAGYGGFWLARWLKSRGIEVHVMQPSSVPVERRKRRAKSDKIDADLLLRTLLAWLRGEPRVCSMVAVPEEAEEDARRYSREREELIRERIMLSNRVGAILATLGIDDYNPLRRDRRVRLEALRTALDQPLPEHARAKIVRIIDRLELVLSQVSVLESQRDAVLEEKAPEEAERMIKALVLLRSIGAQSATVLVYEAFIRRFASGKALGCYAGLTGTPFNSGGSEREQGISKAGNRRLRAAMGELAWLWLRYQPESALATWFKERLAGAKGRLKKVLLVALARKLLIALWRYATDGVVPVGAVLKPA

SEQ ID NO: 200592 - protein, 340 aa, unidentified
MSKFTKKSVFVGVDISKDRLDLALLKEESYGKYVSKSVVNEFNGFDEILNWLKNHRVNITDCLFCMEHTGTYGLMFFAWLSQVKIDYAVIPALEIKRSMEITRGKNDQIDAIRIADYAFSNRVKLEPFSLPSVNMLQIKQLLTYRSQLVRLSTSLKNSLKSHKQYQRITGLASLTEDIETKIEDLKVSIQNIEKQIKDLIYKDDQLNKNYDLATSVKGIGFIIATFMLVSTNNFTAFENGRQYASYSGVAPFEHSSGTSVKGKSRTSNLANKQIKTLLSNGANSAINSDPEIYSYYQRKIAQGKDHKLVINAISCKLLNRVFATVKKETPYVITYEKKFM

SEQ ID NO: 200593 - protein, 412 aa, unidentified
MQVVYARCAGLDVHKKTVSACVSVCEVEGGKQQQMRVFGTFTSDLLALADWLKERGVTHVAMEATGIYWRPVWAVLEGQFQQMLVNPQHIKAVPGRKTDAKDCEWIADLLQHGLLKGSFVPPTPIQDLRDLTRYRAELRQSQNRVANRLQKFLEQANIKLSSVASNALGVSGRQMLEAIIAGQEDAGQLAKLARGKLKNKIAELERALEGRIRDHHRFLLAEYLDEWEALGERIVRLEAEIDKQIRPFEQAVALWQTIPGVDHVTACNLVAEIGVDMRQFPSAQHLASWAALCPGNHESAGKRKSGKTRDGNKWLRRTLCQAAWAVTRKKNCYLSAQFKRLAGRRGVKRAVMAVAHTMLVIGYHMLKTGQTYHELGGDYLERINKDQLQRYLVKRLQRLGLKVTVEPVPQAA

SEQ ID NO: 200594 - protein, 392 aa, unidentified
MFYIGIDVSKDKHDCFCCNDDLQPVFQFQFSNDSIGFNLLFEAIKSLDSSFDNIKIALEATGHYSYNITSFILDNDLPLAIINPLHSNLFRKSISLRKTKTDKVDANVLARMLVAYPDLKFSTSLDDNDIILSELKSLTRFRLSLVKDLSKLKTSVSRIINIIFPEIEKVFSSTNSLYELLYNFPSAQEIANAHLTKLTNVLIKASRGHFSKEKAIQIKELAKNTVGNSSCASTFELKHTINLINEYNYSIDKIDKEITTIMDKIASPITSIPGIGITLASIIIAEIGNFDNFDSPDKILAFAGMSPTIYQSGKYVASSAKMEKRGSKALRYALYNAARLTSIYCPVFREHLARKRSQGKHFSVAISHVVKKLVRVIYHLQTKNELFKNTIN

SEQ ID NO: 200595 - protein, 470 aa, unidentified
MLPNQRGENEAMKQKRSKKASREPQGWSLNLNIVHPNAAGIDIGNESHYVAVPPDRDAKPVRQFACFTEDLRRMAAWLRSCDIDTVAMQSTGVYWLPVYEILTEAGLRVFLVNARHTKNLPGRKTDVQECQWLLQLHTFGLLNNSFRPPEEICVLRAYWRQRAQHVASASACIQRMQKVLTEMNVQLANVITDISGMTGMAILQAILKGERDRYKLAALADVRIQATQEEIARSLEGNWRPELLFILQQEVDLYHIYQQEIAECDTALCAHLQTLEGKAKPDSKLPPTKANKKAGSNAPSNFDLRGELYRISGTDLTQIDGINVMNAQTIIAEIGVDMSRFPTEGNFASFLGLSPDNRITGGKVLRRGTKRVENRAATALRMAATSLWRSKTYLGAKFRRLRARLGAPKAITAMAHMLARLVYRMLRYGEQYVDKGMKYFEEKYRQHEILSIQKKAKDLGFAVTLTPAAV

SEQ ID NO: 200596 - protein, 375 aa, unidentified
MKEKVRFLGLDVHAETIAVALAEPDGEVRSLGTIANREESIRKLIKKLGPVEQLRACYEAGPTGYVLYWQLTQLGVECAVVAPTLVPTKAGDRVKTDRRDALKLARSHRSNDLTAVWVPDGDSEALRDLVRTREAAKQDQLRARHRLSKFLLRMGRRPAVGMKAWTEPYMAWVRQVRFQRPAQQATLQDYLHEVDHMAARVKRLEQAITEVVKLASPEVQEVVKGLQALRGIAEISAVTIVAELGQISRFDTPRQLMGYSGAVPSEDSSGKRKRQGSITKTGNAHLRRIVVEAAWSYRHRPAIGPRLRKRQEGVPEPIKEIAWKAQVRLSKRYARLAAAGKDQRKIITAVGRELLGFIWAIGVKAETASKQPMAA

SEQ ID NO: 200597 - protein, 352 aa, unidentified
MNYTQTTAVPKLFIGMDVHKKSWTVHFKTDLFDNKTVTMPAELSALISYVAKNFIDHEVSCCYEAGCCGYWIARALRQQGWEVKVVNPADVPRINKQDWQKTDKLDSRNLCKHLSDDNLKGIHIPEEEQEQLRSLFRRRIHLARQLRTIKNHIKSQLLYYGIKLPEQFDNPNWSREMKTWLGTIKWKYSSAAESMRSRLKQLEFVWYEELHISNVLRAYCRKHYKKDYYLYKSVPGIGGITASAMIAELGDIRRFNRMDELAAIVGLVPGMYQSSENKINLGLTKRSNHQLRSLLVEASWVAVRTDMALQQYYRKHAHKEPNKAIIKVAHKLLSRIRAVIFSGIPYQTGILK

SEQ ID NO: 200598 - protein, 450 aa, unidentified
MHYKLRGNPMPVLILFLMKGGDTMNNALTTTLFIGIDVSSRTNYVFALDFFGTKLLSFQVKNNLPGSEQIISKVCSCLKENNLTHLTIAMESTSFYSWHLANTLSSHEALLWFKPKVYCINPKVIAAYKKSFVDIDKTDPKDAFVIADFARVGKITTSPWNGAEYIAIQRLTRCRLHLMENISREKSYILSNIFLKFSELAVLDKNETPFSNTFGVTSEAVLTDYMSVEDVANTSIEDLISFLVEKSKNRFSNPEATAKILQRAARDSYRLDKALYDPLNATIAASLNCIKALEKEVKSLDKAIEKAVKGFGNHQYQCLMSIPGIGPVFAAGIIAELGDITKFNNQACVAKYAGLTWRKKQSGNFTADNTFLTKTGNKYLRYYLLEASASIIRHIDEYSAYYQKKSDEALVHKHKRALALTSRKLVRLIFALLRNNQLYTSNEVVEKATI

SEQ ID NO: 200599 - protein, 338 aa, unidentified
MTILTVGIDLAKNVFAVHGVGETGKAELLRPAVPRDKLHELIAALPPCVIGMEACSGAHHWARLFQASGHTVRLIAPKFVTPYRMTGKRGKNDAADAAAICEAIQRPHMRFVPIKDMEQQSRLMVHRARQGFVEQRTATLNRIRGLLSEFGVVLPLKAATVRRRACECLEELPGYANTVIGDLLSEVTRLDERVAQYDGYILAMARADARAKQLMQLSGVGPTTATCLLAMIGNGHDFDCGRQFAAWLGLTPGQYSSGGKTRLGRITKAGDAYLRSLLVLGAKALLNAAKNKTDSLSRWAVALAERRGYWRAVVAIAAKNARMAWAVLRRGDAFALPA

SEQ ID NO: 200600 - protein, 341 aa, unidentified
MKKNLFFIGLDISKADFAASIYQTPDQLIVTKEAIPNDRKGFEMLLLWLYDHHIDKKNCRICMEATGVYSQAIAYYLLFQGFPVSVEPPLKVKRAFDPVGHKTDPVDSKQIAEYAYRFQDELTSWKPRDEILEKIRQLLSVREQFTKQKVALDNSIQAYSKQRVQVTLIRKAQKETLNQLKKQIARIDKELANLIKQDPQIFQRANNLDSIPGCGMLLAAHLLVITENFTKIRNSKRLAAFVGIVPYQHQSGTSVFKRAKIRHFGPGPSRKLLRLAAQSVATHNATFRRYYLRKLDQGKPKPLVLNNIANKLLKIACTIIRNNTRYIKDYRSINPMYLKSA

SEQ ID NO: 200601 - protein, 321 aa, unidentified
MSESSVAVVGIDVAKDHVDVAMVGASLTPMRFDNEIDGHTAMIAALQPLSPQLVVMEATGGYEAALACALQAAGMAVAVVNPRQARDFAKALGRLAKTDRIDAEGLAEFGRMLLTRPDLARYLRPLETPAQQDLAALVTRRRQLVTMLGMERQRLASARPAVRRSVQALIRAIEKQLDQVDAEMTRHLTTHFRELDQLLRTTGGIGPVVSATLIADLPELGRLTRRQIAALVGVAPMAWDSGQMRGRRRIQGGRFEIRRTLYMATIVAARYNPVIRAHYQRLVAAGKLKKVALVACMRKLLTILNAMARTATAFNPEHHHA

SEQ ID NO: 200602 - protein, 414 aa, unidentified
MLKIVYPICCGMDVHKSFVVACIASTNEQGVTTYKGKRFSTFTGDLRQCADWLSENNCKDVRMESTGKYWIPVYNILESTCNIVLAHPKYVKAIRGKKTDKRDAKWIADIFKHDLVAGSFIPPADIRQLRDLVRYRWKLTNFTTGEKNRAQNCLTVSNFKLDDVFSDVFGKAASAITDRILENPAEKITDVSCFRTKGMKATNEQVLAAVDGEMCEEQAEKLRIIRSHMDNLELCKANLESLILTTAEKYLPQLGLVMTVPGIQSFAAIGIISEIGVDMSVFPTSKHLCSWAGLMPQNNESAGKKKTTRISRAGAYIKPLLVQCALSAIRAKQFPEIRNRYLALRKRRGHKKAIIAIARMLLTAIYNMLKKNEPYNPELYRKDDRPPAHREVSVEEAIFILQRQGYLVAAPSTT

SEQ ID NO: 200603 - protein, 350 aa, unidentified
MIIIGCDYHPGFQQIAFVDTDTGELNERRLGHREEAEQFYRQLKVSGKQVRIGMEASGHARWFERLLSELQFELWIGDAAAIRAKRVRKQKTDRQDAQLLLTLLLEDRFPRIWIPNPENRNLRQLLWHRHRLVQMRTRVMNQLHVVALNEGVRLKKALWRPAGRAQLESLELACWSSRRRQDLLDLLDQLTAKIQELTRALEAEVEKRPVARRLMTHPGVGPLTALAFELVIGTPERFGCGKQIASYVGLVPSEESSGDRRRLGHISKQGNSLLRFLLVEAAQVTVRTNPDWRRHFLHLAMRRERRIAKVAMARKLAVRLYWMWRKQWDYEQMRKFGSHVGEPGNRQGVS

SEQ ID NO: 200604 - protein, 372 aa, unidentified
MSEIIAACRSFIGVDLHKTTVTLVAVAPDGTMIAKLTINTKCREKIAAWLLALPRPSHLAVESVGFVEWFIDEFRSRVDRIDIADATELANRRGKRPKNDGRDALDMAQRLARGECPLGYIADDELMQLRKLGRHWCRLSRIVAGVKQCMKSILLAANLRGPKFDGASAQRWLLAHGKRLKPAQRRAFADFTRIVQLIELEREPLRYAIIVACRSERFDLLTKLLQTVPGIGEIWACIIAAEIGPFERFPNADALEFWSGLTSDVKKSAGRTQPGPITKAGSRTLRWALCNAALTMCHSDAGQEAIRQRLIRKTGGIKGKANTAMGRRLLRLLYAMVRDGKPYQAGPSRHRNAAANKARAAKRARKIRKEAA

SEQ ID NO: 200605 - protein, 376 aa, unidentified
MSILQVALEPSTVVVAVDPGKVMNRVWVSNGNGLLEEPVSLPVARSGIAALEKMLAVHAGDPVIAIEATGSLHRAWTAEVERLHPGAIRVIAPSETKAARIQLGSGRFKTDDRDCAALTYLARQGAGRRHCEESAVEELRAAVRYRHGLVADRKKAQQRLHDQLNVLVSGLSAPAGHGRALPVGGPTGQAVLACAAAFAGRPPSTRSLIARSPGQRVEATAQYWARRWRDCLPPPPDAVARAQWMGRDLDRYRTLQADLAAVEDQIATLLANTDGQVLTTLPGVAVIRAAAFAAFSMPIARFADAEHLYSATGLAPALYQSSTLHRRGRISRQGLAEHRDAPWASPGACRCTRPRSPNATSNSAPAAWHRSRLGWP

SEQ ID NO: 200606 - protein, 334 aa, unidentified
MLYAAIDIHKSVLQVALLEPATGEVSDARMPATREALRGWALPLRESVVAVALEATSGWRWVWRELSVLGFEVQLAEPAQARALRGRKRKAKNDRLDARWLALLLAKQMLPQSWIPPEEIQRLRDLTRLRQALRHDRTRWLQRLHAVLAHEGWPCGRGELASASGQRWLAGLKLDPHVRALVDAQLAMVRASAEQINAIDVELRRLARSDRRLLALQTLPGVGPVLACHLLAELGEARRFRRARQLVRAAGLDPVVHDSAETKRRGKLSKQGSPQLRWALVQAAHGAARRAGSDEQRRQRALTPRIGSQRAALTNARAIARHAYHVLAAAETAA

SEQ ID NO: 200607 - protein, 312 aa, unidentified
MEESFVGIDVCEDRLDVAIRPGDKEWSLPNAAEGIKKLTTDLKRMKVTLVVLEATGGLQVPVATALMAAGVPVAVVNPRQVRDFARATGRLAKTDALDARVLAHFADAIRPEARALPDAETQNLASLVTRRHQLAEMITAEGNRLRTAPALVRPEIREHIQFMRGQLAKVDAEMKRTLRTPKWREKDKILQSAKGVGLVTSATVLAKFPEAGTLDRHPAAALIGVAPLNRDSGNFHGKRSVWGGRGCVRSPIYMAAVCASRCNPAIKAFYDRLIAKGKPKKVALTACIRKLVVMLNAMLKHNTPWTYPYPIT

SEQ ID NO: 200608 - protein, 492 aa, unidentified
MGTCELESGDVALAAIPIRKMTIGIAQTLLLIIDWRIAMPKRMTGRPELKPVNVGAAAIDIGSKMHMAAVNPASTDVPVRSFGTFTQDLHDLADWFKGCGVTSVAMESTGVYWIPVYEILEQRGFDVILVNARYAKNVPGRKTDVSDAAWLRQLHSYGLLRGSFRPDAEIAKLRAYLRQRERLVEYAAAHIQHMQKALMEMNLQLHHVVSDITGATGMRIIRAIVAGERNPDVLATYRDVRCHSSIETIRAALVGNNRDEHVFALTQSLELYDTYQAKMLDCDRKLESLIATLTDKGAKPVGKLPKPRIKTKQVNTPTFDVRTALYGVLGVDLTEIHGLGPSLALKLVGECGTDLRAWPSAKHFTSWLCLAPGNKISGGKVLSSRTRRSSSRAAALLRLAATTVGRSDTALGAFYRRLSSRAGKSKAVTATARKIAVLFYNTLRYGMSYRDPGAEHYEQQYRGRVLANLQRRAKSLGFVLQAIPGDANPAVS

SEQ ID NO: 200609 - protein, 337 aa, unidentified
MDYFAGLDVSMAETHICVVTRTGAVIHKAKVPSTPTDIAAELAQLPACRRILFETGRMAPTLYHGLSQLGLPVVCVESRQAYQALKSLATHKTDRNDARGLAHLARTGFFKPVYVKSLSAHAVRSLIIARKKLVGHRVTLENQIRGLAVVFGVRLPRALSPAFIQQALQASDGIPGLSAAMRGLIGARAAVLAAIVAIDADIRRMVRASDACRRLMSIPGVGQLTALAFTAAVDDPRRFRRSRDIGAYLGLVPRRYQSGEIDYTGGISKCGDRRIRTLLYEAANVMLTRYKGPLKLKDWAFAIAKRSTMRKARIALARRLAIIMHAMLRHGTEFEPA

SEQ ID NO: 200610 - protein, 366 aa, unidentified
MQKLSTRRVMGNNILEGHQLTIGLDLGDRWSFYCVLNELGEVVREEKLATTPDAMKRTFKKLPASRIVLETGTHSPWISRLLTELRHEVIVAHAQKVQLITKSSRKDDRHDARTLARLARIDPQLLGPVRHRSAQAQIHLTVIRARAELVSARTALINAARGLAKSYGERLPKRGTQQVGRELAAALSTALREVLEPLLREVESLNERIREYDQRIEQIAKEVYPEVALLKQVKGVGTQIALTYLLTIDDPHWFAKSRDVGCFLGLRPGRRNSGQSEPQRKISKEGDRYLRTMLVQGAHYILGPFGEDSDLRRWGLKLAERGGKNAKKRAVVAVARKLAVLLHRLWVGGEVYEPLRNTHRAMGAAA

SEQ ID NO: 200611 - protein, 471 aa, unidentified
MFGKAAGTLKRKRHNKNGLDSGIEGEGIPALRRKVAGIDLGSTSHWVCGPTVDGLRREVEEFGATTPELEKLAAWLKERNVESVAMESTGVYWIAPYELLERHGLDVLLVSTRAFAQAPGRRKTDRIDCQWIQRLHSCGLLNGSFRPAEQVTMLRTLVRDKANLEAEQADWLRRMQKSLDQMNVRVHRAVSDMQGTTGMAIIRAIVAGERNPAELAKLRNPGCRKSEEEIAEQLSGHWRPDHLFSLAQSLQMYDAIAERIDAYDKEILRRLGELERAECGDTQAPKLKNGNKAKMIRQRGEEDMRQAFYRMSGVDLTAVDGVGVGVVEVVLSEYGADLSRFPTEKHFVSHATLAPNKPFSGGKPLKKKKRGSASSRLSAALRSAALTLRHSQTALGAYFRHTALRLGADVAAFATARKLATLIYRLLRWGHEYVDDGAEAYERRYQAARISRLAATAANLGYKILPRAINP

SEQ ID NO: 200612 - protein, 344 aa, unidentified
MEHYVGLDVSLKETAVCVIDQEGNRIWQGKCASTPQDIEALIRKRAPHVVRIALETGPLCVWHWHALRAVDLPVVCIHARHAKAALMMQLNKTDPNDAFGLAQIVRCGWYREVEVKSMDSHRIRLLLSARSRFVSMRTTLYNQIRGLVKTFGIVLAPGKGGTFVREVEAKMPCDPIVETVIGSLLSAWKTITAQLLKLDHDIKVLACESTVHRNLMTVPGVGIVTAAAYVATIDSPQRFSKAKDVGAYLGLTPRRYQSGQVDRNGRISKCGDGMLRALLFEAAHALLTRNKHNSALRTWGLALVAKTGPAKAKVAVARKLAVIMHRMWLDGTPFRGSADLSVAA

SEQ ID NO: 200613 - protein, 358 aa, unidentified
MNEITRVGVDLAKRVIQVFAVNAAGLRVTGRALARDKFLAWCAQLPAGCLVAMEASSSAHYWARKLLALGLDARIIAAPHVVPYRLQGKSGKNDANDAAAICEAASRPHMHFVPIKSVEQQSMLCIHRLREGVKADRTACINRIRGLLAEFGLVFAQSPEALRQVLPDAMEDASNELGALARLTLQRAYAQWQELDAHLRWCDERIAAHGKASDQVRQAEQLLGVGPVTASAVVATVGDFKQFKNGAQFGAWLGLTPRQNSSGGKNNLGRITKRGDAYLRTLLIQGAKSIVLTAHRRDDPISRWVQALRERSGWQKAVVALANKNARILWAVFARGRAFDAHHVSTKPPGAIAAVIAV

SEQ ID NO: 200614 - protein, 336 aa, unidentified
MKLMPVGVDIAKNVMQVHFIDTATGEIFNKAIRRDKFLEFFTNHSPCLVGMEACGGAHHWARQLISLGHTVKLMPGEFVKAFNIRNKNDTADARAIWLAVQQPGKAVAVKTEQQQAMLALHRIRSQLMKYRLMQTNALHGLLAEYGEVMRKGHASLVKNVPEILTRLSERLPAVLIDSLREQLSEVERMDDRITDIERRIRELSRDDPGVKAISEIPGVGFLTATAAVASMGSADAFRSGREFAAWVGLVPRQTGTGGKIQLLGISKRGDKYQRKLLVNGAHSVIQNARKPGPWVTEMLKRRPINVVSVALANKMARIIWAILAHGRPYQKESSIN

SEQ ID NO: 200615 - protein, 359 aa, unidentified
MSWVVAFNTPLSEKISRHALTGCKWKRLLELIEEVRARVSRETGRAVEVVSCYEAGYDGFWLHRKLEAHGIRNYVIDPASLQVDRRARRVKTDRSDTDRLLRSLMAYLRGEPKVWSVVRVPSVAEEDARRLHRERDRLVSERVQHVNRIKGLCALQGIYDYNPLRPQAMARLEQLRTAQGGAFPPRLKSEIMRGLQRLEMVVEMIATLEAERNAIVENEASTHLNAKKIQTLHKLKAIGPEFAAVLVGEIFHRDFNNRRQVASYVGLAPSPFQSGNVAHDQGISKAGNRKGRTTGIELAWMWLRYQPESDLSVWYRARVGATKGRIRRIAIVALARKLLVALWRYLETGLVPRGAVLKG

SEQ ID NO: 200616 - protein, 359 aa, unidentified
MVLERTSVGLDVHARSVVAGVLDTATGELWSRRLPAASEAVVAWTVSLPGPVAVAYEAGPTGFGLARALEAVGVRCVVVAPSKLERPAGDRVKTDRRDAERLARLLAIEELPEVRVPSEAEEAARDLVRAREDARVDLMRARHRLSKLLLRHGLVFEAAARTRAHDRWLHQLRFDQAGLRVAFEEADGAVLAAGARRDRLDLAIAELAATPAWAPLVRRLGCLRGVGVLTAFGLAVEVGDWHRFTGATIGAFLGLVPSEHSSGAQRVQGSITKTGNSHARRLLVEAAWHHRKPYRPSVPLQRRQAGQPAVVRERAERGNRRLHQRWRRLDARGKRSTVSAVAVARELAGWCWSLAILEA

SEQ ID NO: 200617 - protein, 323 aa, unidentified
MLPSLGIDISKASFHVELSLNKKLRHRKFVNRQEGFAELHAWLSKHKAELVHACMEATGPYSEDLALYLHQHGHTVSIVNPAQIKAFGQSELLRNKDDKPDAGLIRRFCEKQQPAAWVPPPAHLRALQALTRHLENLAETKQQQVNRLESTKAKHVVKSLRKLIAYLDKEIERTEKQIQDHIDTHPDLKEQFELLDSISGIGTRTAATLLGEINFKQYRTARQLAAFVGLTPKNNRSGTFSGRTRLSKIGNHRVRKALFMPAIVAKQHNPIVHAFCQRLARRGKPKMAIIGAAMRKLIHIVFGVLKTGKSFDPEHQNIRTLVA

SEQ ID NO: 200618 - protein, 341 aa, unidentified
MKNLFIGVDFSKEKVDVAIIFADGLVETAARVFKEFKTTVSGYKQLVKWVEQNSYGIDSSLWLFCGENTGDYSKGLCNFLYGKGYDMWLENAKSIKDASGLRRLKSDRADASMIAEYAMRNYDKAIMYEPLSESLAQLRELFLYRQMVVRHRCSFQVRRGEKRLTMEKSPVKTMISQSGRHIVSELNKEVEKIDKRIAELIKSDEELTEVFTIVTSVPGIGTQNAVCLMVYTDNFRRFNYDSRKIACYYGIAPFGKDSGTSVHSDPRVHYMANRQIKAMLTQAALAAVKFNPVMARYYMRLVERGKKKQVALNNVKNKLVHLVTAMVRNRQTFTPEYKISA

SEQ ID NO: 200619 - protein, 428 aa, unidentified
MKYNTQNAKIASITEKTLIVGIDVGSETHFVRAFDWRNYEFTKKPFEFSNSEAGFQTFKAWMEDLLEKNGKSVVIPGMEPTGHYWFALGKFLQDNGMRPVHVNPHHVKKSKELDDNNPNKNDRKDPKTIASLVNEGRFSYPYIPTGVYAEIRSLSNMRFQAQEELTRAKNRIARWFSIYFPEYKDVYRDLKAVSGRMVLETAPLPEDICKLGVEGVNRIWRDAKLRGAGMKRAKTLVSAAEHSVGSKEAPEAARIELKNLLKDMDVYASRVEELLGVIEEKLKEIPYIDKLMAIKGVGLVTVSGFIAEVGDIRRFDDPKQLQKLAGYAIVSNESGKHKGESRISYRGRKRLRYVLYEAALSLIGRNPEFKAIHEYYRTRKENPLKKMQSVVAIACKVIRIFYVILTKGVDYNPEKMMGDIHRPQIQAA

SEQ ID NO: 200620 - protein, 439 aa, unidentified
MLQTINPHAAAIDVGSERLHVAVVNQAVQVFDTFTDSLHALRNYLLRAGVTTVAMEATGVYWLPVYEVLEAAGLEVCVVNGAHVKSLPGRKSDMQDCQWLAQLHRHGLLRGGFVPPHDIRRLRDYQRLRQDHIRMGSAHIQHMQKALDRMNLKIHEVLSDLTGLSGLRLIQAILQGVRAPHLLLECCDVQLVTRKRAALLKAFKGNWQAEHLFALRQAYEGWQFYQQQIAACDREISAVLAELAASAPPGDAPVGDAPTKRLQHNAPQIADLHKLLLRITGGQDLGALPALSDYSVLQLLSEVGTDMTRWPTVKHFTAWLGLAPSSRRSGKRRRREKRFRNPAGQIFCVVARSLARSKHLALGGFYRRLRAMHGAQLANIATARKVAVLFYNTLRYGLAYVEQGLQNYEVAYRQQCLRRLQRNARQFGLILLPATNANA

SEQ ID NO: 200621 - protein, 329 aa, unidentified
MKVLHIIGADLSKKTIDFANPKGDHIKVSNDPPGYHQLIGWIRKQKINIAETMIVMEHTGLYSYRLERFLRAKKISFSKVPGYVIKHSMGLVRGKNDKVDAIRIARYGFEKKQSLVAETQVSESLERLQMLQSTRDHLVRNRAGLIRSVKEYQDSCGLKKSDLIISSQLEIVKTYDCRIAKLEDAIANILESEPTLNKNNQLLQSVTAVGKVVSLAVIIKTRNFTKFHDARNFASYCGTAPFDNTSGTSIRGKTRVSKFRDKNMNRLLDLAAKTAIQYDKELREFYLRRTAAGKPKMSTINVVRCKLLYRMFAVIHRQTPFIKDYLRSA

SEQ ID NO: 200622 - protein, 368 aa, unidentified
MNEYKLKAAPTAVSKEQNSQKNPKANRILIGVDAHLKSYEAARKIDNGAVGVAQSFRSKEAFLLYVEKQREQAEEVVVLYEAGPLGYTLYRELKASDIECLVCAPRSGEQKRKRRKNNSIDARTLSSDLFNYLNGNEQALQAVRVPSEAQEQARVESRQHDALVEERKRIGAMGNSLLLSQGYGSWSNWWRPKAFERLSKGVAPWIVKHLGRWVGILRELDQQIQQAKAELTQHYQGPRPKGMGAPSLAQLNAEVLDWTLYSSRRKIGCLAGMVPSEWSTGEGQRLGAITKVGVPAIRRIITEMVWRMILFQPEYKPVQKWREVLEGPNRGLKKKAVVAIGRQLIVDIWRLQTGRITAQELNLIMVEG

SEQ ID NO: 200623 - protein, 379 aa, unidentified
MERIIYIGMDVHSTSYSLCALEPVFGQENKFFFETKVAAEPSNIIKYLDDIESCFANDECTFVTGYEAGCLGFSLYNYLKGRGIDCKILAPTKMSEEKGGKKVKTDKRDARAIAQNLAYGTYSAVFVPGEEDLAVRDYIRMRDDHKAAVKRIKQQINALCMRHGYIYQRTKWTAEHLKYIQGMTLSPLYREILQEYLATMEQLNNKIKAFDVRIEELSKTERYKDNVGKLACFTGITRSRALAIIAEIGDFRRFLKPLNFAAYLGLVPGEKSSGKKQNRTAITKAGNSHIRKELIEAAQSICRGLPGYKSRALLARQQGNDNTVINYADKANARLRRRYYKLGRCGKKHNVAVTAVARELSCFICGMMNGLTEVQIKKA

SEQ ID NO: 200624 - protein, 340 aa, unidentified
MNHYAGIDVSVEESSVCAIDGSGKIVREGKVASDPEALIAWFRSLGVEFTRIGLEAGPLSQWLYAGMQQAGLPVELLETRHVRTAFKIMPVKTDRKDARGIAELIRMGWFRPVHCKSMEAQETRAMLTARKLVQKKLLETESSIRGILRGFGLKVGKTTPVLFESRIKELVAGHQSLETIADALLAVRRTLQREFDGFEKRLRAMARTDTRARLLMTTPGVGVIVALTFACAIDNPSRFKSSKSVGPHFGLTPTRYQSGETDYSGHISKQGDGSVRTVLYEAANVIICKPLKGCTALKSWAMRLIKRAGRKKATVALARKLAVIMHRMLADGTPFTTQPA

SEQ ID NO: 200625 - protein, 322 aa, unidentified
MSGWVLGIDIAKQKFDAALLVDGKTKHKVCKNSVEGFEILMIWLEKQGIQKVHACLEATGNYGEDLAIYLYEAGHIVSIVNPARIKGFGQSELIRTKTDKMDAALIARFCLAMKPGPWIPPSPEIRSLRALVRRVDSLIDMRSQEKNRIGTAHKSVVLLIKKHIAYLDKEIEKIRKQVADLIDQNPNLKRKRDLLDSIPAIGKATIPHILAEIDDLEKFNHVRQLVAFIGLAPKETLSGSSIKGKPRLCKIGHARLRKALYMPALVSIQCNPVMIAFYNRLKDKGKNGKVIVCAIMRKLVHVIFGVLKSGKKYDPNYKPAFA

SEQ ID NO: 200626 - protein, 340 aa, unidentified
MNATTYGLDVAKRVFQMYWVDAQTGEIVNRRFGRDELIGFLAQRPAGRVALEACGSGHWWARKVKALGHEVVLLHAKFIRPFVQTNKTDAADARAIWTAMQQPEMRTVATKTEDQQAMLSLHRMRALLVKFRTMQVNQLRGLLYEFGVTFRAGRLAGLAEIRARMAELQDALPGAMSCSLQDQLQRIDRLEQDIDRLEKRMGTWQKQEAACRAIAEVPGIGKLTATALVATMGDAKTFKSGREFASFLGLVPRQSGTGGRIHLGSISKRGDPYLRTLLIHGARSVLCHAKVPTPWQKGIQARRPANVAAVAMANKMARTSWAILAHGQAYQKDYVSVKPA

SEQ ID NO: 200627 - protein, 547 aa, unidentified
MVAVMIGIDPHKASHTAVAIDPAEVPLGQLRVRACAAQAEQLLEWAQAWPQRTWAVEGAGGVGHLLAQQLAAAGERVLDVPPKLAARVRLLATGNINKNDPNDARSVAVAALRSAGVGEVRRDDHAAVLKVWSKRYRDLGRARTQVACRLHQVLCELIPGGVPGEITAGQAERILASITPAEAVQAARWELAADLTEDLRGVDTRIRETRKKLTEAVRAAGTSLTGLFGAGPVIAAAVIGDVRHVARFPDRDHFAAYNGTAPIEVSSGGRKIWRLSRRGNRRLNHAIHMTAVTQIRHRHSQGHAYYQKKLAEGKTGKEALRALKRQVSDVIYACLRADARRAAARLKGPGGQPGNGSDSSAAGSHPGHRLFGQATPGPRHHTTTAASDPAPGPAGAPGRAGHSSIAATLPLAKPQVQVQRPQRSEDERPGGAARQRPYSAARKACGQGLQAATAPESRLTRPRKRPTEPLTIAQRGVRSARSVAAVAAGYLSADTRRSGRSGVPAECHADGPVTGRRVATITASWIVTWMPSGVFASPGCAAPAASA

SEQ ID NO: 200628 - protein, 408 aa, unidentified
MEVLYSRCAGLDLGKDALVACVRLHGRPVRQEVRTFGTTTQELLALVAWLTEHGVTHVAMEATGTYWKSVWHLLEEDFTLVLGNAGHIRNVPGRKSDVKDAEWIADLLAHGLIRGSFVPPAPIQEVRDLTRTRKQLVREIAQHTQRIQKTLDIANLKMTGVVSNVLGVSGRAILRALIAGQTDPVQLADLARGTLKNKRAALVEALTGRVTPHHRRLLKLHLELIERLEAAVSDIDAQLGEALAPFHEAVARLNAIPGIDTVVAQAILGEIGLDMSRFPRHQHLISWACLCRRLDESAGKRKSTRTRKGACWLKTVLIQAAWAAVRTKDSYYRAQFFRLRARRGPKKAIVAVAASMLTAIYYILRDGVEYRELGGQYFERLDRTKVTQRLVKRLRDLGYYVQLKEVAA

SEQ ID NO: 200629 - protein, 340 aa, unidentified
MLAHKVAQRTARDKVESEYDHYLALDWSLKIMAIAHMSRRDRIPRVFERPANLKELKTYLSSLKGRVILTFEESGFAHWLYLELLDEVDRIVVCDPFQNKLLLHGPKTDKIDAHKLCTLLRAGLLTEVYHSPSGLYELRLLVSAYDDVVRSGIRLLNQQAGLRLAHRDTGKTAAFIGGFLTENIDLYRKTKEQYERRFRDSARRINLVRFQRHIPGIGTIGAVKIVACVVDARRFAHSGKYFSYCGLIKHEKLSGGRSYGRRKPRYSRMLKSVYKTAALAAINGKNPIRDYYDHLLNSGVAEHNARHAVARYIARVSYGMLKSGTRYEPYRWRNNQEQNR

SEQ ID NO: 200630 - protein, 375 aa, unidentified
MMVNSATASNEQSIYAALELSKNSWLLAIQVPGRDNPSLHPLPGGDADGLMTKLSAARDRVTKDTGQTPAVTLCYEAGYDGFWLARFLEQRNVTCLVMEPASLQVNRRARRVKTDRIDVESILHTLVAWCRGERHVCSMVVIPSVEEEDLRRCHRERDRLIGERTAHINRIKGLLFGQGIRGINVKSRYKTLTPSELVTGDGRPLPERLGREITREIERLAQVQAQIVAVEREHPVTSCEATERKRHDLLRLKGLGPSLSSTLTREVYYRQFNNRRQVASYIGIAPSAYDSGDGHRSQGISKAGNRLARVAMVEAAWLWLRHQPDSALSQWFHDRTQGQKGRIRRIMIVALARKLAIALWRYLETGLIPEGAVVK

SEQ ID NO: 200631 - protein, 354 aa, unidentified
MKHIGMDLHSTTTDACVRNGKGKIVLRRQIATTKGELEKFILGIQGPKRVAVEESQLADWVTRVLKPHVDEVIRCQPRFNKLISESEDKRDKTDAESLSELLYMNRLKRVHHPEAVYRTLREAVRAYWIASREVTRAKNRLKAFFLFNGLPERGDTIYSVRSRSRNLQKLEQLEGNADLARLLYERMDHCRQLKAKHIRVMRQSAKPVKDLVHLLMTIPAIGPISAYTLVAYLEDGRRIPNKRKLWRYAGLSLRRHQSGSTGTEGASHSGNRMMKHVVMSAAITIVSRSESNALSALWEKEILQKVDPKRARRNLARKIVVIAQHLLRSKQAYSDECMSGEKASLQEHGCNKGE

SEQ ID NO: 200632 - protein, 341 aa, unidentified
MKNKSFIGIDISKNVIDASIFTEGASIKDFPHAVFNNSRKGFGGMVTWLKKNHVVLSNCLFGMEFTGSYSMELEKFLTARKYQFCMLSTHTVKHYPMGPKDKNDKIDSAKIADFLYRYNGTECVKPYKMPDKTMQRLKTLMNERKFLVEQRTCFMNRRQLCITKEDAQLYDGYIKKFSRDIENIELEEQKLLATDESLLTTYRNLLTIPGIGSVNAINVIVITRNFTAFETARQYASYVGVAPHFRTSGTSVRWRPRPSARCDGQAKADLSMAALITVQYDAELQSFYNRKLGGKQDSDTKRKALNAVKFKLVLRMFAIGKQNRKWEPLDSKSSNEKLAIS

SEQ ID NO: 200633 - protein, 346 aa, unidentified
MKYFAGLDVSLEETAICVVDEAGAMVREARITSEPEALVAFFQGSGLVMERIGLEACSLSAWLHESLVAAGLPAVCIETRRAKAAMGAMPNKTDRNDARGLAQIIRTGWYRAVHVKSPACRSWRALLTARRLLLNKMRDLENGLRAVLREAGLKLGTPTRKEFAARVRELTAADPVLSVLAEPLLTIIAAMTRELAQLTKRVLEIVRDEPVCRRLMGVPGVGPLTALTFRATIDQPERFRHSRDVGAHLGLTPKRYQSGETDVQGAISRCGDELARTALYEAAHSLLVRSRRWSALRAWGMQVAKRRGMARARIAVARKLATILHRMWADGTEFRWGKEGTMPAAA

SEQ ID NO: 200634 - protein, 358 aa, unidentified
MEIIGVDLHGRQQTIAMLDTETGELVEKTLEHQGEKVREFYSALPGPVPVGIEATGSMPWFLKLVEELKIDCQVGHPAKIRKAETRQQKHDRRDARLLLKLLAENRFPSIWMPSTEQRDLRTLLRHRHQWVGMRTRLQNTLQALALSHGLRRGHGLWSQAGQQALEALPLAPYTAQRRAALLRLYPRLQKAIDDLDQQVGEQARQRPQARRLTTHPGVGPLTALATEVFLGDPRRFADGKAVASYIGMIPSEHSSGGRRRLGALSKQGNALLRFLWCEAAMQAVRRDPELKRFYRRKLVQKGLGKARIAAARKLGTRLWIMLRDQIDYREFCRRVQLRQKSGAARAGMPAYNNGSALQ

SEQ ID NO: 200635 - protein, 342 aa, unidentified
MQDINRVAIDLAKNVFQVCALNSHNKVLFNKKLSRNKFTEFMAQLPTSTVYMEACYSSHYWGRTLQEMGHHPFLIPAQHVTPFVRGNKNDNNDALAIAEAANRPGIRFVPIKTVQQQEVMAMHRLRSRLVKSRTQVSNQARGLLSDFGIIFPLGSKAFIDAMTVLQDDERLSLSFRQLMLDMSTEFHEISARINTIENRLKTYIQQTDHCAIVSSVPGIGVINASALVASIDKGQAFNNPREFAVWLGLTPRQYASGEKSRNGGITKRGDRYLRTQLVHAARAAKKWSRKRDDQLSLWIKQLEARVGVHKATVAIAHKLARIIWVLLQKQQTFVAQYPQKMM

SEQ ID NO: 200636 - protein, 322 aa, unidentified
MRKHNTVCAGIDTGKRKLDVALNRRRGEELQVDNIPDGHDALLAWLRRHGVKRVGIEASGGYEKAVVARLRRDGLVVIVFQPAQVRAYAQFVLQRAKTDKIDARLIAACTAAAEKIHAPPDPRLAPMAEHLTLIEQTEQDLARYQTRLETCRDAHSAAHWRAEIKRLNAVLKSELKALVSAIRQHRDLAQVLDLIESVVGVGLRTAVAILVRMPEIGRVTREQAAALAGFAPYADDSGDHVGARHIAGGRKRLRRSLYAAALPAAFRWNRQLIAFYQRLRAKGKEHKVALVACARKLLIYVNTVVERGTPWQKTAPALAVAA

SEQ ID NO: 200637 - protein, 388 aa, unidentified
MFFLGIDIGKNTHVASLLDEKAKIIFKAYSFANTLDAAEALLVKLEPYKDSLEIGMEATGHYWLSLYSFLTEHKFIVHVLNPIQTDGWRKGIEIRKRKTDVIDSVLIADLIRYGDFLETSLADEDILSLRNLSRFRVYLVNSVSDLKRKAIAVLDQIFPEYASVFSNVFGQTSKELLKSLSLPSDYENLSATKIEEVLSNITQKKKASKTISTLSDKARRSFGIAFCKDSFAFQLKLIIEQICFIEEQISSVELEIEQLMSKLGTNIKTIPGVGSVIGAVILGEIGDIERFDNPSKLVAYAGLDASVSQSGEYESSSGKLSKRGSPYLRKALYMAAQRAEFCDPVFHAYYEKKRNEGKHHLVATNAVARKLCHTIYAILKKDIPYEVQ

SEQ ID NO: 200638 - protein, 347 aa, unidentified
MRFYNQQHKYYCGVDLHARKMYVCIIDQKGKTKVHQNIKTDPQLFFELVFPYLEDIIVGVECVFCWYWLADLCAEHNIDFALGHALYMKAIHGGKTKNDRIDSYKLASLLKGGNFPIAYAYPAKWRATRDLLRRRMYISRRCGELVAHINNTNTQYNLPAFRKKLSRKYNHDGVVERFEDPEVQKSIAVDLEMINALNQTLKKLEWHIEKTARQHDYHTLYLLRSIPGVGQILALVMLYEIHDIKRFPRVQDFSSYARLIRPVKESDGKWAGHSNKKIGNHHLKWAIKEAAILMLRDSHDAKYFVSKMTNKYNKGKALGIFTHKLGRAIYFMLKNKEAFDMKRFFAR

SEQ ID NO: 200639 - protein, 341 aa, unidentified
MNEYVGLDVSMEETSVCVLDAGGAIVWEGKVESEPAAIEKVLRRRAPHAVKVGLETGPTSTWLWHELRRLGVPVICIDARHAQAALSMRVNKTDRNDAIGLAQLMRMGWYREVQVKQLAAHGDGALLASRALLVRHRCEIENQIRGLLKNFGLRARATTGRAFEQSVQALTRHHGLLKDVITPLLAVWSALRQQTAVLTYKVKLRTHTSPACRRLMTMPGVGPMTALAFSAAIDDPARFRSSSSVGAYLGLTPRRYASGETDRMGRISRCGDALTRSYLYEAANVMLSRSRGTNPLKTWGAKLAKRAGFKKARVALARKMAVTLHRMWVDGTDFGAPAANA

SEQ ID NO: 200640 - protein, 328 aa, unidentified
MNHVGVDVGARELVVSIDRNEMRESGVVFTNDADGHRKLIRWATKKGARAQFVLESTGVYGLDLAFALHRAKRVVVMVANPRAISAFAKASLQRSKTDALDAETILEFSMRMPFVAWNPPAPSILELRALSRRIEAMSKTVTQEKNRLHASQQSKELSDFVKEDIRELVELLKGRIGRLRKQALLVIEQDPELAKAFGHITSIKGIADAAGIQLLAELATLPKDMTTRQWVAHAGLDPRQHQSGTSVHKPARISKIGNAHLRGALFLPAMVASRWEPNVKAFYEKLLAKGKAKMQALVAVMRKILHSIHGMLEHDQDFDGEKFFVVKG

SEQ ID NO: 200641 - protein, 310 aa, unidentified
MEHFAGIDISRDHLDLAIWPSSEVTRFSNTDDGIAQLVASLESLEPTIVAYEPMGPMSRPLVDALADAGLVAAAVNPYRIRSFARAVSRLSKTDRLDAITIAEFAGTIRPTPTVAPNKEEKELHDLVGRRRQLTEILRDEKIRKAHAGSDDAASSIERHQEWVTSEMRQIDELIDQTIESRLDWSEKRALLMTFNGVGPVASAALVADLPELGLLDRRKIASLVGLAPIATESGTKIGTRRIKGGRRRVRNALFMCSVATMRSNEKLKTYYWKLRNSGKPPKVARVAVMRKILVMLNAMVRDHATWDPGK

SEQ ID NO: 200642 - protein, 320 aa, unidentified
MAQQGRIVGIDVAKLKADACIRSLQLRLSQPSTAQGQQDMITWLRRNEVGLAVMEASGGYERVWAEALRAAAIAVRIVDPKRVRYFAKSAGRLAKNDPIDAEMIAWFAETFAVAAEPAHDADRDALNRLVTARRLLVRLATPIRQLGEHGQPRVVENAQRAILKTIKAQLAKLEAAIEAKIAANAQFVARRAIIASVPGFGDHFVAGALAWLPELGRISNKAAAGLVGVAPYDDDSGQHRGERHIRGGRRDIRTLLYMAALGAATRHNPVVMAYYKRLRAQGKKTKVALVACMRKLVVILNTMLARGEMWNPTPRTTAVA

SEQ ID NO: 200643 - protein, 339 aa, unidentified
MGNTILGIDLAKRTFQLHLADESGRALLRKKVARKELLETVLKLKPGLIVMEACGGANFWGRTFGEYGFRVKLISPQFVTPFVKSQKNDRNDAEAIVEAASRKSMRFVSVKTLWQQDLQTLLRAREGAMKQLRALSSQARGLAGEYGVVFSESWSKLKKELPLALESDNDLTPMARETLGDIFKNYLSAERVKNKLDEKLKSIAREDESLKRLQQVPGIGPLTAVAFLSLVGDPKEFKNGRQAAAWLGLVPRQYSTGGRSVLGPITKRGDDYLRYLLIQGGHAVVRSAVKKAEDPRRFYKWARSLKERRGTNIASVAVANRNAKVMWAMLVSGEKYRAA

SEQ ID NO: 200644 - protein, 343 aa, unidentified
MEAKRYIGIDLHRDCFTACVRLESGREYLKKWKLEDMPKFADKLRPTDQVAVEMTGNTRLFHDQVAPLVDRVVAVNPTQFKVITHSVKKTDPNDARLLALYLAKDLLPEVRMKDKTQAQIASLTQTRDTMVKLRTALKNKVNNLCSAYGVNLNRESLASEKGLRAVGQMPFDPLVNLELKIIVDQIRSLNRSIAELEEMIGKEGQKLEGHKNLTSIKGIGELSGGILLSIIGDIGDFADEGKLASYFGIVPRVSNSNETEHSGRITKRGTKLGRTTLIQCALIAQRYSPYLKTYYEKMKARRGAGKAIVALARKFLGIIYRTLKNQWVFEDFPNFVLAEQATA

SEQ ID NO: 200645 - protein, 356 aa, unidentified
MTSMAHPDAPQLTIGVDTHLEVHVAHANDQLGRPVATIQIPTTPAGYQQLLVWAHELGEPIVWGVEGTGCYGAGLARFLAANDQVVVEVNRTDRQARRLKGKSDPLDAQAAARAVQAGQARVVPKAGDGQVEMIRCLRVARATAMRARTQTINTLKGLLVTAPAELRQQLRGRTATRLVQTAAALEPGPITSPLAAATFALGSLARRHQALSAEIDALSSQLDRLTQTAAPELVARFGVGHDSAGALLVAAGDNPDRLRSEAAFSMLCGASPIPASSGKTIRHRLNRGGDRQANAALHRIVVVRLRYHQPTRDYMTTRLAQGKTKKEIIRCLKRYVAREVFAVLHQLHHDNITPAA

SEQ ID NO: 200646 - protein, 327 aa, unidentified
MDKVTSKVMVGIDVSKDVFDVHSTATGHAQYSNDSKGFKAFVKELNGKHHCVMESTGSYHQCLALYLYENGITVSVLNPLIIRRYIEMKLIHVKTDRSDALWICNYAQEHGNSLKEWKPAAQYVQQCEALITVSELYFKQSTALKNKLHSLESRGHSKGMAARSLRLQIKRVAKELEKLELELEQLIRQHEGELYTNITSVPGVGRKTAMFLIAITEGFNGFENHRQVISYLGLAPTERRSGSSVRGTRRISKTGNPQVRKRLFMCSFTASQCNPQCRALYERLVAKGKSKKLALIAVCNKLLKQAFAIAKSGMPYDPAYRSIRPKM

SEQ ID NO: 200647 - protein, 350 aa, unidentified
MLIIGCDYHPSFQQIAFVDTDTGELQERRLEHREEAEKFYRGLGVQGMKVRVGMEASGHARWFERLLGELNFELWIGDATEIARKRERKQKTDRQDAQHILRLLLKDDFPRIWVASWENRDLRQLLWHRHRMVQARTRIMNQLQAVALNEGLRSKKRLWREHGREQLESFRLAPWASRRRQDLLELLNRLNPTIAELSQAIEQEAEKFSEARWLMTHPGVGPLTALAFVLIIGEADRFQCGKQVASYLGLVPLEDSSGNRRRLGHITKQGSSMLRFLLVEAAQVTVRSLPEWRSKYFHLMMRRGRKIAKVAMARRLAIRLYWMWRKGWDYEQVKKFGSHAGQLGTGDGVQ

SEQ ID NO: 200648 - protein, 344 aa, unidentified
MNDYNIIGIDLAKNIMHLVQVNKTGKKVAHKKLKRDELLHYLSSIDKDTIVAMEACSGCNYWSQAISKLGLQVKLMKTKDVKVYAKSKQKNDYNDGLAICKAAMDPELKVVRAKGREDQDISFLHKSRMNTIKDRVQRTNSLMSSLYEFGYVTKLSKSVFCIECANEVTQAYEEHRLSERIHSILLRDCNEIKELCEKEKYLDKLIAACNKQNKKAVKLQKIMGIGPINASCLSIAPVETYPTPRDFSASLGLVPRQNTSGDKVYLGSITKQGDRYARTMLIQAGRSIAMRARVVKEPKDKLLQWAQKKFAEKKPFNVICVGLANKLARIAYSVIINGTEYEAI

SEQ ID NO: 200649 - protein, 373 aa, unidentified
MSFTSNNILVALELSNSLWLVGTRMPGAQKSHMHRIDAGDTAALLSLLSGLQSRQQAQVSRAPIAVCFEAGRDGFWLHRLLTAHNIPTYVVEPASILVNRRAKRAKTDRLDAEGMLRVLAAYLGGDNQICSMVHAPTPDEEDGKRVHREREYLVQERTRIENRISALLATQGIRSRPSLRSWERDMAALETGDGRKLPRHLAAELNRLRRRLVLVRDLICELDTERDEHLAATSGDAITTKVTALSGIYGIGDNFAAVLAREVFYRHFGNRKQLASYVGLAPTPHQSGNVDKDRRIGRAGNARARKTLVQAAWLWLRYQPGSELAAWFRQRVGELKGRTRRIAIVALARKLLIALWRYTETGEIPAGTIFRAA

SEQ ID NO: 200650 - protein, 314 aa, unidentified
MITCAAGIDVGKNFFDVGMAPAGPNFRVPNVPKGVAIIIDRLRRLKVQRVVLEAIGPYGAALIAGLRSHGFDVGVVNPRRIKAFRDAEGRRAKTDRLDAGLIARFALTMTDVVRPLPSADQLALKALATRRRQLVEIIAMEKTRLKQTSEPLILASHRAAIAALTIERRAIEREIEQRIAQDAVLTRRKEILTSIPGIGQQVATVLLTELPELGSIDRRAIASLAGLAPHPNQSGISHGRAQIAGGRPCVRTALYMAGLASCRANPQARQSYRAMREAGKPAKVAIIAAARKLVILANALIKSDRSFDPNHTTA

SEQ ID NO: 200651 - protein, 337 aa, unidentified
MDKYIGIDVAKATLQIYIPKNNSDIEIKNSPDGLKKLYSKLKKQYKNELKDIIFVYESTGAYSTILEQFCQEKEILCFKVGAYQSASFSKVIKNRNKTDKIDARMLAQMHILAKKKDIKVPKRDEKAHQIRSYIKYYQSLVKEHIRQSNYLEAATYNFEDKFILKQVKKKIASIEKEKAMIIDKVLEIIQTNPTFHQAYKNITSIKGIAEKSGIILLYLFLKYPNASRQQITALCGLDPVQRSSGTSVQHKERISKQGLSLVRAILYMPTLNTILYNPEMKLIYDRLVERGKPKMLAQMAVMRKVILLAHSLYKNNQQYDECRYLNFTQIKEVDMVE

SEQ ID NO: 200652 - protein, 326 aa, unidentified
MEHELHYIGIDTAKEKLDVDVLRPDGRHRTKKFANTTKGHDELVSWLKGHKIDHAHICIEATSTYMEPVAECLYDAGYIVSVINPALGKAFAQSEGLRNKTDTVDARMLAEFCRQKRPAAWEAPHPLERALRALVVRHQALTDMHTQELNRTETAREVQRPSIDAHLLWLEAELKRLEKQIKDLTDDDPDMKHRRKLLESIPGIGEKTSAVLLAYIGLKDRFAHARQFAAFAGLTPRRYESGSSVRGASRMSKAGHVSLRRALYMPAMVATSKTEWGRAFRDRLAANGKKGKVILGAMMRKLAQVAYGVLKSGVPFDASRHNPVAA

SEQ ID NO: 200653 - protein, 407 aa, unidentified
MIYGGIDVAKHSHEVCLVNDSGDIVLRMHLDNNHKGMNKLLQALERLGLKPDDVKFCLEATGHYWLPIYCYLTNQGFELHVINPIQSDALRNLYVRKAKTDQKDALLLADLLRLGRAPATRLPSETTLKLQSLSRLRFEFVRQVGGLKNRVLGILDRIFPEYPDCFSDVFIRTSRELLKSYPEPEELAEVDLSELSAFLKEHSRGRFGEERAKKIQSLAKGTFGITMALDAFTLQLRLLIEQIEFIEEQIKVIEDAINEVMEELRPSKETPYRHVIETIPGIGSILAAAIIGEIGDISRFPNPRALVAYAGLDATVRASGLFEGARNRMSKRGSPVLRNSLWLAAISARRFNPELRAYYELKRSQGKHSNVATGAVARKLVHLIYSLWKDNRPYDADYQWSPPGNNA

SEQ ID NO: 200654 - protein, 337 aa, unidentified
MIVIGVDVHKHSFSAVAVDEVGRQLDCLETSDGEELVCWSKRVARRRLWALEDCRHVTRGLERTLQRQRQRLVRVPPKLTAPERRRGRVRGKSDLIDALAIARAALREPVLDSPRPEEARLRELKLLVNHRDDLVDERRRCQQRLRWHLHELDPSLQVPLGALDRAVWLERLSRQLARRQQTIQVRIARDLLGRCRSLSRSIGELDRELATQTTALAPRLLELPGCASLTAAKLLCEIGPIDRFRSDAQLARHAGVAPLDASSGKHQRHRLDRGGNRQLNCALHRIAVTQGRVHGPAKAYLERKQAEGKSRREALRCLKRQLARTVYVTLKNEPLLT

SEQ ID NO: 200655 - protein, 351 aa, unidentified
MVLIGVDYHPSFQTIAFLIEETGEYDEQELSHSDGQAEKFYRGLKQRGLCVRVGMEATGYSRWFERLLAELGFELWIGDPAEIKAKRVKKQKFDREDARLLLRLLRENNFPQIWVPGPENRDLRQLLWHRHRLVQMRTRIMNQLQALAMNEGYHLKKKLFSKQGRGQLEKLTLAPWASRRRQELLELLDRMNPTIEELTAAVEREARKRPEAMRLMTHPGVGPLTALAYVLIIGTPTRFQRGKQIGTYVGMIPCEESSARKQRLGHISKQGNSLLRFLLVEAAQAAARIHPDWRRRYIHLAMRRHKSIAKVAMGRRLAVRLYWMWRNGCEYSQSLEFGSYAGQLGTGDGVK

SEQ ID NO: 200656 - protein, 366 aa, unidentified
MKKTNTVRVNRNMIFKGHKLTIGLDLGDRWSFYCVLKEAGEVLLEQKVATTPEAMKQTFESIPRSLIALETGRHSPWVSRLLRELGHQVLVAHAQKVQLISKSKRKDDRHDARTLARLARIDPELLGPVRHRSAKAQIHLTVIRARAELVSARTALVNAARGLAKSYGERLRQCGTQQVSRELAAEWSVELREVLEPLLQEVESLNERIKGYDALMEKIAKESYPQVERLKQVKGVGTQIALTFVLTLEDPHRFPKSREVGCFLGLRPGRRDSGESQPQMHISKEGDPYLRTMLVQGAHDILGPFGQDSDLRRWGLKLTARGGKNAKKRAVVAVARKLAVLLHRLWVGGEVYEPLRNSQKAMRAVA

SEQ ID NO: 200657 - protein, 363 aa, unidentified
MEKYILKSAVNDHLPAPGQIVYIGIDQGLNKWVYAIRWGGELRQTLAGPSELGHLQALVKRYAGHEVRIVHEACGFGYGISRWAQEYKDQVIRVTVVPPSTIEQKPGRRVKTDRIDARKLALKLEQGDLKRVWVPSVEQEIARQIGRTQQQLGKERRRAQTQVRSLLRAHGYKAPAEAKSWSGYERWLQQLPLPEALQHCVGHLLAVRMQAAHSEQKMLRRLREMSAAESYANVVKAWTTLSGVGWLSAMRILLELGEVRRFPRRGSLPHYLGLTPSEYSTGDEVNRGPVLRCGPARVRSQLIENAWIAVRRDPTVRARFSRLAGVRPTAQQKKIAIVAVAHRRAMQLRALWKQAAAAAQPTP

SEQ ID NO: 200658 - protein, 483 aa, unidentified
MKSKPEEKNKRATNHPTQPHWDEMNRRQRREMTRKIQSEGLRLEVMHPDAAGIDIGNESHYASVPPSRDSQPVREFGCTTAELKAMADWLKQCRIRTVAMQSTGVYWIAVYDILEQAGLEVYLVNARDTKNLPGHKSDVQESQWLMKLHTYGLLRNSFRPTQEIRVMRTYWRQRNDLVQSASRHILRMQKALTQMNLQLANVLTDISGATGQAIIKAILAGERNPHKLAEFRDYRVKASEGQIAQSLEGNWQEDLLFVLKQEHEGYEFCHKQMAECDRQLQQYLQQREDRSHGAPLPEEKRKGRLQKKRANKPQFNLREGLFRMTGTDLTRIDSIDVMTATTVISEAGYDMSKWKTENHFVSWLRLCPDNRISGNKVIGKGRLPTNNPISIALKMAATTLRESKTYLGAQFRRLRTRLGAPIAIKAMAAKLARLVYRMLRYGMKYLDQGAAVYEIRHRELQIKRLKAKAEKLGYRVTSIPAAT

SEQ ID NO: 200659 - protein, 409 aa, unidentified
MRYYLGVDWADQTHAVWVVDEGGTKVAMRTVPHTAEGLTEWGRALDEWRAQGIELWAAIERPEGRVVDLLLDHGVVVYAVNPKTLDRARDRFRQSAAKSDPFDARVLADFLRTDHAHLRAVQPSSEAAQELKLLTDDYQRQIRQQTRLVNQLTTTLKAYYPRGLEVAELTTGLAREFLQTYPTPATITALTERQWQRWAHAHRLSETRTQQLWVVLQRPQLPVPPHVVRAKARLMQSLVAQLMVVMEGVGAYREAIEDFFARIPAAQWIRTLPIGDHGITAPTLWARLGDAPGRWESFRHLQAQAGTVPVTIRSGKQQVVRFRFACDKSLRYIIDHVAFLSLRWSEWAHAYYAGQRARGHSYRQALRALSAKWLKIIFVMWERQIPYDEQYHLAMMTRQQLRQRQEKVA

SEQ ID NO: 200660 - protein, 392 aa, unidentified
MVVSVGVDVSKDKHDCFIVSSEGEVLADVFTIPNTMDGFHYLLQRIRHCTAPQDKIKVGLEATGHYSYNLLGFLLDNGLTTYVLNPLRTNLYRKSLSLRKTKTDRVDARTIASMLLSDAGLKPYTDTAYHNEELKSLTRYRFDKVKERAKLKSSIARLVCILFPELEKLVPSLHIASVYALLEEFPGAKQVAAAHLTRLKALLETASNGHYKRDMALEIRNAAKNSIGSQMPAKSLELQHTIRLIRELDNEIAEIEEQIQAIMEELHSPITTIPGVGFRMAAMILAEVGDFTRFDSPDKLLAYAGMSPSTYQSGQLKNCYPHMEKRGSRYLRYALYNAAKYVCHWDPAFAAYLAKKRAEGKHYNVALSHAAKKLVRLIFAMEKSRQPYCSAS

SEQ ID NO: 200661 - protein, 321 aa, unidentified
MSFLAPTLKNVSNKPAHKVVRNNESGITKFIKTLPADAVLVAEHTGVYGDRLLKHCTESHINIAYVGGYVIHTYKSAPDRAKTDMLDCAVLREFGERFTDKLIYKTFPKKELYELKQLARHRTMLVEDRKRYVTADKGEDCRPCRSMQVKESMERIMKILTEEIARTEKQMLDIIRTHEELSRNYDIITSVKGVGLITAVELIVKTENFTTIKTASQYAAYAGTAPYEKSSGKMNKGAHVSKIGNRRSKTLLYICAESARMHNKEIKLYYERRTIIDKKPHFYVLNAIVNKLLKIIFSLVTKGQMFDSDFIRKDPRAIKDN

SEQ ID NO: 200662 - protein, 321 aa, unidentified
MNKDRKIYGVDISKDVFDVFSIESGHSQFKNDETGFKALVKMLRKEALVVMEATGYYHYRLAQYLYKKGIAVSVVNPLSVKRFIQMKLAKVKTDKSDAKAICEYGEMNETPLYLALTEVQSECLQLFRLLDNYLKKRTATKNKLHGEETLGIPSKFVYRSLKRDLKHLNKEVTTLEDRLLELVKQDQQHQLTLLRSIPGMGIKTALFLIVITDGFKKFENASQLCSYVGITPTIRESGSSVRGRSRISKVGNKKLRNLLFLCAFSACKHNKACREIYERIVNKGKSKKLALIAVANKLLKQAFAIAKSGLPYDEKFVSKLN

SEQ ID NO: 200663 - protein, 339 aa, unidentified
MKLYGGIDLHANNSYLVLLDEGGSVVHRCRLPNEMMAVLEQLEPYREQIVELAVESTYNWYWLVDGLKEAGYSVKLANPNAMQQYQGLKYSDDKSDARWLGEMLRLKLLPTGYIYPAGQRPLRDLLRQRSFLVRQCTSQLLHVNNLLSRHQGRRSPDTPIRQLSVAEVRELFPDRERRLAVESSLLVIQALDKQIAVIEKQLKSQAKPEASFELLQSVYGVGPILALTIWLETGDIGRFPQVGDYASYCRCVASTRLSNQKKKGENNRHNGNRYLAWAFVEAATHAARSYGSARRFVERKTAAVNRTLAIKALAHKLARACYYVLRDQVRFEPTRLFSS

SEQ ID NO: 200664 - protein, 456 aa, unidentified
MAHNVARKLISSKVDSILPDDQSLSVLNLQNYQEVILLSFKILKNNCCGLDVHKTWSYACIGITDSNGRTEYKQARFSSFTKGLQELCDWLVKYNCNDVCMESTGKYWIPVFNILEKNNLWVTLSHPKYTKPQKGNKTDRKDAKWICDLYMCGMVKPSFIPPADIRQLRDLVRYRFKLTCMITGEKNRAQNCLTVSNFKLDDVFSDVFGKSSRSITEQILQHLGETFDVAPFVDGRCKTPIEEIQAAVDGAISTEQAVKLRQCLNHIDELEKHQAEIEREIFRLSDKYESILNLIRTVPGFDKNPLTAIQVLSEIGGDMSVFPTAKNLVSWAGCCPHNDQSNHKIKSTRISRAGSYFKPVLVQVANALIKSKKHPEFTTRYRRIKARRGHKKAIIAICRMILTAIWHILTDLKPYTPEGFLESRPVNASKVLTTSQALNLLKQRGYVIKDDTVPVT

SEQ ID NO: 200665 - protein, 429 aa, unidentified
MEQSTSEWKAYQELKEQLEIHKTSGIVGIDIAKKKHFAVVLDPTGQTIQPPFSFHNSKAGYERLLERVAEAERKHLISSWVFGFEASGGYEKPLASFLSEIGYDIVQVSSYSVKRHREMMTRSVDKNDAKDCVSIAYLMREGFVEYYELRSLEDEDLAVLVLLNEHLKARKTQLKLKIKHNVLKYTFPELEKVCKKIESQFAMELLTQFPTPHEILKVGKLEFKKTMVHRLKGKRMASCLDEVFALAETSVGIKMDRWATKVLELHTYIAELRVIEQQRRSVISRIDNILGMDPAYELIITIPGIGLETGSVLLAQIGDVGRFGTNRQLISFSGFDLVSYQSGEYSGKPRISKRGRPLIRKATYQAISCALLARKPNEFNRKYREILAKQGQTSDVKKKARIKLCARMLRVVHAVLSKKEPYRDTLATQ

SEQ ID NO: 200666 - protein, 393 aa, unidentified
MYLVGIDIGKLKHSFCLLEKETGEILVEPVFFKNNRDGFNALLSSFKHLPQKDILIGMEDTGHYNLALLKFLLDRNYQVALINPVATNLTRKMQGGISKNDKLDTLTICDVLSSSQRVKSYRISKYSSFDLYEQKLLTREHHNLKEEENQLSNRLQKCIDVVFPEFNSLFKSKYGIVYMNILKEFGSADAIAHADIRTLRKCFDTGRGKHISLTAEELKEAARNSIGFPSSSEATQIKHLVARIELIKEQIAEIDKKIEEFSIQNNSPILSIPGISHFSGTSILAELGDIHNYSKPSQIIKFAGVAPLTYESSQFTAQHTAITKKGCKYLRKTLYQIITPVIQYNPVFRKFYLLKIAQGKGHRCAQGHCVRKLMRVIYHLLSTGTQFDPALLR

SEQ ID NO: 200667 - protein, 409 aa, unidentified
MEKTEKRYIGLDVHKHYLIALGVDEGLNVVLPARRVELSRLDAWMQKTLTRQDEVVLEMTTNTWQLYDELIMYAGSVMVVHPPHVALITRSQVMNDKIAASILARLLAKGLLVGIWVPPQEIREMRGLVAQRRKMTNLATQAKNRLHAVLQRHHLVPPEGNPFRASNQDWWQSLSIGKLEKLNLQSDLETLQFAERQVERMTEMMEGMAAEQEAIGRLMHLPGFGVVTAVTVWAAIGDIRRFAEPGKLVGYAGLGTRVHDSGLTMRSGKITKAGRRDLRTVLIEAAQAAASSHSHWKAELARLELRLGHNKAIVAIARKLLIAVWHVLAEKKADRFLEPEKVSQKLLRFAYDVGKSNRQGQSAAQFVRQRLDALQIGQELTSISWGSKRPIPLPPSALKTEGSDVPNTK

SEQ ID NO: 200668 - protein, 462 aa, unidentified
MKKKTSTRKKQSKKICIDDSWEPVNPHAAGVDIGSREHWACVGRDAAECPVRKFGTFTADLEAMADWFKDCGITSVAMEATGVYWIALFQILERRGFQVILVNARQTKNVAGRKSDVQDCQWIQRLHTYGLLQGSFRPEDAYCVLRTYLRYRDELVCARSTQCQHMQKALQQMNIQLTQVLSDITGVSGLAIIGAVLQGERDPAKLAGMVDHRVRASQESISRALKGDYRQEHLFVLQQAFDLYHIFEARIKGCDEQIAKESAQLPDLAQAPLPSHAEGKKARSDQMGGVDMRQRLYQKTGVDVTAIEGIGPTTGLILLTEVGPNLNRFRSEKHFCSWLGLCPDNRISGGKVLSSRTRRVVNRLSDALRLAATTLERSQSALGGFYRRMKARLGAAEAVTATAHKLARILYRLIKHGEAYVRQGMEDYERQFQLRKLTTLRKSAKALGFELTPVQTLPARVS

SEQ ID NO: 200669 - protein, 349 aa, unidentified
MQEIATIGLDIAKNVFQVHGVDRSGKIVLRKALRRSQMQGFFSTLPPCLIGMEACATAHHWARTLVACGHDVRLIPPAYIKPYLRRQKNDAADAAAICEAVTRPSMRFVPVKSPQQQSTLMLHGARDLLIGQRTALINALRGHFAELGIVVAQGAHNMRQLMAYLQDETNQDIPPTARMALQPLAVTLGEIEAQIAKLDKSILAAHRSDPISLRLATIPGIGPIVASCLSASIPDASLFQGSREFAAYLGLVPRQHSTGGKARLGSISKMGNRHLRKLLVVGAHAALYSMKSGKTRTAMADWARSLLAKKPFKVVAVALANKMARIAWAVMARSTAYEPEGKGPAAPAA

SEQ ID NO: 200670 - protein, 426 aa, unidentified
MSTMEQRVWVGIDWGDYEHAVWMVDGLGNPLADFAVPHSAEGLDQLADELARHGPVTGVAIEATHSLVIVKLLEAVHTVYPINPKMASQWAKCLAVDPAKDDRRAAATLANGLRLFAPQLRPLRPDDPLTRELTLLAHDEMTLITQRTALANTLKDRVKKAHPDVLAWFPDVTKTTACDFVLAFPTPQALREAAARDVQKFLAAHHIGLSPRWQARIAARGQGPQWPCDEATARAASRFALALARQIRTLNESLQGYRRTVDDLFAQHPDAALFASLPGAGAKNAPRLLATFGSDRERFQDAADLQALNGVVPLTKRSGKKTEVLFRWACRKEGRNTMFLFAFASISRSVWARAFYERQRANGHSHALALRNLGAKWTKIIFRMWQTRTPYDERRYLQSLKDHGSPLIDHIQNSEKCGKLMKKLLT

SEQ ID NO: 200671 - protein, 370 aa, unidentified
MAQSTPLFVGLDVHKDSIAVAHAAANSAAPPVFVGAIGSRQADLDQLLRRLRSKASALSVAYEAGPSGYGLYRYLTAKGVTCHVVAPSLIPRKPGDKVKTDRRDAVTLARLLRSGDLTTVYVPSIDDEAIRDLCRARDAARITMKDAKLRLKAFLLRQGLHYVGRADWNAAHRRYLAKVVCPTPAQQIVFQEALRAVDEQVERIARLEAELRDALSTWRLAPVVAGLQALRGVQWLVALTVVAELGDLTRFDTPRQLAAFVGLIPSEYSSGGSRRQGGITKAGNGRARRALIEAAWAYRHSAKVSAHIQTRIDTLPKALQDIGWKAQLRLCKRFRRLVARGKHPNVAVTAIARELIAFMWAIAKEVPLAH

SEQ ID NO: 200672 - protein, 326 aa, unidentified
MEHELHYIGIDTAKEKLDVDVLRPDGRHRTKKFANTTKGHDELVSWLKGHKIDHAHICIEATGTYMEPVAECLYDAGYIVSVINPELGKAFAQSEGLRNKTDTVDARMLAEFCRQKRPAAWEAPHPLERALRALVVRHQALTDMHTQELNRTETAREVQRPSIDAHLLWLEAELKRLEKQIKDLTDDDPDMKHRRKLLESIPGIGEKTSAVLLAYIGLKDRFAHARQFAAFAGLTPRRYESGSSVRGASRMSKAGHVSLRRALYMPAMVATSKTEWGRAFRDRLAANGKKGKVILGAMMRKLAQVAYGVLKSGVPFDASRHNPVAA

SEQ ID NO: 200673 - protein, 342 aa, unidentified
MDQISIIGLDLAKGVFQVVGRNVAGEKVLCRQLRRAQVEPFFARQERCVVAMEACAGSHFWARRLRELGHDVRLIPPIYVKAYVVRNKNDARDADGLSLAVQRPDIPTVPIKSPDQQAQASLHRVRDLLVRQRTQCANQIRGLAAEYGLITRQGREGLKQLISQIGSDDLPEAAREALRLQVGHHRELGEKIDELTARICREARACEQARRLMTIPGIAEIGAHALIARLPDARTFRSGRDLAAWLGLTRLDRSTGGKPKTQGPISKRGDRALRRQLVLGATAVIAHQRRKGRLDPWIAGLLQRRPFKVVATALAAKMARIVWALLVRGETYQSGHQPKLAA

SEQ ID NO: 200674 - protein, 386 aa, unidentified
MKKHTKNETRKCQRETKKVAELETAGWSEREANTLVIGIDLGDRSSSYCVRTLGQQIVREATVATTATAILKEFQGLRRQRIVIETGTHSRWVAHLLEMMGHEVMVANARKLKLISENNQKSDKVDARLLSQLGCMNVEWLHPVYVRSQEAHCELLLARSREALVETRTGLINHVRGVVKSFGSRLAKCGSESFVEVARVGLPDGLKPALSGVLAALEEMDEQIYDYDCRIEHLCNTKYKEAAQCLLQVNGVGPVTTVTYLLTIENKDRFEQSRDVGPYLGLVPKSRQSGQRDPQLGITKAGDEMLRKLLVNCAHHMLGAKGQDSDLRRWGLELVRAVERKGKQGARKLAAAAVARKLAVLLHALWVSGAVYEPLRNRGAQQTPAA

SEQ ID NO: 200675 - protein, 348 aa, unidentified
MTVYCGVDFHARKQTISYLTIEDGEVQQTELQHEQGDIRGFYAKLRNLGPVIVGFETSGYAAWFEELLEELGCEIWIGMPAAIRRQARRRQKNDRRDADLILELMLRGDFPRLHRYTPESREVLQQLRYRHRLVKLRTIVVNSLQYMALSRGVSLRSKLLTGRGQERMKQLPLPVHLAKQRDELCELLKELTQKIETAESWLELKAKQDARVERLRTHPGIGLLTGLCLVHTLEQVQRFANPRKVTAYVGFDPVEDSSGERQRIGAISKQGSRLLRFLLVEAGQVAVRSDPDLKAAYWRVQLRRNHQKAKVAVARRLLVRAFIMLRDEIDYAEFQRRGVAARSTRRTA

SEQ ID NO: 200676 - protein, 328 aa, unidentified
MSHFIGIDVAKATLQIYIPQGELDLEFTNTKSGLNKLYKTLKLSYKESLQELVFVYESTGCYSRPLEEFCQKMKVNCFKVGAYQSASFSKTIKNRNKTDKVDARMLSAMQMLASEGDIKVPYRDEDAHQLRSYVKYYQSLNKEKTRQKNYLEALEINQEDDYILKQVKKRIKQIDNEQDNLMVLSMKLIKANTEYLNAYNNITSIKGLGQISGIILLYLFLRYPNASRQQMTALTGLDPVQKESGTSLKRKTRISKQGISLVRGLLYMPILSTVQHNNEMKHFYERLIESGKVKMSAQIAVMRKVILLAHSLYKNDEMYDENKYLTFI

SEQ ID NO: 200677 - protein, 364 aa, unidentified
MVSKQYYIGMDVHKDSVQMAVFEQTGDDPIYERRLNNDTALLVKEAKRFSQKGETEAAYEAGCLGYVIHRAMQQAGITCYVLPANKVAKKRDDRIKTDKRDARLIGRELRSHSIRPISVPQEEDEAARDLVRCREDTVEDLKRAKQRFMKFLLRHGHNYSGGGNYWTQKHWRWIDQLQFSQRHEQEVYEEYRSQIRSLEERGERLKLKIQEVAESPRYQAAVNKLRAFKGIDYIIALALVCEIGDFRRFANAKAFMSYLGFVPSENSSGGKRKQGNITKAGNGHLRTLLIEGAWQYTRNSRSGRRLEQRRLNSPPDVIAVADRALQRLHKKYIRLVMKGKHKNTAVTAVARELAGFMWAVQVSV

SEQ ID NO: 200678 - protein, 346 aa, unidentified
MEEISRIGMDTSKHVFQVHGVNGAGEVVLRRRFRRGEVARFFAGLDPVVVGMEACGGSHYWARVLGDLGHEVKLLAAQLVKPYVKRNKNDAADAEAICEAMGRASMRFVAVKTAEQQASLMLLGLRNRLVRERTRLGNRIRGYAGEFGYVASLGTSKIDALLARLEADEELPELAREMFAVLGRQYATNEVELGDLERRLKRWQRTNEPARRVAMIPGIGPVTSAHLVIKAPDPGAFASGRDFAAWLGLTPKDHSTAGRRRLGGITRAGDETLRSLLVLGATAVIQQVRRGKGPAWPWLHALVARKQPKLAAIALANKMARIAWKLLVSGQSFAPARLQGAVAKAS

SEQ ID NO: 200679 - protein, 416 aa, unidentified
MDVLRERSAGLDVHRSVIVACVLLSTLGSRVTKEVKHFAATAAGLAELVAWLSGYGVTHVGMEGTGVYWMPVYAALEAVSGLTPIVANARHIKAVPGRKTDVIDAEWIARLIRYGLVRASFVPPQPIRHLRDLTRYRRTLVEVQASERRRLIKLLEAADMKLAEVLSDVFGVTGRAILCALIEGEATPAQMAALAKGLARKKIAPLTVALGGQLAEHQRLMLRMQLHRIEATEQQIAELDEQIEARVARYGVEMKLLTSIPGIDRVGAAAILAEIGPDMSRFATAANLAAWAGACPANNESAGKKRPAGARSGNRHLLTVLCNAAVSASRKKGSYFRAKYYSLKSRIGGGKAVLAIGHKLLICIWHMLTSGEVYRDLGEAHLDRRNQQQALKRYARKLDALGYIIVPKQGVAAMAA

SEQ ID NO: 200680 - protein, 356 aa, unidentified
MAEVTRWVGIDWAYRRAAWCALGAGGEIVEEGAVPADEDGLARLVLCLGTDVRACVEMMSGAIWVRDRLAAAGWQVQVAHARKVRDIAPLACKTDKVDARVLAELCRRDLVPELWIASLADRELRERLRRRLHLVRLRSSAKNRIFGLLTQWGLRISLERLRAADAIELLEARGVPAVWRDSIAEALAVIDLLDRRIAPIERELRPFAAADPRVLLLDTIPGIGELLGLTIASEIGDVARFGSARKLVGYAGLAPRVNQSGDRSRTGALSKAGSRTLRWAAIEAAQHGWRESNPWHRLYVDVAKRQGKNPAKSAVARKVLIAAWHVLSRDQPFKPAARTTGDQAPVSASSSSFLAA

SEQ ID NO: 200681 - protein, 329 aa, unidentified
MFYLGIDVAKAKIDCCLILEDSAGKKKTKTFPNTPKGFEELQAWLNHHAAGPAQTIALMEATSVYHERLAGYLFDAGCQVCVANPARARYFAQSMSRLNKTDKADSEVLARFAMTADLHFWQPLPGHIQLLNALLDRRAVLGEDLQREENRLEKAESTFTIEPVLQSIHKNIKQLSRHIQDLDRQIDDHIDQNPDLKNDKELLSSIPAIADRTSLLMLSFLRSHAFERASQAAAFAGLVPIQRQSGSSIHGRSRLSKAGSSKIRAGLYMAAIVATRHNPHIKGMNDRLLANGKTKMMAVGAAMRKLIHLCYGVLKHQRPYQENYCANSQ

SEQ ID NO: 200682 - protein, 404 aa, unidentified
MIIVGLDWSRSKHDFVIMDPQGKVIERGAVAHNANALEELDASIERHVSGVEQVYVGLELNNGALLAWLVVKGYSVFGIQPKSAQRFRDIYRPSGSKDDRIDAFVLAEFVRVNKCRLRPWCPPSKITLELGELLRWREELVQQRTAAYQRLRALLAEWSPQLEELCDNLDCIWQLDLLSQFPTETRLCQAHGNSIRSFIRNHRMRPKKQQQIEDIRRSVPMPVPAGRAQVVEKQTSFLVEQIRMLSTEIDHIEQDLQQLTTQHPDIDIFESLPVRGIVTIDSLLAIFGDDHEKALSPDELAAVCGVAPVTIASGKTKKVRQRRACDHTFRQALVHFAFNTAFRDGCWAAQFYQRKRSEEATHYAALRCLAKRWLKIVHRLWKDRITYDEALHQANQRRNQSHVA

SEQ ID NO: 200683 - protein, 428 aa, unidentified
MNMTSKSAQFAALIGIDWASQRHALCLYDCATGKRESSILEHTPEAIAQWARGLQERFRGNQIALCLEQTRGPLIYALLEYPFFVLYPINPATAARYRQAFKTSRAKDDPSDAQVCLELVLHHREKLNPWLPNDGQTRELSCLLQHRRVAVDLRTLLTNMLRDALKSYYPQALELAGQDLFAPLGCQLLLKWPSLQELQKARKQSVRKFYYAHNCRRRDVIEKRLDAIAQMTPLCRDRALLEPAMVQVKMLARQLLQLGGALKEYDSKIEQLFAQHSDALIWKSFPGAGLSLAPRLACAFGSQRSRYQSAAAIQQYSGTAPVTEKSGKNQHWVHRRWARPHFTHQSFFEYASQSVLHCHWAKLYLKEQMARGKAYPTAIRALAFKWQRIMFVCWRDRVPYDETTYLQNLKRRGSHLARTLNQQLPKAA

SEQ ID NO: 200684 - protein, 346 aa, unidentified
MRFYNGQHRYYCGVDLHTKRMYLCILDHDGNTRLHRNVRAKPHDFLSAIEGFREDLVVGAECMFTWYWLADLCLDEKIKFLLGHALYMKAIHGGKKKDDKLDSEKIARLMRGGTFPLSYVYPREMRATRDLVRRRMFLVRRRSELLAHVQLTNQQYNHDPFEKMLKYASNRDVLDRFEQPSVRLSVEADLKTVDHYDQLLKQLETNLVRQATLHDPRACSLLRTIPGIGKILSLVLLYEIHTIDRFPSIGDFLSYARLVTPKQTSDGKVTGHGGAKIGNVHLKWAFSEAVLWMLRYSEDAKAFLKRKEKRYGKCRAMTMLARKIARAVYQMLKHKEPFDAVKFFAC

SEQ ID NO: 200685 - protein, 334 aa, unidentified
MKNYKNYLGFDVSKNTLDYCLLIPERDTVKRGSVANEKKSLQTLFAAFSKEGLMMEDTLVVFEHTGIYSTILAVFLCGNGWNYAEVPAIEIKRSRGLSRGKSDTIDAQEIAKYAMRNEDKIQLSEVPEIIYQQLNLMNAEREKLIAAIKSFERTSEGEEFLGKEVYRSVKSANRKTVTFLKSQLKTLELAISKLVRSDEDLNAKRELLRSIPGVGEIGTLYLLLTTKGFLRFRNARKYACYCGIAPFGRTSGTSIRGKSRVSPFADKKMKSILHLLSLTAIKYDHELKLYYERKQAEGKPKMLALNNVKFKLVNRIFAVIERGTPYVKTQQFAA

SEQ ID NO: 200686 - protein, 341 aa, unidentified
MGEYIGLDVSMKDTAISVRREGKRVWRGKCAWDPEAIARLVRKHASEPERVIFETGPLSVWFYHALQAEGLPAICIDARHAKAALDMVTNKTDANDADGLAHLAEVGFYREVRVKGFDSMLTRTLVAARTKLVRIKPEISNQIRGLMKTFGLVIPAGKGSTFETIVRVRLGEHSELAAIILPLLEAWRSVRMRAAELARRLIADARQSEACQLLMTILGVGVVTATAFATAVEDPANFRRSRSVDAWLGLTTRRYQSGQVDYNGHISRRGDHQVRNLLYEAACVILTRSSAESTLRDWGLKLRERVGFKRAAVAVARKLSVVMHAMLKSGELFDKTAGAPV

SEQ ID NO: 200687 - protein, 319 aa, unidentified
MTKQAIEFEQVIERGCGLDVHRDTVVATVMGKGIQTETRTFGTTTSSLKELGEWLESIQVTDGAMESTGIYWKPVLHVLREYPLNLLVANARHIKNVPGRKIDKADSQWICKLLISGLLKGSFIPPENIQALRDLHRYKKKLVGTVASEKNRIIRVLEDANIKLSSVVSDTSGVTATYLINGLIEGRKDLEKLVSECYHKKLRSTPDQIVEAINGRLIPYLRFLLKSMQKHIQSVEEQIAEIDTEIETHIKYFEQEIELLQTIPGVGKEGAIGIVSEIGVDMDVFPSEHHLASHSGMCPGNNESAGKKKVQEHDKGTSI

SEQ ID NO: 200688 - protein, 430 aa, unidentified
MDYNTQNKKIEAITEKTLVIGIDVGSETHYARAFDHRGIEYSKKTFKFSNDEAGFTIFKEWIQEHQKAHDKDKVIPGMEPTGHYWFNLGKFLQDNEMKPVLVNPHHVKKSKELDDNIQTKNDRKDPKVIAGLVREGRYMIPYLPDGVYADLRTASNMRFQIQSELTRILNRINRWFSIYFPEYKTVYGKPDAVSGVMILKKAPLPKDILALGVEGINKIWRDAKMRAAGKKRAQTLAYAAEHSIGSKEGAVSARMEIRMLLEDYESRNARLQEVMELIEELVKKIPMAEKLMAIKGVGIKTVSGFLAEVGDISRFNNPKELQKLAGLAIIENSSGKHKGETTISRRGRKRLRYLLFEVAMSLVAKNPEFAEMHCYYTTRKVNPLKKMQSLMAIAAKLMRVFYTILTKGVDYDPKKMVGDIKRPETYQQAA

SEQ ID NO: 200689 - protein, 342 aa, unidentified
MEYYVGLDVSLKQTSICVVDQAGLVVREGVVDSDPEAISVFVRSKAPGAVRIGLETGPTSTWLWTELKRLDLPVICIDARHAKAVLKMQINKNDRNDAIGIARIMQTGWFKEVHVKDIDSHSVRALLASRALLVKIKRDLENHIRGLLKNLGLVIGRATFNVFAVRAEELIEDRPDLVAAVRPLLEARNAVEQQVSELDRKVMKLARRDAQVQRFMTVPGVGPITALAFKATIDDPARFARSRSVGAYVGLTSRRHASGEIDWSGRISKCGDGMPRSYLFEAAGVLLTRVPKWSTVKAWGTRLAKRNGLRKAKVAVARKLAVILHRMWIDGTEFNWSKEVAA

SEQ ID NO: 200690 - protein, 343 aa, unidentified
MLYIGLDVHKEFCQACVMNKSGKVLSNERFLSNQESLDKFLDRFDKAKFVLESTGIWEFIYEGIEKRGFEAVLAHPLKVRAIAEAKVKTDKVDAQTLAHLLRADLVPRSWVPSKDVRDLRQLVRQRSYLVRQSTSLKNRIHAELLRRGARRPEESGGGFTKKSVGWMRSLRIPTVDSCLACLENVQEQIEAINVKLLEEFGRRPEARLIATIPGIGFYGALLIHAEIDDIHRFAHPEKLCSYAGLAPTVSQSASSVKYGSISKEGSAYLRWILTEAVHVHILHNPTSRLSKFYARVERRRGKHKATIATARKLLHIIYWMLLNKERYHGHGFNPGSQTCMRNA

SEQ ID NO: 200691 - protein, 346 aa, unidentified
MEQIIRIGMDTSKHIFQLHGVNAAEQPVLRRRLARKQMVTFFEKLAPTVVGIEACGGAHHWGRLLGSFGHEVKLLPPQLAKPYVKRNKNDGRDAEGVCEAMSRPTMRFVGVKTADEQAALMLAGIRSRLSRNRVQLANSIRGYAAEFGLIAPKGKARIEELLLRTQVDESLPTMAREQFADLAKEYAQLEVRLAETDAKLMAWHRSNALSRRLVGVPGVGPITASLMVMKVQDPKAFRCGRDYAAWLGLTPRDHSTAGKQRLGVITRAGDEDLRSLLVVGATAVIWQLRRGNGKASPWLAALLKRKPPKLAAVALANKNARICWKLMVSGERYKPRLLPAALDEAA

SEQ ID NO: 200692 - protein, 343 aa, unidentified
MQTITTIGLDIAKSVFQVHGVDAAGQVVIRRQLKRRQVLAFFEKLSPCLVGIEACASSHHWSRELQAFGHSVRLMPPAYVKPYVKRQKNDMADAEAICEAVTRANMRFVPTKTPEQQSCLMLHRTRHLFIRQQTAVINSIRAHLAEFGIVAPVGRKGVTELLHVVADPNDKRVSEVARACLAALGTQLLSLKQQILEFDRMILAWHRSNQTSKRLHYIPGVGPMLATALVASVADPSTFRSGRNFSAWIGLVPKQHSSGGRERLGSISKQGDRYLRSLFVAGALSVIRYAKIHGTGHRPWLTALLSRRPTKVAAIALANKIARMAWAMMAKGERYKQPVALAA

SEQ ID NO: 200693 - protein, 343 aa, unidentified
MGEVSTIGLDIAKSVFQVHGVDVDGAVMIRKRISRAKLLEFFATLPTCLVGIEACPSAHYWSRRLQGLGHTVRLMPPSYVKAYVKRGKNDANDAAAICEAVTRPSMRFVATKSKEQQSGLMLHRSRQLLVCQRTMLSNAIRGHMAELGIISAKGRNGTAELLKIIADEQDDRIPAAARFSLNVLARQYAAIREETVAIERRIHAWHRSSEESRRLEEIPGVGPIVATALMAEVGDWKTFSSGRSLAAWIGLVPRQHSSGGKERLGRISKQGNRHLRWLLVAGAMAVIRYARQHGTKRPWLARLMDRRPIKVAAVALANKIARMAWAMMVRGERFKEPKLLPAA

SEQ ID NO: 200694 - protein, 404 aa, unidentified
MNAVGIDVSKGKSMVAVLRPMGEVVRKPYEVSHDYGALETLAYSLKGLEGETRVIMEYTGRYYEPVARVLHEIGIYVSVVNPILIHDYGNNSLRRVKTDKKDAVKIAKYGLDNWAQLREYTPMEAVRQQLKTANRQFQLYTKMKVGLKNNLIALLDQTWPGINTFFDSPVRSDGRQKWVDFAYSFWHADCVSTISKDAFIEKYRKWCKRRGYNFSQSKAEDLYIESLGRFQVLPKNVNTKLLVREAVAALNSVSKTAETFRAEMQRLAELLPEYEVVMDMYGVGPATGPQLMAEIGDVRRFSHRGALIAYAGVDPQPAQSGKQSRSSDPISRKGSGLIRKVLFQVMDCHLRKAPADEPVYQFLDRKRGEGKPYYVYMTAGANKFLRIYYARVKEHLNSLGEYEG

SEQ ID NO: 200695 - protein, 387 aa, unidentified
MDFVGIDISKFKHDCAIVDELGDVITPSWSFQNDREGFSLLKELLDALDGEKKIGLEATGHYGQNLKLFLENNDFSFMEFNPLLINRFVRSKSLRKTKTDSIDALMIAQYLMTVEYKPYPPSFYTLEKLKSLTRFRDSLIRQRSKQLVELTNILDKVFPEFKPFFKGRFSATALYILSHYASPEKISNMNSKSYEPLRCLSRGRFSMVDFVELKTLARNTVGSTCDYLLQEMEITIDIYNQLQSKVEEIELQIHDCVLGLAPPMLTIPGIGVASAAVILSEFGDLSKFNSPSKLLSFAGMEPGYFQSGTSESTGKMVKHGSSHLRYAMMNCAQTVINNEPTFAAYYAKKRAEGKEHRVALTHVAKKLLRVIYTLQTKELSYNPDLVR

SEQ ID NO: 200696 - protein, 342 aa, unidentified
MKQAQAYHFVGLDIHKRSVVFCEKNLTGQTVAHGTIAARKQELIAFARSRGKPWVGAIEATLFSGWVYDVLAPYAVELHVGHPARLKALSKNKNDRIDAEMLANLLRADLFPSCHMSSPQVRELRRVLRYRNFLVVQATRMKNKASGLLMEVGVEYAKSKLHGKKYFSELLDGLEEVPGSVRELLRMTRMNLEVFAGTQRRLLDALTRHAALRERLELLKTVGGVGDVTALTWALEIDDPYRFSSIKDVQSYCGLSSAQHESAGKQWRAPLSKERNPHLQTILIEAAKLAPSKHRHLAAVYEAALERGYNRNRATLAVARKLAAYLLAVDKSGRPFVTPETQ

SEQ ID NO: 200697 - protein, 339 aa, unidentified
MIATNDIVYVGIDYHRNPLQVAVKDPTGRTLTNRRCPNDVEAVLELVSKHGRVGKVAIEACCGSMAFAEELAERTGWTLEVAHPGVVKRMRLNPDKSDLADAEVLADLTRSNWVPRVWLAPRRVREMRAVLHHRESLVRERTSCKLQIRAALRQDRIQEPSARPWRRKWLEWLREEAPLTEDARWLMEERLRELDRLEESIERCRVRLAAKAKESPLTKWLMEQPGIGLITGWWIAASVGRFDRFRRGKQLSRYCGLTPRNASSGSRQAEGGVVGTCCRELRAKLLQAAHRLRRYDKGWKQLSTRLTRMGKPINVAVMAVANRWMRKLFHQAKALGLTA

SEQ ID NO: 200698 - protein, 343 aa, unidentified
MDKIATIGLDIAKQVFQVHGADAQGATLFNRKLRRSEVRPFFEKLSPCTVAMEACGSAHYWGREISALGHEVRILPAQYVKPFVTRGKTDAADAIAISQAVKRPDIRSVPVKTAEQQAATMVLRTRTFFVRQRANAINALRGFMAEFGLVADRGIANFGKLVTALPERADARIPPAARMMLDEILAEIETLTARIQRIEEQIAAHAKEDEDIRRLTAVPGIGTLTASAFQAHVPDPGSFKSARHFSAWLGLTPKQNSSGEKSRSGRISRMGNGELRSLLYIGAMGVLSAARRFGTRSAWLRRLMDRRPLRVVAVALANKTARVVWALLVKGGTYRAPAELAGK

SEQ ID NO: 200699 - protein, 449 aa, unidentified
MGNGSGVSRGDRNRNARLERLRALVPVSNAIAGIDLAGKKQMVVVTDHDSKVIARRVFRCRAWDLGSALDWAAGRAAASGWAGVTVSCEPTGHRWRVLGQLAADRSMPFVCVQPMVTSWSRRTEDLTCDKTDEKDAVLIARLTAQLRCYVPEPVDETWGRLRHLGVRREQLITEAGSQIQQMRDLLECAWPAALDTARQPFRSRTWMAAMSVIAGRDGGDFSRTRRLGAARFEQAVRREITRRGGRKPSLRILRALFTALSDPAGVIAHRPGALERVQLLMEDWQLTKTRLNDTEQRMTAVLDELGLTALATSITGLSPVGAAAILAETGDPRRFATARALVKHAGLAPREKLSGAFTGRTRLTGQGRPGLRLAAWRAVWGAQCANPVYRARYQHLTSREQNKLTPTQAQTIIAAAILRHLHAVITTGQAWDPVIATHGTRRNPGTLAA

SEQ ID NO: 200700 - protein, 399 aa, unidentified
MEQFIGCDAHKKYSVFVAVNERGEASPAIRVGHDREQYRQFLEQLAAGSEIALEASGHYYWMVDDMEAAGHHPRLAHPLEAKKRMGKTSKKTDKVDANGLGILLRNGTLPEVWIPPAELRDQRESLRLRMFLVQQRTRLKNRIQGTLARYNVQIAGVSDLFGVEGRLRLGKRLGELPEHTRQSVEVELATLDFLEVQLGDIEKRLEALMKVTPEADLLKTLPYVGRILSMVMTLEIGKVERFPSAAHLASYAGLVPRVHSSGGHTRLGQICGDVNQYLKWAFIEAGNLVVLHQKHLAGQHVVRLYQRIKRKKNHQKAVVAVARHLAEAAYWILKKQEVYRDPQPQPKIPVKARAAHSMGGARVSAEPALVPAGQSAATAASLAAIGAEIQPGAGGKRCA

SEQ ID NO: 200701 - protein, 374 aa, unidentified
MSKIARIGIDTSKGSFQLHGVNEKDEVVLRRTVRRRQFLEFMAKLEPTVIGLEACGASHHWARELGRLGHRVMLIPPQAVKPYVSPGRKNDKNDAEAICEAMSRPRVRVRLVPVKSVEQSASQMLMGVRDSLLKRHTQLCNTIRGHAAEFGLVAAKGLDKIEPLLVRIAGDEGLPALAREMFADLGQEHAELSKRIAQIDRKLAAFHRSNELSRRLMEIPIVGPVGAGLLITRIINPRGFRSGRLCAAWVGLTPKNHSTGGKQRLGGITRAGDESLRAVLVSGATAYIQQVRRGRIVPSPWLAALLERKPPKLAAVALANKTVRIAWKLMTSGGRYDPTHRVDREGPGASLYGGLRAEPLAPSPTAGHSHAVAA

SEQ ID NO: 200702 - protein, 367 aa, unidentified
MEQVTTVGLDLAKKVFQVHGVDAAGGVVIRRSLRRRQVLAFFAKLPPCLVGIEACATAHYWGREIGKPGHRVRLIPPAYAKAYVRRNKNDPADAAAICEVVDRPSMRFVTIKTEVQQATAGIHKVHAVLVKQRTMLINTLRGLMAEFGIVVAEGPRHVKELVAMLADPADTRIPEPLHGSLMAIVETLRGLEHRLEGIEKQIVGWGRDNATCRHLITIPGYGPMLSTAMAAIAVDPAAFASGRHFAASLGLVPRQDGTGGKVKLGPISKRGNGYRRRLLVNGAMSVLCSKGAKHDPRLVKLIETKQRKIACALANKMARIGWAVMVRQEDFRNRHDPPRPNLGQAGTMLATVKTAARAPAAVAFGQS

SEQ ID NO: 200703 - protein, 411 aa, unidentified
MEGAALKQYLGIDIAKHEHVLGARFEDGRQHGGAFAFANDDRGFASLLGRLRELEATPETSLVVMESTGHYWMALWEFLVAHGYEAAIVNPVLTDAFRKADTLRKTKTDRVDAFLIAEYARFKNLGPSRVSPEDAEGLKQLTRYRHHLVAERTALKNRLTSVADRIFPELAGLFSDRHSATARAILGEYGSAARVASTDIRTLTKTVRSASRGRHGREKAVEVKEAARRSVGVTFAADALAFEARHITDLIDHLDAEVDALDAEIARLLDPEVGALLQSVPGIGPVCAATIAAEVGDPDRFGDPKKLMAYAGMDSTKSQSGGFDGDAQHMSKRGSAPLRNALMTAADGARRFDPYFGDYYDSLRARGKHHYVAVSGCARKLCGVILAVLRERRPYEPRPSIQSQQRQPGES

SEQ ID NO: 200704 - protein, 408 aa, unidentified
METIHPICCGLDVHQASVSACLRRVNAQGAVNVESREFGSTVKELVALADWLVAEGCPIAAMESTGVYWKPVWNILSPLLDVWVVNAREVKQRRGKKSDRADAKWIAELVAHDLVQPSFVPPPRIGVLRDLVRMRTVLVQTRTQVKNRVLAVLEDTNVKLASVVSDPFGASARKMMEALVNGERDCKVLSAMALGVMRRKIPQLEVALQGSFTEHHAFLIRLGLESLDQSNRQIAELDAQIGRLMEPLQEEASRLTSIPGVGETAARVVLSEIGTEMSRFGSAQRLASWAGLCPGNHESAGKRHSGKTRKGNRYLRRVMAECAWAASKTNTFLGRTFRRFQIRIGGKKAAVAVGHKILVIIFHLLNEGRLYDDGRYDPIAQREQIRQRNRALTTLQRLGYQVVLTPTP

SEQ ID NO: 200705 - protein, 346 aa, unidentified
MDQIIRIGMDTSKYIFQLHGVDAAEQAVLRKRLGRKQMVAFFAKLPPTVIGIEACGAAHYWARVLGQLGHEVKLIAPQHVKPYVKRNKNDSRDAEGLCEATGRPTMRFVPVKTAEQQAALMLAGLREQLVARRTQLSNAIRGYAAEFGITAAKGLDKIEPLLANIAQDESVPALARWSFAVQGREYAQLQVELKAIEVKLRAWHRAHADSRRLAQIPGVGPIGATALVMKTPDPRAFASGRHFAAWLGLTPKDHSTAGKTRLGKITRAGDEVLRRLLVAGATAVIQQVRRGRGRPSPWLLAVLKRKPPKLAAVALANKIARIAWKLMTTGESYDGARMPGASALAA

SEQ ID NO: 200706 - protein, 454 aa, unidentified
MKKQDSYIYFVGIDCAQNKHDFAVINDQKKFLIKKGHFSNTLQGYEKFLKTVLSKCLNKDKILFGMEVTGIYGTNLYERLASEGYHVVMISPDSVKKYRDYKGLNKTDKIDSTCIAELLLKGDAQLVDIQKNGYTDLKAYIRRRNALKATCTQETNRFLAKVCLYFPDLLKVFPSGRATLKAVFSIYPTPYSIIEANFDELVSVLQEASKNKFGQDKAKELVRAARNSIVVRKSVPDGELYNIHSLIDSINSLETEIRVLENLIQSKAEEYPAYQVLLTLTGCGKITAATIIAEIGDISRFHKASQIVSLAGLYGNNSKSGSSVNKRGKISKKGSRYLRHAIYMVAEFARRNNPISKAYFTKKKNGDRTKHILAVNAVANKLCKVIYSLLKNQSTYIIQYRDLAKLSESTQNEFFQNVETDFSANTRRKKYLYEDEHGELHEFVFKSTRKVRVE

SEQ ID NO: 200707 - protein, 349 aa, unidentified
MTIVEDRPVITGGVDTHADLHVAAALDPLGGLLGVQEFPATATGYAQLLDWLGGFGTIAVAGVEGTGSYGAGLTRHLAAAGIGVVEVDRADRQDRHRQGKSDPLDAVSAARAAQSGRACGAPKGRDGAVEAIRALMVAKRSARHERTQAINQARALIVTGPDELRARFAGHSPAALVEAIAALRPRPGNVPGYATRVALRELGRRAQFLDTQLDRLDELIGPLVAARAPGLLSLYGVGPDTAALLLIAAGDHPGRLRSESSWAHLCGVAPIPASSGKVSRHRLNRGGDRQANHALWRIVITRLGSRPGHPATRAYAERRTKEGLSKKEIIRCLKRYVAREVYHQLRGGA

SEQ ID NO: 200708 - protein, 366 aa, unidentified
MERTFVGLDVHARSVVACALDDRTGELSKARLVPDNETVLAWLQALPGPVAVVYEAGPTGYGLARFLTGRGIRCVVAAPSKMHRPSGDRVKTDARDALLLARLLRLGEITAVTVPSLTQEAARDLVRVREDVRADLMRARHRTSKLLLRQGILWSGGTAWTGAHEQWLGHQRFELPGLQAAYDTTLETVLLATSRRARLDKAIIEMAHEPQWWPTVSRLQCLRGVSTLTAFGLAVEVGDWSRFSGSTIGAYLGLVPTESSSGEGRHQGSITKTGNTHARRLLVEAAWHHRRPYRPTKTMRDRWDLAPAAARARGHAGNQRLHERWLRFNERKKRTVIANVAVARELAGWCWSLAMIEDPAAPAARR

SEQ ID NO: 200709 - protein, 388 aa, unidentified
MFQTIDQSKKCLNAFEQDSTLVAVVELSQKSWLVAGIVPGVDRHPLKKFDADENRLLALIQRWKQEAIKAGREIKRIVVAFEAGRDGFWLARWLQALGIEVCVIHSTSVSVPREHRRAKTDRLDTELLKRATLGWLRGEPDHCRMVAIPTLEEEDAKRSNREHQYLVGERTRLINRLKAALARLGVRNFNPKLRKASERLRGLVTPESMPLPPNTLAEMERDMQRLQFVRQQIKAIEQTRFERIKKAPKTRLNMMVLLVARVLGMGIETADMLVHEVLSRDLRDRRAVARYAGLTGAPDESGARRREKGLARAGNARVRRGMIEFAWRFVRFQKDSTLAQWFRARTADARGPTRKTMIVALARKLLIALWRLVTTGEIPTSLTLRPVA

SEQ ID NO: 200710 - protein, 365 aa, unidentified
MPSVSHLGPIHLGLDVHKDTISVAILAPDRDGPDVERIPHDEASVRRLVGRLGDPRWLRACYEAGPTGYELARLLHSMGVRCEVIAPSLIPKAPGDKVKTDRRDCRRLARLHRAGELVAIRVPTVQEEAVRDLCRARADMVEDRTRARHRLSKFLLRHGRPWRGGNAWTLTHERWLLGQRFHEPALAATYGHYRAVLAGRDAQLEAIQADLAGWYDQAPFADAVHRLSAYRGVTRLGALTLASEVCDWRRFGRAAAFAGFCGLVPSEYSSGTSTWRGHITKCGNAHLRAQLVESAWADQHRPAVGLELHARQQGLDPQVVARAWAAQLRLCGRFRRLAARKNSKNVVATAIARELAGFLWAEMTA

SEQ ID NO: 200711 - protein, 407 aa, unidentified
MEQVIIGVDPHKLSATIEVVDGRETVLASGRFGTDKAGHAAMRKHVASWSERVWAVEGSSGAGRPLAQRLLAEGEHVVDVPAKLSARARLFDTGHNRKTDAHDAHAVAVVAVRTRNLRVLCYDDELEALRMIVDRRTELARQRVQTVNRLQRLLAELTPGKAKKDITALQAKAILSSVRPRDLAGKTRRRLAVEQLADLFAIDKKIKASTKELKAFVLAHGSRLMDLPGVGPVVAARILADVSDVARFADRNRFASWTGTAPLDASSGEQIRHRLSRAGNRKINHMLHIAAATQIRLDTEGRAYYRRKRAAGKTHLEAMRCLKRRISDAVYRQLLADARRAALSNARASSQADPGGHCGATHQSSAVDLPPHIDTSDQPLPGPANPTLQPAKPPRKTTAKRRLNRAS

SEQ ID NO: 200712 - protein, 363 aa, unidentified
MRETITATDRGKLTVGLDVGDRYTQICVLDEDGGILEGGRVATSPRAFRQRFAALPPSRLVLEAGSHSLWAHRLLKEVGHEVIVANPRMLRFIYGNDSKNDRADATYLARVGKLDPGLLHPVTHRREESQAHLVLLRSREVLVRSRTRLISHARGLVKPFGVKLPHCGAHVFATKVREHVPEILLPALGPVIDIIAVLTEQIRELNDKVETLARETYKETALLAQVPGVGTLTSLAYVLTIEDPGRFSRARAVGSYLGLRPRQDESGTLKPQLRITKAGDTFLRHLLVECAHHILSNNSQDTDLKRWGLKLAERGGKAAKKRAAVAVARKLSILLLRLWTTGEIYEPLRGTPRSAEPEIVPSG

SEQ ID NO: 200713 - protein, 335 aa, unidentified
MEKYAFFVGIDISKARLDICLRNATGKLAEFAVDNSVAGVKGAVKLLAQFEGFKGRDCLACMEHTGIYGRYALEVLRAKGFAVWHESPVSIKNGAGEIQRGKNDKVDAARIAEYAFNFKAKARLWEPPRKVVDLLADLLSLRSRLLEVVKKLRVPLREIQKFKDKGHAETVRVACGKTLANAEKEVRDVKKRILAVIEGDPALKRLYNLITSVRGVGFVTASSLIVATNEFKDINEGRKLACHAGCAPFDHKSGTSVRGRSRVSHKANKRLKSLLHMCACSAIQRPGELRDYFDRMVAKGKSKFVVLNAVRNKIIHRICACVRDGRKYTAVPNAA

SEQ ID NO: 200714 - protein, 381 aa, unidentified
MRTAYDKQHRADDQVLAVALELSKASWKVALSDARHKARIKSADAQQPLARLEQVLALIEDARARWELPEAARLVVLYEAGQDGFWIQRALTARGIEALIIDPASLPVERKARRAKTDRLDACRLVEGLLGWLRGERTRFRVLRQPGVEQEDSRHWGREREQLRREMQQHRDRIVKLLTTQGCWEKPGKTFAQRLERGELRDWEDKPLGAALQARLQREQARWQQARDQLKQLEPERIERFSPQQQAQRTQLAQLRGVGPVSAQRLVLELFWRHFSNTRQLGACVGLVPQPYDSGTMRKDQGISKQGNRRVRALSIELAWMWLRYQPDSALSRWFAGKVQGDSKRSRRVAIVALARRLLIALWRYLEQGIPPEGSRLKVAA

SEQ ID NO: 200715 - protein, 352 aa, unidentified
MTVTTLARSITGGVDTHLDVHVAAALDERGALLGVESFPTTESGYKLLLGWLSDFGSIVLVGVEGTGSYGAGLTRHLQAERVRVVEVDRPNRQRRRRKGKSDPQDAITAARAALSGDAAGEAKTRDGNVESMRVLRVARASARKGRTQALNQMRGLISTAPEPIRAELRGLNVFHLLERASTYRPGAKRDIVSLTKLSLRMLARRAITLEEKVSEIDAILKPLVKETAPRLVGALGVGTDAASALLVTAGDNPERLRDEAAFAHLCGASPIEASSGKQERHRLNRGGDRQANSALWHIVITRMVYDPRTTEYIDRRTKEGLTKKEAVRCLKRYVAREVFSLLPHEKLGLDSP

SEQ ID NO: 200716 - protein, 384 aa, unidentified
MLIERNAPHIQALDKMDLSKIHFINNRAGGAYMAKYNIGVDYHKRFTYFVVKSSKGVVLKNGQVINKKDHVQKFLEGFTSDSAAVLESCRNWCVMHDWLEDIVDEVVLANPYKVKAIAEAKIKTDKIDASILSDLLRADLVPRCYVAPKNVREMRNLLRERIYFVRMRTMTKNRITTIFDRYPEEKAKFKTWTDLFGKKGRVQLESINMSESDRAIVNRELDYIDSINTFIKDIETVIKENFKLSKNAQILKTIPGIGEFFSMLIDAEIGDINRFKNEKALACYAGLVPSTYSSGGTTHHGRLIKHSNKLLRWAFIEAIIPAIRSDEKLRFEYDLLRSRMNWNKAKAAMGRKLLTIAFHCLKKQQKYKKLNRLELEEYKLRRAA

SEQ ID NO: 200717 - protein, 343 aa, unidentified
MKVKRVGVDLAKNVFQVHGVDGNEQPVWRRRLSRARWVEAVTAKLALGGEIGMEACAGAHHWAREFQSRGYRVKLIAPQFVKPYVKSNKHDVADAEAICEAMSRRSMRFVSVKSVAQQDIQAVHRIRAELISQRTAKANQIRGLAGEYGLVAPPQLSHLRRWIPLWLEDGENGLSDRFRRLLNGLWGDLRRFDERVNELDEEIQSIATTDPDARRLQQLCGVGPVISTALVASMGDGTQFRRGRDFAVSLGLTPRQHSTGGKERLLGISKRGEPYLRSLLVHGGRSALRAARNKDDHLSLWVKGIAVRRHPNVAAVAWANKTARVAWAIVAHGSDYTPQRAST

SEQ ID NO: 200718 - protein, 402 aa, unidentified
MNSVGIDISKGRSMVAVMRPFGEVVVSPFEVRHTDSELSELAKLLKSLDGETRGVMEATGNYHTPVAWLLHGAGLYVSVVNAKLVHGYGNNDLRRVKTDRKDAVKLANYGLDRWLTLPRYIPEEDTRLLLKNCYRQYQQYSKVQTMLKNNLISLLDTTFPGMNRLFNTPARADGSEKWVDFAADFWHCGCVCECSEKVFMNKYQRWCRKHGYNFSERKALDIYTEASGHIGVMPMSDTTKLLVAQAVSQLRATSAALAVLKQEMQTLASQLPEYPIVMEMFGVGPALGPQLMAEIGDVRRFHSKKALVAYAGIDAPPNDSGDVTGRHKGMSKVGAPSLRRTLFLVMSVYLQNAPLDEPVYQFMDRKRAEGKPYRVYMMASANKFLRIYYASVKAYLETLERF

SEQ ID NO: 200719 - protein, 379 aa, unidentified
MERQVVAGIDVAKLRLDVAVRPSGERLTVSNASRGISRLVNLLKREQPECVVLEATGGYELKLLERLLAEGLPAVVVNARQVREFARATGRLAKTDAIDADVLAHYAEALKPEQRTLPDLKTRELRALLGRRRQLLGIVVAEGNRAAHAIDVVKRGIAATVRCLEKQIAALDRELARLIREFPAWREKAEVLRSVPGVGAVTSATLIAELPELGTLNRKQIAALVGVAPFNRDSGTLRGRRTIWGGRSSVRAVLYMSTIAALKSNSIIGEYYRRLHAAGKPSKVALVACNAQTRRDPKLHAAKRQRVVSTAGRIGLESRRLLTRSRYESRPTSPFGRGLREERGAGCLPRLAMPLTFIRRGDSNGCSRAPQARYRSHRV

SEQ ID NO: 200720 - protein, 320 aa, unidentified
MHTTTVGIDIAKAKFDAARLGADGKHKHRKFANTPVGFAELAAWLEGFGGERPLVCLEATGAYSVPVAEYLADQGWPVSVVNPACIAAFAKTGLSRAKTDKADAKLIARFAREKQPGPWTPPPANIRLLQALLRRADDLQEMAQMERNRQGTAGTDLEGSIQTVLESLEAGLEAVRQRIKDQVDGDPDLRGRAGLLASIPGVGEATAAHLLVALSPHYGFENAKQAAAHAGLDVRIRQSGQWKGQSKMTKCGDPLLRKALYMPAVAAQRWNPAVSAFRDRLRANGKNGKAIACAAMRKLLHIAFAILKSGKPFDPQYKPA

SEQ ID NO: 200721 - protein, 324 aa, unidentified
MSESEVFVGIDVSKAHLDVGVSGSAESWTVANSEAGIGKLVERLLDVAPVLVVLEATGGFEVPAAAALAAAGLAVVIANPRQVRDFAKATGQLAKTDEIDAHVLALFAERVQPTVRPLPDEASRDLDAILGRRRQIIDMIITAEKNRLGFARPSVQKGIQKHIHWLERQLADVDSDLDDRIRKSPIWKAKYDLLRDVPGVGPNLARTLIAELPELGHLTHKEVAALVGVAPFPRDSGLMRGKRRVWGGRSSVRTALFLGTWSATRWNPVIRVFYQRLRANGKAPKVAQVACMRKLLTLLNAMLRDARPWDPSIPLEQLQLQHSC

SEQ ID NO: 200722 - protein, 416 aa, unidentified
MIRKVMEAIHHRVGGLDVHKKMVMACRRRLLDDGYAEVEIRSFKTTTAGLRELANWLAEWNVTDIAMESTGIYWVPVWNILQRQFKLILVNAHELKKVPGRKDDVLDAEWIAQCMQCGLLRASFVPSVEIRQWRHLTRQRTKLTDHRTAVVNRIHGLLHQANIKLSDVASNIVGVSCRKILNAMSKGESDPERLAALGVGRLKAKPEDLIESLDGQFQVHDRWLLKRLMLQIETIDKEIAMYDDRIRVEMEDYQHQIELLDTITGIGRRIAENLFAEIGPDMSQFPTDDNLVSWAALCPGRNESAGKKRSSKTRNGNKWIRRALVEAAWAAVRSKNSNLAALYKRLAPRRGKNRAIIAVARTILQSAWHMLSKDVEYKELGANHFEMINRDKSQTYFVKRLERLGYQVELKKINAA

SEQ ID NO: 200723 - protein, 395 aa, unidentified
MRVWVGVDAGKEHHWAAVLDENGQTLLSRRFLNDEQAIVQLVNDIDDIGEQVTWAMDMSTGYVALLLAVLWHRGKSVNYVSGRAMNRASDGYRSEGKTDAKDARIIADQARLRRDFASLTPQADLLTDLSILVTHRRDLATDRQRMVVRLRERLASVFPALERALDVTTKGALVLLTRWQTPDAIRNAGESVIAAHLRGTAGIRVHKLTQAAMTAAQTQTVSLPGEQTTAAIVARLARELLRLRDEINQLDADLEQRFRSHAQADVLTSLPGMGTLLAAEFLVAVGDIANFTDADHLAAYAGLAPVPRDSGRRSGNLQRPHRYNRALMRVFYTSAMVAAGRPGPSRDYYQRKRTEGKRHIQAVMALARRRVNVMWAMLRDAQPYTEQLPKTAPQT

SEQ ID NO: 200724 - protein, 354 aa, unidentified
MNPIIGCDAHRRYSLFAVLDTSTLSVEQTRVNHQPGAIREFLSDFPEGTPVALETVGNYYWIVDEIEQAGCVPQLAHAAKAKVIMGNINKTDKLDATGLATLIHLGSLPTVWLPPGETRDERELHRTRMAFSKVRTALKNRAHATLAKYALNSAEHSDIFVGKGRAWLDRTLKKLPPETGRCLYQEIELLDATMEQIAALEERMLERIQLTPDMQRLKTIPGVGNILAIVIEREIGTIDRFPSAGHLTAYAGLVPKVHSSGGKTRYGHMRKQANNYLKWAFIEAANVVVAHRHHPAWRQKKVSAVYERICRRKGHATAVGAVARHLAESAFWILKKEEDYQDPALRRQDSPKLA

SEQ ID NO: 200725 - protein, 421 aa, unidentified
MSASVQMLWGERRGHGTMGAVQLLPMELPMSQHFRFDASRSLTALEQDSTIIAVIEMSQTKWLVAALVPGVERQPLKKFDANEETLLKLVHRWRREADQAGRNIKRTVVAYEAGRDGFWLARWLRARDVEAYVIHPTSIAVSREHRRAKTDRLDTELLMRVFLGWLRGERRHCSMVAIPTIEEEDARRPNRERQNLVAEQTRLINQIRAIFTRFGLRSLRPTMRKLAEKLEDLRTAEGTLLPQNTLAELRRHLARLRVVRDQIRAVEQERLRKLAVAPAAETKSPDVMVRLIARVLGAGIETADMLVNEIFSRDWRDRKAVARYTGLTGSPDESGSRRRERGLARAGNARVRSGMIQLAWRFVRFQKNCALAQWFAARTADGRAGTRKTMIVALARKLLIALWRLVTRGEVPQGVVLRPAS

SEQ ID NO: 200726 - protein, 316 aa, unidentified
MSESQVFVGIDVAQATLEVAVRPTGEAWQIANDEIAFGDLVERMCALKPSLIVLEATGGIHLPVVAALAAVKLPVVALKPRQVRDFAKATGKLAKTDRIDAQVLAHFAEAVRPEVRPLPDAATQQLAMLVARRRQLMEMRVAEQNRSRRAPARIRLQIRDHIAWLNRHLDELDRELGQRVRSSSVWRERDDLLRSTPGVGPVLSTTLLADLPELGTVSHKEIAALVGLAPLNQDSGKKRGKRVIWGGRASVRAALYMATLVATRRNPVIHAFYQRLLAMHKPKKLALTACMHKLLTILNAMVRRHAHWSLPDPVSA

SEQ ID NO: 200727 - protein, 430 aa, unidentified
MEVIYPKACGVDVHKSFIVAVICDSTSVKPQYLRKRFSTFPNSLIDFRNWLLANDCQNVCMESTGKYYVPVYNALEGHISNVVVANPKWVRCIKGEKDDNKDAKWIADLFKLGIVRGSFIPNKDIRILRELTRYLYKLTNMRTSEKNRFTNALTVGNCKLDMVFSDIFGKTSSAIIDIILSQNEYNDEDILKNIHKGCKSSNEDILNSISGISWEDAQKQRMNVIQEHIDYLDKSIKTVREIIDSIIAPYESAINLLCSIPGIDRKSAITIISEIGTDMSQFSSHYRLASWAGLAPGCNESAGKKKSVKISRAGVYLKPALVEVAHCAVKDKDNPYYANKFNVLSKRRGKKRAYIAIARKILVAIYHMLSTGELFNPSDLSRVETSDKDKIKYTKNNFMQSTKQLISLGITIDELQTFLTSKISETTPVI

SEQ ID NO: 200728 - protein, 318 aa, unidentified
MTTNAKTHKGVNIGIDVGKFQLDICIHERNISFSVSNDKAGIRKALGRLGRYQVSRLVLEATGRYERTFVEAALAKKLPVVITNPLHIRRYAGAIGQLAKTDAIDAQLIAQYAAVVQPEVRPHHSRQVMEIRDLLVRRRQLITMLTMEKNRHHVMPKFLQGDIQRSIQHLQRQLEKVDRELDKRVEAESEWREKRDILLSMPGIGRTVVNTLMGDLPELGQLTQRQVAALTGVAPYNRDSGRLRGKRRIRGGRHTVRTMLFMATLTSIQHNKVIRAFYQRLVAQGKHKKVALTACIRKMIIILNAMVRDHTRWDEKYA

SEQ ID NO: 200729 - protein, 340 aa, unidentified
MEKRYIGIDLHRNRFTCCIRLENERTYVTEWALESLTKFVKKLRPTDEVAVEITGNTRLFHDAVVGSVARVVVVDTNQFGVISRSVKKTDANDARLLSLYLSKDLLPEVRMKNKELAQLASLTQTRDTLVKQRSALKNKVNNILSARGLNLAKEALSSEKKLAEVQELPFDEIVQIELRVIVEQIRSLNKSIAELEKTIGEEGSKLEGHKELSSIKGIGKITGAILLSVIGDVNDFGDEGRLASYFGIVPRVSNSNETERSGRIHKRGTKLGRTALVQSALIAAKYSPYLKNFYERVKARRGAGKAIIALARKFLGIIYRTLKNQWIFEDFPNFVLAEKA

SEQ ID NO: 200730 - protein, 348 aa, unidentified
MSEAYDGPQVVGMDLHRRRSVLVRMTADGRKLETAHITNSPAALRKVIARAGKRPRVVLEATYGWYWAADTLAAAGAQVHLAHPLGVRGFAYRRVKNDEKDAADLADLLRMGRLPEAWIAPAEIRELRELTRYRIKLVRLRTSCKDQVHAVLAKLGVPVTCTDIFGVWGSTWLDGLELGQPYAGKVASLRTLAGELTSEITVLEAAIADLLERHDGYHAIRALPGIGPVLAAVLVAEIGDITRFGHPGRLCSWAGLTPRHRESDVKVRRGHITKQGSPLVRWALMEAIQHVPAGHPLRQRKDGILARRGKEAKNIAKVAAARQLLTWVFYAMRDGQVRALATSSPKAA

SEQ ID NO: 200731 - protein, 446 aa, unidentified
MKTKTHPKTQYIYVGVDSHKLTHTATIINCFNEKLGAITFKNNYKGFASLTKLANQVGDDTPAIYGLEDTKQYGYLLKNFLMKNGLIVKHINSSETAAERRKYPVSIKNDNLDSSCIAKVTLDNFDKLQDAQDDEIYWTLKQFTVMRETLTNSSARFKRKLHNQLMFNYPNYYDLFTDISCKSAIRFWEKYPSPDLLKNVTDEELFNFFKEDSNSLWTSRINKIIENVRKIDLNNFVYQENRNIIIKMTIKQIKENILMREDLEWEMIKIYDIIGKKLHTFPGMNKILASYILAEIGNIDRFATSSKLAKYAGIAPIDYSSGNSSKAYANKCGNRKLNMRIYIIAFSCLGRGSGTFPMNPIFAEYYLKKISEGKTKHQALICVMRRIINIIYNILKNNTEYKIPVQLLEECKTKFLKRQQEQEDTAEKIMNRIASREILKNAGKNV

SEQ ID NO: 200732 - protein, 338 aa, unidentified
MNLSRIGLDLAKQVFQVHGVDRHEHVVCRRQLKRAQVRDFFRQLPPCLVAMEACGSAHYWARELRELGHTVRLIAPQFVKPYVKGDKHDAHDAEAICEAASRPSMRYVPVKSAEQQAVQSVHRVRSRLVRARTALCNEVRGLLGEFGLIATRRGRAATMALFETVTATEPAPLPAPMGELLRELKDELQTLEARIARLERQIQAHVRGDARIQRLLAVDGIGPISASAVAASAGDARQFRTGRQFAAWLGLVPRQHSTGGQQRLGNISKRGDTYLRTLLIHGARAVVRCCANKTDARSRWLQGLLQRRPANVVVVALANKNARILWALLSRETCYRPG

SEQ ID NO: 200733 - protein, 370 aa, unidentified
MRQSTPLFVGLDVHKDSIAVAHAEGGTAAPPVFVGAIGSRQADLDQLLRRLHSKAAALTVAYEAGPSGYGLYRYLTAKGVACHVVAPSLIPRKPGDKVKTDRRDAVTLARLLRSGDLTAVYVPSVEDEAIRDLCRARDAARVTMKDAKLRLKALLLRLGLHYVGRADWNAAHRRYLAKVVCPTPAQQIVFQESVRAVDEQVDRVARIETELRAAAPRWRLDPVVQALQALRGVQWRVAITVVAELGDLTRFENPRQLAAFVGLIPSEYSSGGSRRQGGITKAGNGRARRALIEAAWAYRHPAKVSAHIQQRIDHLPKPLQDIGWRAQVRLCKRFRRLTARGTHPNVAVTAIARELIAFMWAIAKAVPLTT

SEQ ID NO: 200734 - protein, 348 aa, unidentified
MLIIGCDYHPGFQQIAFVDTDTGEAAERRLTHREEAEQFYRTLEARRVRIGMEASGHGRWFERLLNELQFELWIGDAAEIRTKRVRKQKTDRQDAQLLLKLLMEDRFPRIWVPDAENRDLRQLLWHRHRLVQMRTRIMNQLHVVALNEGVRRKKALWRPAGRSELESLVLAPWALRRRRDLLDLFDQLTPKIHDLTRALEEEVEKRPIARRLMTHPGVGPLTALAFELVIGTPERFHCGKQIASYVGLVPAEESSGDRRRLGHISKQGNALLRFLLVEAAQVTVRSQPQWRSKFFHLAMRRGRKIAKVAMARKLAVHLYWMWRQGLDYGQFEKLGSHAGEPGNRHGVQ

SEQ ID NO: 200735 - protein, 343 aa, unidentified
MDYFAGLDVSVKETSVCIVDDAGKIVREARVASEPEALLQVLANNTYRFKRVGLEAGPLSQWLYSVLTEVGLPVICVETRHMRAVLKAQINKTDRNDARGIAQMMRVGLYRPVHVKTLRSQKLRVLLTHRKLLQSKAIAIENDLRATLRNFGLKVGMIGTVKFEARIKELVENVPDLAVLVQPLLIVRQVIREQLGILHRRLLAIVRDDDVCRRLMTIPGVGPVVALTFCVTVDIPARFRNSKAVGAVFGLTPAKYQSGENNRTGAISRCGDEMMRMMLYEAAQSMLVRSAKWSWLKAWAIKIARHRGMKKAIVALARRLAVIMHRMWVDGTEFRWTREVAVA

SEQ ID NO: 200736 - protein, 324 aa, unidentified
MNLPPLGLDVAKLKFNACLMRAVGKLRHKVFPNNPDGFTQLCDWLKKQGVTRVQACLEATGTYGDSLAAYLHEQDHLVSIVNPAAIKAYAQSHLSRTKTDRVDAALIAGFCVERKPPAWHPPAREVQELQALVRRLESLVEMRTAEENRLSSGISVGAVRESVEELIVHLSEQIKRTGALIREHIDNHPDLKRQRELLDSIPGIGETTAAALLAEVPDFSQYKSARQVAAYAGLVPRERQSGSSVRGRTRLSKIGNARLRRALYFPAITALRCSPFFQAWAEGLRQRGKCKMSVIAAAMRKLIHLAYGVLKTGKPFDPEWGKIA

SEQ ID NO: 200737 - protein, 352 aa, unidentified
MLIIGCDYHPSMQQIALVDTETGERGERRLMHRDGEAERFYRELKQRRVEVRVGMEATGYARWFERLLAELSFELWIGDPARIRARRVRKQKTDRQDAQLLLRLLLEEDGFPRIWVPSPENRDLRQLLWHRHRLVQMRTRIINQLQAVAMNEGLRRKRALWSEAGRKQLESFLLAPWATRRRKDLLELMDRLNPTIRELTGAVEKEAENKPEVQLLMSHPGVGPLTGLAFVLIIGTPQRFHCGKQMGSYLGLIPCEDSSADRQRLGHISKQGSSLLRFLLVEAAQVAARVDAEWRRRFLHLAMRRGRKIAKVAMARRVAVGLYWMWRKEWDYQQVVKFGSHVGQLELRHGVQ

SEQ ID NO: 200738 - protein, 340 aa, unidentified
MSVNVIGIDIAKSVFQLHGIDSHGNVVLKERVSRKKFLTVLSNLPKCLIGMEACSTSNYWGRELTKLGHTVKLISPQYVKPYVKTNKNDSQDAEAICEAVTRPNMRFVAIKSIEQQDILSLHRVRSRLISQRTALVNHVRALLSEYGIVLPQGITHIRRHLRSILEDTDNELTSMLREVLYELRDEFLRLDERVKALDHKLKEVCMYSDACKRLLEIPGVGPITASALVSSIGNIHQFKNARHLSAWLGLVPKQHSSGSKQTLLGISKRGDKYLRKLLIHGARAVLFRYKQASEWMKAIVMRRGFNKACVALANKTARIVWALLITGERYQKVSIRSALS

SEQ ID NO: 200739 - protein, 378 aa, unidentified
MHSMKHQDTLVIGGVDSHADTHHAAAMDQRGALLATKGFPTTTPGYRELLDWLCAFGEVDVVAVESTGSYAAALVRYLRGHGVRVLEINQPHAHTRRRRGKSDAIDAEMAARLVLSGKATAVPKQTDGIVESIRLLRAARHSAVKSRSAAIVQLGGLIITAPQELRDQLAARRTIRGKAALCRRLRPTTDELARPAQAAKFALRSIAQRIDALDDEIAVLDRQLDQLVRVAAPGTVQLLGISTGHAGRLLVTAGENIERLRGEGAFAALCGASPVPASSGKTTRHRLNYGGDRQANRTLHLIAVCRLRYCERTRAYAKRRTAEGKTKPEIMRCLKRYIARETYHALLADLTVLQPPTPPATTTINCGAGPIGISRHRT

SEQ ID NO: 200740 - protein, 346 aa, unidentified
MKILALDLGKFKSVGCVYETTSLQHRFEATTTTAKALHDLLVEHEPDRVVIEICSIAGWVSDLVRTLGIEIQVASTSHEAWRWKHIKRKNDRADALKLAQLSAMNQLQLVHVPERETRQWRALIKYRHRLIGQRTQSKNHIRDLVNREGLWLARGAGAWTVKGMEQLAELARPLKEVGLAELWRGELAVELTVLEHIDQQLRTVEQKLDELGGAEQRVQLLQTIPGVGPRLAEALVTLIDKPQRFKRGKEVGAYLGLVPKQIQSGESNRLGRITRAGDRVLRSLLVEVSWVGLRYNSWMRAIYERTRRNSKTRKKIAIVAVARKLLIRCWAMMRDGTTWRPDHRTA

SEQ ID NO: 200741 - protein, 450 aa, unidentified
MAKAQRKKPRKLERNLPVMRPNASGVDIGATEIFVAVPADRDAESVRSFPTFTEDLHALADWLRQCRVDTVAMESTSVYWIPLFQILEARGIEVHLVNAQHVHNVPGRKSDVLDCQWLQYLHSVGLLKASFRPEQAVCEIRSLMRHRDNLVQLACVHVQHMQKSLDQMNLQIHHVISDITGVTGLAIVDAIVAGNTVPQELAKLRDYRIKASIETVTKSLVGDYRPEHIFTLKQSLTAYRHYQQLIADCDQEVQRRIETFQSKDAGPTAPADSASPATAPQTSFDLRTHLERIFGVDLTRIPGFDVLRVQTIFSELGADLSDFRTDHSFASWLNLCPKDGTSAGRRIRGPRVKTKNRVTQAFRMAAFSLHNNKSYLGDYYRSQRALLGAIKATKNAAHKLARIFYHLVTTRQPYDETVFAKLEASNQKRKLHKLQTLARHLGYSLVTLPA

SEQ ID NO: 200742 - protein, 440 aa, unidentified
MQKVTVFETVHENAAGIDIGAAKIFVSVDGTEAISFDTYTIDYYKCAEYLQEKGIKEVAMEATGIYWMSLYAILESCGLKVCLVNPKETKQIKGRKTDVQDCRWIQKLFAAGILRKSFIPEGKFMEIRQLVRERLDIIDMGSVYINKMQKCLELMNVKLKEVISQIHGASGIKMIKAILSGNHDKIYLLNLCDKRIIEKKGELVLKALEANYNETYLFMLDQNMRLWEMHQQQIVLIDQRIEKLLEQMCEETKTIEIKSKAKPIRHHAPKVNGLHGKLIQLYGANLSSISGINDYTLLRLIGETGVDMNRFPTKKHFVSWCGLSPKHHQSGAMHKRVKGTKCNKAGQIFKECAQSLLSSKYTAIGSFIRKLKVRRDTGIAIKAGARKLAEAFYNALTKGTDYVEHGTKKYEEQIKQKEKAALYRLAKKHNMQLSEKQEAA

SEQ ID NO: 200743 - protein, 352 aa, unidentified
MSRLKEKMVDKEDLFVGIDRHKLRWHVTIRTPDIELFSASIPGTWEALQRILARYAGHQLQAVYEAGYFGFRLHDRLVAHGIPRLVTPPSLVPQEYGNRVKTDRRDSRKLAHLLAKRLLKRVWVPSEEELYHRQVIRRRRQLVRDRVRTQSRIKAALRFYGIHLVEPRGKWTQLYLESLRRINFGNRWMQERFKRLLEQYEFLSRQIDKQTQLLRELSETGLYQERVKILQSIPGIGVISAMELLLELQDLSRFRRAEQLAAYVGLTPSQYSSADKVRMGRITGIDKNTLRAILVEVSWKLITKDQVMREKYERIKIRSGGKRAIVAIVRTLLLRMRRMLLAKQAYALDLAA

SEQ ID NO: 200744 - protein, 363 aa, unidentified
MSAALQVQQPRRRRRRVFVGVDTHQLTHHAAVVDQAGRVLADQQFEVSTDGYQALTGWAAEYGQVITVGVEQTGSYGAALARHLTATGITVIEVNTFDIGARILRGKTDQLDAVAAARAVASGRAKTVVKDTTGEVEALRCLKIAHDTAVRARTVAINQMRDLWTTAPAPIRETLGGKPGTAAFRQHCLALPLTGTGPDHAVAVALRCLTGRINALNTEIKDLTAAMTPIVEHLAPHLLALRQVGIQIAAQIIVTAGQNLHRLHSEAAFARLCGIAPIPASSGKTSRHRLHRGGDRQANRALYLIAVGRLKNHPETRAYRDRRQAEGRTTNDIIRCLKRYIAREVFRELTLDLNPPKTTPTKG

SEQ ID NO: 200745 - protein, 420 aa, unidentified
MFMDIPSPFPYKATVGIDWADQKHDVFVRFAKGDSYRRKIDSRPGAIQEWLLELRSVCAEGKIAIALEQRRGALFYQLCTHLNWIDLYPINPHSLASFRLTFFSSRAKDDPIDSQLLEELVRTHSDRLRAYQPESTTERKLDQYCRHRRSLLDLATKTELKLISTLKQYFPLVVNLFAAVGMKSDIALNFLSRWPTLDELQRAKTHTVRSFFYAHNSRSQTLIEKRLQQIADAHNVTDDFALIEPLVVTTKCLVGQLRQFNQVIKEFDHLIKELFKSHPDHFLFESLPGAGAQLAPRLLSLFGSDRSRWADAADIQKYSGIAPVIERSGQSVWVHRRLSRPIFICQTFHEFAQQSVQRSAWADQYYRRQREKGKSHHSAIRALAFKWIRIIWACWKANKPYDESFYVHALEKRNSSLSTT

SEQ ID NO: 200746 - protein, 342 aa, unidentified
MSTIKTIGVDLAKNVFSIHGVDAYGKCVLRKTVKRNKLLDTFAKLPPCLIGMEACSGAHHWARELLKLGHNPKIMASKFVIPYRQNEKNDANDAEAICEAVSRPKTRFVSIKSEEQQAVLCLHRIRQGLVKTRTATINQLRGLLSEFGIVMPQGRHSAQNTIGSVLEDAENGLPILARELLQDLSNKIQNLNLEVLHYDRRVSALIREMASAKTLMDIPGVGEHSASAIVATVNDAKQFGSSRQFAAWIGLVPRQYSTGGHVHLGRISKRGEKHIRTLLIHGARAVIARCKEKTDRNSIWLNQLVERRGYKRAAVALAAKNARIIWALLTTGKEYKINYVNG

SEQ ID NO: 200747 - protein, 447 aa, unidentified
MKKVFIGIDVGKFKNSISIIDTEGNPIIKKGLSIENDYYGFARLEEQIDLIINNYGFTYDDCIAGVESTGHYWFNLRDYLKDIGIETVMIKTDSVKHRRALEEGQKGKNDTLDARVIASCLRNGNYVYIRENERELRALQKLTRMRNDISDELVALKNKIHRCIDICNPVFFKIFENLNSKTGVALIKLYPSPEDIINVNLDNIKIELGEIVDKPNMRMVSLYKEECEIWGRLIKEPSYAEKVEMVAYIDKFLLQNKSKEHLDKQIKEIAKNIIPLYSEFEQIKGIPLIQLISVLSEIGDIRNFKNTRAILAFLGLSLKGNASGKYIGERRINKAGSRIVRKHLFNIMDTLVKHNEYFRIAYCYYKSYNHKNPTKKRSMQIAVMCKFVRVMYGMLKHNTNFDYKEMLKGYYFGDCNMKVFKEEFEGEKRTKKIENYKLAYSIFVNYS

SEQ ID NO: 200748 - protein, 345 aa, unidentified
MTLFVGLDISLKTTSICVVEVDGSVVWEGKAESEPAPLAKALARFQDRIKLVGIEACPLSEWLYGALVENGFETICIETRHAQRFLSSRPNKTDRSDARGIAEMMRLGHFRAVHVKSKASQMLRTTLIARKKFVDHMLAIENTIRGLMKVHGLKLGTVHRSAFAAKVATLLADAEELRMAIEPLLEARNMMRRQMVLLDRQISKMARKDDVCKRLMTISGVGPIISLLFKATIDDPSRFRDSKAVAAHLGLTPRVYQSGEIDRSGHISKCGDKLMRHALFEAANSHLRRSTKWSTLRAWGVKLAKRVGGKKACVAVARKLAVIMHRMWVDETDFRFGQVPAGKPA

SEQ ID NO: 200749 - protein, 447 aa, unidentified
MNRVIPTSAAATKRKESQQMKTWNEVTHFAGFDWAKDHHDVLVLDGAGKIVAEFRFDHTGSGWMLCQEKLAQFPQVAIAVEAGHSAAIERLVMLDYRVYSVHPRSSKSYRTRKLPSGTKTDRADCWALADALRLEGESWRVLTAPEPLVQQLRLLCRDEVALIEQRTALINQLQQALYEYYPAALEAFEDWCAPSAWAFVERFPTPQTLVKAGNRKWQNFLHAQKLFHPEWNKKRMEIFARADQFCGPEAMIAAKSALAVATVKMLQTLAAQLTRYRAFITECFKQHPDHTLFASLPGAGPKLAPRLLGELIALKALADTPQALQCLAGMAPVSYQSGKVSVVYLRYQCNRFLRATIHLWVDLSRHYCDWARIYYEAHRKKGQGHACALRCLGMRWLKIIAAMMRNQTPYDAATHTRNQLQHGSWVMQLQPVKAVKNNGSAYIDAHK

SEQ ID NO: 200750 - protein, 364 aa, unidentified
MKRKVYVGMDVHKETIQIAYLTSNSKEILKEQQIKHNEVQIKKFIKKLKLEWNEIHCCDEAGVTGYPLYRYLKSLRVNCILVAPGKIPRQNTDKIKTDKRDAIKLARLMRSGELESIHVPSEEDEAVRDYLRSRDSLRLDLGRNRQRLMKFLLRKDIKYSTTKYWTVSHYKWLNNLHFNNEILQETFNDYYSRVRVQEENLKSMDKKIQEIAESEPYREKVGILRCFRGVDYLTAMFLLCEVNDFKRFKTAGSFMSFLGLVPGEYSSGSKRKQTGITKTGSPRLRRILTEAAWQHRFPGTGSKIITARRSGQPALVVALSEKASLRLHKKFRNLQLRGKTPQVMITAVSRELSGFLWAAMNLVA

SEQ ID NO: 200751 - protein, 343 aa, unidentified
MQLTRVGVDLAKQVFQVHGVDRAGRPVWCKRLKRSRWIAELERAAEPGAEIGMEACGSAHHWARVLQGKGYRVKLIAPQFVKPYVKTNKTDANDAEAICEAMSRPSMRFVAVKSVEQQDLQAVHRVRSSLIRERTAKANQMRGLLYEYGLVAPREISSLRRAVPEWLEDAGNVLTPRFRALLAGLYGDLRLFDERVRELDREIAAIAREHEAVGRLEQLRGIGPLTASALYALVGDARQYRNGREMAVSLGLTPRQHSSGGKERLLGISKRGDKYVRTLLIHGARSALRAAPGKTDRLSRWVLALAERSHPNVAATALANKMARVAWAMLRHGTNYEPEHVAA

SEQ ID NO: 200752 - protein, 342 aa, unidentified
MQETIYVGLDLGSSVCQQTVLGADGGRRFSRVIATSERSLQSAFDKLEGDVRVHMEAGELASWVQSILKPMVAEVVVSHPRSLAWIGKDAVKDDKVDAGKLAELLRIGRVHEVYCEQDDKRRTFRQLVTHHEQMSREQARQKSKIKARLRTLGVIRKDAGLFTSSGQKALLEAIAEPEIKRMIVQLFAVLNRMIECEREARRAMIEYSRKFAEVRRLQTAPGVGVITACRFVGYLQTPHRFSNKRKLWRYCRLGITRRESNGKRLSHPRLDNAGVGSLKDVSRKVFEAARRCKGDNSFKRVYEQSLENTKNAVHARLATQRKILACLRAMWIHNQPYRDNLG

SEQ ID NO: 200753 - protein, 344 aa, unidentified
MEHYAGIDVSVESASVCVMDAMGRIVREGKVASEPASLIGWFRALGFELTRIGLEAGPLSQWLYAGMRDAGLAVELLETRHVRDAFKAMPVKTDRKDARGIAHLMRLGWFRPVHCKSLPAQETRALLTARKLMQSKRHDIEMSLRGILRGFGLKVGKTSQRTFESRVRELVASHPTLLSMAEALLVARAALSEQLGRLEKRVRMLARDDQQVRRLMSTPGVGAIVALTYVAAIDEPARFRSSKAVGAHFGLTPKKYQSGETDVTGRISKIGDADARTVLYEAANVILTRPVKGSALKSWAMRLAARAGMRKAKVALARKLAVVLHRMLVDGTTFIADRAATARA

SEQ ID NO: 200754 - protein, 425 aa, unidentified
MDFKQNHKINQVTEKTLVVGIDIAKRKHFACFVDDRGRVLQKSFSVLQSNDGFQHFYHRILTAMKEHEKTEVIVGIEPTGHYWLNLAYFLDERGIPLAMANPLHVKRSKELDDNLPTKHDRKDALVIARLIKDGRFSYPRILKDIEAELRVGSTFRGKLTEEFGAVKNMMIRWLDRYFPEFTQVFPSFGKMALAVLECTPFPSDLFQKQPDEVLSLYRQVEGLKSPQRPKAIQLIEVSSNSIGVTEGREMARIEIATLVRRYNQLEQEIESITQQLVTLVQTSVEYEWLSTVQGLGDTTIVDLLAEIGSFSHYEDPRQIIKLAGLTLRENSSGQHKGQKHISKRGRRKLRALLFRVMMPMVRHNEAFRKLHEYYTNRKVNPLRKKQSIVVLCGKLIKVLHGISTKHKAFDAQRMMKDIPSLAEAM

SEQ ID NO: 200755 - protein, 426 aa, unidentified
MSKSDYNKQVLRRQRIRKTTLIVGVDIGNAFNALGFMDKEGNVLGSCAKLYNSREGFEQFVDMIEGLKAKHHLRDVLIGMEPTGHYWRKLAYFAKEHGYEVRFVRTTALKHHRELDESSSAKSDQRDALTIANITREGKYIDTVIEDGVLRQLRTLSKARERLLRYSVSAKNSLHAALDDYFPELHEIFWSMGSRSLWTILEQCPFPQDVVLMKVSTLQDLIAQSSRKKAGSAVKAEKLIESAQKSIGIKQIGNADRYRVQMCLEEVKRTVLSLKNIDKQLKFLLKETTAASYLMSIPGIGPLSAAVFLGELGDPTHFHNARQIVKYAGYDPQESDSGSHIGRKFISKKGRWLLRKYLFFMSMRVVVLSNYFQEYYLRKLETKNRVGQQPRRKEMLCAVAIKLIKVIFALLRDKREFVDLVPAAAA

SEQ ID NO: 200756 - protein, 347 aa, unidentified
MAHFVGLDVSVKETAVCVVDEAGEVVSEQKVPTEPDDIVTLLTSIGEAYGRVGIEAGPLSQWLVNGLATAGLPVVCVETRHMQALLKGQQINKSDRNDARGIAQMMRVGLFKPVHVKTLVAQEQRMLLTSRKLLQRKLLDVECDLRGTLRNFGLKVGTVSTRGYEARIRELVEGFPKLAAIVEPLLTVRRVMRQQFAVLHKMLLDTVRHDPICRRLMTAPGVGVVVALTYRATIDQPQRFVHSRAVGAHVGLTPKRYQSGEIDYDGRVSKCGDTMLRTMLYEAAHSLLIHSRKWSWLKAWGMRVAQRRGMRRAIVAVARRLAVILHRMWVDGTDFRWSNGPAVAKAA

SEQ ID NO: 200757 - protein, 326 aa, unidentified
MQTILHNCCGLDVHKDSVVACIIKTRESLTPERNQEDVTKEIRVFKTFHDDLAQLRKWLESENCCHAAMESTGVYWYPVYDALENACGGKMEIFVTNARHMRNVPGKKTDVKDAEWIASLLRAGLLRASFIPPVEVRELRQMTRYRKNVVEDICTQKNRIEKSLQQAGFKLSTFLSDIFGVSGRNLMRVLIQKGMLTPQDIENETRRISPAKKHEIKIAINGRLSEQQRQFLQLQITLLDELLGHLAVIEQSIEELSKPFADEIARLDTIPGIGVTAAIAVIAEIGTDMSKFPTAEHFCSWAGVVPGDNASAGKKKYPNHFWKHIH

SEQ ID NO: 200758 - protein, 317 aa, unidentified
MSVANEVFVGIDVSKAELEVYWLPQLERLQVARDEGGLVRLVERLKELGPSLVVLEASGGYEMPVAMALAGASLPCVVVNARQVRDFAKASGKLAKTDRIDAQVIAEFAQAIRPQVRALPDAAAAHLIALVARRRQLVEMLTAEQNRLALSHAAVREDLKQNIAWLKSRLQDLDGELARAVRSSPLWRENDKLMQQVPGVGRVVSVVLLALLPELGRLSPKRIAALVGVCPFNRESGRWNGKRAIFGGRAGVRSVLYMAIVSAIRWNPLIKTFYQRLLAAGKPKKLAMTACMRKLLVILNAMMRDRTDWNPNGALAT

SEQ ID NO: 200759 - protein, 411 aa, unidentified
MRRVIGIDIHRIFGEVVFGEDGRLRPAGRVDMTRSALENFGRSLTKEDEVVVEATGNAMAVVRVLTPYVARVIVANPTQVKAIAYARIKTDKIDAGVLAALRAADFLPEVWLPDANTERVRRLVARRNQVVRHRTRIKNEVHAILHAHLIPPCPHADLFGRLGRAWLGRQIVPADETAAIARHLRELDRLGEDLAVLDREIAQGAVDDPAVKRLLTVSGINLTAAVGLVAAIGDVSRFASPQKLASYVGLNPRVRQSGLGLAQYGRISKQGRAHARAMLVEAAWTAAKTPGPLRAFFLRIRARRGHQVAAVAVARKLAVVCWHLLSKNADYHWARPALLAHKVRAMELQAGLPEKKGNKRGPAYAYNVKELRDREIEVARHAERAYERFVTGWQPRGTRTRRTGAAIEERR

SEQ ID NO: 200760 - protein, 365 aa, unidentified
MQKISTMRTSGKNIFQGQLTIGLDLGDRSSAYCVLNEAGEIVLEHKLATTPEAMKQVFGSMPRCRIAMETGTHSPWVSRLLTALGHEVIVAHAQKVRLITKSRRKDDRLDARSLARLARIDPGLLSPVKHRSAQAQLHLTEIRARAVLVSARTALVNAARGLVKSYGERLRKCGTEQLRRETMSGLSAGLREALEPLLREVESLNERIQEYDRRIEKMAKQTYPETALLKQIKGVGDLIATTYVLTIEDPHRFRKSRDAGCFVGLQPGRRNSGESEPQMHISKEGDEYLRTLLVQGAHYILGPFGEDSDLRRWGRKLSARGGKIAKKRAVVAVARKLAVLLHRLWVGGEAYEPLRNSQKAMNAAA

SEQ ID NO: 200761 - protein, 357 aa, unidentified
MDKMTRIGVDLAKNVIQVHGVDSMEHVVVRKALSRQKFLEWFANLAPCLVAMEACSAAHYWARKLRALGHEVRLIAPQFAAPYRKGGKHVKNDRLDAEAICEAAGRPHMRFVPIKTADQQNVLLVHRMRDGFVEERTALVNRLRGELVEFGVFLPQGIDAFRAHFVDALEDGATELNGVARTALLRGWDHLQALDQQITRCDAQVATHVKHDSDAQRVMAVIGIGPLTASAAVATVGDAHLFKNGRQFAAWIGTVPKQKSSGGKTRLGRITKQGNTYLRTLLFQGARSAVTSAHRRTDRLSRWIVQLQARVGWYRTLVAVANKHARILWAILAKGERFDPSYVPTRPPPAGREAATA

SEQ ID NO: 200762 - protein, 408 aa, unidentified
MNTLYVGIDVSSKSNVVYLMLPNGDKHSNFSVANSHEGSTQLVKRILSVLTSHSLDTVLIGLEATSVYGDNLVYFLREDATLAPFNRKIHVLNPKQVKKFHDAYNDLPKNDYVDSFVIADCLRFGRINKEVYMGDYRYKALQNLTRARFFAVQNLVKEKQRFMNVLFKKYSTMTQEKVFSDTFSTTALAVYDEFESAEALANMDLHELTDFIMEKGKNRFPDPDAVAKAIQKAARSSYRLPKTMNDSVNQVLSISITSMKALESQIKEFDKAIKAQMELLPNVLISIPGIGPVYSAGIMAEIGEIDRFNSQAALAKYAGLAWKQHQSGGFEAEVTRLIPSGNRFLKYYLCEAAFSLVRCDKEYSDFYHLKYKEVNRCQHKRALALTARKFVRLVFRLLKDNRLYCPAK

SEQ ID NO: 200763 - protein, 363 aa, unidentified
MIVIGTDTHKRTHTCGAVFAGTGQLAGELTAPAREAGFHELLDWGRGLEEERIWAIEDCRHVSGALERFLVASGERVVRVPPKLMGESRRGERTRGKSDPIDALAIARAALREGPETLPVAHLDEAALQLKLLLDHREDLVKARTEDQQRLRWHLHDLWPELEIPAGALDRIVWLDRIARKLSRVEQGARVQISRELVVEIRRRTRRAAELEREISSKVKEQAPQLLELEGCGALTAAKLIAETAGAKRLASDAKFARLAGVAPIPASSGNRTRYRLDRGGNRQLNCALHRIAVTQGRFHAPAREFLARKQAEGKSRMEALRCLKRHLARRVWRLLIDSEIDRSVITVDTQRGTPSPQIAVAA

SEQ ID NO: 200764 - protein, 345 aa, unidentified
MEHFVGLDVSQEMTHFCVIDGQGKTVSQGRCLSTPEAIAGTIKSKAPDVVRIGLESGPLSTWHWHALKAMGLPVVCLDARHAQATMSGQVNKTDKNDAYGLAQIVKVGWYREVGVKSLDSHAIRSMLGARAQLVGMRVEVTNQIRGILKTFGIVLSRRTGEPFEGLVNEACGDGESMLNHTVRSLLCVYGGLKEQIRHMDRELMDCARKSVICQQLMTIPGVGVLTALAFVTAIDDPAKFAKSRSVGAYFGLTPRCYQSGEIDQNRGISKCGDSLVRTYLFEAAGTLLTRVEKWSALKAWGLRLAKRNGLKKAKIAVARKLAVIMHRMWVDGAVFRWSADTAEAA

SEQ ID NO: 200765 - protein, 350 aa, unidentified
MQSHITIGMDLGDQNHIAAILDADGQEILCAKLPNTKRSIKRFFQQYTGARVAIEAGTHSPWISRLLEELGCQVYVGNPYKLRVIWDSTDKSDERDARMLAMVCRLEPKMLWPVRHRDERAHNDLEVIKARNILVQSRTKLVNHIRSVVKGTGERLPKCSTESFGNRATNLLPKPLLPALKPLIDTVSDITSRIRKLDKQIKELILDLYPEAQLLQQIQGVGPVTALAFILTIEDPGRFAKSRMLGPYLGLTPRRDQSGSTDKQLPITKAGNVYLRKLLVGCAHYIMGPFGPDSDLRRHGLAIAARGGTNARKRAAVAVARKLSVLLHRLWVSNQVYVPLYTSMRVKQVA

SEQ ID NO: 200766 - protein, 355 aa, unidentified
MTSTKYIGMDVHKESISIAVRNSAGKVVMECVIETKASMILQFIDGLRGDLQVTFEEGTSAAWLYDLLKPHVTKLVVCDPRKNKSMREGNQNDKIDARRLAELLRLDHLTPVYHGEHGLRTLKELVRSYLTITKDLARVMSRVKAIYRSWAIPCSGKQVYAARHRAEWLGKINEPGVRRRAECYYQQLDALRVLRQGVRRDLLAESKKQKAWKRLCEIPSIGPIRAAVLLGILQTPHRFRTKRPLWNYGGLAIEMHSSADHRRVHGQLERSTKNVLVRGLNRNCNHDLKNLFKGAAAVASSKPGPFQEFYTALVAKGMRPEMARLTLARKIATIVLIVWKKGVRFDAQHLKPQTA

SEQ ID NO: 200767 - protein, 396 aa, unidentified
MPLQLVMWEEHVHKPTTTIAGSARLGEQVDAVIGVDTHTDTLSACLVNPVGAVLAEITEPANPVGYRRLLTWSTKEQAKHGCPRLVWAVEGTRSHGAGVTRALRTAGQLVLEATRPPRAARRPGGKSDPKDAVHAARAALANTHHAEPRADGPREALRMLLGVRSAALTARTDAINELKALIMQAPDELRGRLRGLTSSAQIAACRRLRVPATPDPVAVRHDPQVVLVDAETRARLACMRRLARRIGDLTIEIDDAADEIHTLVHALDPGLLAEVGVGPITAAQILISWSHAGRLRSEAAFAALAGVSPLDASSGAQQRHRLNRHGDRALNSALHTIAVTRERCDPRTKTYIQRRVSEGKSRREARRMLKRYLARHIYRHLERAASVPTDGALLAA

SEQ ID NO: 200768 - protein, 356 aa, unidentified
MSKDSKLNFSGQSIYIGLDVHKKSWSVSIFSEQGEYKTFSQTPKAETLVQYLQHHFPGAQYRSVYEAGYCGFWVHDQLGEQGIQNIVANPADIPTQDKERRNKRDRVDCRKLARGLRSGDIKGIYTPPRWKLEDRSLIRTRLSMGRKQGRCKNQIKSMLLFYGVEIPEQREIGHWSRRFIRWIEGIQMERTSGNIALKIHLEELCHLRQIIAKLNRAIVALARTDQYRSWISLLKTIPGISTLGAMILLAELYEITRFRSIDELCSYVGLIPDTHGSGEKEHVGGITQRHHSYLRWLLIEASWVAVRKDPVLLESFQEYCKRMRKNKAIIKIARKLLNRIRYVLKNQAEYVAGVLE

SEQ ID NO: 200769 - protein, 362 aa, unidentified
MSMYFVGIDISKYKHDCCIISAADQQIVSKFTVKNDKDGFEHLLTTLNSLSNPEDIKIGFESTAHYAPNLELFLENAHHSFMEVNPVLIKEYKKSTTLRRTKTDSVDCESIARWLMTVEYKPHSKGFYHSYSLKSLTRLRDRLIRQRSFYLVKITNVLDHTFPEFKPFFNERLSKTAIYLLENYGSAEKMAHMNSASYDKLRCISRGKFSIQQFLRLKELAANTVGVNNSIFDIELNSLLTLYNSLCKEIKTLEAEITKLIEEVHPHYMSIPGIGPISAAVIYAEYGDISNFLNPGQMLAFAGIEPGINDSGTESHGGRMVKHGSSQLRYVLLNACLPLIRFDIKPLQLTMQRNVQKAKNTG

SEQ ID NO: 200770 - protein, 344 aa, unidentified
MAIAVLGIDLGKNSCSVAGLDGTGRVILRRRLTRESVVRLAGTLPACVVAMEACCGAHHLGRVLREQGHEVRLMSPEYVQPYVKAQKIDERDAEAIAEAATRPTMRFVELKSEAQLDAQILHRARSRLVGQRTALINQLRAVLLERGIVVAKGRRRLEEYLIGLLDGDRPATLSPRICLLIEDMRLEWSELDQRIAALTAEFVARAREDQAARRLATIPGFGALNATALVAAIGTGETFRRARDLAAWLGLVPRQATTGGKPRLLGITKRGNTYLRTLLIHGARAALPSLSASQSPMGEWLRGLIGRAHKNKVIVALAGKLARIAWAVLRSGETYVKEGRPVAA

SEQ ID NO: 200771 - protein, 439 aa, unidentified
MHFSGEVEEREERLNKQKVVAWVGIDWADEGHEVWEYTVQTDSATCYAIKHTAESLQEWVNQLRIRHGGKPVAVVLEQARGGLIYALMNTGFMEIYPVNPESLAKFRKALYPSGAKSDPTDAELLGQMVRQNPGRFRAWVPGDEQTRSLQLLAEGRRKLVEDMTALTNQLTSVLKTYYPQALNWAGDLSSEQACSFLEKWPTLADLQKSRPFRIRNFYEKYGRPPREVLDERVTQMEKAQPLTADPAVVMAGKMMVNAVVAQIRPLRAAIEKYDDEIERIFRQHPDRAVFESFPGAGKVLAPRLLAAFGADRDRFEAALEVQQFSGIAPVTERSGKTIWVHRRLACPKFVLQTFHEFANQSRRFCVWSKLYYQQQRARGKQHNAAVRALAYKWIRILFRCWKDRRLYDDSRYQKSLIKRGASLAPLLNVLDCGNGVQAL

SEQ ID NO: 200772 - protein, 333 aa, unidentified
MSKFTHFSGIDVSKDFFDAVILLNGDKDNPIHNQFENSYKGIKSYKKWLTGLGATNENTLMCLEHTGIYGKLIIKYLLAFDFSIWVEMSLKIIRSIGVQRGKSDKLDAGRIAYYAMKNVDEAVLYKAPSETVEKIRKLLSLRDKLIITKAGLLKNLKELETFDKTLARLSKQSQKNTVKGLEKDLKNIESQLNELIKSDENLNRMYKQATSVPGIGKVTALFLIVYTNEFTMYTTPRQLACYCGVVPFEYTSGKSVKGRPRVHYMANKKMKKQLHMCALSAVTYDPEMKAYFERKVAEGKNKMLVINNVRNKLVHRVCACIRENRMYEIREIA

SEQ ID NO: 200773 - protein, 375 aa, unidentified
MTRMPPPLPASHPTMTPPTSPVVIAGVDTHKDLHVAAVIDTGERVLATKSFSTTRAGYRALIRWVRSFGDVARVGVEGTGSYGAGLTRHLVEAGFDVLEVDRPDRSDRRRKGKDDDLDAISAARAALHGRRTSVPKSKDGAVESLRVLRVTRQTAVRARRNALQLLRMSIVSAPEELRDSVRNLTRMQLIRTCAAWRPDTTDAADPVTATRIALKSLARRMLELGDEIAMLDDLIAPLVTELAPQLLERVGIGIEVAGQLLVTAGDNRARLRSEAGFAMLCGVAPLPASSGMTQRHRLNRGGDRQANSALHLAVISRMRLDPRTQGYVAKKTAEGHSKPEIIRCLKRYLAREVYYLLNPGQPKAATGSRNPQIAA

SEQ ID NO: 200774 - protein, 450 aa, unidentified
MPRGEFAPDLCLFRAPVQGSAKIAVARRLKRGEGMTDQRHCYAGVDWASESHHVFLTDGDGRKIGERVFRHGGEGLAEMAAWLMATSGAIEGDEIQVAIEVPHGPVVETLMERGFKVHAINPKQMDRFRDRFTLAGAKDDSRDAEVMASALRTDPRCFRLLAVADPVVIELREWSRIVEDLSAERNRLTNRMREQLWRYFPALLELENDLGAEWLLDLWETVPTPDKVARIREATIAKLLKRHRIRRFDAARVLDILRQPPLKVAAGTTESASAHVTTLIARIRLVNRQLKQAHHRLDGLTASLVAAAETEPGQKKQHDVEILASLPGVGRIVLATLLAEAFDALQRRDYAALRSLTGVAPVTKRSGKSCIVVRRQACHDRLANAMYHWARVAVQRDLRSRLKYAALRSRGHSHGRALRSVADRLLAVACAMLKTGTTFDPSLAAQKSAC

SEQ ID NO: 200775 - protein, 338 aa, unidentified
MYYVGVDLHKRSISLCVVELADRERKIIERRKFRCDEEEQMAEYFASLGEYQLVVEATASYEWFVQLVEPTADRVVLAHPGHLRVIAQSKRKTDKLDAQTLAEFLALDQIPEAWRPTPRVRQHRTLVRHRHYVIGRSTSVKNKLRRVLSHYNADTKHLFSKAGREYLATIALSAADRFVVDLLCEEFDQHRERLKRVDLQLKAFAKQAPVAEQEARTVLESMPCVGPVTIDAVLAEAGDIRRFGSQRKATAYAGLAPGIRESAGKAKQLGITKQGSRILRMILVETGWRLVNKTRRWASVYEKLKSRCGAKKAIVAVARRVWCVMVSMLQNGHTYQPT

SEQ ID NO: 200776 - protein, 472 aa, unidentified
MSAGKKNANDGASGGAVAAGGGDGAEVAEDRVQVVEYAAAIDVAKGFGMVCTRVPGSRPDRRRQKVWRVEATCGEVTALMDHLRCEGIQRLVLESTSDYWRIWYYLAEAVGLEVWLVNARDVKHLPGRGKSDRLDCVWHCKLNERGMLRRSFVPPEPVRDLRALTRTRARLAQDQARHQARVEKILEDALLKISVVISDLFGASGRRFLDALVAGERSPKALAALGDTRLRATRRELEDALTGRFRDIHAFETQTHLRLIDAINEEIARLDEAIGQQLALVPGTAPCCTACGLAGGGHAPACAGEDTPVLGLAGRLDEITGVGECNARVIIAELGTDPSIFPTPGHAAAWARLTPRSRQSGETARPGRTGKGNRYIRGALGQAAMAAASTNTRLGAMYRRIARKRGKQKAIVAVSRVICEIAWILICDPGARYQELGPDYYRPRSPARQTRDKIREIERLNPGKKVILADAA

SEQ ID NO: 200777 - protein, 393 aa, unidentified
MVCVGIDVAKDKHDCFIISSEDEILADVFTIPNNAEGFDTLLQAIRRSTRPEDKIKVGLEATGHYSYNILGFLLDKGLPTYVINPLHTNLYRKSLSLRKTKTDRVDARTIAAMLMSDVDLKSYTDTVYHNEELKSLTRYRFDKVRERAKLKQSVSRLVTILFPELEKLVSSLHSASVYALLSEFPGAKQISSTHMTHLKAVLKNASQGRYGQEMAETIRNAARSSVGSVMPAKSLELQHTIRLIRELDAEIEDIETAIQAIVDEMQSPITTIPGMGVRMGAVILAEIGDFSRFDSPDKILAYAGMSPSTYQSGQLSLSGAYSHMEKRGSRYLRYALYNATKHVCHWDPTFAAYLAKKRAEGKHYNVALSHAAKKLVRLIFAMEKSQRPYCAAA

SEQ ID NO: 200778 - protein, 347 aa, unidentified
MEHIAIDLGGRESQICVRASDGTVLAEERWPTGSLKKYLVRRPKSRVVVESCAEAFSVAEAAEECGHEVNVVPATLVRALGVGARGLKTDVRDARNLSEVSCRMARLPAVHIPAKASRERKSLCSLRENLVEVRTKLANGVRGWLRSEGLGSPRVGQPERLWLRVQEHLKQRDRVMPGYVERNLKAINFLTEQIEEADRELGATAKADPTCRRLMTVPGVGPVTAVRFAGAVDQVERFPNSHALESYVGLVPGENSSSERKRITGLTKAGARKLRWTLIQAAWSARRCRRNDPMVAWALQVEARRGKFVATVALARKMTGILYAIWRDGSTYHANRGSGPVCEPSPP

SEQ ID NO: 200779 - protein, 338 aa, unidentified
MNIARIGIDLAKQVFQIHGVDRTEKVLVRRQLRRSQMLGYFSKLTPCLIGMEACGSAHYWARELGKLGHEVRLMAPQFVKPYVKSGKNDANDAEAICEAVGRPNMRFVAIKTAEQQVIQAEHRIRARLIKSRTALSNEIRGLLAEFGIVVETSIGRLRKALPELLEDGENGLPGSFRVLLAGLGEELRALDDSITAFDAGIAQRAREDGRIRRLLDVEGIGPITASALVAAVGNGTQFNSGRDMSAWLGLTPRQYSSGGKNKLGGISKRGDKYMRMLLIHGARAALNAAKNKEDGRSRWVKNLATRRNKNIATVALANKNARIAWSILSRSESYRKAA

SEQ ID NO: 200780 - protein, 331 aa, unidentified
MKVFAGIDVGAKSVVLAWRQGGRAVGRGTVLQTVEGHRQLVQQLCALGPAHVVLEATGIYYLDLAVALAQAGLPVSVINPKSFHHFAKLKLQGSKTDGIDADLLAEYGERMTPAPWVVPDPALLSLRDLGRQVNRLTATRTQAKNRLHALEARSGTLALLVEDEVQAIADLDRRIQRITQAARELLREHPTLAEQVACLDSATGIAEASAIAILAELCVLPKTLSGTQVARFAGLDVRLCQSGTSVNKASRISKAGNAYLRAALYMPALSAVRYDPRTRAFYEALQRRGKKKLQALCAVMRKMLTGLWACLKTGQSYDSTKLFSEIHLAQA

SEQ ID NO: 200781 - protein, 342 aa, unidentified
MQITTIGLDIAKNVFQVHGIDASEKVFVRKQLRRSQVLAFFKALPPCLVGMEACATAHYWARELTKHGHQVRLMPAKDVKAYVKRNKNDAADAEAICEAVRRPTMRFVQVKSAEQQGRLMQHRTRDLLMRQRTQVINALRAHMAELGIVAAQGREGIKELLTIIASEEDARLPVDAHASLVVLAAGLQAVQTMIASIEKRIIVQHRSNEASKRLETIPGIGVIGATAIVATVPDPKAFRSGRDLAAWIGLVPRQDSTGGKQKLGPISKQGDQYLRRILVVGAHAVLRRARQQPEKYPWLTQLLARKPFKVVAVALANKMARIAWALLAKGGTYRAPALAAVA

SEQ ID NO: 200782 - protein, 340 aa, unidentified
MNEITRVAIDTSKSVFTLHAIDARERPVLRRNLRRQDLLPFFAKLPPVDVAMEACGGSHYWGRTLQAMGHRVRLIPAQYVKPFVKRSKNDRNDAQAISEAAARPGMQEVAVKSADAQARAMLLTVRELLVRQRTQLINALRGHATEMGLVAPVGGKGLAALRSEIEADATLPEAATEALRLLGREVDQLEAKLAEVDKNLLAQHKADPDSRRLSAIPGVGPMSALSFSRMVDATQFKSGRHFAAWLGLVPREISTGGKQRLGGISRAGNERLRQLLVLGATAVIRFARSGRPGVSAWLLALLERKPRKLAAVALANKMARIIWAMLTRGEDYRPVKPVVA

SEQ ID NO: 200783 - protein, 346 aa, unidentified
MTIVEAARTVTGGIDTHGDVHVAAALDQVGGLLGTESFEASPDGYSALLSWLSNFGTVTKIGVEGTGSYGAGVARFLARAGVQVIEVDRQNRQARRQSGKSDPIDAVEAARAALSGRAHGQAKSRDGSIEAIRVLVVAKRSARAARVKALAQMRQLTYSAPDQLQCRLKGLPIPQFVSVAQGLRPTRSKDPVTAATKASLSSLAHRVADLEDEIAELDAMITPLLQATAPQLLAVYGVGIDTAAALLVAAGDNPERLRSEAAWAHLCGVSPLQASSGKITRHRLNRGGDRQANRALWHIVMSRLASDPETQAYMERRVKNGRSKREAIRMLKRYVAREVYHHLPRG

SEQ ID NO: 200784 - protein, 368 aa, unidentified
MVKIARIGIDTSKGSFQLHGVDAEEQVVLRKTLRRKQFLEYLAKLEVGEIGLEACGASHHWARALRQLGHRVVLVPPQYVKGYVARGKNDKNDAEAICEAMSRRRVRERLVPVKTLEQSAGQMMMKVRSSLIERRTQLTNSIRGHAAEFGLVAAKGMDKIGPLLERIAVDESLPARAREMFAMLAEDYAELAARIVRIDKRLLAFQRDNEVARRLMEVPTIGPIGACLWVTKVVDPHAFRSGRSCAAWLGLTPKDRSTAGKQWLGGITRAGDESLRATLVLGATAYLRHVRSGRIAATPWLAGMLARKPPKLVAVALANKTARIAWKLMISGERYDPAHQPTREGLDASQWGGLRAEPLTAGGVEAVA

SEQ ID NO: 200785 - protein, 346 aa, unidentified
MILIGCDYHPSWQQICWLDTVTGETGEKKLEHGSGEAERFYRQLPAAALIGMESTGNCQWFVEMATTQGHDVWIGDAAKIRASEVRAQKHDRRDAALILKLLMEGRFPRIWTPSGQEKDLRQLLIHRYKLVRIRAQVKTELQHLAMNQGVTRKRKLWSKAGEKVLRELPLKPWASRRREDLFKVRGMLDEQIAPLDQAAAEAAEKNEKARLLMTQPGVGPITSLAFVLTMGDVSRFQRGKQVASYLGLIPREYSSGGKQRLGSISKQGNRFLRMLLVEAAQGAVQCDPGFRNEYLHRCHTKAKGVAKVAAARKLAIRLYWMLRTNTGYPEVVRVESSSRVPLVSAS

SEQ ID NO: 200786 - protein, 369 aa, unidentified
MEDRITYVGLDVHKEGIVVAVAEGGLRGEVREYGRIANTAAALDRLVRKLGGEGVRLRFCYEAGPCGYGIQRHLSARGHECVVVAPSLIPKRAGDRVKTDRRDAAGLARLHRAGELTAVWVPDAQHEAMRDLVRARLDAVHALRRARQQLSGFLLRQGCHYGRPAWTKLHRRWLAGLKFEQAVHHIVLEDYIAAIEAAEARRDRLTAQIEAMLPDWTLASVVAALQTMRGMALVNAATLIAELGDLSRFANARQLMAYLGLVPSEHSSGASVKRGGLTKAGNKAARRLLIEAAWCYRFPARVSRELRLRQEEQPRPIREIAWNAQLRLCARYRRLARSGKPANVVTGAIARELAGFIWAIARCVPPAAG

SEQ ID NO: 200787 - protein, 319 aa, unidentified
MAQNDLVVAGIDVAKDKVDVCIRSLSLKRTFASTEEGRRELTSWLRRRKVGKAVMEASGGYERDWAKVLRNAEIEVRIVDPKRVRSFAQSAGRLAKNDTIDAEMIAWFAETFDEARGQAYDETREQLHQMVNARQALKGMQAKLESQGEHGLPAAVQRMHARILKTITVELVKFEAAIAAMIQATPRFTELAEIIESVPGIGRTTSAALIAAMPELGQANNKIVAALLGVAPYDDDSGRRRGERHIKGGRRRTRNVFYMACLGAATQHNPVLKAFYDRLVAKGKEKKVALIACMRKLISILNIMIERRQKWDASRYALS

SEQ ID NO: 200788 - protein, 340 aa, unidentified
MRIIGCDLHAAQQSIAMLDCETGEVIEKTLHHQNAEVRDFYRALPAPVVVGIEATGTMGWFLQLMDELGIACRVGHPAAIRQAETRRQKHDRRDATLLLQLLVEHRFPAIWMPTTELRDLRALLLHRHQWVRMRTRVQHALQAIALNHGLRRGPALWTRDGQAAIAALPLPRYATDRRNELHALYRHLTEQLGRLDDRVAQEAQGRPRATLLMTHPGVGPVTALATEVFLGDPRRFRDAKALASYVGMIPSEYSSGPKQRLGAISKQGNAFLRFLWCEATQHAVTHDPALKRFYRRKLQQKGFAKAKVAAARKLGIRLWIMLRDQIDYAEFCRRSSARQA

SEQ ID NO: 200789 - protein, 414 aa, unidentified
MDVVVERCAGLDVHRDSVVATVRVPGNGKSRRRREQQTRSFGTTIGQLETLADWLQGFGVTLVGMEATGVYWKPVFYVLERRFECWLLNAQHLHNVPGRKSDVIDSVWCCQLLEHGLVRPSFVPPPEIRRLRDLTRLCIAQVEERTRAIQRLEKVLQDAGIKLTSVASATYSASARAMLEALLAGVTDPEELAQLAKGKLRAKIPQLREALANRFELAHHGVLVAGLLVHIDALDQTVAILDARIEAATEPYAELVELLCTIPGVSVNTARVLIAECGVDMSVFGSAEHLVSWAGICPGINTSGGRRRSGKTRYGSRWLRKTLTESARAAARSKGTYLASHYWQIRGRRGDAKAIGATRHDILIAYYHIIRDRVPFRELGPDWLARRHSVEHRTRRLVRQLEALGHTVTIEAAT

SEQ ID NO: 200790 - protein, 335 aa, unidentified
MNQARMHVGVDVGKDSLDICYPNGDKEHIRNTKRCRATLIKKARALGAVISFEATGPYDEALESECVASGVPAVRLDAWKTRKYAESQGMLEKTDSIDCEMIRDYAASLRPDQLHFVRERSAGYRKLKRAVSVRRNLLKAKALIASQLEGDLDAEIKSAIARAVASIDRQVERMDAVCVAAIRSDERMGAIAARFGQVVGIGPVLISTALASCPDIGSFTSKGIAKFAGVAPLENRSCTITKKPRPRRGRRDLRCALYMAAVSACRSNHRLRRTYEGLVARGIPKRAALIALARHIIILMNYIAKYPDFNPEVDPKKAAQMALPKRRPGRPRKNP

SEQ ID NO: 200791 - protein, 484 aa, unidentified
MKTKSIYPASNSLRLKKIMAKYSPSEILYVPIDVAKYNHKACCINFFGDILTPAFEFPNNSHGVDFFISKVTGVVRTSKIKKILIGLESTGHYHRNLTLRLRALGHDVAVINPFDSWKERLNKNAKTDKIDLSSIAKALISGEFSSSYIPDGVYYNLRRATRTRRKFISRRGSSQNVITGLVDQLFPGLWDKDDSIFSDRWGKGSLLVIEHYPTSQRVLRLGEARLARFLRKNSTKLTLKTARKIISAARCSLASNNPCEQTMDILALRSHIKVYRLYQEIIANLENEIAHLLGQTPGVYLLSIPGISVTYGAEITAEIGDISRFAYAKQIISSAGTCSKKNQTGEYDPQGLPMSKKGNKFLRTSLNQAALSLNAWCPDFNAYYTRKLVEKADKKGIARTATGNKLARLVFALMKHEMLYRPRTINSLTSNLRGYYIALYGKILKKLDRFSSEKVLPKDNYLEQIKQKLEKQYGVNLSKLSESI

SEQ ID NO: 200792 - protein, 275 aa, unidentified
MMYSGIDLHSNNSVVAIIDDADRVVAQKRLPNDIAKIVGFLARWQDELAGVVVESTYNWYWLVDGLRDADFHVHLANTAAIKQYEGLKHSGDETDAQHLAHLLRLGILPTGTILPREHRVVRDLARKRMQLVQSCTAHVLAVENIMARQLGGRMTSNQIKRLTDDTIDSLPLAADVGLAIKANVAVIATLQSQVEVLEKRLQERVKPRPQYGLLTSVPGIGQTLATVILLETGPIDRFADVSNFASYARCVAVIPACADSGPNSASSGDHFDEGG

SEQ ID NO: 200793 - protein, 350 aa, unidentified
MNILALDLGKYKTVFCDYNSDNGEHEFGKVKTTPQTIHDLIVEKGPQRVVLEVCHIAGWVVDIARALGKETETANTTHDAWRWKNVKKKNDREDALKLAKLSAMNQLPTVHIPDKKVREKRSLIKYRQRLVKHRISTKNAIRAIFAREGITTVPRGKNAWSKDGLRWLRTHAKPLEEIADIDQLWRGQLHVELETFEAISESLKKVEDKLNKLGACDEQIKRLQTIPGVGPRLAETVVAFLDDPKRFQNSKQVGSYAGLTPRQYQSGQTERQGKISGQGNKLLRNLLVEICWTSLRCNPWARDTYNRLLRGSPSRKKIAITALARKLVVRCWVMLRDEQDWKNDIQKNVA

SEQ ID NO: 200794 - protein, 347 aa, unidentified
MKILSLDLGKYKTVGCDYERESGRHRFRGTVTAPAALAQVVKEVKPDRVVIEVCNIAGWVSDLLRGMGVEVQVANTSDDAWRWRKVKKKNDRSDALKLAQLSAVNQLREVHLPTIDVRQWRALIGFRQQLVKRRGKMKNHIRDLLVTEGQLLPRGAKCWTQIGMARIEAMARPLSEVGINELWRGQLDIELRQLREVQQEIAVAEEKLNAIAAADPRVALLRTIPGVGPRLSEAIVALLDRPERFQKAREVSAYIGMVPKQFDSGESERAGRITRHGSRLVRSLLVEVAWAGLRYNPWVRQTYQRISGGKKSRKKIAIVAVGRRLLVRCWAMLRDGTSWRPHAPQTA

SEQ ID NO: 200795 - protein, 420 aa, unidentified
MKKKPKQTQMPINKLDMQNNKIGFKGQNIYVGIDVHKKNWQVSVSADMPIKRDEFHMTSNNVEGLLSHLQAKYPGATYYSAYESGFCGFSSHRRLIEAGIRNIVVNAADVPTTQKASVTKTDAVDAKKLSEALKNGMLNGIHVPTEEEEGVKNLQRKRDDYVKKLGGTKSQIKHFLHRNGIDFESEFREGVHWTSSFIQWLKELDLSTHLKLTLEGYLEDYEYLKRQAAKFEGYLRTYMRENRMDDLEKIASVPGIGIITSMTFLSEIGDFSRFNNQRAFASYIGLSPTCHDSGEKKNTGEITFRSNRRLRTSLIESAWVAVKEDDSLRADFLAYKRRMDSCNAIVRIARKLANRILHVMKERDVYVIKEADGGERVKNTFPITRKKIDALSLPQQTANEQISGESNNREGAAPRQPKEI

SEQ ID NO: 200796 - protein, 457 aa, unidentified
MNPKRSKPKNDRTMPMIHPNAAAIDIGATMHMAAVRADRTPEPIRSFGTFTTDLHRLVDWFTECGVETVVMESTSVYWIPIFELLDARGFAVFVVNARDAKHVPGRKTDVSDAQWLQRLHSYGLLRASFRPKGQIAQLRAYVRQRERLLEYAASHIQHMQKALTEMNLQLHHVVADVTGATGLRIIRAILAGERDSKVLACLRDYRCHSSAEAIEKALTGNYRAEHLFALEQALALYNVYQDKASACDARIEAVLKELSISRGRDAGLLPSPRRRLHGKANGPDFDVRAALFKLLGKDITQIDGLGSYLSLRLIAECGDDLSAWPSAKHFTSWLCLAPSNKISGGKVLSSRTRRSGSRASALLRLAAVTVGRTDTALGAFYRRLSARIGKAKAITATARKIAVLFYNAVRHGMEYVDPGSSYYETRYRTRVVENLHRRAKAFGFVLRPVQLKAGAVS

SEQ ID NO: 200797 - protein, 371 aa, unidentified
MEHTTFVGLDVHKRATSVAIAEPGGGGEVRFLGEIPSTPEALHRLVERLKGRHRRLSFCYEAGPCGYGVHRLLSGLGQECSVVAPSLIPSRPGDRVKTNRRDATTLAKLYRAGELTPVWVPDAAHEAMRDLVRARATARRVLGKARQHLQGFLLRHGRIYRGVRGWTEAYRRWLTTVRFDHPAQQIVLQDYIHAVEDAEARLGRLERQIEELLPAWSMAPVVEAVQAMRGVALIVAVTVVAEVGDFSRFATPRQLMAYLGLVPSERSSGASVRRGGITKAGNAHARRVLIEGAWTYRMQARVSRKLLDRLERLPQAVRDVAWKAQLRLCHRYRRLAAAGKPKVVVTTAIAREMVGFIWAIARMVPPRPAIG

SEQ ID NO: 200798 - protein, 408 aa, unidentified
MGRSIGLDVHRDFCEVAVADGGRARSAGRVVTTPEDLELFAASLAADDRVVLEATGNALTIARLIEPHVGEVVLANARQLKAISHARVKTDKVDARVLADLLVADLIPPVWSGDERVRMLRRLVSRRRGLVKRRTQVKNEISAVLHRNLKGRPPASDPFGRKGRIWLAAQELPIDERLTVDAGLRQLDFLGAELAEIDRLVAVEAQGDEDVRRLLTVPGVDVTTAVTLVAVIGDARRFPSSRQLVGYLGLHPRVRQSGSAPARHGRLSKEGSAAARHVLVEAAWTASRSPGPLHAFAARIAARRGRQVAAVAVARKLCVLCWCLLTRGEDYAFARPSMVRRKLRRLELAAGAPRRKSGPQADPVWNTDADRRERRLAEQAERAYERLVADWKAAQARAGAGATPGRAS

SEQ ID NO: 200799 - protein, 424 aa, unidentified
MQTDRANQQQYAAYIGLDWGDQQHAIALQAAGADQVEEAYTVKQTPESLHDWVLSLRTRFGGRDVIIAIEQSRGAVINVLLGYRFVHVLRVPPKSLARYREAFYPSGAKDDIPDASLLLEWARDHRDKVKVWIPDKPEIRALQKLTEFRRGTVGRRIAITNMLTQSLKEYFPQALSWAGELDTPMACDFLDKWPTLEKLQKAKPAQIRKFYQEHGCRRTEVVQQRLEEIGSARPLTEDSAVISTSITVLETLVPQLRCLIDAIDRIDAQIHKLFNKHEDRDIFDSFPGAGRVMAPRLLAAMGSDRNRYDTALEVQQYSGIAPVTERSGKSKWVHRRFACPKFFRQSFHEFAGLSIRYSSWARAYYQMQINKGKNHHAAVRALAYKWIRIIYRCWQKRVPYNEEIYLEALRRKNAPLLELLEPAA

SEQ ID NO: 200800 - protein, 461 aa, unidentified
MRRKTKRKAKAKTTLPEGLETINLNAAGIDIGSTEHYVAVPPGGSSEPVRSFGSYTAALYEMARWLKECGITSVAMESTGSYWIAPYQVLEASGFEVILVNSRHVKNLPGRKTDVLDCQWLQKLHTHGLLSGSFRPVNKVCVLRSYLRHRENLVHAASAHIQHMQKALTEMNLSLHHVLSDLTGLSAMMIIRAILAGERDPWKLAGMKDRRVKKSQEQIARCLEGDYRDEHLFALTQALELYEFYQAKIAQCDLQIEKQLHTFKAQLDPKKNPLPENPKKKSLKAQSNFELKTHLYAICGTDLTRIDGIDVMSAQSLISEIGLDMSRWKSEKHFTSWLNLCPSNRISGGKPLTRQPRKGHNRAADILRLCAQSAIKSSSAIGAFGRRLKARLDAPTAVKAVAHKLARIVYRMLKYGRQYRDAGERYYEEKYRDHLLRRLQKQAAAFGFQLTPQQPIMDPVS

SEQ ID NO: 200801 - protein, 352 aa, unidentified
MSSNLKKFIGLDVHKEATSIAVLNGVGKLVMESIIETKAATLLEFLRGLRGELHVTLEEGTWAAWLYDVLKPHVEEIVVCNPRRNALLKEGSKSDKVDARKLAELLRAGLLRGVYHGENGLRTLRELARSYLTISKDQGRVMSRLKALYRSWGIPCAGRQVYAPRHREQWLSKIAHAGVRRRAELLYQQLDGLLVLRHTVRGELLAESRKHQAVKVLRQIPLIGPLRAALLLALMQTPHRFRSKRQLWTYSGLAVETHDSAQHRYVDGQLQRSKKPQQIRGLNQNHNHEMKEIFKSTAMSASRCAGPLQDFYEGLLAKGMKPDMARLTFARKIAAITLTLWKKGENVSTLNI

SEQ ID NO: 200802 - protein, 357 aa, unidentified
MTQHLQAIEVTGGVDTHKDSHTAAALDSAGRLLGSARFGATAAGYGQLLDWLRGFGALVLVGVEGTGAYGAGLARHLAAAGVEVVEIDRPDRRARRWQGKSDPVDAEAAARAALAGRRTGVPKGRDGQVEALRSLRVARRGGVAHRAVVIKQMKALLVTAPEPVRAELSALANARLVAVCVEADVPAARAGDPAVAVRLALRSLARRYQHLSTEIKELDKIIDRLVRELAPKLVAGNGVGPDVAGQLLVSAGDNPDRLRSETAFAMLCGVAPLPASSGKTNRHRLNRGGDRQANAALYRVVLCRLRWDPATRAYIERRTAEGKSKKEIIRCLKRYVAREIYTILTAPSTPKDLPMAA

SEQ ID NO: 200803 - protein, 379 aa, unidentified
MSSITLYLGLDVHKDSITIAIAQPGSKGEIRLYGTILNSLQALERALTRIRQAHPGAQLEVAYEAGPCGFVIARRLKQLKVPCLVAAPSLIPKQPGSPFKTDKRDARSIARLLRAGELTGVYVPEPTDEAIRDLCRARTDAVDDQRRCRFRLKAFLLRHGYRYQGRANWAQPHMRYLRELVLPHPAMKTILEEYLQGIDAAHARVQRIEASMLQLLEHWRLKPAVQALMAFRGFQLVASMITVSELGNIHRFEHPRQLMTYLGLVPTESSSGPHQRFGGISRCGNGHQRWLLTECAEHYALPPKISKELSRRQEGQPRAVRELSWKAQNRLHLRFSRLLARRLQRNKAKVAIARELCGFVWALLRTQECYQRPTETSAT

SEQ ID NO: 200804 - protein, 385 aa, unidentified
MGTQSFSPRDYDVFAGLDVDKKSISVTFTDHQGLLKSMRMPYSVEHLVNHVRKHYGEKKVAFAYEAGPTGYGLYDGLKAQQYPCVIASPSMIPKAPGQRVKTNRLDSRGLSENLRGGQLKSIHVPTTLYRELRHLTQLRDVVVSEMVAMKQRIKSLLLMEGLEFPPAPAGSQWSFRVKDKLRKLPCSSVVCFKLNQLLDNLEFNEKQVLNSTREIRRFCQDDPELSQCIGYLKTLPGIGWIVASQLMARIGDWRQIKNIRQLPAFLGLVPTESSTGERTERGSITHSGDPRLRSKLIQASWSAIRQDGELREFFRTVARKHPRHLGPRVAIVAVAHKLCVRAAVVLMKQRPYEMREKIQSAPLTQEETVPQGTTRRQAVPGEKTS

SEQ ID NO: 200805 - protein, 371 aa, unidentified
MWTAPGGIDRARMRSLLLISDKGRPSVDQISRIGMDTSKHVFQLHGVDVAEAPVLRKKLRRKDMVAFFAKLPPTVIAIEACGSSHHCARLLQSFGHSVKLIPPQLVKPYVKRNKNDAADAEALCEAMSRPTMRFVPVKTAEQQAALMLVGVRDRMIRNRTQLSNAVRGHAAEFGLTAAKGMAHLVPLLERIQADESLPALARELFAVQAEEFAQLQARIGEIDARLTTWHKADECSQRLDRIPGVGPIGAVLLRMKTPEPELFQSGRQFAAWIGLTPKDHSTAGKLRLGVITRAGDEGLRSVLVAGATAVIQQAQRGGKASPWLAGLLRRKSPKLAAVALANKTARIAWKMMMTGETYIAKSVPAAVAGTV

SEQ ID NO: 200806 - protein, 323 aa, unidentified
MTTAQLYAGVDVSKDRLDVCLRWSEHERRDGDVFFVTHDDAGIDTLISGLLEEHPVLVILEATGGFERAVVGALAAEGLPVAVVNPRQVRDFARATGQLAKTDTLDARVLARFAEAVRPAPKPLPDEEIRALQEILARRRQLLGMLTAENNRLHSASKPVAKRIAAHVGWLEKELERTNRDLDGAIKGSPTLRENEALLRSVPGVGPVLARTLLAEVPELGTLTHKRLAALVGVAPLNRDSGTLRGRRSVWGGRAEVRAALYMGALVAARRNPAINWEFYERLLAAGKPKKVALVACMRKLLSILNAVLKHRTPWRSPHYIPS

SEQ ID NO: 200807 - protein, 365 aa, unidentified
MEKYVVKARSNHQSRAKPGESVYIGIDQGLNKWVYAIRWGGEQRQSFAGPSEVSHLQALVKRFAPNEVHIAHEACGFGYQISRWAQDCTDQVVRVTVVPPSTIEQKPGLRVKTDRIDARKLARKLEQGELKAVWVPSVEQEQARQISRTQEQMAKERRRAQIQVRSLLKAHGYKAPPATKSWSSYMRWLEQLSLPEALQQCVRLLLGMRDHAANSEQELMRQLRKMSRAESYTKPVQAWTNEVVGVGWLSAIRILLELGDVERFPRRGSLPHYLGITPSEYSTGDDVQRGSVLRCGSARVRSWLIESAWVAVRRDPQLKELFYRIAGPSPSTGQRKVAIVAVAHRLAIKLRALWKEALAQTEVVA

SEQ ID NO: 200808 - protein, 385 aa, unidentified
MQNESTPDARGPVFCGVDTHADSHWLYVLDWRGRKVLSRQFPADAAGYEALAGAIAAAGEPACIAMEGTSSYGAGLTRHLASLGMPVREALSPARMQRRRPGQGKCDEADAERAARAAMSGSRLGTPKSQDGWVDGVRCMLAARSGAVKARTSAINTARSLLTTAPEGLRSRFRGMGGPRLMEELPSVRAEGALGAALGALADLWAAARDAALDMERAIEASLEENCPALLAMYGCGPVSAAKLAVAAGDNPGRLRSEASFAAICGACPIPASSGKTVRDGLNRGGDRQANSALHEIARQRVMRDPETAEYAERARRAAKVSQVRAASILGTSEKYISMLERGQRELKPIRRAYEAWVEAGLPLDWDRQAFEAERKMDSKKHLAK

SEQ ID NO: 200809 - protein, 316 aa, unidentified
MSVPQIFVGIDVAKAQLDIALRPTGERWAVPNEDASIATLVTQLQAVHPVLIVLEATGGFQRAVVAALAAAALPVVVVNPRQARDFAKATGQLAKTDVLDARALAHFAEAVRPTPRPLPDAQTDDLRALLARRRQLVAMRTAEINRLGSAPPRVQGDLQAHIAWLDQRLAALDDDLDTTLRASPVWRERETLYRSVPGIGPVCARTLMLDLPELGTLSRQRIAALVGVAPLNRDSGTWRGHRTIWGGRAQVRATLYMGTLVAVRHNPVLKAFYERLCRAGKVKKVALIACMRKLLTILKAMVKHHKPWHVQEVPSA

SEQ ID NO: 200810 - protein, 350 aa, unidentified
MSVIHYIGFDVHKKSVSYCVKDAAGKIIEEGKLRATCQVLRQWAGDRTEPWHGAMEATLFSGWIYDTLKPFATVLEMGHPAMMKAIGASKKKNDKIDARKTADLVRCNLLPACYVAPVEIRELRRMLRYRNVVVAQAVRMKNKMSGLLMEVGAEYNKQRLHGKKYFTELLGSLEQVPESVKDLLRLSRGALELFETTQKQILDRLQKEPRLVRRLEVLQSIRGVGDVTALSWALEICDPHRFASIADAVSYCGLTSALVSSADKQQRGPVSKQRNAHLQTVLIEAAKLAPRWNPQLAAVHEREANRGNRNRATLAVARKLVAYLLAVDKSGKPFQVQTPPATKTEVPAVA

SEQ ID NO: 200811 - protein, 486 aa, unidentified
MANRKQSTFERLSSGRLNRQQRKELARKLTAEHPGLEIVNRNVAGIDVGNESHYVAVAPDCDPQPVREFGSWTADLERMAEWLKACGVEMVVMQSTGVYWMALYDILEARKFKVCLTNARHTKNLPGRKSDVQESQWLLKLHTYGLLRDSFHPPEEIRALRSLWRLRDRHVKDAGRAVLHMQKTMTVMNVQLSNAISDISGATGQAIIRAILAGERDPWKLAKLRDRRIRATEEEIARSLEGNWRADMLFELKQAVDAYDFIQNQIAECDQRLQTLLAALPQREVKRTEVQAEAPLRESVKRKQKRKKSRADGNAPRFDLQVELKRICGVNLTSIDGIDIMTAQTIVAELGTDFSRWKNESHFTSWLGLTPSRDISGGKIVKQESRKIKSPVAMMLRMAASSLIRSESYLGARYRSLRTRLGAGKAIKAMARYLACLVYRMFTHGQDWVDRGTKEFESKRTQRELSSLQRRAPNFGYTIVPQPASA

SEQ ID NO: 200812 - protein, 408 aa, unidentified
MEVVHPCCCGIDVHQASLAVCVAIKEKVHSEKHKLRCGTTTAELLRLADWLHGYQVTHVAMEATGVYWKPVWHILEGQFELLLANPTQVRALRGRKTDFKDGERIADFLQHGLLQGSFVPPKPIQQLRDLTRSRTTLKQEQVRIGNRIRKVLEDANIKLSSVMSDVMGVSGRAMLRAMVRGESDPETLAQLARKRLRGKIPVLQQAAAGSLNEHHRFLLEQWLTHWDELTERIAKFEQRIEEQIRPFAAAVETWNSLPGIDRITAWTMVAEMGPNMNQFPTVAHAASWAGLCPGQEESAGKRKSGRTRSGNVWLRRALTQAAWGASMTKGSYFKAFYHRLAARKGKKRAIVAVAHALLSTGYMLLWTGRRFSDLGEGYFDRLDKERLTKRLVKRLEKLGHQVSIQPAA

SEQ ID NO: 200813 - protein, 424 aa, unidentified
MVEVKAVGLDIHRDFCEVAFMERGELRSGGRVVTSPEAIEEFAATLGSEDWVALEVSGNAGEIARILERHVARVVVVSPSDTGIRQARAKTDRLDARTLARLLAAGSLEAVWMADERTRVMRRRLQRRSQLVGSRSRSKNEIHAALMRRLIPRPNVSDLFGHAGLRFLRELELPVEERESVDGSLRQIEFLDREISEVDRLIALDALASPEIKRLMSVPGVNVVCAASFLAAIGDIRRFKDPRKLVGYLGLDPRIRQSGPGPGTSGHISKQGSASARWALVEACWSAVRQPGPIRAFYERVRSRRGHQIAIVASARKLVCLFWCLLTREEDYAYQQPSLTKKKLRRLELAAGAPRHKGRSDVWSINEAMRAAERALAEQGELAYKNTVRDWQAAQAKKVGASATTGRASNKPTGGKAARQTTSP

SEQ ID NO: 200814 - protein, 408 aa, unidentified
MTVVGIDVSKGKSMVAAMKPGGELVAAPYEVRHSDIELSHLALDVLCMEPDTRVVMEATGRYHEPVAALLHSEGIFVSILNPLLIKQSGAGSLRKVKSDPKDALKIAKYGLDNWSTLREYTPMEAIRQQLKLCARQCDLYNKNIVMLTNNLISLSDKTFPGVNELFSSPEKADGHLKWVDFYRSFWHCDCINRMSPDAFEERYKKWCKRKGYHFSTDAADALYAASCRPYTTLPRDNNAKLLVTVAADQLIALRENQSKLEAEMLNLCKQLPEYETVMAMYGVGKSTGPHLMAELGDVRRFPHRSSIVAFAGVDPGVVGSGKMQLSSVTTSKRGSPQLRKALFQVVSTYVKCKPENEAVYQFYAKKRDEGKPFFVCTTAAANKFLRIYYARVKECLNAAESATQVEEG

SEQ ID NO: 200815 - protein, 396 aa, unidentified
MEQGGQRVVVGMDPHKRSVTIEVMDAEEKVLGGGRFGTDVAGFRSMLDYVKRWSERVWAIEGCSGIGRHVALRLLSDGQEVVDVPPKLSARVRVFSTGQGRKTDATDAHSVALVGTRMAGLRPVADDQQLTVLRVLVDRRRSLGDDHTRMISQLHQLLLELIPGGAKRDLSAAQAKALLAKVRPRDAAGKARRRVAAELIGDLERVYQRRKVADKELKQLVAATGTTLMDLHGIGPSGAARLLVEVGDITRFPDRDHFASWNGTAPIDASSGDQVRHRLLRGGNRQINRVLHIMATVQLRNQTEGRAYYDRRKADRKTSMEAMRALKRRLSNIVYRTMLDDAIAATVSHPRTGPGGQTGHDSDSSVTGSHPSAGSSDKPLPGPANCQPRTPLPAAS

SEQ ID NO: 200816 - protein, 325 aa, unidentified
MKHIGMDVHSTTTDITVLNSNGKKIFYQKIPTRREELVASIKSIPGKKQVVVEESSLSDWVTRLLEPYATKIIRCQPQYNRLISESEKKCDEEDSYSLAELSYLDKLKGVHHPTQVYRDLREGVRAYWYSSRQVTRAKNRLKAFLLFNGIEKQGKKAYSRRQRSCMLDKINNSSANMKLATIRYWELDAARQSQLEHLRLLRELAKPVQDKVKILKTIPGVGEIGAHTLVAYLEDGWRLPNKRKLWQYCGIGIRRHESSNKGIEGASRQGNRCLKNALMIAVAHILKKMRTPIIFLLFFAHFHGSSINDIERRANHGIATEPICH

SEQ ID NO: 200817 - protein, 429 aa, unidentified
MNCTQNKKIEQVKETTMIVGIDVGSEKHYFRAFNWRGIELTRKPVAFSNSMEGFNSFYNTIVELMQKSELEEALVGIEPTGHYWFDLGQFMCEKDIKFVMVNPHHVHKTKELDDNSPSKNDRKDPRVIAGLVRDGRYFYSYMPTGAYAELRNASNRRFVLVEEQTRAKNRLQKWIAVYFPEYKGIYTDIDAKGGMLVLKKAPTPEEIVRLGVEGIIKIWKDAKLRGNGHKKAMLILAAAMRSIGLKAGLTEARMEIQDLIEDYELQTKRLERVNDLIKGLCQQVRYADKLLEIKGIGITTVAGFIAEVGDITRFDSTKELQKLAGLELVADSSGKHNGKTKISKRGRKRFRYLLFEAAISVVGKNEEFKEIHRYYTTREKNPLKKMQSLIAVACKLIRVFHAILTKGIRYDASKMLKDIRHPGEQLKAA

SEQ ID NO: 200818 - protein, 330 aa, unidentified
MNSICLSTDRIAAALPVLGLDVAKQSVQAELRTNGKPVRFDFANNAKGFAQLERILKGHNAPKVWAGLEATGPYSHALALWLHGRGHRVSLLNPRRVKEYACSAGNRNKTDRRDAAIIADFIRAHEPPAWQPPKQEVAQLQALVRRREELSLMLQGEKNRLEGVAPNVRSSLERIIATLSTEKAHLEKLILRQIHSHQQLSWDHQLLCTIKGIGSLTAAILLAEMARPGQVERARQAAAHAGLAPRREESGSSVRRNRGLGKEGNRYLRKALYMPALVAIKHNAPLQHFASRLRAAGKPKMSIVCAVMRKLIHIAFGILKHQKPFNPSLA

SEQ ID NO: 200819 - protein, 412 aa, unidentified
MDVLYPRCCGIDIHKKSITVCVLIREAGQKEQKQIREFGTTTAAILSCGDWLRDLGVTHVAMESTGVYWRPVWNLLEGQFQLLLANATHVKNVPGRKTDVKDSDWIAQLMQHGLLKPSFVPGTVLRDLRELSRDRTSLVAERSRLKNRIQKILEDANIKLGSVASDILGKSGRAMLTAMVKGRENPDELADLAQGQLRLKIPQLVEALRGRVRAVHRFRLQQQLQRIDFIDEQIAELEAEIEKQNAPMEEAVSLLAEIPGFDRTTAWSVLAEIGVDMNQFPSADDLASWAGVCPGNNKSAGKRLSGKTRKGSRWLRQKLCQSAWCASRCKNSYFTAYFQRIAAHRGKKRAIVAVSHSLLVVCYYMLQRKCHFQDLGVNYFDQLNQEKLTHYFVKRLTRLGHKVTLEPCPAAA

SEQ ID NO: 200820 - protein, 336 aa, unidentified
MSHYCGIDLHSNNHLVVVIDEGDKRVLEKRLDNDLSLTLETLSPFRESLHGIAVESTFNWYWLVDGLQEQGYDLHLVNTAAVKQYDGLKYSGDRHDAFHLAHLMRLGILPTGYIYPKAQRAVRDLLRRRLFLVHSASAQLISVQSQIWRTTGRRIRSADLRKPDFIASGVEGYTLQAVEAGLAVYQAVQREIDALEQSAQQAVRLSNDFKILQTVTGIGKILGLTIMLETGTIERFAGPGNYASYCRCVDSRRDSNGKKKGEGNAKAGNKYLSWAFSEAAHFAVRFEPLAQRFYERKKARTNGIIAIRAVARKLARATWMMLKHQVPYDARLMFPG

SEQ ID NO: 200821 - protein, 337 aa, unidentified
MDYFAGLDISMDETRICVLDREGAVVYEGKSASTAEAIADELAKAPSCRRTVFETGRMAPILFHSLSQLGLPVVCVESRQAYQALKSLATHKTDRNDARGLAHLARTGFFKPVHVKSLSAHAVRSLIIARKKLVGQRVTLENLIRGLAVVFGVRLPRALTTAFIDQALKASEGVAGLSAAMRGLIAARTAVMTAVAAIDADIRRMTGASEACRRLMTIPGVGRLTALAFVAAIDDPSRIRRSRDVGAYLGLVPKRYQSGEVDYVGGISKRGDRRVRTLLYEAANVMLTRTKGQLKLKDWAFAIARRSSMRKARVALARRLAIIMHAMLRDGTEFVAA

SEQ ID NO: 200822 - protein, 368 aa, unidentified
MAPYYVGLDVHSRQSVFVIEDAAGQVVGQGEVPTTPEGLQQLQTQHRLPAGTPVALETGTVAFFVARHLRRLGLEPVVVDAQEVRLKAHRPTQKSDRRDAYELCEGLRRDIYRILVHVPPPAVSALRDTLSRRRHFVRLQTAEINAVKRLLRAAGLGHLSRGLRTEVGWGKLLAAVAPQPDLRAFGEHHRAAWRCAGEQVAALEHALGAQQRAFARDLERLETAPGVGPIVAATTLAVFSEVTRFPSAKHAASYAGLVPSTYQSGTRDAHGRITKRGSAELRAMLCEAAQHARRPTHPLHPYFTKLCAKRGYKMAVIAVAHRLARILFAMLRDGTDFDVHRLGIAVGPFTRTTVDAYRLKRAPRAHRA

SEQ ID NO: 200823 - protein, 344 aa, unidentified
MEHFAGIDVSLEHSSVCVVDGLGKIVREAKVASEPEALVRFFRGLETGVTRIGLEAGPLSQWLHAGLVAAGFEVVLLETRHVKAALSAMVIKTDRKDARGIAQLLRMGWFRPVHAKSPRSQEVRALLVARKLLQTKLLDVEFSIRGILRGFGLKMGEVSKGRFAARVRELAAGHAMLERITEPMLRAREALRTEYARLHGEMLAIVKPDPVCRRLMTVPGVGALVAITFKSAVDDPGRFTRSRVVGAHFGLTPRKYQSGETDVTGAISRVGDGMVRMALYEAAHIMLGRVTRFSSLKRWALDVAKRRGLKRAKVALARKLATVLHRMWVDGTTFHWGKQAVAVV

SEQ ID NO: 200824 - protein, 393 aa, unidentified
MQNCLAIDVAKGKSMVTLVSSSGEVLIDPYEVNHSINDFSNLLNRINNFKLDNVSVIMESTGVYHRPIERFFLENNYKVFVINPIYGKMKKRNLRKTKTDKEDCFNLVNLFMSNTFKEYIKPNQIYLDLNALSRQYFALDELCVNIKNRYKNLLYLCFPEYEEIFKNSLIYSSIALEFIESYPHADIISNTRIDKLQNFFKKHEFRYWKAKAILIKNIASNSYPSVNMNDEIVSNLSQLASLVNEYQKTIDIIKYKITFLAKNSKYFKPINSIYGIGEFTTSIIIAELGDINRFNNIKELTAYCGLDPSIKQSGKSINVNGPISKSGNKYMRKILYVACFNIIRLTAISKQENDIEKYYRKKRNEGKHHYAAIVACTTKLLRKILALCKQLDN

SEQ ID NO: 200825 - protein, 423 aa, unidentified
MSSYAMIVALDRADAKVDVCERRGDACAFETVATRPEVLRAWWRGMRQAQPAGVIAVVFEQPAENLVAFFAGEENVVVYALNPAVVARYRETFVTSRAKDDPLDCALMADLIAHHAERFTPLVAGSPELRRLGELVQARRALVNQRVDLTNQLQAVLKKTYPQALELAGEDLWRPLATAFLRRWPTFTLLAAARPDTLRRFYHAQGSRSEARIEQRLAIAAAAAPLTTDQSLIQPAGLLVTSLVKMIETVVAAIARFDHEIAAVFPHCPDAALFAALPGAGPAFAPRLLCAFGEDRDRFATAGQIQRYSGIAPITRQSGRTRLVQRRRRCPKFLRQSFHEFAASSIVYSRWANAFYRAQRARGKPHQTAVRALAYKWQRVLFTCWQTRTPYDESHHCRDLLHHGSPHHPDLAVETPKKSHSRA

SEQ ID NO: 200826 - protein, 408 aa, unidentified
MNPLFVGIDVSSKNNVAYLMKPDGSKHSSFSVQNNLGGAKLLSEKIVSALHSMQLNDVVIGLEATSIYGDSLVYALREDGSLGRFQRKIHVLNPKQVRKFKEAYPDLPKNDWVDAFVIADHLRFGRIAKEVYMDDYRYQALRTLTRARFDIIQNLTREKQRFANYLFLKCSGIAQDKDIQNTSATTIALMEHFETVDDLANADLDELTAFISEAGRGRFVNPDATAKAVQAAARGSYRLPKTVNDTVNQAMSVSIASMRALKEQVKVLDKAIEQQFEIIPNTLTSIPGIGKVYSAGIIAEIGDIHRFNSQASVAKFAGLVWHRNQSGDFEAEHSQMIKSGNRYLRYYLLEAANSVRRCDSEFRRYYDLKLKEVNKYQHKRALALTARKLVRLVFRLLKDNRLYIPPVG

SEQ ID NO: 200827 - protein, 429 aa, unidentified
MHYVGLDVHKENAFATLVDEGGTVVSRCKIDCTREALASFVTGRLSPEDRVVLEATTNTWAIVDILEPHVAEVLVSNPMQTKAIANAKLKTDKVDSEILAQLYRSDFLPTVWQPDPETRKKRSLMARRTTLVHDRTRIKNRIHAVLHQRLIVAPEGDLFAGAGRAFLEVAQLDDLGRHIIDSELRLLELVDEEIAKVEAMIAKEAWQEPAIRLLMTLPGVDMAVATTLFAAIGDIERFATADKLASYLGLVPSVKQSAKPIYRHGSITKQGNSDARFMMTQAAQHLWQNSGPLGHFFRKTKKKRGHNVAVVAAARKMVTIAWHMLKNNEPYRYATPRSTDDKLSKLRVRATGERPKRGPRKGEPRPANYGTGKSTRTIPSIDTIYEREGLPALGELAPGERRMIEETGSAEFVDGLHATHVVPRKKGGG

SEQ ID NO: 200828 - protein, 355 aa, unidentified
MDSAKYIGLDVHKESISIAVLNAAGKIVMECVIETNATLILQFFRGLRGELHVTFEEGTSAAWLYDLIQPHVTEVVVCNPRQNALLKVGNKSDRIDARKLADLLRGNQLKSVYHGEHGVRTLKELVRSYLTISKDTARVMTRVKALYRSWAIPCTGKQVYAPGHRAEWLAKITVPGVHRRAEFYFQQLDALRSLRQQVRRELLSESQKHPAWKLLCQIPSMGPIRAAVLIGIVQTPHRFRTKRQLWTFSGFGIETHSSADYRSVEGRLRRTNRPVSVRGLNTNHNHDLKSLFKAAAIVAAHKPGPFQEFYTALLAKGIRPEMARLTLARKIAAITLHVWKKEVRFDAQYLNPQAA

SEQ ID NO: 200829 - protein, 404 aa, unidentified
MTTKLFAGIDIGLNEATVCCIDSEGKQLSPTRTVGNNLDGAREILAIIADLAADETHIGLEATSVYGSHLRDFLLNSSNSRNWFVYEINPSLVAGFKKSFPRRDITDSTDARMIAERVRLGYLRPYTKGDMLRQPLLQLTRHRLHLVKMIGQEKNRALNMIFLKFSNYKRDNPFSTVFGKASLAVLNQLSPDEIVNMDIQELLSFINRHSRNMLPDPEKAALTLKTIAQKAYRLHPKMSNSVNATLIMTLENINFLEKQLAKLDKLIASELKAIPQTLDTVTGIGPVYAAGIIAEIGDISRFPNEAALAQYAGLTWPRCQSGEFEAEERRLTKEGNRYLRYYLVEAANSLRVFNEEYKAYYQKKYAEVTKHRHKRALVLTARKFVRLVFALLSKGQIYRKEMMV

SEQ ID NO: 200830 - protein, 343 aa, unidentified
MQIAVLGIDLGKNSCSLAGLDNTGRVVMRRRIRRESVIKFAASLPPCIVAMEACCGAHHLGRILRSQGHEVRLMSPEYVRPYVKAQKNDDRDAEAIAEAATRPTMRFVELKSEEQLDMQTLHRARDRLVGERTALINQLRAVLLERGIVVPQGRRKLEQHLAAMLDEGEDVPLSPRVRALVVDMRAEWRELDRRIGAFDDEFAARARSDEAARRLATIPGIGVLNATALVAAIGTGEAFRRGRDLAAWLGLVPRQASTGGRAKLLGISKRGNKYLRKLLIHGARSVLRPLSRSATPLGAWLRGLLARAHVNTAVVALANKLARIAWAVLSRTRTFNAGAVMVA

SEQ ID NO: 200831 - protein, 343 aa, unidentified
MQPVTTIGLDIAKSVFQVHGVDAQGDVVARRQLRRRQVVPFFKKLSPCLVGIEACATSHHWSRQLKALGHTVRLMPPAYVKPYLKRQKNDAADAEAICEAVMRPSMRFVETKTLEQQSCLMLHRTRHLFIRQQTAVINAIRAHLAEFGIVAPVGRNGVEELLDVVADPDDDRLPEVARECLAALGAQLRMLKAQILEFDRRILAWHRSNETSRRLDEIPGVGPALATALVASVADPRAFRSGRDFSAWVGLVPKQNSSGGREKLGNITKRGDRYLRSLFTAGALAVIRYAKIHGCKHRPWLTALLARRPTKVAAIALANKIARMAWAMMAKGERYREPVALAA

SEQ ID NO: 200832 - protein, 340 aa, unidentified
MKLYGAIDLHSTNNVTVVIDEQDRVVYQKRLPNDLALVLKELSVYQSELEGMVVESTYNWYWLVDGLMEQGYKVHLANTAAIQQYNGLKYTDDNSDARWLAHLLRLGVLPVGYIYPRADRPVRDLLRKRSQLVRQRTTNLLSIQNLMTRNTGNSLNANRVKGLDVQQVDELLPNPDLALAVKANLSVLCSADEQTKILERTVIERVQLRPQFCFLKTVPGIGKILSLTIMLETGDIRRFASVGNYASYCRCVGSQKISNSKKKGKGNTKNGNKYLCWAFVEAANFAIRYNSRIKSFYQRKKAKTKGVVAIKAVAHKLCRASYYIMRDRVPFNITKAFGQK

SEQ ID NO: 200833 - protein, 364 aa, unidentified
MKTYYIGADVHSNSTELAIEHKGSIVSRYSVPTTIPAIRNVLSSIDGEKHLTMEEGPMAGWLYRNLNDAVDELIICDPRRNKLISSDGDADDRIDAGKLASLLRGGFLRAVYHNDDMNRVTLKEWVCLYYDRVRDAVRMINKIRARCRMNGISIPRAVIREPSKRKLWLSEIHNSALAAQLNMLWLNYDSVVKQVKISKRQLAILSRQHDIIKLWSELPGIGTIRAITLFAFLDTPCRFKKKNKLWKYCGVGLERSASGTDKKGKPKPAFLQLAWHVNKVLKYVVLGAALSAINQNKNVFSCYYERMLHEGIMPSNARHAVARKMLTVMWGMWKQNSRFRENMVMPVSKSSAVSPARGKWTTLS

SEQ ID NO: 200834 - protein, 399 aa, unidentified
MAYPTSLELRVGIDVGSRCHSVAIGLSDGRLLEEFEISHTAAGFDDFFKRVEASAQRHAVPIAIAMEGYNGHVRPLDSLVRAKGWPLFNVNNLKLARFKEIFPAAAKNDRIDTKKTLELFQLRDHLPMAGDVLQETAPIPEENNVLKRLSRRQRRLVDERTRLGNALGADLQAVCPGLLAITREVNNYWFLNFLTCRKGLPKLARLRRASLLKIPGIGQKYADLIQAWQKKAFFSHDVDLVGDMIQQDAERMLELHQQIKALKQQMARVANDSAIARQLDTIPGFGLICTAELAGEIGTIERFRKEASLAVYLGMATLDHSSGKSRRSKRPKHVNVRAKAAMMTAIDAHRKLCPQSKRYYEKRRAEGKRHNQAIRALGRHLCPVIFKMLKEDRPYWIET

SEQ ID NO: 200835 - protein, 349 aa, unidentified
MKLIGCDFHPSWQQVCWVDIETGETQEAKLVHAAGEAEKFYRKFSAPARIGMEATGNCQWFVEMLAGLGHEVWIGDAAKIRASEVRQQKHDRRDVALLLRLLMEGRFPRIWTPSSEQKDMRQLLIHRYKLVRLRAQVKNGLQHLAMNRGLQKKNRLWSKAGQQALRELSLQPWASRRREDLFSVLAMLDRHIESLDMAVKQASEQNQNARLLMTQPGVGPVTSMAFVLTLGDVSRFPRGKQVASYLGLIPREYSSGGQQRLGSISKQGNRFMRMLLVEAAQVAVRCDPELRREYLQRCHHDKPKGVAKVAAARKLAVRLYWMLRTQKPYPEIVHVESSSRVALDVRHGG

SEQ ID NO: 200836 - protein, 385 aa, unidentified
MRPCGEVVALPFEVHHTSYELTKLSKQIRSLEGETRIVMEATGNYHLPIAQWLSDDNFYVSVVNPILIHNYENNSLRKVKTDKKDAIKIANYGLDRWDKLRQFIPTDEIRALLKCCCRQLQQTSKVQTMLKNNLISLLDNVFPGVNELFCSPVRKDGSEKWVDFVAKFWHCECVCGLSPKAFSERYRKWCNKCGYHYSEDKAEDIYVSACGHVCVMPKTDSTKRIVLGAVSQLQSVTTSVAKLKAEMTFLAEQLPEYGIVMQMFGVGSSLGPQLMAEIGDVRRFASKKSLVAFAGIDSPPCDSGKIYGNHRSITKRGSASLRRTLFILMTVYLQRSPVNEPVYQFMDKKRSEGKPYRVYMMASANKFLRIYYATVKKYLDSLEES

SEQ ID NO: 200837 - protein, 352 aa, unidentified
MLIIGCDYHPSMQQIAYVDTETGEGGERRLMHRDGEAERFYRELKQRPIEVRVGMEATGYARWFERLLTELGFELWIGDPARIRARRVRKQKTDRKDAQLLLRLLLEGDGFPRIWVPSPENRDLRQLLWHRHRLVQMRTRIMNQLQAVAMNEGLRRKRALWSESGRKQLESFLLAPWATRRRQDLLELLDRLNPTIQELTAAVEKEAENKPEVQLLMSHPGVGPLTALAFVLIIATPERFQCGKQMGSYLGLIPCEDSSADQQRLGHISKQGSSLLRFLLVEAAQVAVRVNPEWRRRFLHLAMRRGRKIAKVAMARRLAVGLYWTWRKEWNYQQVVKFGSHVGQLELRHGVQ

SEQ ID NO: 200838 - protein, 364 aa, unidentified
MVMIGTDSHKRTHTAVALDEVGRRLADKTVPATSDGHFALVSWARQWPQVSFAAEDCRNMTRRLERDLLAAGHRLVRVPTRLMAQARAQGRQPGKSDPIDAEAVALAALRHHHRLPVAELDGPTRQVKLLVDHRRDLVGERTRVVNRLRWHLHELDPALQVPARGLRSYCVIDRLGEHLATVTGLVARLARELLHRCQELTMQINTLQRELRDLVKRLAPAVLAIPGCGVLSAAMILGETAGVHRFRSRDAYARFTGTAPIPAWSGNTAGKVRPNRGGNRTLNSALHMIAITQSRGVGPGAIYLDKLTASGKTRTEAIRLLRRRISDAVYTALRTDQRNHLPDNAAQPSTRPDTTLAEPTHPAA

SEQ ID NO: 200839 - protein, 414 aa, unidentified
MEVLYPRCAGLDVHKDTVVACVRLVEDGTVHREVRTFSTTTPGLLALSVWLGEQGCTHVAMEATGVYWKPVWHVLSDGDFSLILANAAHVKNVPGRKTDVNDAEWLAELLAHGLIRSSFVPPAPIQDLRALLRTRKQLVREQSSHIQRIQKTLESANIKLASVLTDILGVSGRAILEAMIAGEADPDQLLGLVQRGVKAPREQLRAALTGRITQRHRFLLQLHLQQIDTLQCAITAIDQEVDRDIAPFRAAVRLLRSIPGISDLSAEVIVSEIGIDMSRFPTAGHLLSWAGLCPGQNESAGKRRSTRMRKGAPWLKTSMVQCAWAAVRKKASYPQAQFQRLRQRRGPKKAICAVAASLLTAAYHMLRDGTVYQDLGADHFRKSTPEAHAKRLARQIAKLGFTCQIAPLEELVSI

SEQ ID NO: 200840 - protein, 392 aa, unidentified
MEVGIDAHKRSCTVCVVEEGTVTDSFSFPTTREGVNEFMEKIHGKATVIVEASTTGKVLSRMLLEKYEVHMVAPPERKRSIKTDRRDAERIVREDRLQYLRRCYIPSPYIEMLRFLVMQQIQVGRKIGRVKNQVHALLERNMIHDLDRFSDIFGVQGLRSLVEIKLPSLDRTALARYLEELKLLAAHHRQLETELAKIAESDADALLLMSIPGIDFFTALAVKSRIGKIGRFPTKKHLCSYGAVVPGASNSGEYISTHNHVKHGDMVLKYALTCAVRGAVSARKNTAVKRFYLKHCKRMGNQKAEVAAARKMACVVWKVLTTHQPYREEDERLTAKKKRILAWKAKRQEKNISSDIRQLTETLMGETAILEKYPANFNQQFVNSLPKESDWA

SEQ ID NO: 200841 - protein, 331 aa, unidentified
MRKPTAYVGIDTHKSFSYVTAIDSKGKVIKQGKLRNFKFEEFFKELSKYKVKIAIESTEMIMPLIRALENYGEIKVAHPGKLRLIAESKIKTDKIDSLVIAQLLRTNFMPESYIPSKEIRELRELCREHYSLKVMSTKIKNQIRHHLLAQGIITNENIFTKERRLWLRRISRVANRKLDILEFLENKIKEVDREIKEKTRSIEVVRLLTSIPGIGWYSASLVYAEISNIERFSSFCKLNAYFGLNPSVHQSGKRKYYGSITKRGNRMVRWVLIQCAYVAIKYDRKLREFYLRKKAEKGNNKAIVAVARKLLKRIYAVWKRRGAYEREPNLI

SEQ ID NO: 200842 - protein, 372 aa, unidentified
MVWTAPNGIAMCQNEVVADLIQRRPPVDQIIRIGMDTSKHVFQLHGVDAAEQPVLRKRLRRGQVEMFFARLTPTVVGLEACGGAHHWARVLRGLGHEVKLLPPQYVKPYVKRGKNDAADAAAICEAMSRPSMRFVPVKTPEAQAAQMLVGLRDRLIRRRTQLTNAIRGHAAEFGVIEAKGLNRIVPLLARLAAEEPLPALARELFASLAEEEAQLATQLEAIEARLLAWHRGNETSRRLAKVPGIGPIGAAMLTMKAPDPAAFRSGRQFAAWLGLTPKDHSTAGKTRLGVITRAGDEALRSVLVAGAMAVIQQTRRGRASHSPWLIALLKRKEPKEAAVALANKTARIAWKLMVTGEAYDPHRLQAVRAAAA

SEQ ID NO: 200843 - protein, 369 aa, unidentified
MDKYIWVGLDVHPESITAAILEDGSNEAEVLKMSGDLMKVRRLMRRLSEKGTVRACYEASGAGYVLHRVLKRDGFHCDIIAPSLIPRKLGDRRKTDRLDAVMLAKLYRSGHLTAVHVPTETHEALRRLIRLRYSYQEQCKSTKRRISGILLAHGLVYREGKSYWTKKHKQWLGTLRQELEGPIQEALAMELEHLEYIQMQRNALDADIERYAQQQPFRGYVEVLCCLRGLKTLTAMTLLSEVDDINRFRSPRSLMAYFGLIPSERSSGDRERRGPITKAGNKHARRVLIEAAWNNRHNAGADLILNRRRQGQPPEVVAIALKAQHRLSRRFYHLSHKKHLHVAITAVARELCGFVRAIMKAAPCRQNAA

SEQ ID NO: 200844 - protein, 401 aa, unidentified
MEAIVQRSAGLDVHKKIIVVTILLEQPNGSVQEETREYGTMYKACAELANWLLSHDIQLSVMESTGIYWKNIYAALEKAGLRVSVVNARHVKQVPGRKTDVKDSQWLARLARYGLVRGSFIPPKDLRELRMIARYRTKLVGTLAGEKNRLHKTLDDAGVRLGNVVSDIGGVTATEIITGLIEGKSMGELLACTRGALKKKKDELQAELEGELSARHLFLLQELQEHITQLRAKINKLDDYIFEAMQPYQKQWEILQTIPGIDAVGAALLIIEIGVDMQQFGSREQFCSWAGMCPGNNESAGKKKSGKTPKGSKQLRYILCEAANAASKTDCQFQHKYKSLMIRRGHKKAIVAVGHKMLRVIFSRLKTGETYQDPTVSYEELVVKKNAPRWIKMLTKYDYAM

SEQ ID NO: 200845 - protein, 396 aa, unidentified
MAKKATTVKTATGKKLQVVNPNAAGIDIAASEMQVCVPDDRDSDCNRCFGCFTQDLKSIVQWLKKCRIETVAMESTGIYWLPLYFILEENGFDVILVNARDVKNLSGRKTDEADAEWLMLLHSYGLLKCSFQPENEARAIRNLNRHRSNLLQSSSREALHMQKAMEQMNLKLGNVISDLLGKSGMAIIEAIINGNHNSTEPAMLAEENCKATKEIIAQSLEGTWAEDQLFELKQAYDLYRFIQGQIRQCDRQIEMHLTRYRAYLESSSDVGFTRCKKRIGKKNAPDFDVERYAFDIWKVNIMAIPGMSAISLLQLMGELGHDFVGKFENCHMFCSWLNLVPNNKISGGKLLSSKIPKRTNACGQIFRLCANSLKRNKTTLGYYFRRIQSSHSCHSA

SEQ ID NO: 200846 - protein, 419 aa, unidentified
MSKSNIARQLAQVQPGTLHAGVDLALENNVVVVINEKAERLDHFSFPQDRGGYDYFLRRLEGLRQKYQASEVVVAMEPSNYFWKLLAKELEEKKITYHLVNSYTVKKHREGDQLDRSKDDRRDAGQIAELSRNGKYTGTHLQKGAYEDLRVYATLYDQSVQAIRREKQVLWGLVGQVFPELSQVFKNLVGETGQALLMTYASATIIRQLTVEDFIAQVRAAYSGKRLFVSKLHRVHQLAVTSIGLTEGLGAFQLAIQVHLAELQTFQKQLKRVTTAMTTCLATLPEAPYLLSVKSLQAVSAAIFLAEVGDPKRYQSAAQWVKLAGIQPAPNTSGKKQRSQTPMSRQGRARLRTMLYFTCLRMVRFDENFAQIYAHLQRRQNNPLTKMQALGVLMNKLLHILWALIHNQTFYNPSFGQSI

SEQ ID NO: 200847 - protein, 429 aa, unidentified
METVSDRETIFARCAFLDVHKKTVEATVRLLQGQQVQAETRRWGTMTGQIQALAEWLETQGVTHVGMESTGVFWKPIYNILETRFTVVLTNPGHMKQVPGRKSDVRDSQWGAYLLQYGLLRGGFIPARWQRELRDFTRYRAQLEAERTRVANRLHKHLEDANIKLGSVATDILGMSGRAMIKALMEGEQDAAQLADMAQGKLRTKLPELQLALEGKVTPHHRLMLRLLWKELEAVEELMAEVDRQVQEVTRPYTPQIEQMDPVPGVDRRVAEVVLAEVGPNVDPFPSDQHLSSWAGMCPGNEESAGKRRTGRTTKGNRWLRAALVQAAWAASHTKRSYLGAQYRRLAGRRGKKRALVAVGHSILVILYHLLKDGRPYSDLGRDFFDRMNHDRLIRYYSRRLAELGQKVTVEPLPEVTPGEGMVNVPSPC

SEQ ID NO: 200848 - protein, 345 aa, unidentified
MYRSKVGVDLAKEVIQVCTYTNKKVQLNIEMTPNEFLCWLINSKPATIIFEACGTSNYWKQKAIEAGHDARLISAKLVAVVRQNQKTDKNDALAIIQAALLPDVTFIGGKTVEQQQLQTIKRLRELAVKHQGAAQKQLVSLLLEMNIRISNRKGGIISAIEDVLEDATNDLSVECRQAIYTAKEHLRSLIKAVHQYDDCLEKSASVHPDCKKLLKLEGVGTMNAINLYLSLGCFELGVFNKGKDASACIGLTPIQHSSGGVVKLGSIGKHCKNSILRSQLICGAMAAVNQAIKREAKTKKDVWLKGLVERRGKKCAAVALANKTVRTAFAMLTQGTEYKVELLAA

SEQ ID NO: 200849 - protein, 375 aa, unidentified
MAEITRALIARVGVDLAKNVIQVHAVDGAGRRVMARAFKREQFLAWCAQLPAGCLVAMEACGGAHHFGRKLRAMGLDARLIAASFVSPYRMEGKGGKNDMTDAAAICEAASRPTMRFVPIKSCEQQGVMSLHRVREGLKEERTACVNRIRGVLAEFGLVFGKSPKALRAVLGEVIEDADNELSTTARLVIQRAFEHWRELDEHMRWCDRQVGQHVRSSPAARRAAKIDGIGELGASALTASVGDFNQFRSGDQFGAWVGLVPRQNSSGGKASLGRITKRGDDYLRTLLIQGAKSAVMSAGKRDDPISRWLVQLTARVGWQKACVAMANKNARILWSVMTREQGYDPHHVSVKPLAKLPVQRGGGQAMPTEQSCAA

SEQ ID NO: 200850 - protein, 335 aa, unidentified
MQVYGIDLSMEKFDVNFTDSKGKEKKKQVKNRLSAISKFLEEVSEDAVICVEHTGSYGDLLVYLCNQLGISIALVPGYTIKHSLGMVKGKSDDIDAARIREYGERFFDKLEYKQYDTEEIVELKGLYTLRSQLVKARKILRTGEHGRSNVPIQSINVHKHVEKAINNLDNEISEVEEEIESIIKTNTELNENYELVVSIKGIGPVIATDLIIKTGNFLVIDTARKASSYAGICPFPNASGKMVGKAKISPFGDRKLKALLYMGAKSAVKHNKEYRLYYEKKKLEGKPHYLIMNNVSNKMLRTVYSVVTNKTPYRQDYICLDPREKNINSSTEKVA

SEQ ID NO: 200851 - protein, 342 aa, unidentified
MDYFAGLDVSVKETSICIVDDTGRIVREAKVASEPEALLQVLGNPIYRFKRIGLEAGPLSQWLFSALAEAELPVVCVETRHMQAVLKAQINKTDRNDARGIAQMMRVGLYRPVHVKTLRSQKLRMLLTHRKLLQSKAIAIENDLRGTLRNFGLKVGMVGKMRFEARIQELVENFPDLAGLVEPLLIVRRALREQIVILHRRLLAIVRDDEVCRRLMTTPGVGPVVALTYRATVDVPARFRKSKAVGAVFGLTCSKYQSGEIDWSGRISRCGDEMMRVMLYEAAQSMLRSKRWSWLKAWAMQIARRRGMKKAIVALARRLAVILHRIWVDGTEFRWTRETVAA

SEQ ID NO: 200852 - protein, 342 aa, unidentified
MDEYVGLDVSKEETSFCVMDAGGKVLAQGKALSDPGSLFEALREHSLCPERIVLETGTLSGWLARGLRDRGLTVEVIDARQAHAVMKLQHNKTDKNDAHLLADLARTGFYRSVSVGSEAFQLQRILVKARRHLVCHRRDTENVIRGFLCALGLRFPRGSGKLAARVRDALDARPDLKPMIEPLLASVEALKTQIKRLDGEVMAEAKVSPASRLLMTVPGVGPVTAMAYAATIGDATRFARSRDVGAYVGLTSRRYQSGEMDYSGRISKYGDALLRSLLYEAANSLLTIVRRSHPLKDWARRIRKRSSHKKACVALARKLAVIMHRMLITGEAFRWPQKEEPA

SEQ ID NO: 200853 - protein, 261 aa, unidentified
MTVVTVGIDLAKNVFAVHGVNAAGKAVLVKPLVRRAKLLELIATLPACLIGIEACTGAHFWAREFQKMGHTVRIMAPQLVSPYRMGGRHGKNDAADAAAICEAVTRPNMRFVPIKSVEQQGQLFVHRAHQGYVSERTALINRIRGLLSELGIVLPQAFKAFLSGVAQVLEDLPGYCNQVIGDLLNELYHIEEKIKNSEKLIQQLARDNSAAQLLMQFRGIGPMTATAIVASIGNGHDFKNGRQFSAWLGLTPRQVPGGKHG

SEQ ID NO: 200854 - protein, 362 aa, unidentified
MAQPKSVVGLDVHATQTHTCVLSPETGELRAKRLNGPPRRVLDYLEGLPEPVLAVYEAGPTGYGLARGGAERELDVRVCAPGSIPKAPSDRIKTDRRDAERLARLCLAGELSFVRVPTPEEERFRDLARAREAIRADLMRARHRLGKFLLRRELRWEGPGSSWTQAHWQWLRRIEFADGASAAVLEDYQAAVVALEQRRSASERAIEELWPESPWAQTIERLRCLRGISTLTALGLCAEAGDLRRFDRPAALVAYFGIVPSEHSSGSQRRRGPITKAGSAHARRLLVEASYHYRHQPAVGGALERRQRGVDPRACEIGWHAQRRLHHQWQRLRVGRGKPANVVRIALARELGCFVWEVGQLS

SEQ ID NO: 200855 - protein, 348 aa, unidentified
MRFYTQQHAFYCGIDLHARSMYLCILSQDGEIVLQRNIRSAPEPFLKAIAPYRDHVVVGVECVFCWYWLADLCAAENIPFVLGHALYMKAIHGGKAKNDKIDAYKIAGLLRGGMFPLAYVYPAAMRATRDLLRRRMYLMRQRADLLAHVQNTNSQYNLPEIGKKIAYKKNRPGVAERFPDPAVQQSVAVDLALIDYLDKTLNALELSIVRTAKQHDAQAFYRLRSVPGIGKILALVILYEIHDIHRFPRVQDFVSYARLVKCAKESAGKRYGYTGKKIGNAFLKWAFSEAAVLFLRGNPDAQRYLSRLQRKHGKAKALTILAHRLGRAVYHLLRRREAFDQARFLAIA

SEQ ID NO: 200856 - protein, 388 aa, unidentified
MQQVANRPEQAAIRIDLGAIFVSMELSRSSWLITSLSPGGGEKMSKHSLRGGDVAGLLELFATLQEKAQTRTGERFRIIVIQEAGLDGFWIHRVLQGEAIESHVVDAASILVSRRRRRAKTDKIDAETLVRTLLAYKRGEPRVCSMVRPPTPEEEDHRRICRERKTLIAERVEHVNRIKGLLFTQGVGDYEPLRRNRRTRLEDLQTGDGRALPFHLKAQVVRELDRLELILEQLQKVEAARDDLLLDRAKENDPAPVVRLLQLKGVGAEFANVLWSEGLYRHFDNRRQLAAYAGLAPTPWQSGSVDHEQGVSKAGNPRLRGTMVQMAWLWLRHQPDSALSQWFKQRVERNGGRLRKPLIVALARKLLVALWQYATAGVVMEGATIKPA

SEQ ID NO: 200857 - protein, 315 aa, unidentified
MEAMIERCAGLDVHQETVVACVLFGPLDKKPKTSIETFSTTTTGLLALSDWLATLQVSDVVMESTGVYWKPIWNILEGSFHLVLANARHVKNVPGRKTDVKDAEWLAKLLRCGLIESNFVPPEDIRDLRDLTRYRKKLIHHRTSEQNRIHKILQDANIKLTSVLSDIFGVSGRRILEAILNGEKIETDGLRKMVDWRTKASITDIANAINGRIRRHHRDMLRYHWEHMGYLEQTIGELEKQIDQLLSPYRKEVELLDGIPGVNKAAAATFIAEMGVNMSVFKSAKHLASWAGVSPGNYESAGKKKQVKPHKETKH

SEQ ID NO: 200858 - protein, 392 aa, unidentified
MVIVGIDVASQKHDYFMMKPETGEVSSKSSVSITNSDKGYKKLHEDISAFCGDVDDYDVRIGLESTGIYHTNIIMFLLSQKYQVMMINPILTNMARKSDKVHCPKNDNLDAQTICKYLIEHPDDFSPYTTSSYHNEALKSLSRKRFLIVDDLRKAKLTVNNLVQIIFPEFKSLFSNIYGSTAIAILKQYQTPQKIAKARKSSLERLINKKCSCTAEKLIESAKSSVGMSNGYLAFQLIDAIEEMEHIQQRVNKFDEQIKSYVDELCPELLSIPGVGYVTAGLIMGEIKDIERFNTVDGLIAYSGIDIETYESGKYKAKKLRPTKKGSKYLRYALFQVARIAWQCDPIFSAYYHKKIAEGKHYYVALAHLQKKILRVVYSILKNRTTYEVKIA

SEQ ID NO: 200859 - protein, 328 aa, unidentified
MCEFTGIDVSKEKFDVGWLRDVKTDKKKTKVFKNTVAGHQQAVDWLLKNLKAQAEDIVVTLEPTGVYHEALLYFLHDCGFQMLLVNPGKAKKYAESMNQLHKTDKLDAITLAYYGHAQHHKLTLWQPESPEIRELKAMIRRLDALEKDLQREQNRQEAARVSLSSDRVAQSLKDMIETLKAEIQRLQQDIDNHIDRFPELKRNRQLLESIKGIGTVMSRELVYLFASKRFKSAKQAAAYIGLIPRLRESGKLKGRTTLSKIGSARLRAKLYMAAVCASTHNPDIRAQKARLLKTGKVKMQALGAAMRKLIQICFGVIKHQCEYQPQLV

SEQ ID NO: 200860 - protein, 404 aa, unidentified
MLYVGIDIAKEKHEACVIDQEGNTLLKSFTFPNSAAGANALLARVSKLNAQSDSVTIGMEATGHYWLALYTHLKDNEQTVFVINPVQSDALRNLYIRQTKTDTVDAFIIAEVLRFGRFTQTQLAEPDMLALRNLCRYRMSLIDMISDIKRKVMAVMEQIFPEYESLFSKVFGKASSELLSTCTTPDEMMRLSTDNLAKLLNQASKNRLGTKRATTKAQQIQQAAANSFGIKIAADVMAFQVRQELEQIKLMESHIDQLDQQIALLYRRFDCTLDSMPGLGPVLAAVVLSEIGDISRFSAPEKLVAFAGIDPSVRQSGNFTGNQNRMSKRGSPFLRRAIWLAAFVAAFSDPVFSAFYQKKRAEGKDHMTAIGAVSRKYLYTVFSLLNSGQLYVPHPPHVNSSSGA

SEQ ID NO: 200861 - protein, 337 aa, unidentified
MNYKHFIGIDVSKSWLDFTVMLGSQILCHEQIENTEKSISDYFKTICKNKNFQLKETLICIEHTGIYNNHLLVYLSKKRANLCLESGLQIKQSSGLKRGKNDKVDSTRIAQYAYKNSMEVKLWQPKREVVYGLKQLTTLRNRIVNVIKQIKTPLKESVEFLSKTEQKRIFSLNKNSLLALENDLKKINKEIATMIDSDPELNRLFNLITSVTGVGSITATEVIITTNEFKTIDCPKKYACYSGVAPFEHQSGSSIRGKTRVSSMGNKTIKKLLHMAALSACKCPGDLKRYFDRKVLEGKNKMLIINAIRNKIIARIFACVKQNKFYVKNYENHLFYP

SEQ ID NO: 200862 - protein, 442 aa, unidentified
MATKLVNPNAAGIDVASNEHVVAVPEDKSKDSVRTFKGFTRDLHQLAKWLLSCKVETIAMESTGVYWFDLYTILLDYGFEVYLVNAHHVKNVPGRKSDVSDARWLQQLHTFGLLRASFQPDNLTRSLRNHVRQRKNIVQQMSRQTQHMQKAFDQMNIKLNNVIRDLNGATGTKIITAILEGERDPKKLAQHRDRRIKASEQTLIKSLEGNWREEQVFNLQLAYDHYIFLQQQLKQCDAESEKIIQKMTSGNSPKSRTKKIQKSKNNPDFDVAQYLHAALGVDVTQIYGIKEVTALTIFSETGANLKEKFPTEKQFLSWVNVVPNNKITGGKVISSKVKKKKNVAGQAFRDGASALWRAKNPIGDYLRRKKAKSGAKKAVVATARKIAAIYYKMVTEKVEFNPLELTKGKEQYLQKRLKQLEMAKEQTQMQLSDFQQQNSLVI

SEQ ID NO: 200863 - protein, 429 aa, unidentified
MTATHSTVSTVLVAIDISKHRHEVLIGIPGKKRRRRMTITNTLEDFQRLATALASYGPPVRIGFEATGNYHRALAHHLGRAGFELKLVSSVGLARTREALHNSWDKNDPKDAQVILHMMEIGAVQFFNDPLVTGTADIQELSKTHEIVSRSKTELWHRILTHYLPLYFPEAERFHRSSRTDWFLAFLEKYPSPHMITVMSREAFIADAWEVVGRKVSKERLLSDIYATAVGSVGLPVHSESDAVRMFRLVLAEGRSLIRQRDVIEARAVEMLSDLPDYQLLTTIPGIGPINAMTILAEAGDLRRFRHHRQFLKFCGMDLATVQSGMFRGQSRISKYGNARLRRTLWMAGQTAVLKRTNSFRDKFERYISKDRHNAHLRRKAYTAIAAKMARTVHAVVKHGEPYRPFFEGVSPGGRTSLCSSRGGSSLTS

SEQ ID NO: 200864 - protein, 355 aa, unidentified
MQKYKVSFKGQNIYVGIDVHLKTWHVTTLTESGYKYSFAQHADAKELFDRLNKKFPEAHFKSAYEAGFCGFSAHYALTEQGIENIVVNAADIPTTGKEKTMKTDAVDSEKIAWALKRNELTGIYIKDKRYMDDTNLIRLRQRFIMDLSRQKNRTKHLLYTQGVTYPERFRNSKTHWSRNFMKWLREEVELLSEQKLSLLLLCDQVENTRKAILKVTREIRRLSTTDRYKENYDLLFTVPGFGLITSMSMLTELDNDIMRFPNERSFVSMLGLIPTCHDSGEKKVSGEKTNRGNKHLGPLIVEASWVAIYRDYQLGAYYSSCCQIMKPHKAIIKVARKLACRTYAVLKTKTKYELS

SEQ ID NO: 200865 - protein, 354 aa, unidentified
MSEHYAGRQIVGMDLHRRRSVLVRMTETGQHLETVRISNDPEYLAQVMARAGEAPEVVLEAAYGWYWAADTLAELGATVHLAHPLGVKMFSYRRVKNDQRDAADLADLLRMGRLPEAWIAPPATRELRGWVRHRAKLVGLRSSLKCQVHGVLAHAGIWVPMSDLFGVAGQQLLAELSAGDRLSIESRSRLDSTLRVIGALEFEIELFAKLVNGRLRTDPGYRALQAIPGVGPVLAAVFVAEIGDITRFHRPEQLASWAGLTPKHHESDTTVHRGRITKQGSRLVRWAAVEAVQRVSGHTRLGQHRDRVAARRGRNIGVVAAARELLTLVFYGLRDHHIRALDTPAAPVAGTPAA

SEQ ID NO: 200866 - protein, 342 aa, unidentified
MDYFAGLDVSVKDTSVCIVDDTGKITREVRVASEPDALLAVLRNPTYRFKRIGLEAGPLSQWLFSALAEADLPVICVETRHMRAVLKAQINKTDRNDARGMAQMMRVGLYRPVHVKTLRSQKLRMLLTHRKLLQSKAIAIENDLRGTLRNFGLKVGIAGAMKFEARIKELVNDLPDLAVLVEPLLVVRRTLREQIAVLHRRLLTIVRDDEVCRRLMTVPGVGPVVALTYRATVDTPARFRKSKSVGAAFGLTCAKYQSGEIDHSGGISRCGDEMMRVMLYEAAQSMLRSNRWSWLKAWAMRVARRRGMKKAIVALARRLAVILHRIWVDGTEFRWTRDAAAA

SEQ ID NO: 200867 - protein, 412 aa, unidentified
MSKIEITAVGIDVSKGKSTVAVRRPGGEIVMMPFTVLHTAEGLAELTNTLRSIGGEIRVVMEHTGMYWRPIALALKEGGFFVSVVNAMLIHDFSDNSIRKVKTDRADSLKIANYALTFWQDLRDYSVEDETRQMLKIQSRLYERTLNSSIALRNGLISLLDQTFPGANKLFDEQRTKAGHIKWVDFVRRFWHKDCVAASSLSTFADTFQKWCKRTGYHYSLSDAERIHGIARNSVATLTKNDSTKLIITQAVDSLNAVYDTLQILRSEMQHLASMLPEYEVVMAMQGAGPITGPQLMAEIGDVRRFTSKGALVAFAGVDAPPFQSGTFDSKSRHVSKRGSPHLRRVLFTICSVILQHSDPENAVFQFMDRKRAEGKHFYVYTVAGGAKFLRIYYAKVKEYLNTIDSQTGCVA

SEQ ID NO: 200868 - protein, 392 aa, unidentified
MRKPKQHKPLNDLSRSLTPFDPNQTLTVVIELSLKTWLVAGIIPGVERQPLKKLEPDENELLKLFDRWRKEAEKAGHKIKRITVAFEVGRDGFWLARWLRAHGIEAHVMHAASVAVSREHRRAKTDRLDTELLKRTFLGWLRGERDHCKMVAIPTLAEEDAKRPNREHEALVGERTCIINRMKATLTRLGIRNFNPKLKKSAERLEHVRTPEGEPIPPNTLAELMRDMERRQLVMEQIRQIEKARLERLQQAPKHGPNVMVLLLARVIGIGIETADLLVQEVLSRNLRDQRALARYSGLTGSPDESGKKRREKGLARSGNARVRRGMVQLAWRFLEFQKESALAKWFRARTENARGSRKKMIVALARKLLIALWHFVRDGVVPEGIVLRPAH

SEQ ID NO: 200869 - protein, 398 aa, unidentified
MSRIWAGTDCGKTHHHCLVLDAEGETLLSRRVANDEPELLKLIGDVLDLADGRNVTWAMDMTGGEPALLIALLVNHGQELVYIPGVVVNRASDGYRGQGKTDARDARVIADQARMRRDLQPIRAGDDASVELRLLTEHRADLVADRTRVTNRLKALLTSMFPALERALDMGTTGALILLTGYQSPAAIRRTGLRRLTTWLTNRKVRGAQALATKAVEAAERQHTAVAGEAAIARMVLTLAKEVMTLNEKISETDKLIEGRFREHELAEVIQSMPGIGTVLGAEFLVGIGGSLDAFPTPDRLATFAGMTPAPRDSGKVSGNLHRPQRYHRRLQRVFYTSALVSIQFDPNSRRFYDRKRAEGKRHTQAVIALARRRVNVLWALIRDRRCYQVTPPVTAAA

SEQ ID NO: 200870 - protein, 300 aa, unidentified
MDCWTNKIGEITFANRPSAYDKFMTDVKKLYGDLQPIFGLEDTRGFGRNFASYLLGHKYTVKHVNPAYTDAMRNSSPISKKDDSYDAFFVAKILRDMLDTLPDESHDDLFWTIRQLVKRRDSLVQGIIIAKNQLNAQLTYVYPSYKEYFCDVDTKTAMYFWETYPHPKHLKGTQPEGLLQELRQVHRGMTEKKVQDILRLSEVNSPKEKDYQDERDLVIRSLVRELKFRKQENEDIVRKLERQVQLTGYKLHTMPGINLITAASIISEIGNIERFPNSDKLAQFSGVAPVNFSSAGKGKD

SEQ ID NO: 200871 - protein, 410 aa, unidentified
MTKIIVAQNAPVLVAIDIAKARHEVLIAIPDKKRRRRLTVLNELADFNRLIDTLRDYGCPVRVAFEATGNYHRALAYHLATAGFEVKLVSSVALARTREALNNSWDKNDPKDAQVILHMMEIGNEQFYHDPLVHGTNDIQELSKTHDIVSKSKTELWHRVLTHYLPLYFPEADRFHRSSRSDWFFAFLERYPSPHFITAMGKDAFTTDAWDVIGRKVAKERLLADIYETAKSSVGLPVAPDSDAISMFRLVLGEGRSLIAQRNQIEDRAVALLKDLPDYQLLTSIPGIGPINALTILAEAGDLRRFGHHRQFLKFCGMDLATIQSGTFRGQTKLSKYGNARLRRTLWMAGQVAILQRTNSFRDKFERYIAKDRQNTHLRRKAYTAIAAKMARTVHGIIKHGEPYRPFFEG

SEQ ID NO: 200872 - protein, 410 aa, unidentified
MAYKVAGIDVHKRVLMVVVVDVSDPESEPQQRRFGTTTSELQDLSGWLRDQGVQQAVMESTAQYWRPVWYELEPQMHLQLAQAFSNRAPRGRKHDFRDAERLIRRLVAGELTLSFVPEPEQRTWRTITRMKVQLTEDKSRLHSQLECLLEEMRIKLSSVISDLLGVSGYRILCALAGGQTDAKKLAALADDRVRCTEKQLIDALTGSPQPVHLQLLALYLDRHQMLVGQIAKLDRMIAEALKPHQEAVARLALVPGLGVDSAQQIIAEVGTDAGTFPSAAHLSAWVGTCPGQDETAQENHSSHSAKGNKYLRRILNQAAHAAVKKNGSHFQAVFRRLLPRLGYKATIWAVAHRLCRLVWKMLHERVAYVERGSEPDPKTKRRRAQKLLRTLRKLGYEVNVKPITPTPAVP

SEQ ID NO: 200873 - protein, 343 aa, unidentified
MGKLTRIGMDTSKNVFQLHGVDDNEQPALRRKLRRQDMGKFFAGLPQLQIGMEACGASHHWARELQALGHEVVLIPPQYTKPYVDRGKNDAADAEAICEAMSRPKVQRRFVPAKTLDQQALQMLMGVRNGLVKRRTQVSNAIRGHAAEFGLVSPKGLYRVEELLAKVEQSQEVPELARQIFKVLAGQYRHAEAQLREIEAALMAQHRSNEVSQRLAAIPSIGPVGAMAMAAKIGDANRFRSGRDFAAFIGLTPKDHSTAGRKRPGGITRAGDEMLRSHLVCGATAVIRQLKHGRGHNSPWLKELVARKPEKLAAVALANKTARIAWKLMISGERYRSNYAEAA

SEQ ID NO: 200874 - protein, 320 aa, unidentified
METKNAVIYAGVDVAKATLQLHLLGRQNELANTPAGLRQLLKQVQKVPGLHVVCEATGGYEQPMVKALHHAQVPVSVTNPARVRAAAQAQGQRAKTDPIDAAGLTDYGQRFQPQATPPTSATQQKLVALTQWLQQLIHGQAMAKTQAEHHQEPFVRRQHAKLMVHLHSQVDAVEQQIEALVKENAELQERVNCLDDIKGVGSRTAWMVLAHMPELGQLNRRQVAALAGLAPWTRDSGTIKGKRCIGGGRPEVRVALYMASLSAARSNPVLCALFKRLRAKGKLGKVALTAVMRRLVIYMNHQLKDLAAKKANEKTEPAKA

SEQ ID NO: 200875 - protein, 498 aa, unidentified
MEIAYSCCTGLDVHKKDVKACLATTQEDGQVCKEIRVYSTKTEDLLRMRDWLKESGCTCIAMEATGVYWKPIYNLLEGHFQLLVVNPQYVKALRGHKTDRKDAAWIADLLRLGMLKESFIPSKEQRELRELTRYRTRLVEERAREVNRLQKTLEDTNIKLADVVSDVLGKAARLILEALATGETDPRRLASFAVGRVRASQEQLERALTGNVRAHHRFMLGEHLKQIGNLDAAIKRVSQHIADRFAEPDPAKEESASIRSKEEKPEPCQETQSLPVCASEQAEEPCRIREQISDQPSSESAAQKMQAPRDAAMQRAIQATSPDACCKAIEPLSWHKAKELLMSIPGISERAAEGILAEIGLNMRQFPSARHLASWAGVCPGNDESAGKQRDGKTCQGNPWVRRILVQSANAAAHTKNTYLAAQYRRIASRRGGKRAIMAVAHSLLVIIYHVLLEQKPYQDLGSNFFDEHDRQAVEKGLVRRLERLGYRVDLQELPQAS

SEQ ID NO: 200876 - protein, 357 aa, unidentified
MEYGAIDLHKKESQVRIITDGDGVIDRRIPTTRDRLTTLFWGRPHARILIEASTESEWVAQHLETLGHEVVVADPNYTLMYGHRSRRVKTDRRDVAALAEACRHGIYRPAHRRSAQQRAVQWQLNIRRELVATRTRAISVVRAIARHTGYRIAGGATDTFLQRVEALNLPVPLEETLSPVRKVMEVLDQELAHADAQFEALIAADPIVKRLTTCPSIGAITAAAFVAALDDVGRFVGPRGAAHVTSYLGLVPREYSSGEQQQRGGVMRSAHPYVQALLVQAAWRVYRSSDPRVAALRSWEQAIERRRGKKIAIVALARRLARILYAMWRDGTDYQPAKIRTHQTHIAVAAGTQPATV

SEQ ID NO: 200877 - protein, 344 aa, unidentified
MKIAVLGIDLGKNVCSVVGLDASGVVVLRRRVRRDTLIDLVAKLPACLVGMEACCGAHHLGRLFAIQGHNIRLMSPEYVRPYVKAQKNDDRDAEGIAEAATRPTMRFVEMKTEAQLDMQTLHRSRERLVGERTALINQLRAVLLERGIVVPQGKRKFEQYLVAMMDEHDGEGLSARMRMLVADTRAQWRELDRRIAAFDAEFARWAKENEDARRLATIPGVGVTISTALIAAIGKAETFEHARDLAAWLGLVPRQATTGGKPRLMGISKRGNKYLRTLLIHGARAALPHLAEKRTTLGRWAKNLLSRVHQNVAVVALANKLARICWAVLRSGQKFAAKEATLTV

SEQ ID NO: 200878 - protein, 338 aa, unidentified
MDKTDHCGIEVSSEQLLVALRRDGQALPLKPFSNTPAGHRAVAAYLARKGRVVRVCMESTGVYGLDLALLLHRQAGLEVMVANPRAARHFAQALMQRSKTDALDAAMLLEFAARMEFQPWRPPSRAVLHLCALARRLAAITELCVAEKNRLHAARAAQALPAVIRQDLDRSIAFHQRAAARLTRQARKLIEADPLLRERFEQLDSVPGIAETSAIPLLAELGMLSPDLVVRQWVASAGLDPREYSSGRSVHKKVRISKTGNRHLRRALYMPALVAVQHDPHLRAFYEHLLARGKMKMQALVAVMRKLLHAIFGMFKHHQLYVGARLFHRPAQTSAQAA

SEQ ID NO: 200879 - protein, 325 aa, unidentified
MRQPQSQVKLQTQVGLDVSSQTLDVHIRVDGKAFSVPNTDAGFDQLCEILSAYSVSMILMEATGGYEDNVACYLQLQGFDVVVINPRFARRFAQSMGRLAKTDRIDAAILAQMAFMIDSGPDRERYIKPVTDEQRKQLSRLSSRRRQVVDLITIEKQRLTHADDYARESINGIISLLNVELKRIESDILRYVKKNFSELANRLLSIPGVGEQAMIVLIADLAELGHVNRRRISALLGVAPFNHDSGKFKGQRRIRDGRQSVRNVLYMGVISATRFNPVIKAFYDSLLLRGKPRKVAIIACMHKLIRIINAMMRTGKPFDMSLHGV

SEQ ID NO: 200880 - protein, 349 aa, unidentified
MKKLSKMPKQMGETIGIDLGDEVSRYCIVDQDGDVIEEGSFRNQASSLEKHFGDRPRRVALEAGAQSAWISRELKRLGHEVIVANPRKLKWITASDTKNDPVDARKLALLARADVPLLAPVEHRSAEQQAELAVIRARDAILRARTLLINSARSIAKGFGLRLPKSITPTFGQRAVDGLPEFLRSALSGLLEQIDALSQGIAGYDQRIAELAAKHPKLARLESIPGVGRLTAMTFVLTLGRVERFAHSRDVAGFLGLRPKQRQSGARDPQLGISKSGDPYMRKLLVQCAHHILGHYGKDSALRQWGLAKGEGGKKATLRAIVALARKLSVLLHRLWASGEFYKPFPKMA

SEQ ID NO: 200881 - protein, 443 aa, unidentified
MKRNRQRHLRGRRGQAFADLVRGVCPEQILCVSIDVSKDFHVVLLHNGLGEIVTPSFEIDIFHTGFDQFYQAVEAAIADSAAQVVLVGMEPTGHYYENLARHIREMGQEVTIVNSFSVKENRRQQMMAREKDDDIDVAAIGDLLRRGEGSPFRPPTGIYLQLQQLDRARLGELKIQTIYKNRVIGHLDRIFPGLILTKAVTKERYEPMFATDFWHCQALQNLVRICPDPWQLAALSPAGLVALFHQHNCRMGPRTATRIIVYAQKVLWPDPAVVAIRSQFLATDLQTLDQVSIRIAHYSEQLQQKLAQTPYQFLTRVKGLSPIRVASLAAAAGDPANYRFAGQLFRRSGLVSGRNDSGARQRQGKGRAITKTGDIYLRRALNDLLNGLILHQPILRTYYHRLKQTKPVGVARVATIRRAVGILWATLRDQRADSLLLRGDTMT

SEQ ID NO: 200882 - protein, 357 aa, unidentified
MHYVGLDVHARRSSLCILDSCGRVVKRVEVKGSWPKLMERVAAEVPRPFSVCFEASCGYGHLHERLSALAERVAVAHPGKLRLIFRAKRKNDRVDAEKQAKLLYLDQVPLVHVPGADVRAWRGLIELRRKLVGRRTAVKSQLRALLRGAGCCDAPAGKALWSKRGLKWLAAAALGEADALRRDLLLEELAQADERVGRVTRELDRRADAHPGVALLRTIPGVGPRTAEAFVAYVDDVRRFARTRQVGCYLGLVPCQDSSAGRDRLGHITGDGPPTARMLLCEAAWQAVRRSPSVKAFFERVMHGEPGRKKIALVAVAHKLARSMAAMLRAGEAWREEVQEQGRGQGQDRGQGQEPGA

SEQ ID NO: 200883 - protein, 410 aa, unidentified
MQVLYPCCCGLDIHKKFVVACVLTTQADGTVQKEIRTFTTMTQDLLELGDWLQAAGCTHVAMESTSSYWRPVYNLLEGQFTLLVGNAYPMKTVPGRKTDVKDAEWIADLLRPGLIRGSFIPAPAQRQLRDLTRYRTHVGEERARLTNRLQAVLEDANVKLASVVTDVRGVSARAILEALCAGETDPAVLVELARGRLRAKRELLAQAVVGRFSAHPAFLITEHLSQLDYLEEARERISAEIAQRLQEEQAALELLQTVPGLGQRAAEIMLAEMGTDLSRFPSAKHLASWAGMCPGNKESGGKRLSGKTRKGNAWLRQVLIEVAHVASRTKATYLVAQYRRIAARRGKKRALVALGHTTLVSGYYILTRRRPYRELGPLHFEERDRKRVEQRLGHRLERLGYVVTLQPLAA

SEQ ID NO: 200884 - protein, 335 aa, unidentified
MQIYGIDLAKEKFDVSFFDLTSKKVSNQPSHKVVTNNLKGIGKFFKGLPSDAVLVAEHTGVYGDTLLKCCMDSNVKIAFVGGYVIHRYRTTPDRAKTDVLDCALLRDFGERYPDKLKYKTFPEETLYELRQLARHREMLVEQRKQLITADKSEDCRPIRSLAVKRSMDRIKEMLDTEIAETEKEMLKVINGHESIHHNYELVKSVDGVGLITAVELLVKTENFTKITTARQYAAYAGTAPYEKSSGKMDKGAHISKIGNRRSKTLLYICAESARLHNKEIKLYYERRTLIDKKPRHYVLNAIANKLLRIIFTLVEKGEYYDANFIRQDPRVVKHN

SEQ ID NO: 200885 - protein, 425 aa, unidentified
MKNTQNQKISQIKNETLVVGIDVAKETHYARAFDYRGIELAKLLKFSNTAEGFKLLDQWMQDICKQKGKTEIVAGFEPTGHYWFVLGDHLKHQGHKLAIVNPFHVNRTKELDDNSPSKNDSKDCKTIAMLVKDGRYREVYIPDDIYQELREAVAERERLQEQLTSIHNRVVRWLDIRFPEFQNVFKDWRRNAALITLRSFPTPEKIVEAGARKICETWKTEMKRPSFKRAEALVKVASNSIGRTSGKLASEASLKNLLAQYDLYCKQYEALEQLMLELLMQVPNASKLLDIKGVGLSTAATFVGEVGDISRFQDPRQIQKLAGFNLVANSSGKHKGKTTISKRGRKRLRHSLFFAMIAILAHNPEFRLLHQRNLTRENNPLNKMQSIVALCGKLIRIFYALLSKGVDYDPEKMLNDIHQPVQQAA

SEQ ID NO: 200886 - protein, 422 aa, unidentified
MLGVGIDWAEDFHLVALGRPGEGVIQLRRIEHSPAAVDTLVADIAVLEPDPAEVRVVIETRHGLLVERLVDAGYVVLPVNPDLVARRRGPARKKDDAEDARIACLLALDRHLTLRPLIPHGEAAAELRAIARDDERAARDQRRLLNRLRQDLLSTFPAALAIAGDDLGAPTMLRLLERWPTGDQLASASHQELVAFARAGRHGWPDRFADRIAQALAADHFTPRAWLVRAKADTIRLAATQLQAIGTQRRVWEQRMAELLLGAPRHGRAHQPREDNQGQAFPGGKVYRSFPGLGDRLAARVAGEIGDHIDQYQSPNALACYAGKAPVTRRSGKSELVVATRLACNRHLANAVQQWAFCSLNRSGWARELYDAQRARGKTHHAALRALGNRWLEILWHCLMRGQLYHEATHVANRNRALGKAA

SEQ ID NO: 200887 - protein, 316 aa, unidentified
MTTNPVVVGVDVAKDRLDVAVRPSGETWSATNDEAGITALVARLRPLGPALLVCEATGGFERAAIAALAAAGLPVVVANPRQVRDFARATGQLAKTDQLDAAILALFAERVRPTPRPLPDAAAQLLDAVLTRRRQLLEMLVAEKNRLGFAPKPVHRGIQAHIRWLERQLDDVTKELAALIEASPVWRAKDDLLQSVPGVGPIVSYTLLGELPELGTLSHKQIAALVGVAPLARDSGTLRGKRLVWGGRASVRTALFMAALCGRRWNPTLKVFYERLKAAGKPTKVALIACARKLLTILNAMMRDQSHWTSNVQYSC

SEQ ID NO: 200888 - protein, 337 aa, unidentified
MKQIKFFTGTDVSKEWLDMCIMLDGATIHQQRIDNKVAAIRRWIKQTQRQYGYVIENTLFSMEFTGIYNNHLLEVLHQAGADIWLIPGIEINASRGLQRSKNDREDAKLIAEYAAKNLKKIRLWKKPRIVLKQLAALLMVRDKLLLTKHQYQTTFKESRGYSTREEYQIIKGSSDPVLKTIAAELKKLDKQLADLIKGDEQLKELNGYITSVDGVGIIISANTLVETNEFLDIKEGKKYSNHGGVVPHKDDSGKKIKKQRVSNKANKKIKRLLHLAAMSAIRMKGEMKNYYERKVAEGKNKMSVLNAIRNKIVLRIFACVNNKRSYDKNYSYSLAIP

SEQ ID NO: 200889 - protein, 339 aa, unidentified
MGRYVGVDLHKNMFVVSFYRADDHSHELKRYQMKEIAGFIDDLDTADAVAVESTNNTRYFVNCICEHVREVKVVNPSQFKVISKSVKKTDTNDAKVIAEFLSKDMLPEVRMKDKKTAQINSLANTRDKLVKLRTALKNKIHNILSSHGILLKKESLSSEKGLQRILEQPVDPVAFVELEVIVSQIRGLNEGIKKLDKELEDRGSKLPGHENITSIKGIGKKSGSILLSVIGDINDFENEKKLAAYFGIVPRVSNSNQSEWQGRITKRGSKLGRTTLVQCTLIAIRYSPRLRAFYDRLKAKKGSGKAIIATAKKLLNVIYYTLKENIVFEDFANGVIRTT

SEQ ID NO: 200890 - protein, 427 aa, unidentified
MTHTDQQQPEFAGFVAIDWADEKHAGAICSANGKVTIFELEQSAEAIDRWASALRERFDGRPIAICLEQSKGALIYALMKYEFFTLYPINPKQLKRFRESLAPSGAKDDPSDARFLLELLTKHRDRLHAWHPDNADTRLIGQLAEDRRTLVGQRTRLTNALKSRLKQYFPLALEVLGELDTELAAAFLLRWSSLEALKQEEPERVAEFYRMMHCNHPKLIQERLERIAQSVPLVTDPAITASGQMLVVSLASQLQALINPLKQYNLKLAELMEQHPDAPIFKSFPGAGDALAPRILAAFGSDRERLSRPDEMQRLSGIAPVTVQSGKSLHVHRRWACNKFLRQTFHEFALHSLAKCAWAKAYYDMMCKERGLKHQAAVRALAFKWIRILYRCWKTSTLYSEAHYFQSLYKRQSPLLKYMGSQSPQQT

SEQ ID NO: 200891 - protein, 327 aa, unidentified
MKSSKQSKHDSKVEYVGIDVSKDTLSVYAEGLFEGDVPNTAKGIAGLVRKIRRQTGTQRDVRFAFEETGAYSLPVQLELDRLREAACVLNPAQVRHYAKARGVLAKTDRIDARMIRYYAAECHCEPTPLPTKTRLELRDILRTRSLLSKVRSMITALRQITRASTCRAVLGEIVRFVDQRIAKLERELVAKAKEDADIRRVATELDKLPGVGPLTATTVATLVPELGGLGRRQAASIGGLAPVARESGRFKGQRKIGGGRAELRKALYMPALTAIRKDPTIKAFYEHLVNVRNKRKKVALAACMRKMLIHMDRVIACLNATEQCPAT

SEQ ID NO: 200892 - protein, 370 aa, unidentified
MVRGSGSPTSARYKIPSRSTVAGSRNIHARTVAWTLSPNLASVGSSIVAQGELKMNKDSEIIVGIDISKNKLDIQIQEDGQYFTCGNDIIDIGKLVEKLCSIHPALIVLEATGGYEKGVVSALIEAKLPVAMVTPVWVRYFVRSSGTLAKTDKIDAKMLVRYGRANHPPVVIVRTELQERLSVLMTRRSQVSLALVSEKNHLSTTIFPDVKALIEASIENLELQIMQLEEMIAEIIDQSPELKKNEKIICSVPGAGKITAAILLADLPELGTLDHKKIAALVGVAPFNRDSGHYRGKRRIKGGRQSIRKVLYMAAMTAMRWNPVIKDFYERLMAKGKVKKVAIVACMHKLITIVNAMVRAQTLWRPVITS

SEQ ID NO: 200893 - protein, 419 aa, unidentified
MVQEDDNSLVSVVHPICCGLDVHKETLAACLLITGADGRIQSEIKEFATFTDDLLRLREWLAVNDCPVVAMESTGVYWRPVHNVLEGQVTVILVNARHIKNVPGRKTDVADSQWLAGLLRLGLLKGSFLPPQEVRQWRELARLRKHYQESIGDFKRQVHKLLESANIKLAAVLTDIFGATGRLILERLAHQDGIPDLSDLERGPGRPLRHETQELRRAVGGFFTAHHRFQLCLLLKSIRQLEGQLGEVLLRLEEQLTSHQELRQRLQVAPGISQVASAGILAEVGPSLEDFKSSDALSSWCGLCPGNNQSAGKRKSGRSPVRSHPLKTLMVQVAWAAVKKKGSYYKDKFHRLRYRLGPKKAIVAIAHRLLKAVYHIIKDGAAFRDLGEEYLQHRHQAGRFNYLKKQAQLLGYQLIPATV

SEQ ID NO: 200894 - protein, 277 aa, unidentified
MNITTAGLDLAKNVFQVHGIDERGNAKLCKQLKRAQVLGFFANLPPCLIGMEACASAHFWARKLSAFGHTVKLIAPQFVKPYVKSNKHDAADAEAICEAVARPNMRFVPVKNPEQQALLGLHRARQGFVAARTAQANQIRGLLAEFGIVFAKGIGCVTRKMPEVLEDAENGLPGTSRELFSRLFSHFRELDRQVKELEGQIQAWHHEDTASLRLQAIPGIGPLTASALVASIADARMFKNGRQMAAWLGLVPRQSSTGGKLSCLASANVEISTCACC

SEQ ID NO: 200895 - protein, 370 aa, unidentified
MDHDHTIEPKTFVAIELSKRSWVIGVARPDRDKPSIYRLTGGDTSGLVARLRRTSDAKDMVLCFEAGHDGFWLARFLQAEGYDVRVLDPASLQVNRRARRVKTDRIDALAMLRALAAVYRGERHVCAQVRVLTVEEEDARRSHRERDRLIHERTAHVNRIKGLLFAQGIRDVEPRLRRTRIDFNELRTAEGLPIPPRLRAELEREYARLVMVEDQLRLVEKERDTADAQSPAVEQKRLDLCRLQGIGGAASAILAREIFARSFSSRRHLASYLGLTPSAYDSGTVTKCQGISKAGNSWARRILIEIAWLWLKYQPHTTLARWYIQRTQGQGARIRRIMLIALARKLAIALWRYVETGALPEGARLSAKAT

SEQ ID NO: 200896 - protein, 411 aa, unidentified
MNYKIAGIDIHKKVLMVVVTDAAAEEETWESRRFGTGANEREHLVAWLQDGGVQQVVMESTAQYWKPIWLDLEPHFEQLHLAQAHSNRAPKGRKHDFADAQRLTRRLIAGELILSFVPDSEQRGWRAITRAKVQLVRDRVRLQSQLEALLEETRIKLSSVISELLGLSGQRILRALAEGQNDPVELAKLGDRRLRCSQEELADALRGQWQPLHRQVLRLFLERLDVLDRQMQELDEMAAAAMQPYEDAVIRLAEVPGFGPDSAQQTIAEVGAQAKSFDSAAQFASWAGLCPGREESAEHNHSSHSPKGNKFLRRILTQAAQAAVKKKGSHFQIAFRRWIPKLGYPATIWAIAHKLARLVWKILHDQVHYIERGQESDPGVHRRRANKMVRALRQMGYKVEISSLNPQPAQP

SEQ ID NO: 200897 - protein, 387 aa, unidentified
MQKPHDNSKASLAAFMQDNTLIAVIELSLSSWLVAGLIPGASREPLKKLEPNPEDLLKLLHGWRDEAIKAGRLITRIAVAYETGRDSFWLARWLRERGIDAHVIHANSVTVSREHRRAKTDRLDTAMLKRGFLGWLRGERGHCTVAIVPTMEEEDAKRPHREREGLVHEQTRVVNRMKSALIQFGVRNFNPKLRKASVKLETVRTPEGKSLPPNTIAALRRDMERLKIIKEQIKAIEQARLQQFEQKPEAVANRMIYLLVRIYGLGLETADLLVHELLSRTLRDRRAVARYAGLTGSPDESGSKRREKGLSRSGNARVRKIMIQLAWRMVKFQPDSALVQWFKQRTENAKRSRKPMIVALARKLIIALWRYANDGLIPAGFRLHSAA

SEQ ID NO: 200898 - protein, 320 aa, unidentified
MAGHLKFRKKVTRTQFRHFMEKQEPAIVVMEACGSASYWAREMIKLGHEVRLIAPQYVRPFVKRQKNDAADAEAIVVAARQPEMRFVSPKTEDQQAKAVMFRGRERLVRQRTELVNALRAVLYEHGHVFPLGLVHLKRIEALLEDCDNGLPKLIVTECQDLLEQISLKTERITEKTAKLKSLAEQTETARRLQTMPGVGPLTALAVEAFAPDLAGFKSGRDFAAWLGLVPRQHSSGGKDRLGRISKAGQVDIRRLLIIGAMTRFTGRTRGKVPAGSWIARMLARKPKMLVGIALANKMARQIWAMLTKGENYRDPALAAA

SEQ ID NO: 200899 - protein, 347 aa, unidentified
MTDIIRIGLDTSKSLFQLHGVNAAEQPVLRKRLRRAEMIKFFEKLPPVVVALEACGASHHWARLLSSFGHEVKLIAPQLAKPYVKRGKNDAADAEALCEAASRPTMRFVPAKSADQQAALMLVGIRGNLIKRRTQLANSIRGFAAEFGLTAAKGMCRVEPLLERIAIDEAIPKLARDLFALQAREYAQLEREIEAVELKLMGWHRADECSQRLAQIPGVGPIGASLLMMKTPDPHSFKSGRDFAAWMGLTPKDHSTAGKTRLGKITRAGDELLRSTLVVGATAVIRHAQRSQRRNASPWLLKLLERKAPKLAAVALANKAARIAWKLMVSGEHYRRPVEQPMPALAA

SEQ ID NO: 200900 - protein, 344 aa, unidentified
MDNHTQYSGFAGVDLAKKVMQIHFVTGDGEITDKQVKRAEFLDFFRNRTKCLIGMEACGASQDWARKLEAMGHEVHLMSPKAVKPFVSGQKNDYNDAIGIYKAMFNGVRRVPVKSTEIRDLQTLRRIRSQVTKDKVKEINHVRGLLAEYGIVMGKSITAFNKGISSALESLKERGDVSPLVAEELQTTVESIKTKIERQKRLDREIEQLARGCKNYENFLKTPGVGPFTAAMLCVLLCDPAIFANGRQFAAYIGLAPRSRGSGGKNFIIGIPSKFNCDSESRAVFVECAQALARYKNKSPWVDGILRRKPKKVAVIAIANKLARQVWAMATKGESFKQMTILTA

SEQ ID NO: 200901 - protein, 341 aa, unidentified
MKKNLFFIGLDIAKADFAASIYQTPDQPIVTKEAIPNNPEGFDLLLLWLKEHHIDKTNSHICMEATGIYSQAVAYYLLFQGFPVGIEPPLKVKRAFDPVGHKTDPVDSKQIAEYAYRFQDELTSWQPRDEILEKIRQLLSVREQFTKQKVALKNAIQAYSKQRVQVALIKKAHQETLAQIEKQIARIDQELAKLIKQDPEIFQKANNLDTIPGYGMLLAAHLLVITENFTKIQKPKRLAAFIGIVPYQHQSGTSVFKRAKIRHFGPGPSRKLLRLAAQSVATHDVTFRRYYLRKLAQGKAKALVLNNIANKLLKVACAIIQNNTRYIKEHRSIHPMYLKSA

SEQ ID NO: 200902 - protein, 376 aa, unidentified
MEKDIRHVGFDVDSERIAVAVAEASGEVRSLGMIPYTAESVRRLVKKLGPARRLRVCYEAGPHGYGLYWQLMGLGVHCDVVAPTLVPVKAGDRVKTNRRDAEKLARCYRSGDLTPVWVPDAAHEALRDLVRAREAAKKDQLRARHRLGKFLLRRGLRAAGGVKNWTLKHLLWVRTLRFEQPAQEATFLDYLHEVEHAAERVARLEKAIDQAVAGLPEEMRAVVAGLQALRGIKQITAVTIVAEVGPLSRFARPKPLMGYSGMVSSEDSTGNSVRRFGITKTGNAHLRRVVGEAAWAYQYRPAMSAALKKRQEGLSEEVKEIAWKAQHRLCTRYRRLLTKGKVKPQVITAVGRELLGFIWAIGVQVEKEEQLRRRAA

SEQ ID NO: 200903 - protein, 396 aa, unidentified
MEVVAESVAGIDVHQKEITVTVLIGSAESAKPKKVHARFQTVTFDLKACGAWLKQQAVKQVLMESTGQYWRPVWQILEPFGFNMILCNPRIIKNIPGKKTDQKDSEWLSELARYGLVSASYVPPRQIQELRESTRLSKSITQQMTRLKNQVHDILQRSNIKLTTYVSDIFSGSGRRILALLENGEVINLANIEQAGTGKRGYRLKATPKQILASLDGALSYNDRFLMAMNMNLLASYQRELINLESRIYEQLEAFSELYHRLQAIPGVGEGTAQIIIAEIGSDVSPFPDAHHLASWAGLCPGSYESAGKKHGAHTLHGNKYLKTALITAAMAAKSTKQTGLRDFYWRLCSRMGKQKANVALAHKLLRIIYVMIQTGATYQEYKKSQRTEDTLTPKI

SEQ ID NO: 200904 - protein, 429 aa, unidentified
MAEKEHTEFEKFRQLKREIRGSQQHLIVGIDVAKERHHAFFGTSTGKTLHKRVVFENSKTGFERLLVHVEALKKQHGLTKVVFGMEPTANYHKPLGEYLIRMGEEVVLVSGVAVAKNRELLDGRWDKHDTKDSANVADLISQGKVIYYEFPSDDTRDLRELLSLKRRMKKQEHGLRVRIRNNLLAQYFPEMDSYYGEGKPEGYKIVKWCLAPSSIAKFSYDRFERLVRPGARMTLGQRQRLMAIWKCAPDSIGCKAGDALGFTARMMVEALEDIKKALGELDKRILEICKRMPSYPYLLTIPGVGPAIAAVLIAAIGDPHRFTRAKEVIRLAGLDLSANRSGRTSQDAVPVISKKGNAFLRYALYQAALIASVKNPAFMSYYSTLLEGREREQGIKTKMRIKLAAKMLVIAWTLMKKQERFNPEYLRRN

SEQ ID NO: 200905 - protein, 343 aa, unidentified
MVVHYIGADVHSNNVELAVERKGQIVERYSLSTSIRAIREVLDAIPSPKYLAFEEGPLAGWLYRNLKDYVDGLVASDPRRNKWIASDGDKDDRIDAAKLAALLRGGYLRPVYHSDDLQRLWLKRWVALYHDRVRAATRAINKIRALARLEGQRIPGPALRDLAARRSWLDGLEDDLAEALRLRWASYDRHRTEVRIAKRQVIRRSQAFPIIAYWRALPGVGPVRSATLFAYLDTPWRFKKKSQLCKYCGVGLQRASSGQDRRGRDRPTRLELFWQVNRRLKDAVMGMTMSAIRSRDNVFRDHYEERIRHGALASNARHATARKMLTVMWGMWKCQRPFDAAWC

SEQ ID NO: 200906 - protein, 354 aa, unidentified
MSQNLNSAVAVIGIDIGKNSFHIVGLDNRGAIVLRQKWSRGQVDARLANMPPCLIGMEACVGAHHLSRKLKALGHDARLMPAKYVRPYSKGQKNDFRDAEAIAEAVQRPTMKFVATKTADQLDLQALHRVRERLVSQRTGIINQIRAFLLERGIAVRQGQRFLRAELPRILATPPDVLSPRMVRLIEDLAGDWRRLDERVESLSGEIEAVARQDADCERLMSVPGIGPIISSAMVAAIGRGEVFSKGRDFGAWLGLVPKQTSTGDRTILGKISKRGNRYLRVLFVQAAWVVLIRPKSWERHGLKPWIEAAKKRLHPNVLAIALANKLARIAWGVLACGRNFEARTNTNATAQAA

SEQ ID NO: 200907 - protein, 407 aa, unidentified
MQMTCGVDWAEAHHDVALVDEDGALVARSRIDTGATGFSMLLTLIAEHGGSVGDTPIAIETDKNLLVVALAEAGFAVYPINPRAVARYRERHGQAGGKSDPGDAAVLAHILRTDLPMHRRLPDVSEQGRAVKALARQHQEAIWALHQTVSRLRSVLLEFYPQALQTFPNLKHRAALTVLAAVLTPAAATKLTRGRVVTLLKRSGRGNHPALVDQILADLRAPALRQPPRVEAAYGHTVRGLIEAVVAMQHAVEDLAAELALEFDAHPQAAILRSVPGLGPILAARVLGEIGDDPTRFTDPNNLRAYAGTAPVTIASGRSHYLKASKVRNKRLGDACHWWAFAMITKSAGAREHYDKRRAAGDHHNAALRNLANKLLGRLWWCLANNQLWDDNAAWPHRIEQEKSAAA

SEQ ID NO: 200908 - protein, 367 aa, unidentified
MKKLTTTMMQETLNKYDGRLTVGLDLGDRSSFYCVLDGTGDVLLEQKVSTTPKALNEIFGAMPRSRIAVETGTHSPWVSRLLSELGHETIVAHARSVRLIGESRRKDDRLDAMTLARLVRIDPRLLCPVKHRSAEAQADLTVIRARAALVRTRTMLVNAARGLTKSYGERLRGCNARGMKSKAAQDLSPELKYALEPMMHEIESASERICQYDQMLESMARNRYPEAERLKQIKGVGTLIALTYMLTLEDPCRFRKSRDAACYVGLQPGRRNSGQSEPQMHISKEGDPYLRALLVQAAHHVLGPWGVDSDLRRWGMRLAEHGGKRGKKRAVIAVARKLAVLLHRLWVSGDRYVPLRPGGQATLPAVA

SEQ ID NO: 200909 - protein, 358 aa, unidentified
MVDKVTEAAVVGGVDTHKDLHVAAVVDQNNKVLGTQYFSTTRQGYRQMLAWMTSFGTLKRIGVECTGTYGSGLLRYFQNAGLEVLEVTAPDRMERRKRGKSDTIDAECAAHAAFSGIRAVTPKTRDGMIESLRVLKTCRKTAISARRVALQIIHSNIISAPDELREQLRNMTRMQLIRTLGSWRPDASEYRNVTNVYRISLKSLARRYLELHDEIADLDVMIAAIVDELAPELIKRNAIGYESASQLLITAGDNPQRLRSESGFAALCGVSPVPVSSGKTNRYRLNRGGDRAANSALHIIAIGRLRTDAKTKEYVARRVAEGHTKMEAIRCLKRYISREVYTLLRNQNRRINSIPITA

SEQ ID NO: 200910 - protein, 406 aa, unidentified
MNYLGIDVSKNNSRYVLLDNDGEKAAKPFTFDNNQQAFAKLLERLKELNIQPNGLLIGIEATGIWWENLYCFMTEQKFKVIVLNPHQTNKFREALRLKAKTDDIDAYVIAGLLRSGEYAASDIPEETIQILREIVKLRHQLVTNRQSFERQAHALLGLLFPEYEKTAIKNPFGVASLAILKAYPTAKHLAEAKPKNIEKIVRSIVGNNFDIAEIQTLIETARNSIYSGRAKDARGMNLNILLTHVETLHQSIAQLDQRIDDILSPQNSNDANSFPGANLLSIPGVGPKTLAAILSVVGADGSAYPDGKSFIGYIGFFPKIYESGETRRDNIISKRGPNYIRRALYLSAVACLKHNPELKALYDRKISQGKKPKQALICVAKKLAHLCLSMLQSGEFYNPARVFMPA

SEQ ID NO: 200911 - protein, 430 aa, unidentified
MEVIYPKACGVDVHKSFIVAVICDSTSVKPQYLRKRFSTFNNSLIEFRNWLLANDCQNVCMESTGKYYVPVYNALEGHISNVVVANPKWVRCIKGEKDDNKDAKWIADLFKLGIVRSSFIPNKDIRILRELTRYLYKLTNMRTSEKNRFANALTVGNCKLDMVFSDIFGKTSSAIINTILSQNEYNDEDILKNIDKHCKSSNEDILNSICGISWEASQKQRMNVIQEHIDYLDKSIKTIREIIDSIVAPYESAINLLCSIPGIDRKSAITIISEIGTDMSQFSSHYRLASWAGLAPGCNESAGKKKSVKISRAGVYLKPALVEVAHCAVKDKSNDYYAKKFNLISKRRGKKRAYIAIARKILVAIYHMLSTGELFNPSDASKVETTDKDKIKFTKNNFIQSTKQLLSLGLTIDELQEFITSKISESTPVI

SEQ ID NO: 200912 - protein, 360 aa, unidentified
MTTTMTCVGLDVHARSIHAAAVELVSGGLRRARFGGGSEEVVAWLAGLPRPLRVCYEAGPTGFALYRAAQAAGIDVCVVAPSKTPRASGDRIKSDRKDAELLARLLLAGQLKAIAVPSPALEAARHLCRAREQVRADLMRCRHRVSKLLLLHGRVYPAPTTWNERHRRWLGGQRFDEAVAELAYLDTLAAVDGLVARKVALDERLSRLALEGEWAETVARLRCFRGIDTLSALVLALEIGDFVRFGRPAQLASWLGLVPSLDQSGESRRQGAITKTGSSYARRLLVEAAWQYLREPRIGVTLRNRQQGQPAQVLQIAWRAQHRLYRLQQRLRGRGKPGNVTTVAVARELACFLWAAAVVD

SEQ ID NO: 200913 - protein, 449 aa, unidentified
MARQHARRQRSAQPFHPHAAGIDCGATEHFVAVPEDRDPQPVRSFRTFTADLHALADWLQQCGIETVAMESTGVYWIPLFEILEARGLQVYLVDPGKIKNAPGRKTDVVDCQWIQQLHSVGLLSASFRPDDDICILRSYMRQRDMLVRYAAQHVQHMQKALMEMNVQLHHVIADITGLTGTRIIEAILGGERAPNTLAKLRDGHCKQDEATIARALQGNWRDDHLFALQQAYNLYTFYRQQMAQLDTRLEAYLHTFEDHTDGQPLAPPPRKRPPKPNEPPFDMTNLLYRMTGVDLTTIDGIGGHLALGIIAEIGTDMSPWASEKHFASWLCLSPGNHKSGGKQKRSKTGTRPSANRANQLLRLAAMSLSRSDSALGAFYRRLRGRLGAPKAITATAHKLAKIVYNMLKYGKAYVDRGAQYYDQHYRQRAVKNLRRRAEALGFTLQPQAL

SEQ ID NO: 200914 - protein, 482 aa, unidentified
MKKRNIYQNRSQELLRLFEQAGSHSKVMCIPIDYAKKDHVVMFCNGYGDIVRKPFSVKNSAEGLTYLLDQVTRSCRRRGIKRQHVFFGGEDANSYCENFVNTLRSKGWIVAGVNARDAKKQRANLQASTDRLDLMGIATMLLNCRANCCPAQSGIYRNIRSLVRHRRELVVMSTAVRNRIHGVVDRLFPGFLDEKKSGIVAFTRSSLFLMEDRFSARQIRRRSRPKLIEILRRYGTSKAEATAEKLQQYAAQVLHTSVEHIDTLQLSLAQHVKHLRCLQESVDQLKKEISLNLAQTHGAFLTSVRGIGMILAAGLVAEIGDPNEQKPLNNLVSYAGIIPRVKQTGGVEGKTYTFSVAKRCNRILKDYVVKSAFKLGRYGPEDLMVDYKRREASGQHADFGIGRRYLRMAMSLMRTSQVYLPPWLRGANSTMKERAGYYLETWPEFRDKWKKVGALEAAFSKDRPLGLWRQMIQELYDIELKL

SEQ ID NO: 200915 - protein, 429 aa, unidentified
MSNFFNDFVVGIDVSSKSSVITILMPGGEAYGKKINITNDLKGFDKLLLILTDITENFSKRPKIFMESTGLYHMPLLNYFNKNNFECYVINPIHTKNFAKQSIRKVKNDKVDSLRIAQLAQSPTFFSESFFDEDIFLLKKLCREYDSLVSHRAHYKKKVLSSLNLVFPKFNDIFSDTFSAVPLAILSNYPTYKDFLSAHKSDVVTLMRSTVSHSSEWADKKYKLIYTTAKEAEMLKLPTTCLGTELTCFINIIKTFSKSIDDLKEQILIFHKQIPNFEDNAKLLCTHPEVGLLSAISFLAEIGDIKNFSSPKKLVAFLGVDTSVSQSGAFTSTHNKLTKRGSNLARKILYNLAIASTKTLRNGASANPVLLTYYNKLIKSKPKKIAICAVMHKLINHFFAILRDKKAFELRLPETHKQIYIDKNLLVVI

SEQ ID NO: 200916 - protein, 366 aa, unidentified
MKKISTVAMRGNEIFRELKLTVGLDLGDRASHYCILDEAGNVILEHRLPTTPKGIHEVFSRIPRSRTALETGTHSPWVSRQLTQLGHEVIVAHARNVRLIGESSRKDDQLDARTLARLARIDPGLLGPVRHRSAKAQIHLTVIRARAGLVSTRTALVNATRGLTKSYGERLRKCGTGQMNREIAKGLSQELRDALDPLLTEIESLNERIAEYDRRIEQIAKEVYPEVALLKQVKGVGTLIALTYVLTLDDPYRFRRSRDAGCFLGLRPGRRNSGMSEPQMHISKEGDRYLRTLMVQGAHYILGPFGEDSDLRRWGLKLAERGGRNAKKRAVVAVARKLAVLLHKLWVSGEVYEPLRNNHKVVCAVA

SEQ ID NO: 200917 - protein, 338 aa, unidentified
MTIVMGLDQHRGQITGEWIDTDTGEVQRTRVAPADRAAVRKFLQRFRGRELEVALEATTGWRFVVEELRRVGAEVHLAEPAETAARRGNKKRAKNDRADARHLRELLMIKRLPESWIPPEHILDLRARVRLRHELSEQRSEWQQRIQATLYHHGCPQRRQLMVGDGREWLAAQPLPAAAREQVTVALGMIDALEVQIAPLDKELRAYARRQPGCKALMAHYGIGPLVAVTILAELGDCTRFSSSRQAVRYAGMDITVYQSDQRRSPGHLSRQGPPALRWALFEAAQSACRRGSPDRDYYGDTAERLGHNRACLSIARKLLKRSYHTLRELGEEALTPA

SEQ ID NO: 200918 - protein, 347 aa, unidentified
MRFASPTAAFYCGIDRHARTMYLVVLDHAGNVRLQRNLPARPDAFLAAVAPFRPDLVVASECVHCWYWLADRCAAEGIPFLLGDAWGMKAVHGNKTKSDAHDADTIARLLRGGNLPLAYAYPQEKRGLRDLLRTRLRFVRLRARTYGHVHTARRQLNLPPVSSDVKYQSKRAGIADTIPDEHVRRAVAADLELLDPLDALIRHLERDLEVAARRHFAQELAVLQSIPGVGLIISLTVLLEINTIDRFDTRQQFCSYARLIAPPLESAGKKVGVGCKKRGNAWLKWAFSEAAVLCAQKDEGLGAYLQRLTARYGTGKALGVLAHKLGRAMYHMLRTKKVFDRDKFLRH

SEQ ID NO: 200919 - protein, 405 aa, unidentified
MTVMIGVDPHKGSHTAVAIGAGEEPLGRLRVRASVAQAEKLVAWAADWPGRTWAVEGAGGLGHLLDWQLVAAGERVLDVPPEPAARVRLLQAGDTSKNDPDDALSVAIAALRSKAPRQVMAEDYAAVLKVWSKRHRDLSRARNQVACRLHAVLCELVPGGFAKEITAGQAARVLDTVTPAGAIAQARRDLAGQFPGDLRNLDARLRQAKKKLAAAVRASQTTLTEIFGVGPVIAGTVIGDAGNIARFASRDHFAAYNGTAPVEVSSGGRITGRLSLRGSRRASHAIHMAAITQIRNRHSDGRGYYDRKIAEGKTHKEALRSLKRRISNAIYARLRADARQAAAASAKGPGGQPGNDSDSSAAGSHPQRRLFGQATPGPAPTPRPATRRKPALSPKPSSKMTRRSP

SEQ ID NO: 200920 - protein, 397 aa, unidentified
MFYLGIDIAKHKHYASIIDQTGKPITKPFPFQNHKEGGQALLNWMYRYIESPTEIMIGMEATGHYWLAVYSFLLDHGFSVVVLNPIQTNAWRKGTEIRKRKTDAIDATMIADIIRFGRFVETPLVDEKMFALKQMSRFRNALVSNMSDLKRKALVVLDQTFPEYQSIFSDVFGKTSSQILLEYSSPSDYEQISIDDLTQIIEQTSRNRLGKKTANKLMELASNSFGVTFCKNAFSFQLKMLMEQIRFIEDQIKECEEEMSQLLIDLDTPIMTIPGVGPILGATILSEIGDIHRFDKPSKLVAYAGIDASVSQSGQFESSGTSISKRGSSHLRRALFQAAITAHKHDPVLKAFYEKKRKQGKHYYVCIGAVARKLCYIIYAILKSNKPYEIPPHTTET

SEQ ID NO: 200921 - protein, 357 aa, unidentified
MRWSPPPCERYADRVFFFLKGIIMQNVTLIGIDLGKHSFHVHAQDKNGNALLRKKFSRNQLTAFLSTCTASTVVMESCAGAHFMARHISQFGHQVKLISPQFVRPFVKSDKNDFIDAEAICEAASRPSMRFVTPRTEDQQAMSALHRVRDALVRERVKTTNQMHAFLLEFGISMPRGIAVIRHLAAVLEEHELPPYLARLLTRLHHHYAYLSEQIAGLEQELKTHMADDDTAQRLLTIPGVGVITASLLATKLGDGKSYASSRDFAASTGLVPRQYSTGGKNTLMGISKRGDKNLRRLLVQCARAFMQRLEHNQGRLADWVKTQLSRHHSNVVACGLANKLARIAWSLTVHRSAFNQ

SEQ ID NO: 200922 - protein, 445 aa, unidentified
MHYKRLLTLIDSVSSYLSVGLDVGADFTWMSIALPNGSFIGKPFKIVHSDPRSRDLAVAKIKEAQETYSLKSRCFLESTGIYHIPLLCFLRDKGFDCSVINPIITKNSTNINIRKLHNDKFDSKKAALVGLNVSLKTSIIPDDSVVDLRNLVRDYYYFKDLQSAVALKLTAELKVSFPAYAKVFSKVTTQSSLKLLSSYPLAEDMLAASKDDIVKIIRNTARFGEAYALRKYDAIIAAAQDTAVFGRALPSNAVRIRLYIDTYQEYQKHLDALLKALHETVNRLQDTLIYDQICLLQSLRGIGFLSAVVLIAEMGDFKLFSSPKKLYAYFGLDPAVKQSGKLNGDKVHMSKRGSSLARRVLHMVALNNVKVDKGSGTPVNPVVYDYYTRKCSGKKKTVAMGAVMHKICNIIFAMLRDNKPFEVITPEEHCRRFAAEHPNKIRKAA

SEQ ID NO: 200923 - protein, 315 aa, unidentified
MTQTITRSAGIDIAKATLDVYCHPDGVFRQFANDAKGHRALIAWLTSCAPDRVVYEATGPYHRTLERALVQAELPIARINPLHARRFAEALGTPAKTDRQDAILLARLGVTLQPRTTEPVSLDLQSLAELVAARRHLVKQRTAATNRSKILTIALLKRQIRASLRQIENQLDAIDRQCRDIIQTDNDLKQRLDILMSIPGIGELTAIALIADMPELGQMDEKQAAHLAGLAPITRQSGTWKGKSFIKGGRAHLRQALYMPALVAIRFNKPLAEKYKALTKAGKPPKVAITAVMRKLIVLANALLRDNRKWATNAP

SEQ ID NO: 200924 - protein, 387 aa, unidentified
MAKPNDLSRSLVPFEQSSTLVVVIEMSLSNWLVAGIVPGFDRHPLKKLGADEDALLRLLQRWRDKAVTAGCTITRVVVAFEAGRDGFWLARWLRAHDVETYVIHPTSVAVSREHRRAKTDRIDTALLKRAFLGWLRGEPDHCNMTAIPTPEQEDGKRPSRERETLIGEHTRIINRMKACLVRWGIRNFKPTLRQAPQRLEALRTPEGMPLPPNTLAEMRRDMARLHLIKDQIKAITEDRVRRLGQASADRPQAMSRMLARVIGVGIETADMLVQEILSRHLRDRRAVARYAGLTGAPDESGKRRREKGLARAGNARVRHGMIQLAWRFLRFQKASALAQWFHARTADGRGGTRKTMIVALARKLLIALWRLVATGEVPQGVVLRSTS

SEQ ID NO: 200925 - protein, 421 aa, unidentified
MTITIGIDPHKGSHTAVAIDSNEHVLDEIRVRTCSTQTARLRDWAERFEERTWAVESAHGLGYLLAQQLVTAGENVIDVPPVRASRVRVLGSGRSQKNDPNDARSIAIAALRADDLAIVCVDDHSRALKLLSKRHRDLGRLKNKASSRLHALLLDMVPGGAGFRITTVTRINAAIDDFEPADAMGRQRQEIASELASDIDRYNNLLDASTQRITVALAASGTSLTTISGVGPICAAMIIGESGNVDRFKSKHHSASYNATAPVEESSGPKVRHRLNQRGNRKLNWALHVVAISKLSHDTLGRAFYDRGSCQCGGIHAHLELTDVSVRADGPISGDLIGRSTSWAEPLRPPTSRSRTAPATRSNGRWACRDAVSRMPAGERLRLHLGAEQRDRDHHVRITRGGREVAQASSAGEFAIATCSD

SEQ ID NO: 200926 - protein, 420 aa, unidentified
MPDDRCRLGSDDVVIGLDLASAEHQVVVLTADGQRLTRFKIPHSRVGLEELLRRTMPAALSRTGGSRVFAFEATGHVWEAVAYILRARGERYVVINPLTTFRVREARQLSREKTDLTDAEQIAELCRTGLVTRTQLEARPYLALRRAWGEYRRLREERARLKVLVAHQLYGLFPEFLRVWADLLQPGALAVLRTGLTPATMAALSLGEFVARVREHRAGRRVWRFKLAQVHRYAEQTIACPDGVDVLAREVQRAVARMDVLTAQMTAVATEVDALLADLEETPFLRTIPGLGWASVAGLLAHVGAITKYRHGRQLIKLAGTNPSRRDTGQTVGRGQTMSRRGRAGLREVMYLATISCLQHNPRIRAHYDRLIQRADRPLSKMQALGACMNKLLLYAFAVMSRREAFQLDHDWQRTMSRVA

SEQ ID NO: 200927 - protein, 416 aa, unidentified
MNAVGIDVSSRKSTVAVLRPLGEVVCLPFDVTHDIAGLASLAEKLKAIDGETRVVMEHTGRYYEAVAKALHEAGFFVCAVNPLLIKEYGANSLRRVKTDKADAVKIARYALDNWADLRDFTPMDAIRYDLKTLNRQFQLASKQRTASANNLIALLEQSFPGIRKCFDSPVRSDGTQKWVDFAHSFWHVDCVRKQPFPAFCERYRKWCKLHAYFFKLRNAEKVYALAKSAVVLTPKSKVVKVLVQEAANQLISISRSVEVYRAEMDRLAAMLPEYPVVMAMYGVGKSYGPQLMAEIGDVRRFERKQALVAFAGIDPMPNQSGDKNVRSNKSSKRGSPYLRKTLFNVIRTYLQCAPQDEPVFQFLNRKRAEGKPFYVYMLAAANKFLRRYYAKLRDYFASLDTLQPVASIPTILKATL

SEQ ID NO: 200928 - protein, 354 aa, unidentified
MAETLKTAVAVIGVDIGKNSFHVVGLDRRGAIVLRQKWSRGQVESRFANMPPCLIGMEACVGAHHLSRKLKALGHDARLMPAKYVRPYSKGQKNDFRDAEAIAEAVQRPTMRFVATKTVDQLDLQALHRVRERLVSQRTGIVNQIRAFLLERGVAVRQGLRFLRTELPRILAAPSDVVSPGMVRIIEDLAGDWHRLDERIEGLSGEIEAIARQDAGCERLMSVPGIGPIISSAMVAAIGAGDAFSKGRDFAAWLGLVPKQISTGDRTILGKISKRGNRYLRVLFVQAAWAVLIKPKTWERHGFKPWLEAAKKRLHYNVLAIALANKLARIAWSVLARGRTFEARKIDEATVQTA

SEQ ID NO: 200929 - protein, 330 aa, unidentified
MKKSIGFDVSKANIDVAVFDGQNYQYLKTENSRNGFEHIVNTFELSPDPEISITMEATGTYHRKAADYFCSNGYTVHVVNPLKIKRYSGVKFLRAKTDKIDSKIIALYGFNEKEPVYKLKPEKRLKIQGFLNAIDNLCQMRTQLKNRIEALNQHTEDVEDIRLMFNRMITSIQIEIVRMEKEVSILSREISATSYCNVLTIPGVGTRMASAMIGYFGAMEDFEKSKQLVSFIGISPFPKESGSSIHGRGSISRMGNNYLRKQLFMASLSASRYNSSCKKLYDRLISNGKAKKIALIAVSNKLARQIFAVIKYGRKYDPNFGIFCQNGVAI

SEQ ID NO: 200930 - protein, 367 aa, unidentified
MKKVSTRATARSRNISQQKLTIGLDLGDRNSWYCVLDEAGQIQLEQRVRTTGKGLREVFAGMARSRIALEIGTHSPWISRLLSELGHEVIVANARKVRLIGESRKKDDRLDAQSLARLARMDPELLYPVKHRSAKAQADLTVIRARAGLVRARTSLVNTARSLAKSYGERLRSCNVRNLNPEKAESLSPELQAALEPLLNAIESLSERIVEYNDRIENLAEQSYPQVALLKQIKGVGTLIALSFLLTLEDPHRFGKSRDVGGYLGLQPGRRNSGQSEPQMHISKEGDPYLRTLLVQGAQHILGPFGPDCDLRRWGLKLAERGGRNSKKRAIVATARKLAVLLHHLWVSGEVYEPLHNSCPTTVAAAA

SEQ ID NO: 200931 - protein, 431 aa, unidentified
MNCNTQNEKIETIKEKTLVVGIDVGSETHYARAFDWRGYEYSKKAFPFSNTEAGFVSFLEWMQDIAKDNGKEELVPGMEPTGHYWFDLGKFLQDKGIKPVLVNPYHVKQSKELDDNNPSKNDRKDPKVIAGLIKDGRFTYPYLPEGIYAELRSASNLRFQTQEELTRILNRIARWFSIYFPEYKDVYGKSDSKSGLMILEQAPLPADIKALGVDGVNKIWRDAKLRGVGIKRATKLVEAAKHSIGSQEGLTTARMEIKNLLSDYERYSRRMEELAELIDELVKEIPYVEKMLQIKGVGIKTISGLVAEIGDIRRFDNPKQIQKLAGYALVEDSSGKHQGETRISRRGRKKLRYLLFEASLSLVGKNEEFKELHYYYTHRKENPLKKKQSLVAVACKFLRIAYKILTTGVDYDGTKMINDIRRPQKQMLQAA

SEQ ID NO: 200932 - protein, 361 aa, unidentified
MNATTVAVDLAKSVFQLAVADEHWRVVETQRLTRTQFERWFLNREVGLVVMEACGSAHHWGRWLNNLGIEVRLLPAQYIRAYVKRNKTDAADAAALLEAARASDIRPVRVKSVEQQALQGMHRIRSLWMGTRTSRINALRGFCREFGIAIPVGARTGVEAISRVLADPGTAVPDLIRDTAKLLVEEIHLLEARIAQLERELARLAKLSPACTTLLSIPGIGLLTATALVAATSGDVSHFQDARHFSSWFGLTPKEYSSGNSRYLGRISKKGDRYLRMLLTHGARSVLRSAKVAEGAGKEVCGVRRWALDVQARSNHNKAACALANKLARICYATLRDKEPFDEPTVRLTKKINRESFVMPA

SEQ ID NO: 200933 - protein, 399 aa, unidentified
MSKSNYPEIRVSVDVGCHSHSVAIGLSGGELIEEFEIDHNPEGFHHFFTRIRRQEDKYGFPVSVAMEGYNGYARPLDRLVRARDYRLFNINNVKLARFKEIFPGAAKTDRIDARKGLELFQLQDFLPAAKDVLQEVAATPAENELLKRLTRRRRRLVNEKARVLNSFQADLQAVSPGLLEITKDASNVWFLRFITCTDDLEKLARLRWSTLLNIRSVGEKYAGLIQSWQKRAHFSDEVHYVGEMIQEDATRILELRDKIKSLEARIEDVSIESSVASAMLSIPGFGLVCSAELAGEIGTVDRFEKEAGLALYVGIAPLDNSSGKKKGSKTPNLVNRRAKMAMMTAVDKHRKCVPESQRYYEKKRAEGKKHNQAIRALGRHMCRVIFKMLKEEREYEIRD

SEQ ID NO: 200934 - protein, 366 aa, unidentified
MIVIGADTHKQTHTCAAARTGTGELVGELTAAARKPGFRELLDWGRSLDGQRSWALEDCRHVSGSFERFLIAHGERVVRVPPKLMGASRKGERAAGKSDAIDALAVARAALREGPGTLPAAHLDERALEVKLLLDHREDLVRSRSEDQQRLRWHLHDLWPELELPAGCLDRIVWLDRVARKLARAEQGARVRVARELVRAIRERTRRASELEREITALVRAQAPALLVLPGCGALTAAKLLAETAGVQRFQTDAKLARLAGAAPVPASSGNRQRHRLDRRGNRQLNCALHRMAVTQGRLHPPARDFLARKQAEGKSRVEALRALKRHLVRAVWQALRAAETAATLDSSVVADHSPNLRPGAAVALT

SEQ ID NO: 200935 - protein, 338 aa, unidentified
MGSYVGIDLHRQRSVIVVLDDDGNRVSWSRIDNSAVNLAREITAAGVDAEVAMEACWGWYWAADVIAECGARLHLAHPLGIAGYANRRVKNDIRDATLLADLLRMGRLPEAWVAPPAVRELREEVRYRHKLSRLQTGLKCQVHQVLGKEGAIPATKGIWWSGGQRWLDELQLADAYTNRIGSLRDLIELNHREIVQSDTRIHLRLKGHPGYEAIQQIAGVGRVLAAVFVAEIGDVHRFPDARRLCSWTGLTPRLRESDTHTHRGRITKQGSRLLRWAAIEAVSRAARDRRVASVKARVGARRGHNIGRVAAARHLLTLVYYGLRDGHIRCLATTADTA

SEQ ID NO: 200936 - protein, 345 aa, unidentified
MDHFAGLDVSVKETSVCIVDDTGKIVREVKLASEPQALLAVLKNPAYRFKRIGLEAGPLSQWLFSALAEAGLPVICVETRHMKAVLKAQINKTDRNDARGIAQMIRAGLYRPVHVKTLRSQKLRMLLTHRELLQSKAIAIENDLRGTLRNFGLKVGMVGKAKFEARIKELVENLPDLAVLVEPMLIVRRVLREQIAILHRRLLAVVRDDEVCRRLMTTPGVGPVVALTYRATVDVPARFRKSKSVGAVFGLTCAKYQSGEIDWSGRISRCGDEMMRAMLYEAAQSMLFHSKKWSWLKAWAMQIARRRGMKKAIVALARRLAVIMHRIWINGTEFRWTREQAAAAT

SEQ ID NO: 200937 - protein, 352 aa, unidentified
MQIIGCDLHTRQQTIAMLDTTTGEVVEKTLLHEGNSVREFYSKLSGPVRVGIEATGSMQWFVNLMEELEIDCRVGHPAKIRAAEPRKQKHDRRDADLILKLLVEDRFPAIWLPSKELQDLRAWLRHRHQWVRMRTRTQNALQSMALANGLRRGPSLWSQTGQQAIASLPLAPHTAYRRSELQAMYEKFETEIEKLNRRVEEQASERPGARLLMTHPGVGPVTALATEVFLGDPARFQDSKALASYVGMIPREYSSGGRQRLGGLTKQGNPLLRFLWGEAGAHAVRRDPELKRFYRRKVSQKGFGKASVAVARKLGIRLWIMLRDQIEYKEFCRRGQKQQKSSDVRAGMPETR

SEQ ID NO: 200938 - protein, 370 aa, unidentified
MGSIVFVGMDVHKTTISVAVAEGGRDGEVRQLGVFPNRAEVIAKLVRRLAVEGRDLRFCYEAGPCGYGLQRQIEGLGHSCEVVAPSLIPTRPGDRVKTDRRDALGLAKLHRAGELTSVWIPDAAHEAMRDLIRARATAVRVLGKARQHLQGFLLRHDRIHAGRTAWTVAYRRWLTTLRFEHPAQQIVLQDYIHAVQSAEQRVVRLVEQIAALLPSWSLAPVVQALQAMRGVALIVAVTVAAEVGDFGRFAKPRQLMAYLGLVPSERSSGSTVRRGGITKAGNALARRVLIEGAWTYRMPARVSRKLHDRLEPLPDTIRDIAWKAQIRLCGRYRHLVAAGKTKVVVTTAIAREMVGFIWAIARQVQLQPAS

SEQ ID NO: 200939 - protein, 402 aa, unidentified
MYFVGIDWADLHHDVAVLDEKGQELKYFTVPHKREGLEQLKQKLLSLDPDPENFACLVETKNGLLVQFLLEAGFPVYPLNPKVVDYRRKPSGAKSDPIDARLLANIGRSDLSQLKRLKPDTELISELKMLTRDQDGLIQEATRLTNKLIACLKEYYPAALEFFSKPTLPVALEFLKLYPTPDLVREATVPEIAAFLKAHKHPRPNQTAVSIWQKAHEPQLRASAPVVRAKCRLLLALVSQLEVVKEQIAAYDEEITRLFQLHSDSRIFASLPGAAGRLAPRLLAEWGDDRERYENAAVVQALAGTSPVLFQSGKYRFARQRKSCVKPFRRAMHLFAFQSIRQVSWAREYYDTKRSQGKTHHEALRALANIWVRIIFAMWRSRTCYDEATFMTARARHLNRAA

SEQ ID NO: 200940 - protein, 344 aa, unidentified
MDHFAGLDVSVKETSICIVDDAGKIVREVKVASEPEALLAVLKNPAYHFKRIGLEAGPLSQWLFSALAESGLPVICVETRHMQAVLKAQINKTDRNDARGIAQMMRAGLYRPVHVKTIRSQKLRMLLTHRKLLQSKAIAIENDLRGTLRNFGLKVGMVGKVKFEARIKELVENLPDLAALVEPMLIVRRTLREQIVILHRRLLAIVRDDEVCRRLMTTPGVGPVVALTYRATVDVPARFRKSKAVGAVFGLTCAKYQSGEVDRNGRISRCGDEMMRVMLYEAAQSMLRSKKWSWLKAWAMQIARRRGMKKAIVALARRLAVIMHRIWVDGTEFRWTREQATAAA

SEQ ID NO: 200941 - protein, 346 aa, unidentified
MKYFAGLDVSLEETAICVADENGRIVKEARAASEPQALSEALRTIDLPLERVGLEACSLTAWLHDHLRDDGVNAICIESRQANAAMKTMPNKTDRNDARALAQIMRTGWYRQVHVKSRQCRLWRSLLVARRTVLNEMRSIENVVRAILREAGIKLGTLSRTAFASRVRELADADAQVAAMVEPLLAILATMLAEFVRLTKQVIDIVRKEDVCRRLMSVPGVGPITALTFRATIDRPDRFSRSRAVGAHLGLTPARYQSGETDIVGKVSRCGDELARTALYEAAHSLLVRSKKWSSLRAWGIAIAKRRGMARARIAVARKLAVILHRMWADATEFRYGKESVSAMVA

SEQ ID NO: 200942 - protein, 399 aa, unidentified
MLEQAWAGVDVGKEHHHCVVIDAEGRRLLSRRVANDEAVLLALISDVTGLAGQVRWAVDISTGEAALLLALLAAHDQPVSYLSGHQVNRAAGGYRGSGKTDAKDAAIIADQARMRRDLAPIRVPEEVIVELRMLVARRRDLQSDRVRAVNRLHETLLTISPALEKALDLTNQGPLILLTGYQTPAAIGQLGVTELTEWLRARKVRSAGELATRAVAAAHAQRIALPGEALAAHLAGQLAEGVIALDEQIKHTDKLIEGRFHRHHAAPVILSMPGIGFLLGAEFLAATGGDTAAFATSDRLAGYAGLAPAPRDSGRISGNLYRPKRYNRQLQRVFYTSALISIRCCPESRTFYDRKRAEGKRHNQAVLALARRRVNVLWALLRDHRPYQAGPPVSTAAAA

SEQ ID NO: 200943 - protein, 407 aa, unidentified
MEVVYRCCCGIDVHKKVIVACLVNGGKQELREFGTTTSEIKTLANWLTESGCEMIAMESTGVFWKPLYNLFELMDLDAMIVNAAHMKALPGRKTDVKDAEWIADLLRHGLLKASYIPNREQRELREITRYRKSLTEERCREVNRLQKILEGANIKLDSVVKDITGKSARKLLQRIIDDDIPDSDEVSKLVHGRMRPKLEQIVASIEGITTPLQRKLLAQIIDHIDDLNRRIGELDKLVQEYMAEYEAAIEAIDEIPGIARRSAEVILAEIGLDMGRFPSAAHLCSWAGVCPGNYQSAGRRKHGKTTKGNKALKTILTQCAKSAKTVKSSYFFAQYQRISARRGKNRATLAVAHSMLIAIYHILKNKTAFHDLGSDYYDSFNRDRKINSYLKRLKALGWEPDAISNSA

SEQ ID NO: 200944 - protein, 334 aa, unidentified
MEKITTAGIDLAKRVFALHGVDGAGRVGLRKTVRREQLMQTVAALPPCLIGMEACSGAHEWARRFQELGHTVRLMAPVFVAPYRKSGKNDGNDAEAICEAVSRPNMRFVPVKSAEQQAILALHRVRQGWIAERTATINRIRALLTEFGVVLPNRAQHVRRGAMAAAEALPALARRALEDLRSHLGTLDERIGTYDRELEAQARASEAAQRLMQIRGIGPITAVAIVATVGNARDFESGRQFAAWLGLTPRQHSSGGKQRLGHISRRGDAYLRCLLVQGARSVLYTAVRHHDRLSRWVCTLRARRGDHKTLVAIAAKNARIAWALLAKNQTLQTV

SEQ ID NO: 200945 - protein, 333 aa, unidentified
MLYVGVDAHRSSSQITVVDERGHVLKRKRVPSTGAGVRSALGRYRQPLKSVLEASYCWGPMYDWLDEVSQEVILAHPAKVRAIAEARIKTDKIDSEMLAHLLRADLIPEAYAPSREVRAVKRVLRQRLFLVRVRTMLKNRVTALLAQHGIERPAVSDLFGRKGLAWLQGVDLPWPDDRLLAEDLDLVEVLNARIASTEDLIRDLAEGDEAVGWLKSVPGIGKFFSVLVRYEVDAITRFRSPKKFASYTGLVPSTYASGDRQVHGRLTKQGNKHLRWALVEAVTPAICHSPWLRRYYERIKRRRGAKDARTATARKLAELIWTVWTEGRCYREP

SEQ ID NO: 200946 - protein, 313 aa, unidentified
MDDKIFIGVDVSKDWLDVAHHGGKFDRIDNSTEAIDAWIATLKGRVALVAFEPTGGYERALRKSLLAAGLSFARVHPNEVVAFRAQRGVKAKTDRIDARLLAAFAALELSGRGLAPLVEGDEALREMVTRRRQLVDALQAERCRAALASAEIVRKGLAMIVATIETALDELESAIEAHIDADDDLTQTAKALRSLKGVGPVTVQTLLGELPELGRLNGKEIAALVGLAPKTKESGKRTFRATTGHGRPGVRRVLFNAARAAIRWNPIMKAFYERLVSVNRRPGKVALVAVMRKLLIVLNAIAREKQPWKHATA

SEQ ID NO: 200947 - protein, 471 aa, unidentified
MAADKGKADGSGVPGHGADGAEVAEDSTQVVEYAAAIDVAKGSGMVCTRVPGSRADRRRQKTWPVKATFNEVTALMDHLRAEGIQRLVLESTSDYWRIWYYLAEAAGLEVWLVNARDVKHLPGRGKSDKADCVWLCKLNERGMLRRSFVPPQPVRDLRALTRTRARLAQDQARHQARVEKILEDALLKISVVISDLFGASGRRFLDALVAGERSPAALAALGDERLRATRAELAEALTGRFRDIHAFEIAVHLRLIDAINAEITLLDEQIEQQLALVPGTAPACSACGLAGGGHAPDCDDLGILLLGLADRLDEVTGIGAVNGRAILAELGTDPAQFPTPGHAAGWARLTPRSQQSGETAKPGRTGKGNRYIRGALGQAVMTAAKTDTRLGAMYRRIARKRGKQKAIVAVSRVICEIAWILICDPSARYQELGPDYCQPLSPARQTRAKIREIERLNPGKKVILADAGAAA

SEQ ID NO: 200948 - protein, 312 aa, unidentified
MASLYLGLDVAKASVEFASEPAGLGGQFTTDPSGLAALVTQCQAQPVTLIVLEATGGYEAPVAAALASAGLPVAVVNPRQVRDFARALGRLAKTDRIDAQVLALFGARLQPAPRPLPDAATQELEAVLLRRRQLLEMLHAERQRLPRAHGREVRRNLRAHIRWLERSLVDTDATLATLIQASPLWRVQDQLLQSVPGVGPALARSLLALLPELGHLDRRQIAALVGVAPLAQDSGMQRGRRHCWGGRPALRTVLYMGALVAARWNPVLRPFYQRLRAKGKPAKVALIAVARKLLTILNAMMRDQRAWQTAHA

SEQ ID NO: 200949 - protein, 412 aa, unidentified
MNVRVEKACGIDVHKSFLVATVLTSSGAKETKEFDTGIEDLINLRDWIMERHCQRVAVESTGIYWTPVYTCLEGKVETIVANARQIKNIPGRKTDNLDSEWIAELCLNGQIKPSFIPSKEIRELRDLTRTRTKTIQTMTAFKNRVHKVLQRANIRISGILKDIFGVAGLQILNGILNGKCIDDVLKYVKRIGKKKAQIKEAVRGELSQTDIWLIRECLETIDFLKRKINLLDSMINQHLEKQQKQDQLQILMSIYGISYKSGSAILAEIGDVNVFPHPKNLVGWSGLAPSLNESAGKSSNGHITKKGSKYLRRMLVQCAHVIARGRPSKLRFFYQRILMKKGKKIAIVALARKLLSIIHHLLKNNEKYNEEDPKTKKARIPKFQVISELSLDEMIEIVSKAGYTVDKISQED

SEQ ID NO: 200950 - protein, 418 aa, unidentified
MDVVVQRCAGLDVHRDDVVATVRVPGTGRRRWDQQTRTFSSTLAGLAALGAWLSEFGVTLVGMEATGVYWKTVFQALEDRFECWLLNAHHLRNVPGRKTDVKDSEWICQLVQHGLVRPSFVPPAEIRRLRDLTRLRKAQTNERARSIQRLEKVLQDAGIKLSSVASTTYSKSARAMLEALLAGVTDPEQLAELAKARMRLKIPQLREALASRFQLEHHGVMVAQLLAHIDTLDAAIQNLTERIELALAPHAAVIELLCTIPGVHIHAAQVLIAECGLDMTRFPTVGHFASWAGACPGHHESAGRRRSGRTRPSPRWLTDQLTECARAAVRTKGTYLAAHYAQLRGRRGEPKAIGAIRHDLLVAYHHIVRDQVPFRELGPDWQRKRYSPEHRARRLQRQLEALGYKVNLEQVEQAEQAA

SEQ ID NO: 200951 - protein, 319 aa, unidentified
MREPEVVVGIDVAKVRLDLGVHPSGESWTVEHDEAGIATVVERLVAARPTLVILEATGGLEVAVVAALVAAEVPVQVVNPRQVRDFAKAIGQLAKTDRLDALLLARFGAAIRPTPRPIPDAALQEVRALVARRRQLQAMVIAEKNRRASAPKRLHTQIDEHLAWLRRAVAALDRDLGTTIRSTSAWQTAVSRWRSVPGIGPVVSATLLADLPELGTLTRQQIAALVGVAPLNHDSGAHRGTRSCWGGRAHVRTALYMGTLVATHCNPAIATYYQRLLAAGKPKKLALVACMHTLLTILNALTRNGTRWQAHLPSVNTAA

SEQ ID NO: 200952 - protein, 356 aa, unidentified
MTASYDYHIGVDYHKSYSHLVVQDSGGKTLRSGRVKNDRQSLGSFLERYRENSHAVVEATRNWMVIYDWLDDICDDVVLAHPLKVKAIADAKIKTDKIDATVLAHLLRADLVPEAWAPSERSRDLRVALRERMFYVRLRTMTKNRIVTVFDRYPEQTAQLKTLGDLFGKAGRIQLSQVNVSEIDRIQIDRGLAFIGAINERIKQSEATIRAMTKANPNVRLLKTIPGIGEFFARLIDAEIDDIARFRNPKKLAAYAGLVPSTYSSGGKTYHGKIIKQGNKWLRWAFVEAVTPAIVSDPQLRAQYEHLKIRGTNKARVAMARKLLTIAFQILRDQRAYEPRGESIITEGASMKSRLS

SEQ ID NO: 200953 - protein, 365 aa, unidentified
MYLESKVSHVQENSNHLFVGLDVHKINWSVCIRTREFEHHKFSQPADVAVLDNYLKKRFPEYSVTIAYEAGCFGFSISRLFKERGYNCLVINAADIPGTDKEDKHKNDRSDCRKIARELSNGSLKGIYEPSTSQESFRCMFRQRQSLCSDFRKTKTRIRSFLLCYGIACPQEFERNNWTKAFRVWLGKLALSDPSLRMALDSLLVRYDFFRKEILSIELKLRKYGKTYQDKTFKILKSIPGIGPIVSLAFIAEIGDVNRFNRIDNLCSYIGLVPNIYQSGDTIKVKGITKRSHKILRSYLVESAWTAVRRDPELIEYYKKHTGKMLPNKIIIKVARKLLVRIYYCLKTDCIYELNHNHSSKKVIV

SEQ ID NO: 200954 - protein, 339 aa, unidentified
MFMIGIDPHKGSHTAAAVDRSESVIATLRVEADRDQRQHLLDWAASFEPRTWAVEGATGMGALLAQQLVAAGERVVDVPPKLSSRVRLLDNGRIDKTDPNDARSAAVVAWRTPTLNEVIGVDEHRVVLRLLADRDHQTTAQRTRTICRLHALLCLVIEGGATRSLTVDRAEKMLATVIADDPVSRARVVAAGEFLDEINTLDAVRKDVRRRTAVAVKASASTVTDVYGIGPMMAAIIIGHTGDVRRFPTAGHYARHNGTAPIEASSGPNKRHRLNQRGDRQLNHAMHMAAVTQVGHDTPGRIYFLRKRAEGKSSKEAMRALKRQISDAAYHRLLTDATR

SEQ ID NO: 200955 - protein, 463 aa, unidentified
MQTRPLEAVAGFASVSGSSAHLWVERRDEVPTRPAMPQGSGMQGATLAHVTTSTIDPTLTEAAATEVFAGIDWGGSFHQICLIDEDGKVLRQQRVPHNAAGFDELDRLLTCHRARLRVAIERAEGLLVEHLHLLGVEIFCVSPKISARARERCRMAAAKSDAFDAFVLADTLRHEHRHWRALTPPSPVLAELRAISRDRDRIVIAQQATENRLRAVLEAYHPAPLHLFSTLDRDITLDFITDYPTPEQAGRVGTARMDGFCRRHGYSGRTQPEVLVERLRPHLLSAGEGTAAGKAFSANLFTEQLRMLNTHLRAYDKRLDELLERHPDTPIFTSFPGVGPVVAATLISEMGEDRHRFPAPGALLAEAGLSPVTRASGRTRQVRFRYASNRRMRHMIDWWMFTAIREDDWTRQAYDHARARGQGKYRALRGLGSRWTRILWRCWTDHTRYDPAIHHRNPEPTTA

SEQ ID NO: 200956 - protein, 316 aa, unidentified
MTTNAVVVGVDVAKDRLDVAVRPSGETWSVANDEAGITALVARLRPLGPALLVCEATGGFERAAIAALAAAGLPVVVANPRQVRDFARATGQLAKTDQLDAAILALFAERVRPTPRPLPDAAAQLLDAVLTRRRQLLEMLVAEKNRLGFAPKPVHRGIQAHIRWLERQLDDVTKELAALIEASPVWRAKDDLLQSVPGVGPIVSYTLLGELPELGTLSHKQIAALVGVAPLARDSGTLRGKRLVWGGRASVRTALFMAAMCGRRWNPTLKVFYERLKAAGKPTKVALIACARKLLTILNAMLRDQSRWTPNLQYSC

SEQ ID NO: 200957 - protein, 326 aa, unidentified
MQGKEASEQETKVQCNVGIDISKCWLDAHVLPGDDRLRVANNCAGIRQLKRWLSHYRIALVAIEATGKWHRHLHRSLVASAVPVAIVDPYRVRMFAKAQGILAKTDQLDARVLALFAAMMAPPVRPVAPQTMAELAELVVARASAVEAQAALKNQFAAAESTFLKRQLDRRISRAGKDIPALDREILKRIKADASLARRYAVLTSIPSFGFAVAATLIACLAEIGSATAKQIGMLAGLAPVADQSGDRDGVRVIWGGRPAVRRVLYLAALSASRFNADMKAFYKRLIDNGKPSKVALIAVARKLVVLANTLVSEDRTWQPRAPILA

SEQ ID NO: 200958 - protein, 315 aa, unidentified
MGKGLFVGVDVSKDSLDVAIRPGGQNATFANEDKGIGTLVAKLLEVGPERILVEATGGYEMVLVAALAAARLPVVVANPRQVRDFAKAKGRWAKTDRIDADVLAAFGEAIQTEVRPIPDAAARELAGLVARRSQLIGMRTAEKNRLSMAGRAVAPQIGKHVRWLDAEIRKLDQKIETKLRSNEVLRQKLELIDGVPGIGPVTSAILLVQMPELGQLNRRQIAALAGLAPFNRDSGQQRGVRMIWGGRTPVRNALYMATLSAIRHNPSIRPVYQRLRQAGKKKMVAFTACMRKLLVILNAMIRDRASWRGTAAQNT

SEQ ID NO: 200959 - protein, 319 aa, unidentified
MTNVNVFTGFDVSKDSIDFFSIGGSGKSGGQKVAYTKEGLKSLSRKVPLGSHCVLEATGPYHLKLATWLYQQGYAVSVVNPLVIKRFTQMRLVRAKTDKADAQMIAAYAQTERPPLWQPPARYIIELGHMETTIEMHIKHRTALKNQLEAFEATGMIAPAIRSSLKKSIAQLEKTIQDLEGRMEEIIENEHNAMMKNLTSIPGVGKKTAIALIVATGGFTRFDSHKKLSAYLGLCPRIYESGSSVKGKARICKLGMSRIRAMLYMCSWSAIKANVACKELYDRLLEKGKAKMLALIAVANKLLRQAFAIAKNGVQYQPI

SEQ ID NO: 200960 - protein, 421 aa, unidentified
MQVLYERCAGVDIGKDVIAVAVRLPGDGSDGRKTIKRMFETFYGVLRECARWLTDHGVTHVAMEATGIYSMPVYHALLAHGEFEQVLVCNAGHVKNVPGRKSDLSDAEWLAHLLECGLLRGSFIPSAEIKAARDVIRYRAKLTESRTSELSRLGNVLQDAGIKADSVASSITTKSVRAMVEALIDGERRPTVLAELARGRMRSKIPDLQRALEGRFDDHHALMCRLHLEHLDHLDAMLAKLDFQVEQMMRPFRPQRDLIMSIPGFGVRASAAVVSEIGADPAAWFPSAEQLASWAGLCPGNHESAGKRRHGRRRKGNQHLQPVLVECAWAAVRTDGFLREFYRRQVRKFGGFRSPAAKQKAIIAVAHKLIVILWHVLATGRPYEDLGADYFTARIDPEKERRRLVAKLEAQGFKVTLEPAA

SEQ ID NO: 200961 - protein, 382 aa, unidentified
MNELHPSNQSPVPLRLPVPFRILSMRLIKGHSKATKSGPLKRNKGMKKVDFVGIDISKDYIDCALLNADQPGSFKDKKVENSLEGFDAMEQWLLKNNIQIKENCLFCMEHTGTYGLLLIAWLNQKDFDLCVEPGLKIKRSMGMTRGKNDKVDARRIADYSFTNVTKLKLFSVPAEEIVYIKQLLTYREQLVRTRTSFKNSLKSHQQYEQITKRKNVTDDINKLIKDHKMRIKEIEKEIINAIESNQKLRKNFELATSVTGIGLVIAAFMLVTTNNFSSFEDGRSYACYTGVAPFEHTSGTSIRGRTSVSHLANKRVKTMLSRGANSAVNWDPELKVYYKRKIEEGKDHKVVINAISCKLINRVFAVVKRQTPFVITYQQKIA

SEQ ID NO: 200962 - protein, 325 aa, unidentified
MIDQDGQVLANRNVPNGAEPILKVIGGLPLGTPAAFEACYGTSWLVELLEDYGFAPHLVHPSRCKAIASARLKNDKVDAAILGQLLRADLLPEAWIAPPPVRALRALLRHRVYLVRLRTRLRNRIHAIVADYGYDRPAGGYWTGPGRAWLAALELAAVSRELVEDYLGLIDALQQRIDRLDWEIRQRARSDPRVTVLTQLPGVGPFTALVILAEVGDVSRFASARQLASWAGLTPTVRGSDRVAHYGHISKEGSVWLRWVLCEAAQTAKRHPEFAPAFQRIAKRRGKKIAATAIARKLLTHAWHLLTKTDQAAAPQPAAPQTAAR

SEQ ID NO: 200963 - protein, 373 aa, unidentified
MPKYSTAFGMDVHLRSTTVCALDADTGEAVTRRFPGNPWGEIAAWMDGFPGPSLAAYESGYLGFAPQRELAGLGVECVVAAVSKIPRSAADSASKNDRNDAARMAKAILAHDISPVWVPSPEVEGIRDLAGAYDGATARLATAKQRLLAFLAKRGFAYGGTTPAGNPRKYWTYDFLRWLDKVRPEDDGGVRTLAALRNEVEAAAEARADLLSEYRAAVDASPIAAEVAALQSIKGCAFALAAAFSAEVGDFTRFRSGRQVTAYFGLAPSQRSSGDSVRLGGISGAGNALVRKLAVEGSWCYAAARHQPKLMPRDTGVPLEIRMHGRKGSERLLRRREEMLARGMPAAKANAATAAELVRWLWALGMMCREGAE

SEQ ID NO: 200964 - protein, 408 aa, unidentified
MNTLYVGIDVSSKSNVVYLMLPNGDKHSNFSVTNSHEGSTQLVKRILSALTSHSLDTVLIGLEATSIYGYNLVYFLREDATLAPFNRKIHVLNPKQVKKFHDAYNDLPKNDYVDSFVIADCLRFGRINKEVYMGDYRYKALQNLTRARFFAVQNLVKEKQRFMNVLFKKYSTMTQEKVFSDTFSTTALAVYDEFESAEALANMDLHELTDFIIEKGKNRFPDPDAVAKAIQKAARSSYRLPKTVNDSVNQVLSISITSMKALESQIKEFDKAIKAQMELLPNVLISIPGIGPVYSAGIMAEIGDINRFNSQAALAKYAGLAWKQHQSGGFESEVTRLIPSGNRFLKYYLCEAAFSLVRCDKEYSDFYHLKYKEVNRCQHKRALALTARKFVRLVFRLLKDNRLYCPAK

SEQ ID NO: 200965 - protein, 343 aa, unidentified
MSNLDTCGIEVSAKKLVVRMRRQEDLEPLRNFPNTPEGHGMILRYLPRAGRVVRVCLESTGLYGLDLALALSEQEGIEVMVANPRAVRHFAHALMRRSKNDPLDAGVLEEFAARMPFQPWVRPSPTALALHALARRLRELVEMQTAEKNRQHAAGLSQAIPAVVRRDLARSLRAQERALQRLTRQARQLIAQDPQMTERFALLDSVPGIGETSAVQLLGELGVLAPDLEARQWVAYAGLDPREYTSGSSLHKKPRLSKAGNKHLRHALFMPALVAVQHDPHLGAFYRHLLAKGKFKMQALVAVMRKLLHALHAMFKTHQPYDGSQLFRLNSPAQEVTHAPVAS

SEQ ID NO: 200966 - protein, 346 aa, unidentified
MTSTAAAVIGGVDTHADVHVAAACDQLGAVLGTQSFPTTAAGYRKLLAWLRTFGEVAVVGVEGTGSYGVGLTRFLLEAGVELREVSRPSRQTRRRHGKSDVVDAIAAARAVINGDAKARPKSHDGGVEALRTLKIVHRSANKARTQALNQIRDIITTAPDELRAELRGLRRRELLAVCAAFRPGDRDDLLAITKLALRTLARRVTELDEEMTQLNTRRRRITTAVAPALVAAHGIGPDTATALLLAAGDNPDRLGNERSWAKLLAASPLPASSGKTIRHRLNPGGDRHGNSALWRIIIVRMANDPRTKAYVERRTKEGLSKAEIIRCLKRYVARETYSLLPRELLV

SEQ ID NO: 200967 - protein, 359 aa, unidentified
MIKNSMFFVGLDLGDRFSYITIVDQDGELIEETRLPTTKASFERKFASFQPCRVAMEVGTHSRWASHLLRELGHDVLVANARKLRAIYHNPRKGDRADAETLARLARLDPELLSPIHHRSPEAQADLAVLRSRDAIVRSRTLLINHVRGIVKSSGARLPSCSADSFAHKAAPAIPERLRTALLPILETIGSLTHQIHKFDEQIERLCQDQYPETKLLRAVSGVGALTALGYILTLETPDRFRRSREVGPALGLVPRRDQSGDQDPQLRITKTGDAYLRRLLVGSAQYILGPFGPDCDLRRWGLKLAERGGKNAKKRAVVAVARKLAVLLHHLWKTGEIYDPFYLARKHDRATEAVPAAA

SEQ ID NO: 200968 - protein, 345 aa, unidentified
MEPMYYIGLDVHKRKISYCVKDGSGQIYAEGSIPATRWDLDRWMKTLPQPWTAAMEATMFTGWIYDHLKPHAAALKVAHPLMLRAIAAAKKKNDRIDAKKICDCLRCDFLPECYMASTAIRERRRTLRYRNLLVRQMVQMKNKIGMLLMEAGVSYNKQRLHKAGYFRELLATNQDIDEGLQSLLRLCRETVVRLQRTESALVRSLERDSLLVERVERLMTIPAVGPITALAWALEVGDVERFSSIKKAISYCGLCGAEKSSGNTVQHTPLSKQRNKHLQTTLIEAAKMAPRNSSELAMLYDKEKQKGNANRATLAVARKLVAYLMAVDRGQRNFQVVETNNGIAA

SEQ ID NO: 200969 - protein, 309 aa, unidentified
MPKNNYIGADLSKLEIVADLAAPASPRAFPNTEKGHAELIAALPAGAHLICESTGGYQRGLVHALQQAGIPVSVVMPRRVRAFARASGLRAKTDKIDARLLSAFGAAMQLPAARTPEPAQERLKQLLRTRTVLIGQLNDEASHAEHCTDSLLLALAKARVALLKTQCRQIECAIKALIAETDRWQARCERIQKVQGIGPINAWTLLAELPELGTLERGQPGALIGAAPDPDDSGPRHGKRHISGGRPQVRKTLYMAALTASRKNPVLSVFYQRLIKNGKPPRLALTAVMRKLAELINLLLKNPNFVLAS

SEQ ID NO: 200970 - protein, 423 aa, unidentified
MSQKQPEIQYAAFLAIDWADQKHVWSLQEANSSTRLRGEVDHMPEAVETWVAQMSQRFAGRPIAVAVEQSRGALVFLLSKYEQLQIFPVPPAMTANLRKAFYSSGAKNDPSDADLLLDLLQRHREKLRRLSPDTEATRRIQNLVEERRKLVDEKTAQSNRLEAHLKIYFPQIPRWFGDVDIPLVCALLERWPTLEALQKARPDTLRSFFRKQHSRKEELIESRIKAIGEAMPALKDRAVVEAKVAVVKVLVQLIQVLHEGIEGLNRQIQEAAEAHPDFFIFDSLPGAGAVMAPRLLAAFGSQRERYQNAAEVQIFSGIAPVSESSGKSSWVHFRFACSKFLRQSFHEWAALSITQSQWARAYYELQRRRGKKHHAAVRALAFKWIRIIYRCWKEQVAYDENVYLAALAKHNSPLVAATKAVAL

SEQ ID NO: 200971 - protein, 441 aa, unidentified
MAMRKRELTVMHPNAAGIDIGSANHYAAVAPDQSKEPVKEFGCFTEDIEAMADWLIECGVDVVAMESTGVYWIAPYEILESRGLIVYLVNARHVRHVSGRKSDVLDCQWLQQLMSFGLLSGAFRPVGEICALRAISRQRDTLLNEQARQVQRMQKALTQMNVQLTNVIADIVGKTGQDIIRAIVAGERDPHKLAKLRNYRIHASAETIAKSLEGNWREEHVFCLSQALSLFDAYQALIVAVDAKLEEMIKPMRQHQEALAANKNKGRGKNAPTFDARNALYQWVGVDLTRIGGIDVSTALKVLVEIGPDLSKFENAKRFASWLGLCPGTKISGGKKLSSASKRIPNRVAQALKLAAQGLHRSHCALGAYYRRMAARMGVGKAITATAHKLARLIFAMLTKGGEYVERSQEQYENQMHKRTVAYLKRKAAAFGFTMQPINAV

SEQ ID NO: 200972 - protein, 312 aa, unidentified
MENLSYGGIDVSKDRLDVVVLPEGWFFSVSNDTAGWAELVARLRPLAVCAIGLEPSGGYERGIIRALLAAGLSVRRINPNKLRQFARARGVLAKNDRLDARLIAEYVAIMPTRVVQRDDAVERLAEIVTMRRQLCDEHVAVENQAGHLEDVMLRRLSKRRLIRLEADIRLLDKRLTEMVATNAAFAQLYELLTSMPGVGPVLAFTLIALLPELGKMSRKQIAALVGLAPYDFDSGKLRGHRSIYGGRMPIRNVLYMAALSASRYNPALRAFSNRLADANKKSKVIIVAVMRKMITTLNAMLRDNAAWQPQSN

SEQ ID NO: 200973 - protein, 407 aa, unidentified
MPDYDWYVGVDWGGERHQVAILDATGARVAEHQVAHSGAGRESLVEHLARLGADPGRVAVAIEVPRGPVVDTLLMRGYHVFALNPKQLDRFRDRYSVAGAKDDRREALVAASALRTDQLAFRQLQPDDPQVIRLRELSRTYDELLGEERRLANQLREQLWRYYPQALPHCPGADESWLWELLHEAPTPAHAQRFTRPALRALLARYRLRRITGDMLYETLQARSVTLTPGAAEAAAEHVELLLPRLRLVHEQRQQWERRMDALLDALGPPVEGRQEHRDVTILRSLPGVGRVVAATMLAEAWGLLAARDYQSLRAQSGVAPSTQQSGKQRLVLMRRSCNHRLRTAVFHWARNSVRLDPRCRAQYQRLRQRHSQARALRSVADRLLSVLVAMLCSGTTYDVTRCPNAA

SEQ ID NO: 200974 - protein, 343 aa, unidentified
MKITTIGLDLAKRWFQAHGVDAGGQVVVRRKLRRNEVIAWFQSLEPCLVGVEACATAHYWARELTKLGHTVKLMPPAYVKAYVKRNKNDVADAEAICEAVTRPTMRFVPKKTVDQQAVLMLHRARGLLVRQRTMLVNALRAHMAEFGIIAPRGLHHVEGLTKEIAREQARLPDLARDILQTIIDHLRDTMKRVHAIEAKLTRWHKKSQPSRLLATIPGIGIMGATAIAATVSDPSLFRSGREFAAWLGMTPGQNSSGGKERLGRTTKRGDKYIRCLLVAGAVAVLRHTRNRKTKDAAWVRGLLARRPTKVAAVALANKSARIAWAVMTRGEAYRATNEIVQAA

SEQ ID NO: 200975 - protein, 366 aa, unidentified
MAVYCGIDWAEGHHDIALVDSDGTLVAKRRISESADGFAELTAMLAAAGDSAADPVPVAIETPRGLLVAVLRATGRPVYPVNPLAVARYRGRTCVSGKKSDRADAMALANILRTDAHLHRTLPADSGLARSITVLARGYQDAVWRRTKLVQELRARLREYYPGFLAAFASPGAGRRLSTTQLASADARAVLAIAPSPAEGLKVSRARVEAALRSGGRQRRVSTLAASIVAALRMPQLRQEPVVEQAMRTEILALLGVFNAVCESAGLLAAALAEAFRRHPDYQVITSFPGLADVSGAIVLAEIGDDRDRFSDDRALQAFAGSAPVTRASGKSHTVTRRRTKNNRLAAAGYSWAFTAASRPSPAREH

SEQ ID NO: 200976 - protein, 364 aa, unidentified
MAQGRGAEAQSNPVLQGVNMPVAEVDTFAGIDVSAHELSVALRRGQGHDKPAMAKFPNHPSGHKALVAYLLRGGGRVRVCLEASGNYSLDLALTLQAHRQVEISVINPRRARRFAESLGERSKTDPVDARVLCEYAARMPWVRWQPPSPVALHLRALTRAIADLGVIHTQQNNRAYAAAASQALPVLVVKEMQRHKKYLEQRMTRLRREAVRLIACDPELDRRFRLMLTTIGIAETSALQILGELAVLPDMLDARQWVAFSGLDPRLFKSGKSVEKRPRISRSGSRHLRRALYMPALVALRRDPYLRVFYQNLLARGKARLQAVVAVMRKLLHALFAMFRSNQPYDGSKLCAVDLAVHAIAACA

SEQ ID NO: 200977 - protein, 334 aa, unidentified
MSIVSTVGIDLAKNVFSVHGVDVRGVVLIRRTVARAKLAQLVAQLPPCLIGMEACSGAHEWARRFAAFGHIAKLMAPKFVTPYRKSGKNDGNDAEAICEAVARPNMRFVPIKSIEQQADLTLHRVRQGYVEERTAMLNRIRGLLAEFGHVLPLRAAEVRRRVPELLEKLPTRVANCVRDLLEHAVRLEAKVLEYEREIRAHVRTNALAQRAQTRLGIGPITASALVATIGNAHDFKNGRQFAAWLGLVPRQYSTGGKTRLGHITKRGDPYLRTLLVLGARAVLQGALRLNDPLSRWALALQQRRGYHRACVAIAAKNARIAWALLAKDTVIAAA

SEQ ID NO: 200978 - protein, 393 aa, unidentified
MNKIVHYLGLDVHKETIAVAIAPQNTTEVRCYGIIGGAIEAVDKLVKKLSAENVELRFVYEAGPCGFVIHRYLKSKGIRCDVVSPSLIPKKASDRVKTDRRDAEQLARLYRAGELRAIHVPDQEDEAIRDLIRARTAAVCDQRQARNRLKGFLLRLGFRYSGKTSWNDAHKRYLSGLLMPQPAQQIVFQECIHAIDDASQRLERLTQAVEDALPGWKWEPVVRALMSLRGVQVLNGMTLVAEAGDMTRFTDPKELMSFFGLTSSEHSSGRKRRQGGITKCGNGHCRRVLTEAAWHYRLKPQVSEAMQKRQEKQSKAVRVIAWKAQQRLHKRFRSLSVRKKSVVVVTAIARELTGFVWAIARQVKVPEPSSAPEIIRTAHGRVYVLDPKKTYKK

SEQ ID NO: 200979 - protein, 312 aa, unidentified
MIQQGYGGIDVSKDRLDVMVLPERQFFSVENSTAGCGELVQRLRGWSVATVGLEPSGGYERGVIRALLAAGLSVRRINPNKLRQFARARGVLAKNDHLDARLIAEYVAIMPTRVVQCDPVTERLAEVVTMRRQLCDEHVAVENQTAHLEDAMLRRLNKRRLARLEADILLLDRRMAEIVASNASLARRYELLTSMRGVGPTLAFSLIALLPELGQMGRKQIAALVGLAPYDFDSGRLKGHRCIYGGRLPVRNVLYMAALSACRYNPALTAFHLRLADANKKPKVRIVAVMRKMIVILNAMLRDNVAWQPNST

SEQ ID NO: 200980 - protein, 329 aa, unidentified
MFYLGIDIAKAKIDCCLILEDSAGKKKTKTFPNMPKGFEQLQAWLNHHAAGPAQAIALMEATSVYHERLAGHLFDAGCQVCVANPARARYFAQSMSKLNKTDKADSEVLARLAMTADLHFWQPLPGHIQLLNALLDRRAVLGEDLQREENRLEKAESTFTIEPVLQSIHKNIKQLSRHIQDLDRQIDDHIDQHPDLKNDKALLSSIPAIADRTSLLMLSFLRSHAFERASQAAAFAGLVPIQRQSGSSIHGRSRLSKAGPSKIRAGLYMAAIVATRHNPHIKGMNERLLANGKTKMMAVGAAMRKLIHLCYGVLKHQRPYQENYCANSQ

SEQ ID NO: 200981 - protein, 391 aa, unidentified
MSMYFLGIDISKYKHDCCIISAADQQVVSKFVIRNDKDGFNELLKTLNSLSSPKDIKIGFESTSHYALNLELFLEKAHHSFMEVNPVLISEYKKSTTLRRTKTDRVDCESIARWLMTVEYKPHPNGFYHAYSLKSLTRLRDRLIRQRSLYLVKLTNVLDHTFPEFKPFFGERFSKTAFYLLETYGTAEKMSRMNSASYEKIHVLSRGKFSPQQFLALKEMAANTVGVSNEIFETELTCLLTLYKGIAEQVDCLETKIVELISEIRPHYISIPGVGPISAAVIYAEFGDVSNFSSPAQMLAFAGLEPGVNDSGTESHGGRMVKRGSSHLRYVLMNCALPLIRFDITFATYYAKKRAEGKPHRVAMSHVAKKLVRVIFALERKKTDFVTAALR

SEQ ID NO: 200982 - protein, 357 aa, unidentified
MEKLYLGVDLHKRSCWVTVLDAHGQVIESRKLGTEKWELLGYFKQVRKPAAVAVEATFNWYYFLNVVEPLGLELHLVHPWKTRAIASARIKHDKLDSRVLAELLRTGFLAEAWIAPREVRERRQLLRYRVHTVQWATRSKNCVHAILNRNGIRSPLRSPFGPKGRGFLEAVELPSTDRWEVDGQLTRLDLLRQQLAALDREIRQRSKTSPVAQALEQIPGIGSFIAQLLIAEIGDIQRFPTAKHLASYTGLVPSLYASGEHRWAGAITKQGSTILRWALVQAAHRAAISPQFQNYHQRQRERHGAGKATVALARKLAVIVYYRWRSVLHAAGPPRVEQVRERSCAGAWSEDRPYRSD

SEQ ID NO: 200983 - protein, 350 aa, unidentified
MIIIGCDYHPGFQQIAYVNTDTGDLSEERLGHKEQAEQFYQGLRTRGLTVRVGMEASGHARWFERLLDELQIELWIGDAAAVRTKRVRKQKTDRQDAQLLLRLLVENCFPRIWMPDAENRDLRQLLWHRHRLVQMRTRVMNQLHVVALNEGLRRKKALWRPAGRAQLESLALAPWASRRRQDLLDLLDQFTPKILELTRRLQEVVEKRPVARRLQTHPGVGPLTALAFELVIGTPERFQCAKQIASYVGLVPSEESSGDRRRLGHISKQGNALLRFLLVEAAQVTVRSDPQWRSQFFHLAMRRGRKIAKVAMARKLAVELYWMWRRGWDDNKMQQLGSHAGEPGNRHGVQ

SEQ ID NO: 200984 - protein, 435 aa, unidentified
MEEVTDEPLYRDRVCGIDIGKAGMAVTIRVPSDKDPSRRMSETREFGTTRREVLALADWLRCWQVPAVVMEATSDYWKPVFYRLEAEGLECVLADARQVKNLPGRPKRDPSDSRWLAACFERGSVTSCFVATPEFRLIRLHTRYRRDLTDDRTREKNRAEKLLEDAAIKISSVVTDLHGVTGRDIMDHLIAGERNPKVLAQLARARARRKITELEHALEGAEFFTGAHAALLKGMLERIDRMDTEIARLSQVIEQLLAPYEEQLEQAASMPGWGRRAAQDAIAETGPDMTRFPTPAHLASWAGRVPLDNQSGKRKGPGKRKKGNRYLGAITGETAASAGRTDTREGARYRKLARSRGKAKACVALGNTQMRVYHVLLSSPGMRYQDLGPDYYEHHRATARQVSHHVGKLSSLGYEVTLCRRPEPGTAQTQDTLTA

SEQ ID NO: 200985 - protein, 432 aa, unidentified
MRRTRRHTVAACVRTRGPSGERVQEIHTFGTTTVELLALRDWLTAHRVSLVGMESTGIYWRCVYYVLEDALQCWLLNARHLRNVPGRKTDVKDAEWICQLVEHGLARPSFVPPKPIRELRNLTRYRKAQIEERTREAQRLEKILEDAGVKLSSVATDILGVSGRAMLTALVQGTRDPDVVSDLARGQLRTKIPQLKHALAGRFGAHHALLVGMILSHLEFLDEAIEHLSTEIEEVIAPFEAEVELLTTIPGVARRTAESIVAEIGVDMSRFGSSARLASWAGMCPGNNESAGKHRSGKTRKGSKWVRTALIESARAASRSKGTYLSAQYHRLRGRRGSSRATVAVGHSILVAAFHILDRVQPYSDLGADYFVHRHDPQRHANKLVRQLRALGYGRHPPTREGGVAGRGHFHHRCTLQVSCWTGGHGSSAGKP

SEQ ID NO: 200986 - protein, 341 aa, unidentified
MGQAHTIGLDIAKRVFQAHGADASGRVVFRKRLVRAKVLAFFAAQPPCTVAMEACAGAHHWARELGKLGHTVRLIPPAYVKPYVKRHKNDRADAEAICEAAQRPSMRFVPVKTEEQQANGVVFRARDLLVRQRTQCINALRGHLSEYGYIFPQGITHADAVIAHVEDPDSAVPESARAVLTVLIGTFQALEAQIQALDAEITQRAKADPVARRLMTIPGIGPIAATAITALVPAPEGFRAGRDFAAWLGLTPLQTSTGGKQKLGAISKMGERTIRRLLILGASAVVRWAGQRGTPAGSWLARMLARKPKMLVTVALANKTARIVWALLVKGGVYRAPAPAA

SEQ ID NO: 200987 - protein, 406 aa, unidentified
MSQQDCYVKVAAMGLDVHYKFSSVTMRDAQGRVVGRERLEHADRQALRERLASWPKGVPAVVEASFGWGWLSDEMTAAGLDVQLSNCYKVEKMRQARGLCKTNKKDADLLSMLPREAEPWWKVWLVPPEVREQREWMRYRADLVGVQTQAKSRICAVFHRHGIFHDFSDLFGGKGRALLTELCRQGQHAGGVLAPGALTALRGHVRLLDHVRTQLAEVARKLRNDLQHDELTRRLAGIPGFGLILSHVLKSEIGQIERFGGNHNRLACYSLLGPKAEDTGEEDPSKSPLGRHLGRRGNRTLKWAFIEAAHGAVRHGGRWRAMFDRVTKGGKMDRNRGYIRVARELVAVVTAIWKNGTTYQETPPSRPGSPKASVAPSRRELLEKFMSNTRSGTGQPYPPMVPAAKA

SEQ ID NO: 200988 - protein, 388 aa, unidentified
MPAAETPVAYLGIDVGKSSHSACALDAGGGVAFRAELANRPDDIDRVLERAGSGALVVVDQKRNIGALVLARAHAHGNPCAYLPGYAEKQARGMFPGIAKTDAIDAEVIARTALGVPRALRPAPEEPEGTASLRILSSQREFASSARTRAKNRLRATLLEADPALEGAVDPSSRWQVSMLAEFGGAAGCSAAGWRRFSSAARRAGAPAAGARRLWEALLASSRSGRRLPAGEDVAVRMLAREIASLDADIEELDSLVADSLAGDEVYECLLTVPGIGPKTAAALVTSIDISAFRGHDELASYCGVAPSDRRSGSSIRSTSPQHGGNRQLKNLLIFSCNSLIGTDNRFGRYYGECRARGMRHSKALKAVARKRLKVIYAIMRDAVPYAA

SEQ ID NO: 200989 - protein, 343 aa, unidentified
MLYLGVDVHKRSCWVTVLDADGQEREQRKLGMEKETLLGYFGKIHKPAKVAVEATFNWYYFLNVIESLGLELHLVHPQKTKAIASARIKHDKLDSRVLARLLHAGFIAEAWIAPRPVRELRQLVRFRTRTVRWATRAKNGVHGVLNRQGISSPVESLFGPKGRRFLGEVELRELDRWEVNDQLERLDLLAEQIRELDQEIRQRGQASAVARALEEIPGIGPFIALLLVAEIGDLSRFPTAKHLVSYLGLAPSLYASGERRWTGEITKQGSSLLRWALVQAAHVAARSPQFVGFYERLRERHGTAKAAVALARKLATISYYRWRAAEVRRSPQAVITSSGVHLG

SEQ ID NO: 200990 - protein, 345 aa, unidentified
MEIMNYIGLDIHKKTIRFCVKLADGSVVREGELAANRAALDAWMSTLPRPWTAAMEATLFTSWVYEHLKPHAHAVKVANPSMLKAIAAGKHKNDRLDASKIADSLRANLLPECYMAPLELRELRRVLRYRNLLVSQVTQTKNKVSSLLMEAGIEYNKQKLHQKSYFRELLKSAGQMPESLPPLLKLSRSTLDSFGRMEQQLVRGLQKDPALCARVERLLTIPGVGPITALTWALETGEAARFHSIKQAVSYCGLCSAEVSSGGKQQRMPISKQRNHHLQRVLVEAAKLAPRYNPELAALHAREEQRGNRNRATLAVARKLVAFLLAVDRRQEGFRRAVKMQQPAA

SEQ ID NO: 200991 - protein, 340 aa, unidentified
MKVRTLGIDLAKNVFSVHGVDDRGKTAVHRELRRRQLLPFMRQLQPCLVGMEACGGAHYWAREMAKLGHEVRLMSPQFVRPYVKSNKNDARDAEAICEAVGRPTMRFVAIKSQSQQDMMALHRVRSLLIRERTALMNEMRGLLAECGVIAALGASALRRLIATILAEPDDRVSSLLREILSEMNERLRLFEERLKHYDLQIAEFARTDERAGRLMAVQGVGPLTATALIAAVGDARQFRSGRELSAWLGLVPRQHSSGERVMLLGISKRGDRYLRTLLIHGARTTLRHARRKHDPCSRWVVTLREQRGPNIATVALANKNARVLWALLTRGEEYRIPVAA

SEQ ID NO: 200992 - protein, 333 aa, unidentified
MKKYLFYVGIDVSKAKLDINILDALTLKSEHFIIENNIKSVSVFIKKLEGKVDKKYTLFCCENTGVYTNHLSGVLVKLNLDLWIVPAIEIKKAKGISRGKNDKTDAKDISYYSYRNIDKLKLFTFASIDIQKLKILYTEREKMLKALLLIQATKESKAFTDKIIFKEVSQINQTLVKSIKNSIHKIESKIKEVIKANDQLTKQAQLIKSIPGLGEQTSVYLIIATKGFTAFKNWRQFACYSGVAPFEHSSGSSVKGRTRVNHMADKKMKSLLQMCAMTTLKYDPQLKEYYNKKKVEGKNSMLVLNNIRCKLISRVFAVINRETPYINTYKFAS

SEQ ID NO: 200993 - protein, 326 aa, unidentified
MNAKNDPVYVGVDVAKATLQVHLREAQIEFKNTPAGHAELRQKLQSIAGAHVVCEATGGYEQALVQSLNQVEIPVSVINPAQVRASAQAKGQRAKNDPIDARMLTDYGQRYRPAPTPPVSKVQRQLVALTQWLKQLIEAQAVAKTQAEHHTEAFVRKQHQALIEHYGSQIEATEAQIKKLMEQDPVLKQRVECLDAIEGVGLRTAVLLLTHMPELGQLNRQQVAALAGLAPWTRDSGTMKGKRCIGGGRPEVRVALYMASLSVVRCNPILRAFYERLVGRGKLKKVALTAVMRKLLIYMNHQLKSLASQSASTEEQKKSQQKNSQI

SEQ ID NO: 200994 - protein, 363 aa, unidentified
MSKTPDRVVIAVDPHKASWTAAAVNASLRPLDIIRVPVSRDGYRALRRFARRWPDPTWAIEGASGLGAPLTARLRADGADVVDVPAKLAARVRMLSTGHGRKNDDADAVSVGIAALSARTLNTAAVHATVTALRAVVEHRDDLVKTRTQTINRLHVLLTHLVPAGARRELTADQAAELLRGVRPHDAAGKALRGLAADLVAEIRQLDRYIAKAAANIQTAVSASGTTLTELSGIGTLTAGKILGRVGTIKRFRSAAAFATYTGTAPIDVSSGDVIRHRLSRAGDRQLNLCLHVMALTQIRQDTPGRAYYQRKRAAGKSHKEAMRCLKRRLSDVVYRQLVRDETRLEAGPGGHSGAALLSSAAS

SEQ ID NO: 200995 - protein, 405 aa, unidentified
MQTIIAFDVSMGKSYMVIYQNGQCVEEKEIQHNKKDFQALHVTIQSLFMRYGQYPEIVFEATGVYSKVLESFMQANQYPYYLLNPLEAKQQCDRLRVHKTDRSDAHRLAQTHLTSNRKPKVFESTEYQQLRVLSRFYEEIDKEIILIKNRLHNALQLTFPELASIFPNQNSALYLNVLLLFPHPELVLSCSRTVLKNKLLANTKKNLSSERALKKAEELVRIASSSYPAVTLEDVTVSKVRYYAEKISHLLCKKQEIIEEMEALALPLPEYDILRQIPGIGSSSAVRFIAEAGDVRRFTTSRELNAYAGIDIRRYQSGKTFYSDHINKRGNPKLRKLLYLMIQNMLKKQQNTPNHIVHYYYKQKEEPYNKCHKVASVACINKLLKTIHYLTKTNQMYDYSLATTS

SEQ ID NO: 200996 - protein, 451 aa, unidentified
MPREGHRIRSTMNRVIVTSAFATKEKESQNMKSWNQVTYFVGFDWAKDHHDVIVLDRAGKIVLEFRFDHTASGWTLCQEKLAPFAPLAIAVEAGHSAAIERLVSLDYWVYPVHPRSSKSYRTRKRPSGTKTDLIDCWALADALRLEGESWRVLTAPEPLVQQLRLLCRDEVTLIEQRTALINQLQQALYEYYPTALEAFDDWCAPSAWAFVETFPTPQALVQAGKRRWEKFLHTHKLYHPQTNQKRLELFAKAEQFCGTHAAIAAKSVLAVALAKLLQTLERQLTCFRLQITECFKKHPDYAVFHSLPGAGPKLAPRLLGELVALKPLADMPQALQCLAGVAPVSYQSGKVSVVYLRHQCNRFLRHTIHLWVDISRHYCDWAGIYYAAHRKKGQSHACALRCLGMRWLKILAAMIRNQTPYDDALHARNQLKHGSWVLGLNASQSAKDNVT

SEQ ID NO: 200997 - protein, 412 aa, unidentified
MYRAGPFAETTMEGKMVNVGIDLHKTQFTTCARHQKRVLFSQYPTTEDGYAAFLKETSAWQKNGEEVRVGVESTGNTRYFKNRMEAAGIGVTVIDTLNLKVVNQSVKKTDKHDAATIAEFLELNILPEARLCSHGSEQLRRLLKVRTTLVKSEVVMKNQIHALLTAEGMEDAKGSLQSKRGRQHILDTLNQCKNGLVAQPLFEMIGRVEEDIKSIEEHLRVLTTGDRMVELLMTIPGCGEICAWTIRAYTDDISRFSSSKKFASYAGLTPWVQNSNEKIHHGKITKRGPRELRTALVQVVMGLRRMKAKTVTWRLMQQYEAMKAAKGSGKSIIATARKMATIIWHMLTEDVAFDIGQMVDRKLAKKAEAMSKSSRMAEKALTTGQQKPVTPKSACKLVKKTGVASRKRKKAS

SEQ ID NO: 200998 - protein, 343 aa, unidentified
MSEYAGKQFVGIDLHRRRSVIVRTTDGGEVLETVRILNDVDRLRSVMANAGVDPEVVLEATYGWYWAVDALHDAGANVHLAHPLGVKMFEYRRVKNDVRDAKDLADLLRMGRLPEAWIAPPETRELRELVRHRAKLVGLRSHCKAEVHAVLAKCGIQISMTDLFGLEGLDLLDRLDLAAPYAARVASLRRLLDDLDFEIDVFARLARARLATDPGYVAVQQIPGIGPVLGAVFVAEVGDIGRFGTANQLACWAGLTPKHRESDTHVHRGRITKQGSRLVRWAAVESVKSLPSHTRVGTLRDRVADRRGPNIGAVAAARQQVEYVFYALRDHHVRALDHRRVAA

SEQ ID NO: 200999 - protein, 320 aa, unidentified
MSSSDPIYVGIDVAKDSLELATWPAQSHQSFTNDGTGQDAVVGHVKGLGAALVVLEATGGYEMAVACALQAAEVAVAVLNPRQARDFARSMGRLAKTDRIDALGLAHLAQVLSLRDDLHKIVKPLPDDQQQLLAAIVVRRRQLIAMQTAERQRLQTCHAHSRQSIKTVLELLKKQLDDADAELQTHLSEHHADLSALLQGVRGIGTKVAATLICECPELGTLTRREVSALAGVAPIPRDSGQYRGKRSIHGGRPALRNALYMAALVGMRYNPVLKAFYTRLVAAGKPKKVALVACMRKLLTILNAMVRAGKPWDDTIHLA

SEQ ID NO: 201000 - protein, 314 aa, unidentified
MAQLICGVDISSTTLEASIGTEGASGSFSNDPAGIDALAAFCRLHRVTLIAMEATGGYERKSFTRLSQQGLGVAILNPRSVRQFASSVGRLEKTDRIDAGMIAWFAEVKKSRPTVLAPDSQLHVRALVTRLRQLTAIQTSQKNQQRLVTDPMVLATFSQVLDLLKQQIENLAGQIAALIDQDPLWKELDASFRSIRGVADRTVARLLAELPEIGVLSNKTVSKLAGVAPLANDSGKHQGKRSVRGGRAPVREILFIVASVVGRYDPDFVAFRLRLPEAGKPPKVIRIALAHKLLVRLNAKARDVRKFQILALAA

SEQ ID NO: 201001 - protein, 350 aa, unidentified
MRRPKDKLIAGLDLHSNNIMIGIINQDGKRVAHRKLDCDLHEVVEFLEPFKPQLQSMAVESTFNWYWLVDGLRAKEYPIDLANPAKIEQYSGMKHVNDKDDAFHLAELQRLNILPKAHIYDPALRPVRDLLRRRTNLVHQRTALLLSFKSLYARTTGQRLDLSDAKKMEPKEAPKLYTHPANQLIAQVQAEHVQALNKSALRLEKAVLGCARGLPLYERLLTLPGVGRILGMTITMEVGDIGRFKSDGDFASYCRLVDAKRLSNGKCKADNNQKCGNKYLSWAFVEASNFARRYDAQCRRWYDRKAAKTSSIIATKALGCKLAKAAWHVMVHQTNYDAKRMFPELAMRKN

SEQ ID NO: 201002 - protein, 368 aa, unidentified
MSETIVAYQSFIGVDLHKDTVTLVAVDSRGEVLERLKIHTKSVGKIGAWLVTLPRPSRMAVEAVGFVEWFIERFRSCVDGIEIADATELSNRRGKRRKNDPNDALDIALRLACDECPLGYIADDELMQLRKLGRHWRQLGSVLTRAKHCMRSILLAANLRGPKLDGAGAQRWLLAYGHLLKPVQRQAFRNFLEVIQLVELQRGPLLHVIINASRCERFAPLMELLRSVPGIGPIWACIIVAEIGPFDRFPNADALEFWAGLTADMKESAGRTQSGKITKAGSRTLRWALCKAAVTMCHSDARQEAVRQRLIRRTGGFKAKANVAMGRRLLGILYAMVRDNKPYVSGPRRNRTSAANKARARKRRKEAA

SEQ ID NO: 201003 - protein, 346 aa, unidentified
MTESSDYESVQVFIGVDVGKDTHHAVAINRSGKRLFDKALPNDENKLRSLISDLKQHGQILLVVDQPATIGALPVAVARSEGVLVGYLPGLAMRRIADLHAGEAKTDARDAAIIAEAARTLPHALRTLKLADEQIAELSMLCGFDDDLAAQTTQASNRIRGLLTQIHPALERVLGPRLDHPAVLDLLQRYPSPEKLASLGEKKLAAQLCKLAPRLGKRLAADIAQALAEQTVVVPGTNAAAVVLPRLALQLITLRKQRDEVALAVEQRVLAHPLYPVLTSMPGVGVRTAARLLTEVACRAFASAAHLAAYAGLAPVTRRSGSSIRGEHPSRRDFLYPAGVITCLTT

SEQ ID NO: 201004 - protein, 319 aa, unidentified
MRKHSIVCAGIDTGKRKLDVALDGCPDEQLQVSNSEEGHQRLSAWLRQRKVKRVGIEASGGYEQAVVCRLRRDGFTVVVFQPAQVRAYAKFHLQRAKNDKIDAALIAACTAAVRKLHAAPDPRLVRLAEHQTLIDQIVDQIARIKNYLESCRDPRLRRFWQDEIKRFRGLFKTELKALVAAIRRHRDLSERLDLIASVDGIALRTATAILVRLPEIGRISREQAAALAGLAPYDNDSGERDGARHIWGGRGRLRNSLYGAAFAASFHWNAELIELYKRLIAAGKEHKVALVACARKLLIFANAVVARGTPWQSRAAATP

SEQ ID NO: 201005 - protein, 339 aa, unidentified
MSKLTQPKQAMVFCGIDVSAVTLAVAVQQENQRFEERIFDNTASGHKALISWLRKDKAPARVSLEATGIYSLDLALALDRAEGIEVAVLNPKLIHRFAQTLRRSKTDSADAQVLAEYSCRMPFTPWSAPELSGLRLRTISRHIQSLVVEQTRQNNRLHNAEKSATTPRCVVNDLKRSMASLKLRIARLRREALELVRSDEAMRKRFDLLILIPGIAAISALQLLGELAPLSPEMSVRQWVAHSGLDPSHQVSGTSVHKPSRISRAGNRHLRHALYMPALVAVRRDPHLKAFYETLLNRHKAKLQALIAVARKLLHAIYGILRTQTAYDGSKLFPLMETT

SEQ ID NO: 201006 - protein, 375 aa, unidentified
MAEATMPKNSMLLKPVRSVVEVTGGVDTHGDTHAVAALDQVGGLLGTVIVPATGAGYRQALDWLSGFGPVGRVGVEGTGSYGAGLTRVLLDAGVGVVEVNRPNRAVRRGRGKSDPIDAEQAARAVLAGTATAPPKSRDGVVESIRLIHGVRRGAVKAKTAAINEFHAVLVTAPDRLRAALAGRSWVEQLATAAGYRPGEVSDSGQAVKCVLRRLARRIEALQAEIDQADVELAGLTAQAAPTLLAERGVGADSAAQLLITAGDNPERLGSEASFAALCGVSPIPASSGKTSRHRLSRGGDRQANRALHTIAMSRMRWDQRTRDFIAGIQARGKSKRDAIRILKRYLARRIYRILTTSRADSGVAPSTLTPSLPIG

SEQ ID NO: 201007 - protein, 494 aa, unidentified
MKAIAGKAKAKHSNSSKRNAKMAARGEPKGMEIVNPHAGGIDCGAEEHYVAVPPQSVEPGQPAVRCFSAFTEGLDASVEWLKACGVTTVAIESTGVYWIALCQKLEAAGIEVFLVNARHVRHVPGRKTDIKDCQWLQRLHSFGLLSASFRPEDGICRLRSLQRHRLNLIWTAGAEIQHMQKALQQMNLHLHHVVSDITGLSGLRIIDAILAGQRDAVQLAKLRDYRVCKSTVAQMEAALVGDYRPEHLFVLGQSLQAYRFYQARIQECDVQIESHLQQLAQRYESSSALAAKLPEPEVLNDAQAQNPQPAKPKVKRKPQANEPKIDLADYLRRICGVDLTQVIGLNVLSVLLIVSEIGVDMSKWRSAKAFSAWLGLCPRNKISGRKVLDTRTCKVISRVATTLRLAAQSLGRTNTALGLFYRRKRAHLGPAKATTATARKLACLVYHLLKYKEQYREPDPTTYQLKVEKAILARIQKQAAVLGYKLLPTALVPA

SEQ ID NO: 201008 - protein, 349 aa, unidentified
MSHCYTGQHRFYCGVDLHARTMYTHVLDANGQTVFERDLPTDPAVFLDAVAPFRPDLVVGAECMFSWYWLADLCADEQIPFALGHALAMKHIHGSKTKTDKIDAAKLAALLRGGLFPVGYVYPRAKRQTRDLLRRRSFFVRQRAQLITHIVNTNTQFNLPAFPKKLTYAANRSADLVERFTDPSTKLAVTADLGLIAAYDQQVAELERYLVRHAKVDDPVTFGLLRTTPGIGPILGLTLLYEIDTIARFPQPGNFLSYSRLVRCPHASAGKTKGSGPKKVGNAHLKWAFSEAACLMLRSCLPAKAWLQRQAKKKGKKKALSILEAKIGRAVYHMWKKQVPFDVKRFLNG

SEQ ID NO: 201009 - protein, 456 aa, unidentified
MQKKYLKSKNEKKRVSINQAWPLINPRAAGVDWGAREHWVAVPEDCCAQAVRPFGTFTRDLEALADWLQQCQVTSVAMEATGVYWIPLFQILERRGFQVLLVNARQIKNVSGRKSDVADCRWIQRLHAYGLLGASFRPADPYCVVRSYLRYRDELVAARSVQTQHMQKALQQMNVQLTQVLSDVNGVSGLAIIGAILQGQRDPLKLAALVDRRVKTSLDKIARALVGDYRAEHLFVLKIACELYHAYEAKIADCDQELARELARLPDQVDWATHPLPAKIGKTQISEEMRLGLYRKLGVDLTAVEGFGPLVGLTVLSEVGPDLTKFKTEKQFASWLGLCPDNRVSGGRVLSCRTRRVVNRLSDILRLAATTLERSQTGLGAYYRRMKAKLGAAEGVTATAHKLARLLYRLLKHGEAYVRQGLADYEKKYADRKLKALKKTAASIGFDLVQRQAVTP

SEQ ID NO: 201010 - protein, 311 aa, unidentified
MQVLYPRCCALDVHKVNVVACLRIAEDSKVTTEVRTFDTTTASLITLRDWLAANKCTHVAMEATGVYWKPVWHILADGDFELVLANAAHVKNVPGRKTDVSDAEWHSDLLAHGLIRASFVPDTQTQELRALMRTRKQLVREAASHIQRVQKTLEDANIKLDSAISDIMGMSGRAMIEAMIAGETNPTKLAAFADRRLKASPAQLREALRGRVTKQHRFLLRLHLEQIDALAAAIAEIDQQVEGDIEPFRAGVKQLSSIPGVKALAGTVIVSEIGIDMSRFPSDGHLVSWAGICPRNDESAGKLSWRHTGWR

SEQ ID NO: 201011 - protein, 344 aa, unidentified
MEQIIRIGMDTSKSVFQLHGVNAAEQPILRKKLSRKEMVKFFEKGPPTIIALESCGGSHHWARLLSSFGHEVKLIAPQLAKPYVKRGKNDAADAEALCEAMSRPTMRFVPVKTADQQAALMLVGVRERLIRNRTQLANAIRGFAMEFGIVAATGMCRIEPLLERIAADQSLPELARELFAMNGEEYRDLLVETKTIDEKLMALHRSDECSKRLAQIPGVGPVGASLLMMKTPDPRMFRSGRDFAAWIGLTPKDHSTAGKVRLGVITRAGDEMLRSILVVGATAVLQHIRAGRSRHTSPWLLELLQRKKPKLVAVALANKIARIAWKLMVSGETYRRPEGQTQGV

SEQ ID NO: 201012 - protein, 352 aa, unidentified
MRVALPLVAPLKYVVGIDIAKDTFVACFGHIDKSQHLSFGKETTFANTAVGFAALLVWTAKQQVVAAPQWFVVEATGVYYEELAYFLADHAQALSVLLPNKVKHFAQRTEQKSKTDQLDARLLCRLGLERALPAWQPPTPALRQLRVLSRERQSLPQQAVRLKAQRHAYQHSYQPDARTLDRLATRVQLLRQQLKAIGQDLAARLAAEPELARKLAHLTSVPGIGLTTAMVVVAETSGFDLMENERQLASYAGLDGVQRQSGLSAGATRISGRGNVRLRTALYLPAVSSLRLNPQQKAFDDRLRARQPSGKPGVALMRKLLLRCYSLWKNDCAYDPHYHPAHCLEKEVAPTS

SEQ ID NO: 201013 - protein, 318 aa, unidentified
MTSTVNESIGIDVSKATLEIACHQSAQTWSCANDVCEFDSLIERLRQISPALIVIESTGGYQLPLVTALSAAGLPVVVVNPRQVREFAKATGKLAKTDSIDARVLAHFGEAVKPEVRPLPDKATAELAAVLARRRQLVEMLVAERNRLKTAVVAVRVDVQQHITWLEQRLNDLDRDLQSRIELSPIWRERDDLLQTFKGVGRVTTTTLLADVPELGQLNRKKIAALVGLAPFNNDSGPRRGKRRISGGRAAVRSTLYMAALSAIRCNSVIGSFYQRLVEAGKMPKVAITACMRKILTILNSMVKHNSPWNPKSLTINS

SEQ ID NO: 201014 - protein, 364 aa, unidentified
MTTIAQSGAPRRVLGGVDTHKEVHVATVIDDVGRILGTASFPATGPGYRRLLVWLHGFGDVVAVGVEGCGSWGAGLARALTARGVRVIEVNRPNRQNRRRRGKSDTVDAEAAARAVLAGDATVTPKAGTGPIEALRQLRVARGGAMKARTAAANQCHSLIDTAPDPVRAQLRALTFKQKVALAASWRPRNATTPEGASRYALASVARRWRDLAVEISELDARIKVILDDVAAPLLAVHGVGYDTAGQLLVTAGDNPDRLHHERSYAALCGSSPVEVSSGKTNRHRLNRGGDRHANSALWRIVIVRMTSHQPTKDYIARRTAEGLSTPEIIRCLKRYVARELFHHLQHAITDPHHQPVQLDQRAA

SEQ ID NO: 201015 - protein, 368 aa, unidentified
MSHSIFIGLDVHQNSIDVAIADGILDGEVRYYGKINGELSDVDRLIRRLGYKKQRLRIVYEAGPCGYGLYRHLQSQGIDCTVVAPSLTPRRAGDRVKTDRRDATSLARLHRAGELTGVYVPRCEDEAMRDLTRAREDAKSAERRAKQRLNSFLLRHNCKYGGRQKWSLAHRRWLADQRFDHPAQQIVFQEYIDTIDECEQRVARLTAQIGEQVDNWRMKPVVEAFQALRGVSLIAAATLVAEGGDMRRFDRPGQVMAYLGLVPSEASSGEQRKQGGITKCGNGHARRVLIQGAWTYRHPARVGRRLRDRRAQLSPEICKIGWKAQLRLCSRYHRMVARGKPSQVVVTAIAREMAAFLWAIARQAPAAG

SEQ ID NO: 201016 - protein, 320 aa, unidentified
MTSRGAEKMNNDTIGVDVSKDHLDAYRLADGASRRFANDKGGHKALIKWLAQTPLNRVVFEPTGPYHRAVERALGASGVPFVKVNPRQARRFAEATGKLAKTDRLDAAILARMGALLELQARPAPSEVLLELKELYVAREALVKDRTAAKNRAKILTVPVLKRHNAQRLEQIKRHIAAIEAEIRKQLQADPDLAQRFAILTSIPGLSAITAFALLIEMPELGALEPGQAASLAGLAPIARQSGRWTGRSFIRGGRADVRQALYMPALVAARFNPDMKAKYAHLIETGKPAKVALTAIMRKLIVLANALLKANRKWQPKCP

SEQ ID NO: 201017 - protein, 356 aa, unidentified
MDSTKYIGMDVHKEATTIAVMNSAGKLVMESIVETKAVTMVQFLEGLRGELYVTLEEGTWAAWLYDLLKPHVTKVVVCNPRKNALLKAGNKSDRIDARKLAELLRAGLLSAVYHGETGLRTLKELCRSYLAISKDLTRTMNRIKALYRSWSIPCGGTSVYAPRHRAEWLSKITEPGVRRRAELFYQQLDGLQKLRQEARGDLLAESRKHGATELLRRIPYIGPIRAAVLIALLQTPHRFRTNRQLWAYSGLALETHSSAEYHYVQGQLQRSRRPVALRGLNQNHNHDLKSIFKGAATKAGSAKGPFHDFYAALLAKGMKPTMARLTLARKIATITLIVWKKGVCFDAQQLKQQVSV

SEQ ID NO: 201018 - protein, 328 aa, unidentified
MAKEKFDVSFFNPTVKNCSGTAEHKVIRNTDKGIQKFLSSLPADAVLVAEHTGIYGDRLLKHCTDSHIDIAYVGGHVIHTYKSSPDRGKTDEQDCAVLREFGERFADKLTFKKFPQAEIYGLRQLARHRSMLVEDRKRYVTADKGEDCRPCRETFVKESMKRIVAMLDEEIAATERQMQHLISSRKELEKNYDIITSVKGVGLVTAVEILVKTDNFTTITTARQYAAYAGTAPYEKSSGKMNKGRHISRIGNRRSKTLLYICAESARMHNKDIKLFYERRRTIDKKAHHYVLNAIANKLLRIIFTLIAKGQKFDDKFIRKDPRQIKHN

SEQ ID NO: 201019 - protein, 358 aa, unidentified
MEAQVKKIDFNGQDIYVGFDAHLNSWKVTIMAEDIVYKTFTQPPRPEVLYNYLKNNFPGGTYHSAYEAGFCGYWIHDKLVSFGIKSIVVNPADIPTTDKERVQKEDKRDSRKIARSLSSGNLTPIYIPSIKTQRDRSLLRTRTMLAKDLARYKNRIKSFLYFYGISIDDSFKNPQSHWSNRFMSWLESIDMGEESGKEALLVLISECKNLRSSIFNITKQVRQLSQTETYKELVVLLRSVPGIGLLTAMIILTELETINRFRNIDKMCGYIGLVPSTKSSGEKEITGDITPRGHNVLRTAIIESSWTAIRNDPALMKSYLSYIKRMDSNKAIIKIAKKLLSRVRFVLTNNKPYTCSMV

SEQ ID NO: 201020 - protein, 354 aa, unidentified
MNSVRYVGMDVHRDTISVAVLDESGRLMMQSVLATRAGAILDFIHGVRGTLHVTFEEGTHSAWLYDVLVRRVAKLVVCNPRKNALMKSGSKSDAIDARKLAELLRAGMLSPVYHGETSALEVQQVARSYSQLTEDTTRVMARLKAVFRGQAVSCAGKKLYGKRHRGEYLAQLGGGLRRRAEHLYEELDALQPLRHEVRRELIVECRKHAAARWLQSVPFLGPIRAALLIGRVQTPHRFRTKRQFWTYCGLGLETRDSGQYRLVSGRVERRRKPALIRGLNWNHNHEMKNLFKSTATVASVREGVWREFYLGLLAKGMRPEMARLTLARKIAAITLKIWKKGETFNAEHLKLQAA

SEQ ID NO: 201021 - protein, 313 aa, unidentified
MPVALSNPIVGVDVAKNELVIYQADSDLLEAIPNTKTSIKQWLKALLGPVSIAIEATNIYHLEFADLAYAAGCTIYMVGGYELKHYREGVKIRAKTDALDAKLLARYLKNEAEELRPWTPPSPLYRQLLSLFRRRAALVQARVGLVQSWSNEPLLKAAFAEQIKSMQRLETMIEKTINDQLKQAGLLGQLKRCLKVEGIGFLTGARLLTAFQRGEFSNADAFIAFLGMDLRVSKSGQKDGRRSLTKRGDPEARRLLHNAAMSASRTIAWKEFYEAQRARGFSTTQALVMLARKLARVVFALLKGQSEYQTKVS

SEQ ID NO: 201022 - protein, 384 aa, unidentified
MGGIILDVLMTRCAGLDVHAETIVACVMIGEQDDELFIETETFPTLTKDLFRLLKWLENHGITHIAMESTGVYWKPVYNILEDYFDITLANAQRIKNVPGRKTDVSDAEWIAKLLRYGLIEKSFVPPEDIRNLRDLTRLRKKWIGHLTSEKNRILKVLECSNVKLNSVISDVFGVSGRKLLSKLIQNGYVDSIDVENSIHGRMKHKKQMITDSLFGTLNDHQIFLIKQSWQHIVYLESLISQIEERIDEILKNYKEEVELLLTIPGINKDSAAIIIAEIGVNMEQFPTSQHLASWAGVAPGNHESAGKRKSTKTTKGNPHIKTVLCEVAWAISRSRNRWLAAKYWSIAARRGKKKALVAISHRMLRIIYSMLINKEPYKEPLIN

SEQ ID NO: 201023 - protein, 469 aa, unidentified
MKVTLGVDVACRAEHQASLADERGEFLWSGARFRTRVADLDRLWARLPADAEVTVVLEPTRNAWSPLASWFTRRGARVVMVPSTQAADLRAYYSKHTKNDRLDSRVLARLPLLHPDGLRPVSGAGPADPLRRAARRRSSLVARRTAVMNRLDALVELLGPAWYEALGSDYEKTSLAVLAQYPNPEQLLRLGPARLEAFLRRWSRGQWGRAKAEELLDAARESIALWDGGLDFAALADDIRAEAVQHRFLTGQIDALETRIAELVDERDPAQILQSAPGVGPVVAGIIAARIGDPHRFTTLSAVRKFAGLVPSVSTSGTQNAPGKVTKSGDGLLRHGAFLAADSARRTDPQLAARYVRLMQEGRHHNDAITHLAAILLTRVVACWRDGVPYVIRDLDGTVLTPEQGRAVVAAHHQVDPQTRRRRRATRTVKTLKGRPPTEVAGRARQESRGAPTLRPATGNRTTAALRTG

SEQ ID NO: 201024 - protein, 378 aa, unidentified
MALRTAAHDGPVLFLALELSKSAWLLAAHLPGANKPKLHRIEAGDTAALLATITALRARVAGKSGTAVDVACCFEAGRDGFWLHRLLTANGVASHVLEPTSILVNRRARRAKTDRLDAQGLLRVLMAHCRGDRQACSTVRVPTPEEEDAKRLHREREHLVQERVRVENRIEALLATQGIRGRPSLRSWERDMTALRTGDGRALPTQLRAELDRLRRRLVLTPEMIREVEAERAAALAAEPQDDTCRTIAALCRIRGIGETSATVLAREVLYRPFANRKQLASYVGLAPMPYQSGGMDRDRRISRSGNPRARTAIIQLAWLWLRYQPGSALAGWFRGRVGALAGRTRRIAIVAMARKLLIALWKYARTGLLPEGVEIGA

SEQ ID NO: 201025 - protein, 429 aa, unidentified
MIMGFTKPIEHFNLQRKKVITMNTLYVGIDVSSKSNVVYLMLPNGDKHSNFSVANSHEGSTQLVKRILSVLTSHSLDTVLIGLEATSVYGDNLVYFLREDATLAPFNRKIHVLNPKQVKKFHDAYNDLPKNDYVDSFVIADCLRFGRINKEVYMGDYRYKALQNLTRARFFAVQNLVKEKQRFMNVLFKKYSTMTQEKVFSDTFSTTALAVYDEFESAEALANMDLHELTDFIMEKGKNRFPDPDTVAKAIQKAARSSYRLPKTMNDSVNQVLSISITSMKALESQIKEFDKAIKAQMELLPNVLISIPGIGPVYSAGIMAEIGEIDRFNSQAALAKYAGLAWKQHQSGGFEAEVTRLIPSGNRFLKYYLCEAAFSLVRCDKEYSDFYHLKYKEVNRCQHKRALALTARKFVRLVFRLLKDNRLYCPAK

SEQ ID NO: 201026 - protein, 358 aa, unidentified
MKYIGCDFHPSCQQITMLDLETGELVRRRLLHGNGEAKAFYEALQGPVVVGIEASGNTLWFERLLSRLGHELWMGDATRIRRQDPRRQKYDDRDASLILQLMEEKRFPKVWIPTMEERDLRQLLIHRHHLVRMRTRVKNQLQHIALNQGVQKKYKLWTKVGMELLRQLELEPWTRLRRDTLLEMLEELEKKIQPLEQAVAREAEARPAARLLASHPGVGPVIALATVLTMGEAKRFANSRSWVSYLGLNPSERSSGEKRRMGRISKQGNPFLRFLLVQGAAIAARGDKSLARVYARLKAKKHHGVAKVAVARKLAVRLYWMARTQKPYPEVVRMQGSQSHPVAEVMAVRLNRPPASRQ

SEQ ID NO: 201027 - protein, 377 aa, unidentified
MKNCTRYLGLDVHAETITAAIAEGRDRIRNLGKFPNRPEAVRKLVEKLGGGKNLKVCYEAGPTGYALYWQLTKLGIDCEVIAPSLIPKKPGDKVKTDRRDAEKLARSYQNGDLTPVWVPTPEHEALRDLVRQRAAAKHDESRAKHRLITLLLRHASREPNGSRAWTHPWWRWVQALKFEHEARQVALADCIAEVLHMGERLARLDQAIDRMVESAPPHMRAVIEALQALRGVAKLTAVTVVTEVGTFQRFHRPTQMMGYTGLVPCEHSSGSRQAQGGITHTGNAHLRSVLVEAAWHARHRPWLNRRLKQLLPTLPADVAEVAWKAQERLHRKFSKMIYSRKHAGVVAAAVARELVGFIWAIGTMVEAKQTNTVARAA

SEQ ID NO: 201028 - protein, 302 aa, unidentified
MPHVTSIGLDVHARSVAAAAFNPFTGEVVHRDFGTDAAEIAEWALGFEEPRACYESGPTGFHMARELRALGLDCAVAAVSKMQRPAADARRKNDRRDAEFIARMLATHNIVEVPLPDAAVEAARDLDRALDDATVEYRRARQRLNMFLIRLGHVWDERNADGTRKGSWTRAHWRWISGIRLEGPQRDVLEYYVTAARCAESDRRQLEKKVLALARTDRWRPAVEALSCIKGIDTLTAFRLAAEAGSFTRFRTAPAFASWCGLVPSERSSGETERRGGITKTGNRLARTELVESAWHYPTRTP

SEQ ID NO: 201029 - protein, 378 aa, unidentified
MNRIIKIGMDVHTTNYTLCIFEPSFEHDGTVHCITQVKPEVKNIIRVIETFKKKHENEELNIVCGYEAGCLGYSLYHELKEKGIECVILAPTTMKTEKGGRKLKNDYRDAKMIAECLAYGGYSAVHVPTELDNSVKEFIRMRDDIKENLKSIKQQIIAFLTRNGKQFDGKSFWTRKHIDWINTVSFSEPLLQDTLKEYMIEYNHLCDRVETLDKQIEEISLKEEYVEKVQQLQCLIGIKTHTALSLIVETSDFNRFKKGNMYSAYLGLIPGDDSSGGQENKLGITKAGNSHLRKLLVEAAQGYTRGKVGFKSKVLKSRQEKCSSEVVAYADRANERLRRKYYRMILRGKRYNVAKTAIARELACFVWGIMTDHIDLCN

SEQ ID NO: 201030 - protein, 415 aa, unidentified
MLKIVYPICCGMDVHKTFIIATVAATNERSVTTYQTKRFSTFTKDLRSLAEWLKAAGCVDVCMESTGKYWIPVYNILESSCRITLAHPKYVKAIRGKKTDKKDSIWIADLHKHGLVPGSFIPPEEIRQIRDLIRYYFKLVSFATSEKNRVQNSLTVSNIMLASVVSDTFGKSASAIIDHLLDHPGDRDFDFRRFLHRSMLNKADDIALAIDGLITPPQAKKISLCKTHFDQLKNLMEQIKQIAADLAAPFFAQLQIIASVPGISDFSALAVLSEIGVDMSQFHSAKHLCSWAGLAPSNDQSAGKKKSVRISRAGVYLKPLLVQCALATLRDKKFPHYRKRYEQIKRRRGHKRAIIAIARMMLTAIFHCLKNGEFFDPSRYDDPAQQSPNNAREFALQKLFQDASRLGYSLVYSGA

SEQ ID NO: 201031 - protein, 348 aa, unidentified
MPVLIGVDPHKHSHTTAVLDQHGTLLDQQRFPATRDGHRALRRWAARWPQRHWAVEGAGGVGRILAQQLVAQGEQVTDVPAKLAARVRALSPGHGRKADAGDAISIAHAALHASLHQVSAEDHPTVLRLLSDRRDDLVRVRTQTLNRLHQLLAELHPAGAGRNLTAPTAAALLRRIRPRTDAARTRREVASELVQDVRLLDRRISAVEERIQTAVTASKTSLTTLHGIGPVLAAKLLGEVGDVGRFPTKAKFATYNGTAPIEASSGQVVRHRLSRAGNRRLNHVLYLMAVVQLRHATPGQAYYLRKLAEGKSSREALRCLKRRLSDVVYRCLIADQEPPPTRPNRPAA

SEQ ID NO: 201032 - protein, 315 aa, unidentified
MTTYYIGADVHSNSTELAIERRGKIVARYAVPTTIPAISNVLDSLQGKKHFATEEGPMAGRLYRNLNKKLDEFIISDPRRNKLISSDGDKDDKIDAAKLALLSRGGYLRAVYHSDDNQRAELKHWVSLYHDRVRDAVRQINKIRARCRMHGVTIPRLALRDLTHRLRWLSKINHPVLTRQLKMLWIGYDATAKQVRVSKRQLSSLGKKYNIIKLWSQLPGIGLIRATTLFAFLDTPWRLKQKNRLWKYCGVGLQRTTSGTDRKGRPKPARLQLPRAVNRTLKNAVLGAALSAINRKDNAFKSFFSKDAQRWCNWQ

SEQ ID NO: 201033 - protein, 399 aa, unidentified
MVNVGVDLHKTQFTVCARRNGVECFNKYTTEEEGYQLFLSKIKEWQESGEEVRIGVESTGNTRYFKNRMEDVGVEVKVINPLKMKVINESVKKTDKHDAATIAEFLEKDMLPLSQLCSRESEQLRRLLKVRTMLVKTVTVIKNQIHALLLSEGLPDVKSAALQSKKGRKETLNALNQCVNGLVAQPLLEMVDRLEENVNGIEKQLRTLVKGDRTVELLMTIPGCGEICAWTIRAYTDDIKRFASPKKYASFAGLAPWVQNSNETIRHGKITKRGPKELRTALVQVVMGLRRMKAKTITWHMIKRYDLIKQSKGSGKAIIATARKIAVMIWHMLTREEMFQLERMTDPKLVKKSEVMRKTMGGMIEESHIEIQEKPVKAQNSVRIVKKTGVARDKKKKVG

SEQ ID NO: 201034 - protein, 338 aa, unidentified
MIYIGIDVAKDKHDCFITNSDGEVLFKAFTITNNLDGFNDLYQKIETVMKDITKVKVGLEATGHYSYNLLGYLIDKGLPTYVINPLHTNLYRKSLSLRQTKTDKVDARTIASMLMSDVNLKSYSDTSYHNEELKSLTRYRFDKVKERAKLKTSVSRLVCILFPELEKLVPTLHMASVYALLSEFPSAKHVATAHLTRLTNLLSESSKGRYGKDTAITFRDSARASIGSNMPAKSLELKHTIKLIQELDSEIDEIENEIKIIMDEINSPILSIPGINYRMGAMIIAEIGDFSRFDSPDKILAYAGFSPSTYQSGHLYGAYAHMEKRGSRYLRYLSLIHI

SEQ ID NO: 201035 - protein, 343 aa, unidentified
MKHYAGLDVSVEETSVCILDETGRICREVKVTSHPEDLLRILQDPIWHFERIGLEAGQLSQWLFDALADAGLPVVCIETRHAKAFLKAQVNKSDRNDARGIAQMMRVNLFRPVHVKTLTSQKRRVLLTARKLLQEKAIAIENDIRGLLLNFGLKVGVVGAAKFEERIHELIRDMPDLAEIVERLLDARRRLREHFAALHRKLLDLARGDAVCRRLMTIPGVGPVVSLAFVATIDTPARFRKSKAVGPVLGLTPVRSQSGNTDRVGRISLCGDGMMRTLLFEAAQTMLRQTTRWSWLKAWAMRVAQRRGSRKAVVALARRLAVIMHRMWCDGTEFRWTREAPVA

SEQ ID NO: 201036 - protein, 416 aa, unidentified
MKSTMITAVGIDISKNKSTVAVRRPGGEIVIRPFEVRHTSSDLKRLTAKLKQLGGDIRVVMEHTGNYWRPVALTLKKAGFFVSVVNAMLIHDFSDNSIRKLKTDRADALKIANYALTFWDELPPFNDEEEIRLLLKTQSRMCERITTTATALRNGLIDLTDQTFAGINQAFDRAAKSAEGHEKWVDFFQHYWHRDCVCKFSLEAFTESYRRWCRQKNYKFRTDTAHKVYALAKECIATLPKCESTKVLITQACKSLNAVCEAKLASQHEMQRLASLLPEYDIVMGMEGAGPITGPALIAEIGDVRRFKNKKALVAFAGVDAPPFQSGTFEAKSRHVSKRGSPHLRRTLFIISSVILQLSHEDNPVFCFMDKKRSEGKHFYVYMVAGAAKFLRIYYATVTGHFKASKYINSLPAIAG

SEQ ID NO: 201037 - protein, 346 aa, unidentified
MKKIFIGIDFSKEKFDATLIKAEGLKECAPSVHEVFDNKTSGFRRLLRWVKAQSEDVPVDAWLFCGENTGGYSIALSNYLYTSGYDLWLECAYKIKHSAGIQRVKNDKADSRVIAEYAMRNYDKMFLYKPQSKSLAALREVFLYRHSLVRQKVALQVRRNEKRLTQDKSNIKTFMSFTSKHLITEINKAISKCDEKIKEIITSDDELREIFDIITSMPGIGVINATCLIVYTDNFNKFEMNSRKISCYYGIAPFGRQSGSSINGRPQVSPFANRMIKSLLSQAALVATKADINIYNYSQRLIQRGKHPLLIQNNIKNKMLHRLVAMVRNRQKYNPDYIFDNTKDVA

SEQ ID NO: 201038 - protein, 341 aa, unidentified
MAVIIGIDPHKLSHAACAIDNNEHELAQLHVRAGQRQLELLLGWAQPFSERRWAIESAAGLGYLLAQQLVGAGECVMDVPATLSSRVRLLGTGRSNKNDPNDARAVAIAALRAPSLAVVRREDHLTVLRLLAKAHLDAGRARNRACCRLHALARELVAGGIRKEVVVSQAESLLAGVEPVGVAQRQRLELAHELVDEIRALDAKLRRSKARITTAVVASATTVTDLYGVGPIVAATVIGYSGDVRRFPTAGHYAAYNGTAPIELSSAGRTVHRLSRRGNRVLNHAIHMAAVTQIRNLPSEGRAYYDTKVAAGKTKREAMRALKRRLSDRVYRQLLADTRPR

SEQ ID NO: 201039 - protein, 357 aa, unidentified
MEYGAIDLHKNESQIRIVTESAEMIDRRVATTRDRFSHVFWGRARMRILIEASTESEWVAQHLEQMAHEVIVADPNYAPMYGHRSRRIKTDRRDVAALAEACRQGTYHVAHRRSAQQHVVQCQLNVRQELTQARTRAIALARAMTRAQGLRVRSGSTETFLTRLAAMDLSPSLKDTLVPLRRVIETLDDELANADTRFHALVASDATVRRLTTLPGIGPITASAFVAALDTERRFQRAGQVTSYLGLVPQEHSSGDKRRRGRILRSAHPHLQSLLVQAAWRVMRGSDPRTANFRAWAQAIALRRGKNVAMVALARRLARTLFAMWRDRVDYEPTRTRRRHSSKVATAIVETDTARAV

SEQ ID NO: 201040 - protein, 506 aa, unidentified
MKSKPQEKNRKASNHPTQHHWHEMNRKQRREMMRQIQSEDVSLEVVHPDAAGIDIGNEFHYVAVPPSRDSQPVRRFGCTTAELKAMAAWLKQCGICTVAMQSTGVYWVAVYDILEAAGLEVYLVNARDTKNLPGRKTDVQESQWLMKLHTYGLWRNSFRRSQEIRVMRTYWRQRNDLVQSAGRHIQRMQKALTQMNLQLANVLSDLSGTTGQAIIKAILAGERDPHKLAQFRDPRVKASEEQIAQSLEGNWQPDLLFVLQQEQAGYEFCQKQMAECDRQLQQYLQQREDRSQGAPLPEEKRKERLRKKKGNAPQFGLREGLFRMTGTDLTRIDGIDVMTATAIISEAGWDMSKWKTEDHFVSWLRLCPDKRISGNKIIGKGRLPTNNPISVALKMAASTLRLSKTYLGAQFRRLRTKLGAPVAIKAMAAKLARLPHAALRHEIHGPRSRLLPTQTPRITGPAAQVESRQPWIQSHPNTGRGLASRSFWGAPATALRWLYFSASVKR

SEQ ID NO: 201041 - protein, 412 aa, unidentified
MEAIIEKCCGLDVHQATVVASVLVGSGETRVRQQVRKFRTVGRELRALRDWLTELGITHVGMESTGVYWVPVFRALEGGFELIVGNAQHMKNVPGRKTDVKDSEWIAHLVRCGLIRPSFVPPPPIRELRELTRYRRSLMNDQARIRNRVQKLLETASIKLASVASDVFGLSGRAMLRALVDGETDATILAQLAKGTLRRKIPALVEALEGNFEAHHRFLLGFQLDRLEEIERAMTTLDEHIDRKLEPYQAELELLTKIPGFSRVTAASFIAETGGDMSVFPTAGHLAAWTGIAPGNNETGGKRRHAGMRKGNVHLVTTMTQAALGATRKKGSYYKDKYWRLKARCGAKRAMVAIGHKLLIAAYEVLAHRQPFVDLGDQYLTRRSQTDVTRKLVRRLESLGFDVALTPREVKQ

SEQ ID NO: 201042 - protein, 412 aa, unidentified
MEIIHACCCGLDVHARTVVACLIKHGRKQTRTFSTMTDELLRLSDWLVAEGCTHAAIESTGVYWKPVFNILEGVVEVVLVNAYHVKAVPGRKTDVRDCEWLADLLRHGLLRASFIPPPEIRELRELVRYRQTLIKEQVAVSNRVQKLVESGNIKLAQVASDALGLSGRAMLRALAGGETEAAKLAEMARGRLRAKKAELRRALEGRLTAAQRFVLGELLGRYEELEAAITRASAQIAQEVARSSDPFVPEAMKLLQTIPGVGERLAETIISEIGVEMGRFATDAHLASWAGMCPGNNESAGKRRSGKTTKGSVYLRAALVQAAWAASHTKQTYLAAQYRRLVKRMSKKKALVAVGHSLLVIIYHVLKNRASYQELGGDYFDRQHVEVQRARLIRKLETLGLKVTVEELPQAA

SEQ ID NO: 201043 - protein, 447 aa, unidentified
MADERDGFPVLRRDVAGMDVGSNEHWVCAPAGTGEGREVERFPATTPGLERMIAWLQERRVTAVALESTGVYWIVPHEMLEQAGLEVRLVDTRELRRVPGRPKSDRHDCEWLQRLHSCGLLRGAFRPPEAICLLRTLVRDRATLIAERADWLRRMQKALDQMNVRVHRAVADLDGATGMAIVRAIVAGERDPRRLAALRDRRCHQTETQIAEQLSGHWRADHLFSLQQGLKMYDAITERLIDYEREILRQLATMAQTDDTPPPPTNLNKARAIKRRGEEPLRHALYRMSGVDLTTIDALGVETVHVILSEYGWDLSQFPTEKHFISHLRLAPHRAMSGGKPVRNQKKPHSGSVRVATALRMAATSLRRSRSALGAYYRRIAQRLGADVAVFATARKLAQWVYRVLRWGHTYVDEGAAAYEYRYRQARLTRLAATAKDLGYAIVPVQV

SEQ ID NO: 201044 - protein, 312 aa, unidentified
MFEGKVVHEEETANHQNAIMSLIRHLAKDYGIDGSRMLICAEHTGQYTFPLACACKAAECKLWLENPAEIKYSSGIQRGKNDKVDAKRIAVYASRFQDKVQYYERPSEDIERLKQLESERSLYVTDLAKYKGQLKDQREYMPTALYERKVKRLTALMENLEQAIQAITNEMDEVITSCPVLFRQMELLMSIDGVGRVVATNMIITTEAFTRFDDPRKFNCYAGVAPFSYSSGTSQQSKARVSHRADKVMKRLLHMAAIAVTHRNGGELKRYYDRKVAEGKNKMSVINALRAKIVARMFAVIKRNELYKPILS

SEQ ID NO: 201045 - protein, 356 aa, unidentified
MNYIGIDISKDTFVVAYSWEKNIKTRVFKNTTKGIHEFIGTISKEEHHCVVEATGNYSALLVYLLSKAGITTSLENPLKVRNFARAMLSTVKTDKVDARMIALYGQRMRPKPYVLPSDALLILKQKRAVIRQLKKQLIATKNMKGSMEVLPYFDTKCRLSLERTIMHFEKQLKHLEEDLVALTGKEYKKQLELLTSIKGIGLTVATALIITTGGFTYFDNAKQLTRNLGLSPTYQQSGTSVRFKGHINRNGDASLRSQLYMAAISSLRCNTACKTFYDRLRSEGKPVKVSLIAVANKLIRQAFAVVTKERPYVDGYVSTFRPTSPQPQNDIHASNNNMKNTAGFGGAQPPKRLQSC

SEQ ID NO: 201046 - protein, 301 aa, unidentified
MTSEAFVGIDVSKRWLEVRVHGAAESKKIGNDPDGFTSLVGEMKAVQPQLIVFEATGGYESRAVKALSEAGFAVAVANPTRVRRFAEALGILAKTDKIDAQVIAHFASVVQPAANGRQTPLEEQLAAFVERRRQLLVELVAEKNRLSTCSACVREGIEEHLAWIEERVDDLEAKIHACILQKADWRARAEIIDSAPGVGPVTASTLVAELPELGQLSHKKIAALVGVAPFNKDSGPKRGKRRIFGGRSGVRRTLFMATLSATKHNPVIRAFYETLLKRGKEKKVALVACMRKLLVFINAMV

SEQ ID NO: 201047 - protein, 346 aa, unidentified
MLYVGLDLSRKRVDVCLLDEHGTRLETTAAPPDADGLRGLAARLASRGQPIRAAIESMNGARFVRDELEQLGWDVSLADAQKVKGLAPLAAKTDRIDAFVLAELARRDLVPAIWLPTPGVRAERERARFRLHLVRHRAALKARIYASLIAHGLSCPVSDLFGLHGRELLDHLALPEPWAATTAASLRVIEHLDDEIAACEAELRRLGAAHPYVPLLMSAPGIGWVLAYTIASEIGEIERFASPKKFAGYTGLCPRVYQSGASDRRGPLAKNGPEHLRWALVEAAVHAARHPCYAAHYQQTKKRLGRQRGAKVARVEVARKLSEAIWYMLTRSQPFAPAGPALPLVA

SEQ ID NO: 201048 - protein, 378 aa, unidentified
MPSETTIHVAIELSVSSWLVATRPPGAEKSRLHHIEGGNTTALLALIAELRTRASTKLGKPAEVVCCFEAGRDGFWLHRALTMHGVTAYVLEPTSILVNRRARRAKTDRLDAEGMLRVLAAWLAGDRQVCSMVRVPTPEEEDAKRPHREREHLVQERLRIENRIEALLFTQGIRKRPSLRSWERDVAELRTGDGRALPSLLRVELDRLRRRLVLALELIREVEAERAEALAVTAEDEMTQKIAALQRIRGIGTNFAAVLVREVLYRSFANRRQLASYVGIAPMPYQSGGMDHDRSISRAGNPRARTTLIQLAWLWLRYQPGSALAAWFRERVGTLQGRTRRIAIVAMARKLLIALWRYVETGVMPDGVEIRAQADVTA

SEQ ID NO: 201049 - protein, 341 aa, unidentified
MDHIGIDLGGRDSQVCVRNSAGAITEEARRPTIELGRWLANRAPARVVLETCTEAFRLAAIAQRHGHDVRVVAATLVRALGVGQRGLKNDERDARTLSEASCRIDLPSVHIPTVVSQEVKAICVSREALVRMRTLLVNRVRSYLRSRIGPRVRATPDTLPAKVRRALLDDPEGLPAHLERILVVLETLRAQIAQADTELRVLARADVRMRRLMTVPGVGPVTAARFVAALDDVDRFPNAASVASYLGLIPGESTTGFRTKRTRLTRAGAPQVRWALGQAAWSLYRHRPDDPMVQWAKQVAARRGAQVAIMALARKLAHVLYAMWKHGTTYDPARGARPIAA

SEQ ID NO: 201050 - protein, 350 aa, unidentified
MLIIGCDLHTRYQQIAMLDKETGEVVEHRLEHESGETRAFYASLPCGAVVGIEATTPAHWFERMLTEFHHELWVGDAAQIRATSVRRQKHDPRDAWHLMDLMASGRFPRIWTPSPRERDLRQLLAHRDKLVRIRTAVKNQLHALALSQGLCRGHRLWSARGQAELQSLTLLPWAGRRRQDLRELLTPLDTTIAELDKVVAREAEAREEVKLLMTHPGVGPVVGLAFVLTLGAIERFPRSKQVVSYLGLNPREHSSGGRQRLGRISKQGNVMMRWLLVEAAQTAARFDPELHRRYHRLKFRRGSSLAKVAIARQLAVRLYWMLRNQKGYAQLVRMQGSPGSGVVDPGPSTN

SEQ ID NO: 201051 - protein, 398 aa, unidentified
MLSIGIDVSKGKSTVCGMKPGGEIVYTPFEIQHTREGMSELVSLLRGSGEEVRVVLESTGSYHCPVVAALLENGIFVSVVNSLRMKRFCSQSIRRVKTDQIDAMQIALYGLAYWQELQPTRLPENTYRELQLLARQYYQMTSMLIKAKVDFNALCDQVLPGMQELMNDHAGRHKLSDFVLRYHHTTHILEMGETRFRKDYCKWAEKKGYRNCERMAALIFATAQNGIPVLPNAPSTQIVITEAIRVLHTVEASRDAILTQMQALAKTLPEYSLVREMPCIGDTLAPRLIAEIGDVRRFHSKRALIAYAGIDAPPYQSGKFSANNRHISKRGNRYLRKTGYEVMQSYVMHKPANDPIFTFIEKKRSEGKSGKLAMVAGLNKFLRVYYGKVTELYRSLPQ

SEQ ID NO: 201052 - protein, 351 aa, unidentified
MTTIKQCVGIDISQDSFAACICFSESSQTLRFDETKHFKNDKGGFNQLVRWVRKQCNASVETVYLMEATGVYYERLAHHLHKLKQVVHVVLPNTSKHYFSSLNIKTKTDALDARILSRFGVERKHKSWQPPSPMLLELRNLTRYYLQLQETKTVLNNIKHSKEAAHEVQSVILKSNRNLIRSIDKQIEVCKVNIEKLITNDPDLNAKVKKLLTIKGVGLITVATIIAETLGFEHFHSIKQLVSYAGYDVVERQSGTSIKGKTRISKKGNRYIRNALYFPAMVSCRFNPELRAAYLRIIQNKPSKMVGQVAIQRKLLALIYTLWKNDSQYIEGYKKEVAPAIKTEATLDSSY

SEQ ID NO: 201053 - protein, 341 aa, unidentified
MSDYSYFCGIDLAKNHFSLHAVDQNGKVLLHKSVTRSKLLTTIANMPLMRIGVEACGGAHYWARTLNKLGHDARIMAVKYVIPYRTKGKNDLNDAVAICEAVQRPSTRFVPVKSPEQQAILSVHRMREHWVHERTALMNRMRALLSEFGLIIPVGRSSLMKQVPLMLEDAENKLPHLARTVIADAYHHLGELNQRIADTEQVFDSFAKVSDNVQRVMKVRGIGPQTATAILASIGNGSQFDKSRDFSAWLGLVPKQYSTGGKPRLGRITKHGDKYLRTLLVHGARTVIANLGDKQDKLSQWCRGVLERRGMNRAIVALAAKNARIIWSLLHNQTEYENYAA

SEQ ID NO: 201054 - protein, 353 aa, unidentified
MNKVAQKGQVRKVRFEGSIWVGVDVHKASYVTAIRDQEGRFVQFTMAADNAAFVRKIASYGQPIALVAYEAGPCGYSLYRACEAAGITALVVAPSRIPRPVTRGNKTDRLDCRKLADYAARDMLVPVSVPTEEEEMLRSLQRRRHGLTDRIRAVKQYIKSLLLEYHIEEPHGLTKWSKASVDALRHLALNSVLRDTLDSHLRELGYLTVERQSVDQAIAKATPQAVLQRMKILQSVPGVGEVLATTFACEIFRPERFADGERLSSYVGLAPVVSQSGEGAATGRLVRTGQQRLRSLLVECAWMHKGRDAGAEQLYRRILSRTGCAQKGIVAVARRMLTLLWRLCIENRMYVAA

SEQ ID NO: 201055 - protein, 371 aa, unidentified
MPVSKLSQSRDFTGENFYIGLDVHKKSWSVTVRTSNLEVGHFSQTPDPKALYSYLNKKFPSGSYYSAYEAGFSGTSAHTALCKLGIQNIIVHAGDIPNTDKEKKNKTDVHDSRSIAKYLEKGLLKPIHVLTESQQELRSFYRLREMQIADQTRALNRLKGYLNFVGINMPSDMPDNRRITNKQLEWLEKQAMNTPTGKACLQQYIQDYRDQRSRVTEVTKALRNFIIESYSEAYENLMSVPGIGSIIAIALIAEIGDFNRFETPGEYCSYLGMIPWDHSSGDSTKTFGVQPRCNKHLRPLLVEAAWMAIRKDPGLLFYYKKHASKNNKHAIMKVARKIALIAKGVVTNNKRFDPDYLEPKPKMQHRKNAKL

SEQ ID NO: 201056 - protein, 322 aa, unidentified
MRENANASLCRYIALDIHKHYSVIAGVDRDGQELLEACRVEHEELEGWLTRHLKPSDRVVIESTTNAWHVYDLLEPLAAEVLVANPIRVKQIACARVKTDKKDTLILARLLAANLVPTVWVPPKEVRELRQLISQRRRLVGMHTQVVNRMHSVSHRHHLGHPRGKRFQEKDMGWREKLDGMEHFQLDLDLETKQYLQGQIERITGELRRMSHEEPWAEQMLYLMQIPGFGVVTGMTVLAAIGDVSRFESPKKLASYSGLVPGVEQSGVKLRGKGITKEGRRELRCLSCRLAPTCSRHGRWTDSPGGDPVKPDERWWKWPGER

SEQ ID NO: 201057 - protein, 343 aa, unidentified
MEQYVGIDVSLESASICVVDANGRIVREAKVASEPEALIAWFRMLQVTPTRIGLEAGPLSQWLYAGMREAGLPVELLETRHVRAAFKAMPVKTDRKDARGIAQLMRLGWFRPVHCKSLPAQETRALLTARKLVQSKRHDLEMSVRGILRGFGLKVGATTPRTFEGRIRELVRGHPTLLTVMEALLTARAALGEQLQRLEKRVRSLARDDQRARLLMSAPGVGAIVALTYVAAIDDPGRFRSSKNVGAHFGLTPKKYQSGETDVTGRISKIGDAGVRTALYEAANVILTRPVRGSSLKSWAARLAVRAGMRKAKVALARKLAVVLHRMLADGTSFLATRAAAMA

SEQ ID NO: 201058 - protein, 319 aa, unidentified
MAQNDPVVAGIDVSKDKVDVCIRALGLQQIFPSCAQGHRELVAWLGKHQVNKAVMEASGGYEGNWAKALREADIEVRIVDPKRVRSFAHSAGRMAKNDAIDAQMIAWFAETFRQAPGQVHDAAQQELVALVKARIALVDLKMQLAAQSEHSASGQVQKARDRVLKSLIGEIAKLEATIAARIDATPPLAERAEIIASVPGFAKTTSANLVAGMPELGQVSNEIAAALMGLAPYDDDSGNRRGERHIQGGRRWVRNAIYMPCVGAATLNNPVIKAYYDHLIARGKKPKVALVACMRKLIVILNTMIARRQKWDPSRNALS

SEQ ID NO: 201059 - protein, 358 aa, unidentified
MKYVGIDVHKKKCQAAVLNEEGALLDEIRFPNDPDGIEEFASKLTTFRDEVKAVVESTGNLWIQIHDRLEEHGFDVALSNPFKTRLIAEAKVKTDKVDARTLAGLLRADMLLTCYVPGEELRSRRELLRHRLNLVKNRTEVKNRIHGLLDKHGLRMPGTTAFSRDNVAWLRGLSLGFMDDAILRSDLAVLEAIDGQVLLIEEKIAALAAEDRRVRLLMTMTGVGYFTAMLVVSEVGDVGRFRGDKELASWMGLVPSVHQSGERARIGGVSGPGNKRLRWALVESAQAAVRHDARLGGMYERLSRRRGAGCAIVAVAHEMARIMYFMLVRGEPYRGENRGLTERKLKNMSKRALDGLRN

SEQ ID NO: 201060 - protein, 379 aa, unidentified
MEIITRNEKILYIGIDVHKDTYSLCSFDFHKNELSDEMTIKATTKAVIKYLEAIKKKHKEEILFACGYEAGPTGYGLCRGLQKAGYGCVVMAPTTMSNPEGKRRVKTDRIDARAIARILAYKSYSQVHLPSEEMEALKEYTRARDAKKRMFKKAKQELLSFLLRNGKTYPESGNYWTEKFFKWIKTVQFSEKWMQEAFNEYLAEVYSLKAKIELMDMKIREIAELEIIKDKVDMLVCFSGIDVTTAVETVVEIHDFTRFATAAQFVSYLGLCPGEDSSGKAKNMLPLTKAGNKRVRALFCESAKAIKRTNPYGQKSKRILERQKNASPEIVAYADKATKRIRTKMKHLEERGKNYNVSSAAGARELACFVWGMMNGKIS

SEQ ID NO: 201061 - protein, 327 aa, unidentified
MQFVGIDVSKKKFDTLWLRQTQPQKVKTRVFQNKRDQEKAVVQWLLKQTGANPSEIHVVLEATCVYHENLTYALHEAGMQVYVANPARTRDFAKSEGFLSKTDKLDSLCLALYAKEKHERLHQWQPEAPEIRQLRALSARLEALEKDQQREENRLEKAEFNQSSDRVIASIKDMISALKEEIRKLKQDIDDHIDGHPLLKKDRALLDSIKGVGDVMSRELLSLIHSRRFQSAKQCAAFVGLTPMHNESGDSRKPARIRKAGRSNVRGKLYMAAVTACTYNPDIRALRRRMEAKGKSGMAIVVAAMRKMVQIAYGVIKHQQEYTPQVA

SEQ ID NO: 201062 - protein, 431 aa, unidentified
MSHRLQVGVDFSLKRADFCLLFPDGRPLEPHVVFANSMPGYSLAKQLLLDALDTYSFQGLDLSGEATGYLWLPFFLQLSADPDLAPYDLNLFLLNPRWVKWFKKCFSQDDKCDQKDPFYIAERTRTHRPDTTWSPPSCLPLRFYTRLRFHIIQNLAREKCYFSTFLFLKASSYRRLKPFSDVFGATSRLVLTQQPTLDELAALPVEDLASHLYELSGHHLPDPMDNARKLNRAVQESFSLDQTLALPVQRILDLTLDHIRFLEDQVQQVDGWIASELEAYPVIAQLATIPGIGPVFSSGLGAEIGSVKRFLQAPKWDRKRKRFRPRNLRDAEDAVAKIAGLWWPRAASGDFEAQDRRLAKTGNRYLRYYLVQAANLMRRHIPEYAAYYHRKFKEAVKHHHKRALVLTARKSVGLVVGLLHRDEPYRSWEDR

SEQ ID NO: 201063 - protein, 352 aa, unidentified
MLIIGCDFHPGFQQVAIFDNRTGEIEEKRLQHRAEAEQFYRSLAGQEVLVGMEACGHYPWFERLLEELSMELWFGDAARVRASEVRKQKTDRRDAEHLLDLLRADRFPRIWVPSLEVRDVRQLLVHRHKQVQARTRTKNQLQAMALSCGVQKQRKLWTKAGRAELEQLPLLPYAAQRRQRLLEALDALEAEISELDRRVAEEAGQRPEAVRLMTHPGVGSVTALAMVLTLGPAERFGSAKQVGSYFGLIPSEDSSGGKQRLGRISKQGSSFLRFLLVEAGQTAARYDPQLKRFYRRLAVRKNRSVAKVAVARKLATRLYLMLREDWTYAQLSQAVMQVSPSHSVAGEQEPSV

SEQ ID NO: 201064 - protein, 394 aa, unidentified
MHKDKHCAVMIDCWMNKLGEVSFENRPSKFHAFVEDVRKICSNKEVVFGLEDTRGFGRNLAAYLVGRKFEVKHVNPAYTSAVRLASPIIHKDDSYDAYCVARVLRDMVDTLPEAKHEDIFWTIRQLVKRRDMIVKNNVMNKNQLHSQLSYSYPSYRKFFSQIDGKSAMCFWENYPSPEHVWATTPEKIYETIKPVHQALKIDRIHEIIAMIEKDGDTRKDYQPERDFIVKNIVKDIRHNKQLIEEIDEKLRKLIPLTGYKLQTMPGIDLVTEAQIISEIGDINRFPDSDKLARFMGLAPVQFSSAGKGKDQRCRNGNRALNAIFHFLAIQMVAISPSGKPRHPVFREYFEQKVKDGKNKPQALVCVARRLVRIIYGMMKTKTEYRPYEKVDEKN

SEQ ID NO: 201065 - protein, 354 aa, unidentified
MTEIMKGMIAAIGIDIGKNWFHVVGLDGGGAIALRQKWSRGQVEARLANMPRCLIGMEACVGAHHLSRRLSLLGHDARLMPAKYVRAYSKGQKNDFRDAEAIAEAVQRPTMKFVATKTADQLDLQALHRVRERLVSQRTGIINQIRAFLLERGVAVRQGLRVLRAELPGVLATRCDVLAPRMVRIIEDLAGDWRRLDERIEALSGEIEALARLDDGCERLMSVPGIGPIISSAMVAAIGTGDAFAKGRDFAAWLGLVPKQFSTGGRTVLGKISKRGNRYLRTLFVQAAWVVLIRSKNWERYGLKPWIEAAKRRLHRNVLAIALANKLARITWGVLAHGRSFEAAKVAEAATRPA

SEQ ID NO: 201066 - protein, 341 aa, unidentified
MSDYSYFCGIDLAKNHFSLHAVDQNGKVILHKSITRSKLLTTIANMPLMRIGVEACGGAHYWARTLNKLGHDTRIMAVKYVIPYRTKGKNDLNDAVAICEAVQRPLTRFVPVKSPEQQAILSVHRMREHWVRERTALMNRMRALLSEFGLIIPVGRSSLMKQVPLMIEDAENELPHLARTVIADAYHHLGELNQRIADTEQVFDSFAKVSDNVQRVMKVRGIGPQTATAILASIGNGAQFDKSRDFSAWLGLVPKQYSTGGKPRLGRITKHGDKYLRTLLVHGARTVIANLGDKQDKLSQWCRGVLERRGMNRAIVALAAKNARIIWSLLHNQTEYENYAA

SEQ ID NO: 201067 - protein, 422 aa, unidentified
MNPPTIANIDQKETICNDPQVCRIVDLPVYYELETNNGNRDYRIQIGGHYMNYNTVYVGMDVHKESFTLCSCKYEDEKASHYQRTPASYKNVLRYLAFLRTIYGEDTRFVCGYEAGCLGYSLYHQLENFNVECVILAPTTMLEQRSKRRIKTDKRDAEIIARSLAQHNYSPVHIPTETDNQTKEFIRMRDDHKAELKKIKQQILSFCLRQGYQYDGSGNWTAKHVKWLRSLKPAGLYKEILDEYLLTYTILTDKLNRLDQRIEELASKEEYKESVSKLTCFLGIKIHTALSVIVEVGDFQRFVSARKFAGYLGLVPGQHSSGDDRNGLGITKAGNTHVRRLLVESAQSYTRGKIGYKSRVLRSRQAGNSPQVINYADRANERLRRRYYKMVLKDGKKYNIAKTAIARELACFIWGMMTDNIY

SEQ ID NO: 201068 - protein, 338 aa, unidentified
MTDRNFIGLDYHMGSIQVSVMDRRGRELANRRCANDWHAVVETAQRHGPVARAAIESCVGAANLAEQLVSCAGWSVDLAHPGYVARMKQTPDKSDCTDAQVLADLTRVGYLPKVWLAPQPIRQLRAAVRYRQQLVDDQRRIKLRIRAILREQRIKNTSGVNPWRLGWLHWLAHQAPLDEPGRWIVGRHLQRLAQLKDELKITEQRLTGMTMADAVVERLRRQPGIGPVTAWVLRAEIGRFDRFASGKQLSRFCGLSPRNASSGQRTADAGLIKAGNPMLRNVLIEAAHRLARGHDRWRGLAARLRAGGKPAPVVAAAVANRYVRWLYHQMQGMDQTAA

SEQ ID NO: 201069 - protein, 350 aa, unidentified
MLIVGCDYHPGFQQIAFVDTETGEFEERRLQHRGEAEKFYRDLAARGVKVRVGMEASGHARWFERLLAELQLELWIGDAAEIRAKRVRKQKTDRQDAQHILTLLVQDRFPRIWVADWENRDLRQLLWHRHRMVQTRTRIMNQLQAVALNEGLRCKKRLWGKKGRQQLEGLRLAPWATRRRRDLLELLDRLNPVIAELTHEIEQEVEKCPAAQRLMTHPGVGALTALAFVLVIGTAERFQCGKQIASYLDLVPAEDSSGERRRLGHISKQGSAILRFFLVEAAQVTVRSVPEWRSKFFHLAMRRGRKIAKVAMARRLAVHLFWMWRKQWDYQQLNEFGPYAGKPGTGVGVH

SEQ ID NO: 201070 - protein, 394 aa, unidentified
MKLIGIDIGKNKHFFCIMDQQTGEIISQPISFSNDKEGFDFLIQKIKSYPKDSILIGMEDTGHYHFALLKYLLDLQYTVALINPKTTDFNRKMQGGITKNDKLDTINICDVLDTPERKKQYRITKVNSFDLYEQKQLTRHHHNLKEEENVYKNRLQKCIDIVFPEFNKLFNSKYGTVYMNILKTFGSAENIANTDIRTIRKCFEIEGRGNRISLTPERLKECARSSIGISSSAEVIQIKHLTAQIELIEEQLTEIDKKIEEFSIQNNSPILSIPGISHFSGTSILAELGDISNYSKPSQIIKFAGVAPLHYESSQFNAQHTAITKKGSKYLRKTLYQIILPVIRHNQVFYKYYQLKISQGKGHRCAQGHCVRKLLRIIYHLLKTNQQFDPQLLR

SEQ ID NO: 201071 - protein, 423 aa, unidentified
MDTMHERVAGLDVHKATIVACVRILAGAKVERECRTFDTTTDGLSALLAWLVDCRCSHVAMEATGVYWMPVWKILSDGAFSLIVANAAHIKNVPGRKTDMNDAMWIADLLACGLIQASFVPEEDVQELRSLMRTRKQLGREQTRHVQRIQKTLTEANIQLDSVLSDIMGASGRRIIEAMISGVRDPRKLAALASVQIKATPKQLYDALHGRLTDHHRFLLKLHLQQWDGLDATIREIDREVEARIARGDKEVKAGEAPFRDLIKLLSTIPGVSILSATTILSEIGRDMSRFPTAGHLVAWAGLCPGQNESAGKVKSTRLRKGAPWLKTMLVQCAWAAKRKKDSYYKAQFFRLQSRRGPQKAICAVAASILTAIYHILKDGTPHRDLGPDHFNRRSTEGQAKRLVVLLTKLGFDVQLQRKAEAA

SEQ ID NO: 201072 - protein, 344 aa, unidentified
MDHFAGLDVSVNETSICIVDGAGRIVRETKVASEPEALLAVLKIPAYHFKRVGLEAGPLSQWLFSALAEAGLPVICVETRHMKAVLKAQINKTDRNDARGIAQMMRVGLYRPVHVKTLRSQKLRMLLIHRKLLQSKAIAIENDLRGTLRNFGLKVGMVGKVKFEARIHELVENLPDLAVLVEPMLTVRRVLREQIVILHRRVLAIVRDDDVCRRLMTTPGVGPVVALTYRATVDVPARFRKSKSVGAVFGLTCAKYQSGEIDWSGRISRCGDEMMRVMLYEAAQSMLVRSKKWSWLKAWAMQVARRRGMKKAIVALARRLAVIMHRIWVDGTEFRWTRQEAAAV

SEQ ID NO: 201073 - protein, 297 aa, unidentified
MNTIGIDVDSVNLVCRIRRDGKDQPQAIFTNDPDGHRKLIRWATRRGKPARVCIEATGVYSLPLAISLHSAPRIEVMGVNPKAIKHFATARLQRGKTDSLDAATILDFLETMPFRAWQPPSEDVLELQHICRRIRQLNTELTRERNRHKAANRLGNWARVVANDTAVNMRHLQRRIDHLESAALVLIDRVPELKEKLDLLTSTTGIARKTGPRILAELLTLPEDMTGPQWVAHAGLDPRPYESGKSTHKPRRITKTGNRYLRDALYYPALVASRYDQNVKAFYDALIERGKKPNVPV

SEQ ID NO: 201074 - protein, 412 aa, unidentified
MEGETVIAGVDTHKDVHVLCLLDGLGRKIWSGSFGADPEGYDRLAEAIGDPGSCMVVGVEGTASYGAGLTRRLAELGYNVVEVLRPKRDKARPGEGKSDPLDAERAARKAASGKGCSVPKSQDGWVEAVRRLYVARRLAVATSTSCVACAKSMLTTAPSALRERFRGRERPKDLMPLLARGRKAGDALEESVLASLRSVAAVWKEARSQVESLDERIRALLEANAPALLGIEGCGTTTAAALVVAAGDNPGRLKGEAAFSMLCGVSPIPASSGKTDRHRLNRGGNRQANWALYEIAIKRMAYDERTRRYVARRTSEGKSRREAVRCLKRYIAREVYRVLMDPNPDGAAPEGPELAKMRKAMRVTQKKAAAELGLSAATLGHLERGKRRSTKLERRYYELLCELERALPQTAS

SEQ ID NO: 201075 - protein, 360 aa, unidentified
MDKDIREGVVVSLDLSSRKGWAFSMDSETGEVLRDGEYALTESGLSRLVRGLTAPRVVLEAGGNSAWVQAELEARGCEVWVVASTTLSSASGGRPRRKNDREDARRLWQMAVATPGMLVRVRHRGAQEQADLTLLRSRDHLVGMRTGAINHVRGTARSVGISLPRRSSESFASWTPEQWEKVPESMRGVFEAHLRIIAVLTEQIAAMDREVKRVARERYPVVERLQQPYGVGPVISLAFVLTIADPHRFRKSRAVGPYLGLAPGQYQSGDMDPQLGIDKRGDSFLRRLLVQGAHCILGPKGPPSDLRAFGERLCARGGTRAKKRAVVAVARKLAVLLHRLWVSGEAYEPNRQGRAAELVA

SEQ ID NO: 201076 - protein, 368 aa, unidentified
MFTERTAIGLDVHARSVQAEALDTVTGEVVQARLAGELATVLDWVEGVRAVHGPVRVAYEAGPTGFGLARALAQAGIGCVVAAPSKMLRPAGDKVKTDKRDAALLVSLLRLDELVEVRVPSLAQEAARDLTRARDDARTDLMAARQRLSKLLLRQSIVYPVGKQAWTGVHDRWLRSWRRGGLGGAGIGTLHAFDTAYDTVVQAKARRDHLDQLIGQMAADSEFTAVTNRLACLRGISTLTGFALAVEIGDWHRFTGRSIASFLGLTPSEHSSGQSRILGPITRAGNAHARRLLIEAAWHHKPQYRPGPTMRARWAKAPTQAATRGDTGNRRLHHRWMRLLARNKKTTIINTAIARELAGWCWCLAVME

SEQ ID NO: 201077 - protein, 302 aa, unidentified
MTSMPQPVADDQDSSRIEEIILGADTHQDLHVAAVITALGVLRETKTFPASAAGYDALLSWAGTFGILRRAGVECTGSYGAALARHLRQAGIEVIEVNQPDKANRRRQGKTDSLDAEAAARAVLSGRACGSAKAGDGPVEMLRMFKLAKSSAIKARTQAINQLKAVIIAADPQLRETLSGLSNLQLIRRCAQLDIDTLQDTTSAAAYTLRLLARRILTLTDEIRELEQQITTAVTNHTPQLLTRCGVGPDNAAALLIAAGDNPDRLRSEASFAALCGVSPLEASSGKTRRRRLNRGGNRQAN

SEQ ID NO: 201078 - protein, 346 aa, unidentified
MEYIALDVHKNYTWARVENGKGDRLYESRLAHVHGSIKNFVNRWTGGSPVAVETVGNWYWVVDEIEAGGGTPQLVNARLAKLMMGNVNKSDKLDCKGMNRLQRTGTLPTVWIPSSSVRDGRELARTRMVLSRQRTQLKNRIHATLGKYGYTVKGASDAFGKKGREIIEELLLKLPPHTQQALRLILDELDHVTDNLKAIEGHMIEIFSPCPQTQWLKSLPGVADILAVVIWTEIGTIERFNRAEQLASYCGLVSRENSSGGKIRLGPVRRDVNVYLKWAFVEAANSALLNAGRCGYGHISRLYERIKPRRGHGKAKVAVARHLAEANFWMLKKGEPYREPMPSTQR

SEQ ID NO: 201079 - protein, 348 aa, unidentified
MRFYTNQHKFYCGIDLHARSMYLCILDQEGNTMLHHNCRATPDAFIRAIQPYREDVVVAVECMFVWYWLADLCSKEAIPFVLGHALYMKAIHGGKSKNDKIDSKKIAALLRGGTLPVAYVYPATMRSTRDLLRRRNHLMRKRSELLAHIQNTNSQYNLPEFGKKLAYKANRDGVTDHFPDPSVQKSIEVNLQLLDLYDRLLTELELYIVKQAKGHDVRSFYLLRSIPGMGKILSLIVLYEVHDINRFARVQDFVSYCRLVKCPRESGGKKSSAKNSKIGNAHLKWAFSEAACLFLRGNEQAQLYHNRLVNKHGKGKALSILAHKIGRAVYFMLKREEPFSMDTFFART

SEQ ID NO: 201080 - protein, 311 aa, unidentified
MTQITIGAGISKDTLDVYRLPDGEHRQFANDAAGHKALIAFAGKGVTRIVFEPTGPYHRALETALSKRGLPLVKVNPRQARRFAQAAGKLAKTDRIDAANLARMGAVLELEGLQPRPEYLNELKELYVARAALIKDRTAAKNRQKQIALPLLKRQNARRLAQTGRQIGAIEAAIEAKLKADAALARKLDILTSIPGLSKITAFALLIEMPELGRLDGKQAASLAGLAPMTRQSGRWTGRAFMSGGRASIRRALYMPALVAARFNQDLKAKYERLIEAGKPPKLAIAAIMRKLLVLANALLKGDRRWTPKPA

SEQ ID NO: 201081 - protein, 345 aa, unidentified
MEIIRVGVDLAKDVFQLHGVDSREHVVWQKRLRRREWLSELQKRVPEGAEIGMEACAGAHYWGRELAARGYRVKLMAPQFVKPYVKSNKSDRNDAAAICEAMNRPSMRFVALKSVEQQDVLAVHRVRSELIKQRTAKVNQIRGLVGEHGLVAPQRVHALRKALSWWLEDASNELSMRFRRLLSGLAGDLRHLDARIKEQDDELAAMVKESPAAQRLMALRGVGPITATALVATLGTGDGFARGRDFAVTLGLTPKHHGTGGKERMLGISKRGNAYLRTLLIHGARATVQVAKGKADPLSRWINSLGERRHTNVVAIAVANKTARMAWALLHHEREYDENWSTATA

SEQ ID NO: 201082 - protein, 347 aa, unidentified
MKYYAGIDVSLNSSNVCVVDASGKIVREGKVASEPVTLITWLGSLGVNLERIGLEAGPLSQWLYGALRETGLAVELLETRHVKTALSTMPVKTDRNDARGIAQLMRLGWFRPVHCKSMAAQEVRALLTARKLVQSKLYDIEMSLRGILRGFGLKVGPTTSQSFAARINHLVDGQTSLEAVAAALLSLHAVALREFKSLEKSVRQISRADARVRLLMSTPGVGPLVALTYVAAIDDPARFTSSKSVGAYFGLTPKKYQSGETDVSGRISKMGDGSVRTALYEAAHVILTRPIKGGALKSWAMKLARRAGMMKAKVALARKLAVVMHRMWIDAIKFDTDKASGCVRVAA

SEQ ID NO: 201083 - protein, 401 aa, unidentified
MKRLSGGIDVGSEFHHITILDEEDHILYNQKVSHQLNEFIETIKQFKKIEKKEKGEISFALEGKNGYSAPLDRILLNQGFTLYNVDNFKLKRFREAFAGEWRDDQRDALMLSKMLKLKDHINSQREKVFIKIEKPSPVTESLKLLSRHQQTLIDEKVRLTNRLRKKLLEVCPEILKLAKLKNKKLIAILAKYPDFSKYKSITVKSLLKIKGIGEKQAPFLLKRLNHIAYMPGLTDIYKTIILSYAKRISELQKEVKDIDKSLDKIGNRSKEVKHLKTLPGVATKLASRFIGEIGDIHRFPSEKQLAIYCGIACVNNDLGKITKAKAVYKANKICKQTLITMAGGSIRLSLQCRAYYLKKRAEGKSHNHALRCLARQLIKVIYKILTEDRDYIIRKELKKVA

SEQ ID NO: 201084 - protein, 481 aa, unidentified
MKAKQRGKSDPASFAKRSKWHDMNRKQRRETMRKLQSEDLSLEVIHPDAAGIDIGNESHYVAVPQKRDREPVRRFGCTTAELKSIADWLKQCGIRTVAMQSTGVYWIAVFDILEEAGFEVYLVNARETKNLPGRKSDVQESQWLMKLHTYGLLRNSFRPAQEIRTMRTYWRQRNDLVRSASRHIQRIQKTLTQMNIQLANVLSDVSGVTGQTIIKAILGGERDPHQLAAFRDPRVKASQEEIARSLEGHWEPDLLFVLKQEQEGYEFCQKQISQCDGQLEHYLLQREDRSHGAPLPEEKRKTRLRKKYGNNPQFDLRAELFRMTGTDLTRIDGIDIVTATTIFSEAGYDMSRWETENHFVSWLRLCPDNRISGEKIIGQGRLPTNNRATIALKMAASGLRKSQTYLGAQFRRLRTKLGAPVAIKAMAAKLARLVYRMLRYGMNYVDQGVQFYEAQHRKLQINSLKRKAAQFGFQIVEALAA

SEQ ID NO: 201085 - protein, 505 aa, unidentified
MVPGRVRKPLVTPRRFSRLPAIPLRRVPALSHDRGRLSAMAFTFTEETVMPRGRRPTTRAATPPILNPHAAGIDIGATEIYVCVPLDRDPQPIRRFATFTQDLRAVAIWLTQCGVTSVAMESTGVYWIPLYQLLAARGLEVCLVNARHVKNVPGRKTDVQDCQWLQYLHSVGLLRASFRPPETVCAVRSLLRHRDNLVRLAAVHTQHIQKALNQMNLQLHHVLSDITGVTGLAILDAILAGERDPTVLAGHRDRRIKASPDTIAKALVGDYRPEHLFTLRQSLEAYRHYQRLIEECDLQVQGLLDAFDAAIDPVAQPLPPATTTHRKPQGNAPRFDLRAELYRILGIDLTQVPGLNTATVYTCFAELGADLGKFPTAKHFASWLGLCPDNRISGGKVLSVKTRHVKHRVAQALRLAAQSLYRSHSVLGAYFRRMRAKLGAPKAITATAHKLARILYHLLTTHEPYAESQLAKAEAVYRQRTESRLYAQARALGFQLIPVTGQSVS

SEQ ID NO: 201086 - protein, 386 aa, unidentified
MRDTTFIPQEYDVFAGLDVSKKSIAATFTSQQGFIRSLQMPHSVEYLLNHVRKHFANQKIAFVYEAGPTGYGLYDGLAAHGYSCMIAAPAMIPRAPGHRVKTNRLDSRGLSESLRGGQLKSIHVPSPVYRELRHLTQLRDTMVRQAAAHKQRIKALLLLEGIDFPPAAAGSQWTLRVKAQLRKLKCSRTVRFKLDQLLDTLEFSEKQVVNSTKEIRRFCKEDAELSQSIAYLMSIPGIGSIVASQLLARMGDWREIDNVRQLGSFLGLVPTENSTGDRVDRGSITRLGDGRLRSKLIQAAWSAIRQDTELREFYRSVCRRNPRGKGARIAIVAVARKLSTRIYAVLKNQRPYIVREQVHSAPLTQEETSPQGTTRRCAEPGETDDS

SEQ ID NO: 201087 - protein, 345 aa, unidentified
MKKGITIGMDLGDKKHQVCILDKTGKIIAEEEINSNRVTVTKFFERYRGAVVAMETGTHSRWVSQVAEAEGLEVLVGNARKLRMIWMSRQKSDTRDAVMLARIARFDPALLCPIRHRGEQVQMDLEIIRARDLLVQERARMIHHVRGVVKSMGERLATSSTASFGHKAKIPEALNEALKPMLEMIRELTKKIRAYDLMIKETAARKYPETEQLSQVGGVGPLTALAYVLTLEEPKRFAKSRMVGAYLGLVPRLDQSGQTDKQLRITKHGDGYLRRLLVGSAHYILGPFGPDCDLRTFGLKLMQRGGKNAKKRAVVAVARKLAVLLHALWRSGQQYEPKRRQQAAA

SEQ ID NO: 201088 - protein, 284 aa, unidentified
MDGHAKQDEVILGVDTHLDTHVGVAISQSGKFLGTYAAPTTQSGYLSLLTWARSFGCVCRVGVEGTGTYGAGLARVLREQGIEVLEVNRPDRSKRRLKGKSDPTDAESAARSVLSGVATAIPEIQSGAAEALRTISVARPSAVKAKTQAINQLRAILVGAPQDIRERLWKPKAEHCVAACARLRNLGPTLLLQTLTTALRLLAKRWLALATELKELDASLETLTNVSAPHLRAQFSIGPQTAAVLIPTAGDNQERLRSEAALAALCGVNPLPASSGNRDGSNEK

SEQ ID NO: 201089 - protein, 391 aa, unidentified
MIFVGIDVAKDKHDCFILNSEGTVLADVFTIANNRIGFETLLSRIQSCSQGESKIKVGLEATGHYSYNLLGFLLDSGLATYVINPLHTNLYRKSLSLRRTKTDRIDARTIAMMLMSDVDLKSYSNTAYHNEELKSLTRYRFDKVKERAKLKSSVARLVNILFPELEKLVSSLHIAVVYALLSNYPGASYIANANTEELAETLCTASKGRYTKSKTAEIQVAAGVSIGSKMPAKSMELKHTIALIRELDKEISEVESAIDKITSQMDSPIFTIPGIGRHMGAMILAEVGDFSNFASADKLLAYAGLSPSTYQSGQLQNCYAHMEKRGSRYLRYALFNAAKYVCLWCPTFSAYLEKKRSEGKHYNVAISHAAKKLVRLIFAIQRSGKAFLADY

SEQ ID NO: 201090 - protein, 461 aa, unidentified
MAKKAKKVKTAKGAELRIVNPDAAGIDIADGIMQVCVPADRSKDNNRAFRAYTSDLHAISAWLRECGIKTVAMESTGVYWIPLFCRLQEDGLDVVLTNARDVKNITERKTDESDAEWLMLLHQYGLLKASFQPHNDAKRMRTLTRHRDTLSREASSIVLRMQKAMQQMNIKLTLVLSDITGKSGIRIIEAILAGERDPKRLADLADIQCKTPKEEIAKALEGNWEEDLMFVLRQNYDTFKHYCTQLGECDAELEKLMENYRAEVAKVEDTSYSPAKKRRDYKKTRHTVGFDVERKAYEMWGVNVFEIPGISHLTALELMSELGHDFTRKFPSSKQFCCWCNISPNTKISGGKRISSHVPHRRNNVGLIFRSIASSLANAKNQLGNFYRRIRSRAGGKAAVIATAHKVAEIFFAMVANQTTYNPERVGIDEKVLLEKRITRYKRELERITGTHIEIGNACVP

SEQ ID NO: 201091 - protein, 340 aa, unidentified
MKKEAKFYLGMDVSKLWIDIAVMSVVNHEKQQVITERFDNDAAGMKALDKWLKKHQVTFDENSLLVIENTGVYHRLVWQYCSTHALPLYIGNATHIKYSFGIARGKNDKIDSQRLCAYAFKNADELKATPVLNPVFLRLKDMMTARSRLLAQKNSIKVYLAEMKSSNSEETRQIIEQAHKAALEGIKQSIKIVEKQIEQMIQQDAAIKKNYDLLLSVPGIGHLTAVYVICCTNNFICKITGKQLASYGGVAPFSNTSGTSIKGRDKVHKMANKDLKKLLHMGAISAITHYPEFRDYYERKVKEGKHEQSVINAVRSKIALRAVSVINNQQLYVDKYKKAA

SEQ ID NO: 201092 - protein, 366 aa, unidentified
MMGWMAPLRHLSAKMLGVESPADGEPSMSEITTIGLDLAKHVFQVHGVDANGATVVRKRLRRVQVLAFFSRLPRCLIGLEACTTAHYWARELRTLGHEVQLMPAQYVKAYVKRNKNDAADAEAICEAVVRPTMRFVPVKTPEQQAAVLLHRGRERLVRQRTGLVNAMRAHLAEFGVVAPQGLRNVGKLITIVRDESDARLPDLARQVLAVLAAQIEQIEAAVAALEKQLMAWHKSNAVSQRLATIPGIGPIIATAIAATVVEPSAFRSGREFAAWLGLVPRQNSTGGKTRLGGISKRGNQYLRRLLINGASANLLRSKLTNADPWVIGMRRRRPSLVVAVALANKTARIAWAVMHRQEVYQRMAAA

SEQ ID NO: 201093 - protein, 342 aa, unidentified
MKNYQIGIDISKEKVNICLRSEKKSVWEHETPNTVASIKRAIRKWMKDNEVATDDVVVCAEYTGRYIYPLVCVCDELELFLWMEDPTRIKNSFGIARGKDDKVDARRIAEYADRFSDKAVAYGMPDHTLASIKSKLADRDMLLEDRKRYESQLHDQKGFMDPKDYAQKSRLWTTVINTLNRQLALLDEQLAALVASDKRISHQMELLKSVDGIGDRVALYMVAVTMGFTRFQNPRQFFCYAGLAPFRYTSGKSIHSKSKVSQRANKHIKALLHLAALSAATHMKDNEYRQYYERKTAEGKHPMSVLNVIRAKLVSRMFAVIRRDSEYQRNYVFPNSLEKNLT

SEQ ID NO: 201094 - protein, 395 aa, unidentified
MMYVGVDIGKRNHEMGIVDAQGQRLGASFSFSNTSQGAKSMLDYLYRLVSKEEELQIGMEATGHYWLSLYSFLSKLGFQVAVINPLQSDSFRHLQLRKTKTDAVDAFLIADLLRFGQYKTTVLGEEKILSLRQLSRFRLSTVDLCSGLKKQVIALLDQLFPEYETLFSNLFGKSSMEILQEYTTPEALVNLDTETLTKVLLKASKGRLGKAKAQALQAAARDSFGLQYAQESLVFQLKLLLQQIQFTEQQITQVEEKIALLLAEVNTVVTTLPGVGPVIGAILMGEIGDIARFEDCHKLVAFAGLDASVRQSGDFMGTKNHISKRGSPYLRRAIWSAAVVAATHDPVLAAFYQKKRAEGKAHGTAIGAVARKLTFAIYAVLRDNKPYQVPAHPAS

SEQ ID NO: 201095 - protein, 437 aa, unidentified
MATLSHENYTLCCHNVNALKEILEDFNDSLLDSRLYHVGVDLAARVYQVCYFDENGQDQNICYSKEQFKLFLQNPPRKPLFIAMEGCSGCNYWADVIESYGHIPVIINAKFIKNMKRRGSNKDDKNDALSIRKALRCGEDLPLSLRHSQTDMVIKALFSSYEQTIKDVTKICNITRGYLIDIGEYGEHDSCTTGEMAIKCIRAFIEGHIHDPRFEAHIAYLQINLKNLQQSLELLDQYTQELEKHADRNEMCKLIQTVPGMGKLIALLMAVIIKDISRFKSARALQAFFGIVTAHTGSGNKIVPGRMSIKGDPLFKKWIYQAVLAIAHKGRYKNLKPRSQWLIDTFDESSSAFKMKVIKAAAKIIRIVYGVLTRGIGYDPEIDDSLGSKKDRTNRHPNNRKSSYNQDGNNQFNHDVNKKKLPSFDNATELQKLGATA

SEQ ID NO: 201096 - protein, 345 aa, unidentified
MLYVGIDVHKKNLQVCVLDGEGNRLSNCRLENQPVSVASYFATIETPAGIALEATHNWGMLYDLLTDQGFEVHICHSREAKMIGLASVKTDKVDAFKLAILLRAGLLPEAYVPCADSRELRSLVRGRASLMSQSTAIKNQIHAILRANWISSPWTDTFGKSGRRFLESLELAECYKLVIASKLSILDGIGEQVTLLNNEIVRRAHLDARAMLITTAPGFAEFRAVMTLAEIIDISRFSRAEKLVSYTGLNPREHSSGEKTRRGKITKEGSAWLRWIFVEAAQQAIKEEGKIRDLYLRVSERKGHNRGVVAAARELVVAVFWMLTRMEPYRADGKRVHIALASKVG

SEQ ID NO: 201097 - protein, 410 aa, unidentified
MAERFVGIDVALHEHRVAVLDRDGEAVGQSFTIAASQDGVATLLRTLAARAATAAQTLIGLEASGHLWENLEAALVGAGYRVIVLNPLQTRRYRDVVRRKAKTDDIDAHVIAGLLRSGAAQASYVPDEPIQSLRELARLRARLMADRQDYLRRLVAQLDVVLPEHHAVLGDLLTARARGILAQFPTAQHLAHATPRAIRRAAADAGARGFSLDDATGVRDRARRSLYSGKAAAARAHVVRTLVSQLERLTSAIDEVDCAATTLLPPSEPGTGPSDAELLQTIPGIGPQTAATLLGELGTLTRFTDARALVAYVGFYPVINQSGDRAATPRLSRVGSRLARHSLYLAAVNAVRRSGEWRTIYLRKKSQGKTGKQALVVVAVKLLHAVYAMLKHRQPYNPSRLLVAPATIGS

SEQ ID NO: 201098 - protein, 365 aa, unidentified
MPSYTNAPDRRSVRSIGGHLAALDKSLRKLLSRGQRLHVVYEAGPCGFVIWRHLTALGTACEVVAPSLIPKRAGDRVKTDRRDAMQLARLSRDGSLTAVRVPGVADEAVRDLVRAREDAVREQRNARHRLKALLLRNGIAYAGKSSWTAAHLRWLATLKMAHPAQQIGFQEYLHGISESTARITRLEQAMRETLGDWTLKPLVQALQALRGVSLIGAMTLVAELQDFLRFEHPRKLMAYVGLVPGEYTSGQKRRQRSITKAGNSAARRMLVEIAWHYQHPARITPIIARRQAELPKAVTDIAWAAQLRLSAKFRRLGARRLMKTKAVVAVARELAGFVWAIGCEVQTSGWQGLPITPDMPDAAAA

SEQ ID NO: 201099 - protein, 420 aa, unidentified
MKVVYQTCCGVDVHKSFLVATIIKTTYGVEPSYQKKRFSTFNNSILKFKNWLIENQCRDVCMESTGKYWVPVFNLLEGDINVTIANPKWVKAVKGNKDDTKDSKWIGDLFRLGLVPGSYIPCKPIRILREFTRYRYKLTSCRTSEKNRYQNALTVCNVALDSVVSDIFGKSATSVIDYLIKQSDNSISHEEIATKLLRSLKKKSDRVIESIEGYQMTDSQKYRMHLIRAHLDYITSTINDIDTMLDSLISPYENAVQLLCTIPGVDRNSAITVISEIGTDMTPFSNSKRLCCWAGLTPGNNESAGKKKSVRITRAGVYLKPALVQVAHAAVKSNKSPYYKQKYERITKHRGKKRAIIAIARMILTAIYQMLSTGEAWNPTDLYKIDMPEPLKEKQKEKAIKQAKQLLIREGILSESQLAS

SEQ ID NO: 201100 - protein, 465 aa, unidentified
MRTDKKLWRNRKARKELARRLQSENPGLEVLHPHAAGIDVGNSAHYVAVRPDRDPQPVRRFECFTADLHRLANWLQSCGVKTVALQSTGVYWIPLYDILEERGFEVYLVNARHTKNLPGRKSDVQESQWLLKLHTYGLLNNSFQPPSKIRILRTYWRQRLQHVTGAATCVQRMQKALTQMNIQLANVISDLSGVTGQMIVRAIVGGERDPLKLAELSHPRIQASRGEIAKSLEGNWRQELIFVLQQEIEMYDTYQRRVAECDQQLQKQLTSFADTVLPPVNEALPPKKKKKQNKNNPHFHLADELQRITGVDLTRIDGVDVIVAQTLVSEVGLDMSRWKTEAHFASWLGLCPDNRISGDKVLARGTRHVLNRAANALRLGASTLLRSQTYLGAQYRRLRSKLGAPKAITAMAHRLARLVYRMLKYGQQYVDKGAEYYDQRNRQQQIEFVRKKAAQLGLQVTPAHA

SEQ ID NO: 201101 - protein, 339 aa, unidentified
MTQVIRIGLDLAKTVFEVHGVDGQETVVLRRSLRRRKVLAFFAQLPPCLVGMEACATGHYWARELTKLGHDARLIAPHYAKAYVRRHSNDAADAAAICEAVGRPSMRFVDVKTEAQQSAACLHKLREMLVKQQTMWINHLRGLMAEFGIVVAAGPQHVGELLAVLADPEDQRLPAAAREVLIQAAEALRDTQRRVEAIEKRIVAWGRDNETCRHLITAPGYGPILASAMAAIVVNPAAFASGRHFAASLGLTPRLEGTGGKVRLGPISKRGNGYLRRLLVNGAMAVLRSRRAKQDPWLAQLLASKPRLVAAVAVANKMARIGWAMMMRQEDFRARPAAA

SEQ ID NO: 201102 - protein, 387 aa, unidentified
MPQANDLSRSPVALNQDGTLIAVVEMSRSSWLVAGIVPGIARHPLKKLDPDEAALRRLLERWRGEATQAGRTIARIAVAFEAGRDGFWLARWLRARGIEAYVIHPTSVAVLREHRRAKTDRLDTELLKRAFLGWLRGEPGHCSMAAIPTIEGEDARRPNRERESLVGERTRVVNRMKANLARLGIRNFRPTLRSASERLDALRTPEGTPLPPNTLAELRRDMARLHFIAGQIREIEDARQERLEGPSDQGPKAMVRLLAQMVGIGIETADMLVHEVLSRNLRDRRAVARYAGLTGAPDESGAKRREKGLAKAGNARVRRGMVQLAWRFLLFQKDSALAQWYRARTADARGGTRKTMIVALARKLLIALWRFVTTGEAPEGVALRPAS

SEQ ID NO: 201103 - protein, 351 aa, unidentified
MSEYIAFDSHKHYTWVDRQDHSGGKNRCHRLEHAPGAVREYLSGSEPGTAVAVEATGNWYWIINEIEQAGLQPRLVHPRKAKLMMGLTNKTDKLDAQGLNRLQRNGTLPTVWIPPGPLRDLRELTRTRLVLVGQRTRLKNRLSATLAKYGTPASEYSDPYGKRGRAELEKHLQGLPEQTRWVSGQLLAQLDFVGSQVRQLEQRLAELVEMTPQMQWLLTMPGVGVILAATIALEIGEIERFPSAMHLASYSGTTPRVHASGGKVRYGPLRVDVNRYLKWAFVEAANSVAVNQSRCPERHVSQLYRRLRQRKGHPKAIGAVARHLAEAAFHVLRQKEMYRDPSLGRGRTSQG

SEQ ID NO: 201104 - protein, 315 aa, unidentified
MDAILERCAGLDVHQDNIVVCLLSGPLEKKPSKEIQTFGTTTKELLQLQEWLLARECTHVAMESTGVYWKPIWNVLEDMCELTLANPTRIKNVPGRKTDYNDAEWIARLHRSGLIEKSFVPHKDIRDLRDLTRYRRKLLQNVTQEKNRVHKILQDANLKLTTFMSDIFGVSGRALLESIVNGEVLDEKQVRDMVKSTLKRKVPELMESLNGRLRIHHRNMIRRHLEHIAYLEKEIVELEAEIDSLLTPHHLEMELLDTIPGINHDAAASIVAELGTDMSQFPSDGHVSSWAGVCPANHESNGKKKEKRTNEEVEG

SEQ ID NO: 201105 - protein, 387 aa, unidentified
MEQSKQRVVGLDVHPDSFAGAILEGSNPWRAQLVHTSRRVELGQLEEWAGHQTRPNDVLVLEASGNAFAVAERLQEVGRKVVILDSHRAGKVGKTYCATDRVDAIKIARIYLSGLSPMVWQPDAKTRERREVFSAYQAVVKEATRLQQQLKSMLNEHCVRLEKGFRLCHPRALSRLLKRREWSSAQGMLLGQLHAGLVQARQRRQTLRRYMAGEILGTPELLRLSRLCGISLVTLYGLVSSIGEITRFSHSSKLVAYFGLNPSICQSGNYEGATALQRHGRGAMRALLVQSAKKLLQVKNPLQKWGLQVAARRGRNKAAVAVARKLCVAVWHVLQGHQIGALERLDTLHTKLHKFATELGLPIIKQLGYETKEAFVQKKLYLLRTYP

SEQ ID NO: 201106 - protein, 479 aa, unidentified
MESKPKEKNNQPTQPHWREMNRKQRRDTMRKIQSEDLSLELVHRDAAGIDIGNESHYVAGPPSRDNQPVRRFGCTTAELKAMAAWLKQCGIRTVAMQSTSVYWIAVYDILEQAGLEVYLVNARDTKNLPGRKSDVQESQWLMKLHTYGLLRNSFRPSQEIRTMRTYWRQRNDLVQSASRHILRMQKAMTQMNIQLANVLSDLNGATGQSIIKAILAGERNPHKLAEFRDPRVKASEEEIARSLEGNWQPDLLFVLKQEQDGYEFCQKQMAECDRQLNQHLEQSEDHSRGASLPEEKRQGRLKKKKGNAPRFDLREGLFRLTGTDLTRIDSVDVMTATTVISETGYDMSKWQTENHFVSWLRLRPDNRISGEKIIGKGRLPTNNRATVALKMAATTLRKSNTYLGAQFRRLRTKLGAPCAIKAMAAKLARLIYRMLRYGMKYVDQGAAVYELKHRELQVHQLKWKAASLGYQVTPIPVAT

SEQ ID NO: 201107 - protein, 327 aa, unidentified
MAKHTTICAGIDTGKRKLDVALDGSSEPLQIDNTPEGYKVLLDWLRCHRVKRIGIEASGGYEQAVVAELRRKRFVVVTFQPAQVRAYAKFHLQRAKNDKIDAALIAACTAAVKKIHPPPDARLLPFAEHLTMIDQIGEDIALLKNRLETCRNLRIQQVWKEDLARLAKRERVEFKALVAAIREHSDLAERLDLIYSVNGAGMPTAVTILVRMPEIGQLTREQAAALAGLAPYDDDSGNHIGTRHIDGGRKRLRRALYTAALPASFRWNPQLIALYKRLIAAGKGHKRALIACARKLLIFINAIVARGIPWDHEPPPNMAATALPQTG

SEQ ID NO: 201108 - protein, 367 aa, unidentified
MFERTSVGLDVHARSVVACALDGRTGEVFRRRLTPDRDEILAWIISLPPPAKVVYEAGPTGFGLARFLLSAGIDTVIAAPSKLQRPSGDRVKTDARDALHLARLLKLGEITAVQVPSVDQEAARDLVRFREDVRGDLMRSRHRISKLLLRQGIVYSGGQAWTGTHELWLARQRFDSPARQLTYASSLEAMHEISDRRDRLDQAIASMAYASEYTPIVRSLQCLRGISTLTAFGLAVEIGDWDRFTGSTIGAYLGLVPTERSSGASRSQGSITKTGNGHARRLLVEAAWHHRRPYNVSSRLMRSRWEEASSQARARGHAGNRRLHERWMIYLERRKRPVIANVAIARELSGWCWSLATGSLETTQTTT

SEQ ID NO: 201109 - protein, 316 aa, unidentified
MDEILRFVGIDVSKDHLDVHVRPDDQQRRFEYDADGLTDLVKMQTELRPNLIVIEATGGYEQRVVATLAAQQLPVVVVNARRVRDFAKATGQLAKTDRLDAAVLSDFGEKLRPQLRTLPDESREELKALLVRRRQLVDMMTAEKNRQSTAPKRIRRHIQTHIDWLQKQLAEIDEDLAGTIQQSPMWKAKDEILQSTPGIGPTTSTTMLAALPELGSLNRHTIAALVGVAPMNQDSGKFRGRRAIQAGRHSVRTILFMSTLVATKHNPVIRAFYQRLLAAGKPKMVAITACMRKLLTILNAMLKTNSHWNSDHAKTC

SEQ ID NO: 201110 - protein, 326 aa, unidentified
MIFLGIDVSKKKLDVKLLVDPAQVKFKTKSVANTAQGIAELLVWTTHQGRCAVDEVHAVMEATGVYHELAATALCDAGARVSVVNPVQIKEFARGLAVKSKTDGIDSAVLARYGALVNPAPWQPEPQEVRELKALLSRLDAIEADLRRELNRQEKTEHTAVPAEVLASLANSVAFLREEQARLQRRIKDHIDGHPTLRQDRALLETIPAIGDKTAFRMVALLRSRAFASATQAAAYVGLVPVEHQSGSSICKRPRLSKAGNARVRAALYMAAVVATRYNPDIRAQYQRLLAAGKSKMSALGAAMRKLVHICFGVLKHQTPYVAQCT

SEQ ID NO: 201111 - protein, 347 aa, unidentified
MVTLGGDCHKRSHTVVAVDENGRQLGELRVEATPVGHGEALGWGRQWPERRWALENCRHLSRGLERDLLAAGEAVLQVSPRLMGGARRFGREQGKSDPIDALAVARAALREANLPVAQLEGRSRDLKLLVDHREDLVGERTRIQNRLLWHLHSLEPGFKVGTRGLVHSIVMTEVRRRLEMHRDVEAEVARELVDRLVELTQSVNALQHRIEALAAELAPSLLRLPGCGGLSTAKLVAETADVRRFHSSSAFAMHNGTAPIPVWSGNRERHRLNRGGNRQLNVALHRIAITQIRLGGLGSSYVARRIASGDTKTEAIRALRRQISDEVYRRLCKDALAPVSVPSATAA

SEQ ID NO: 201112 - protein, 377 aa, unidentified
MADRITYVGLDVHKEGIAVAAAEGGGRGEVREYGRIANTPAALDRLAGKLGHEGVWLRFCYEAGPCGYGIQRHLSARGHECVVVAPSLTPKRAGDRVKTDRRDAASLARLHRAGELTAVWVPDPGHEAMRDLVRARLDAVHALRRARQQLSGFLLRHGCHYGRPAWTKLHRRWLAGLKFEQAVHHLVLEDYVQAVEAAEARRDRLTAQIAAMLPDWTLAPVVAALQTMRGMALVNAATLIAELGDLSRFANPRQLMAYLGLVPSEHSSGASVRRGGLTKPAPGGEQGAGNGAARRLLIEAAWCYRFPARVSRELLLRQEEQPKRIREIAWKAQVRLCARYRKLARTGKPANVVTAAIARELAGFVWAIARSVPPAAD

SEQ ID NO: 201113 - protein, 356 aa, unidentified
MGDLVGRLKEDHRHADSFGWIDLGKTTFHLVALGEGSKVLFKKKFTQKQLITFTANLQTSLIGMEACSGAHFLGRALREQGHDVKLIPAQFVKPFVKSNKNDFLDAEAIAEAVDRRNMRFVPIKTDDQLDLQALHRVRDRLMTRRTSVINQIRAFLLERGVVFAKSPIRLRERMPDVLENADENLTPRMRNLLSWLWDEWKDLEQQLNVLNLEVKQIASSDTACRRLQQIPGIGPLIATAIVAAIGNGAAFHRGREFAAWMGLVPKQHSTGGKSKLLGISKRGNQYLRKILVHGARSVVLNSKRDHVQMGQWMTALEARAPRNVLVVAVANKLARIAWAVLSSGNDYQAIPVRMAA

SEQ ID NO: 201114 - protein, 354 aa, unidentified
MTASYDYHIGVDYHKSYSHLVVQDSAGKTLRSGRVKNDRQSLGGFLERYRENSHAVVEATRNWMVIYDWLDDICDDVVLAHPLKVKAIADAKIKTDKIDATVLAHLLRADLVPEAWAPGERARELRVALRERMFYVRLRTMTKNRIVTVFDRYPEQTAQLKLGDLFGKAGRVQLAQVNVSEIDRIQIDRGLAFIGDIDGRIKQSEATIRTMTKANGNVRLLKTIPGIGEFFARLIDAEIDDISRFRNAKKLAAYAGLVPSTYSSGGKTFHGKIIKQGNKWLRWAFVEAVTPAIVTDAQLRAQYEHLKFRGVNKARVAVARKLLTIAFQILRDQRAYEPRGASPTEGASTISRLS

SEQ ID NO: 201115 - protein, 331 aa, unidentified
MGERHYVGVDVGAKELLVAIERAGVRETAIVLANDADGHRKLIRLATKKGATARVVLESTGVYGLDLAFALHRAKRTEVMVANPRAIAAFAKASLQRSKTDALDAETILEFGIRMPFAPWTPPDPSILELRALSRRIEAMSKTVTQEKNRLHANDQSEELSDFVKEDIRELAELLEGRIHRLRKQALAVIEQTPELARAFGHITSIKGIAEAAGIQLLAELGSLPNDMTTRQWVAHAGLDPRQFQSGTSVHKPARISKTGNAHLRRALFLPAMVASRWEPNVKAFYEKLLAKGKTKMQALVAVMRKLLHAVHGMLRHDRDFEGEKFFAMNG

SEQ ID NO: 201116 - protein, 369 aa, unidentified
MKIHKYVGLDVHQDETIVAVADGVRGGEVRLYATISSDLRTVEKHLRKLGGENIVLHVVYEAGPTGFGLYRRLRQLGIDCIVVAPSKTPEPKGGRQKTDRRDAVQLARLHRAGELEGIHIPDAVDESVRDLTRARADAVDDLRRAKQRLKSFLLRQGVRYQGKANWSEAHQRYLRELVLPLPALKAVLEEYLLAIDQATQRVTRLEELIAVQVPQWRMYPAVQALMCLRGFQLTAAAILVAELGDVRRFAHPRHVMAFLGLVPKEDTSGKRRRLGGITKAGNAHARWILIEAIQHAYHPPKVSAPLTLRQRGQPLAYREIAWKTQVRLHKRGWNLLHRGVMKAKVNVALARELCGFVWDLLRHVPLPKA

SEQ ID NO: 201117 - protein, 342 aa, unidentified
MQITTIGLDIAKNVFQVHGIDANEKVVVRKQLRRSQVIAFFKALPPCLIGMEACATAHYWARELTKLGHQVRLMPAKDVKAYLKRNKNDAADAAAICEAVRRPTMRFVRIKSAEQQGQLMQHRTRDVLIRQRTQIINALRAHLAELGIVAAKGDAGVNELLAIVADEADTRLPIDARASVIVLAAQLEALQTLIGSIEKRIKMQHRSNETSQRVETIPGIGVLGATAIVATAADPTVFRSGRDFAAWIGLVPRQDSTGGKQKLGPISKQGDRYLRRILIVGAIAVLRRAQENPGKYPWLTQLLARRPFKVVAVALANKMARTAWALMVHGGTYRAPELVEAA

SEQ ID NO: 201118 - protein, 416 aa, unidentified
MMTESYRIFVGIDWGADAHQVWVTDAAGTAVGEQTVDHTGTAIAALVDWIVGLAEGDARAAAVALETPRGPIVDACLARGCQVFAINPKQLDRFRDRFSVAGAKDDARDAEVLSSAVRTDRRAFRHVTAEDPLTVQVREYSRQDTELGEDLRRLANRLRDHLLRTWPELLRLVPAADEPWFWALLKRAPTPVEGRRMRPAQVRQLLRAHRIRRITAEALLTVLRAPSVSVAPGVREGVRVRILDLVDQLPVLARQRRAAERRLATTLEAMTQGPDGESVREHTDVTILQSLPGIGTRIAATMLAEAADALRDRDYHALRLLAGAAPVTKRSGKSCVVIMRYACNHHLQTALYHWARGCLQRDPRSRAHYAQLRRAGHGNARALRGVADRMLTVLIATLKTQMPYDATRRRPRAAGA

SEQ ID NO: 201119 - protein, 418 aa, unidentified
MKIVFPTCCGVDVHKSFLVATIIKTPQDSLQPSYQKKRFSTFNSDLNRFADWLHENDCLDVCMESTGKYWVPVFNILEKRGIRVTIANPKWVKAVKGNKDDTKDSKWIGDLFRIGLVKSSFIPAKDIRILRELTRYRYKLTSMKSSEKNRFQNAFTVCNVALDSVVSDMFGKSATAITDYLTSDEDFDPQHCVSLLHRSLKKKAEDVLSSIEGYEIALEQKCRIGIVRDHLHYIEKLIERVDICINTMVEKYDGAISLLRTIPGIDRSSAITVISEIGVDMAQFGSSKRLCCWAGLTPGNNESAGKKKSVRISRAGVYLKPVLVQAAHAAVKDKLNPYYALKYERIAKRRGKKRAIVAIARMILTAIYSMLSTGEIWNPVDLFKVDMPEHLKEQQLQKAMKQAVRFLEAQGLTVLDSA

SEQ ID NO: 201120 - protein, 383 aa, unidentified
MTQALGTVIDYERTLILAIELSNTSWVLAAQIPGLPGVKAKRSIDPTPEALMAAIENYRARAEKAGRNVDRVIAVYEAGWSGFWLVRWLAKHGVEEAHVIQPSSVPVDRRARRAKSDGIDAELLLRTLLAWLRGEPRVCSMVPIPAEADEDARRRVRERAELISERVGLVNRIGAVLATLGAGEYNPLRRDRRQRLDELQTALGDSLPTNAHAKIARMLDRLELLLIQITELEQSRDAVLEDESPDRASSMIQQLAKLRGIGVQSATVLVREGFVREFANGKALGSYAGLTATPYSSGGIEREQGIGKAGNARLRTVMVELAWLWQRYQPGSAQVRWFRERSGTGRRVRKVMVVALARKLLIALWRFATQGVVPEGAVMKPAS

SEQ ID NO: 201121 - protein, 318 aa, unidentified
MVEQAHYKIGCDAHKHYSLFAVLDHRGKPIERTRVNHEPGAIRAFLSRFPEGTPVALETVGNWYWIVDEIEQAGCVPLLAHAQMAKKMMGHVHKTDKLDAEGLAILQHLGSLPTVWIAPRETRDERELPRTRMALSKARTMLKNRMHSTLAKYALSLDTQSDIYAAKWRPQLVDLLRRLPGETARCMEQELELLDQVQEQIHRLEVRILERVRTTPTIQLIQSVPGPAKILSIVIDREVGSIDRFPSPHHFASYCGLVPKVKASGGKTHYGKMIKAANNYLKWAFIACPGGSGQGSRQRRRPPAAPSQLAPEVRRRPL

SEQ ID NO: 201122 - protein, 408 aa, unidentified
MKKNSKAYTAFCGIDISKDTFDYCLLNRDKQTISHNKLPITREALYHLIGIVTEDVNQNIIFLMESTGKYHRRVSDLLACSGFDVCVIQPLLIKNYTEGKDLRKTKTDKKDAHLIAQYAVDNHDSLLLYNPDSIALKELARHRIKVVRDLTSIKNEYKENMMTYFPEVVAVNENFIYTKTIMNLLKRCCLPEKIARKHVSTLDNMLKKSGAARLSISGTQLKEMAKHSVGSKSSTAQFIISDLIDAMLTLIDRLKCIEEELENHTKDIYEEELEIITSINGIGKTTALNFLIEIKDIDLYDDWKKLCAYAGNDPGIVQSGSSVNKKGNITKRGNKYLRCTLFLMASSVCRHNDRYKSYSEKKKLEGKEYKERMVAVANKLTKLIFALLKKGEFFDENYELNRNFKRTG

SEQ ID NO: 201123 - protein, 410 aa, unidentified
MIYVGIDWADDHHDVAITDDSAKTLSQFQISHDSSGFATLHGQLAKFKQSPNQILIALETSRGLLVHELLRSDYSVYAVNPRAVNRYKDRYVLSKAKSDSLDALALAHLLRTDRQRFKALRPFPEDYRLLDRLCQDLRKLVEEKSRIFNQITSVLKEFYPKALELVSLDSHIGIAFLKAFPDPQALRNCKKKTFMAFFKKHHYTRPNKIEELWTLIQTPALQPDVVILKAGRFRLLSLLDQLIPLREHLSLYEKEVKAILDKLPEAKSISSLPGVGDRLAPELTAALGPKVPNSEARFQSAEEIMNLSGCVPVTRQSGKWKTVSFRYSCVKGLRRTFRDWAFASLEQSVWARAYYDFYKAMNMPHSTILRNLGKKWARILFVLWSQGTVYNEPLYIQSLKNHNVRWAMAL

SEQ ID NO: 201124 - protein, 456 aa, unidentified
MGHARARKVPAQLVEDEEYQLRYERVAGIDVAKAKADVCTRLPPARQGARRASRLEEVPATAREILALAGRLIADGVELAVMEATSDYWRIWYYLLEGAGLTVQLASPAHARQLAGRPKTDRLDAQWIARLAEMGLLRPSFVPPPEIRALRDLTRTRVQLVRDRTREWQRLGKLLEGALIKLSSVVSRLARTKTARHILEALADGQRDPKILAAMAAGQIKGGRAAVEQALEGMLLGEHHPRLIRIHLDHITFLDRAVAAVEDEIEAALDAIPAAWGISADGVPSPDPGPGAAALTAAERLAEIPGVSPGLAMAIIAETGLDMTRFPTAAHLVSWAGLTPVARQSGPRNRKPKKGQGDAYLKGYCTQAANGAARTETFLGERLRRLSKRLGGNRAKCAVGRSILIIIWHLLASPEARFTDLGPDWHNRKTDRDRKIRAHLRQLHALGLEVTITPAA

SEQ ID NO: 201125 - protein, 331 aa, unidentified
MFPVGIDVSKNTLDLCMLYDGIKGRIKTRNIQNNRHSVENILRWLRLQHCSPEDVHVVMEATGVYHERLATELHDAGFRVSLANPHRSREFARGMGIMTKTDKVDAYMLACYAFLKKPHRWEPPAPEIRYLGALLRRRDVLLGDALREENRLEKYLSTDTPADIISSCRRMAQLLREEVGNIERQIKAHIKASPALRRDYTLLTSIKSVGPQLGMHMLVVLRSHNFVSAEQAAAFLGVVPIEKRSGTSVRRRPRMSKIGPPQLRAKLYMSALCGKIYNKRMRNIYDEMCLRGKPKMVAIGALMRKLVHWCYGVLKTGTVFNDEGLKPVLSS

SEQ ID NO: 201126 - protein, 349 aa, unidentified
MRFYTESHAHYCGIDLHAKTMYLCILDREGKTVLHKNLRSRSEPFLAAIAPYRDDLVVAVECIFTWYWLADLCRREGIPFVLGHALYMKAIHGGKAKNDKVDAFKIAILLRGGTLPQAYVYPPEMRATRDLLRRRQHLVRRRGSLLAHIQNTHHQYNLPVPAKKVAYAANRAGVAEVFSDRDARKSLEVDLLLIEHYDQVIRDLELHLEKRAKQHDAQVYYRLRSVPGIGKILALTILYEIHDIARFERVQDFVSYARLVKCEHSSAGKRLGTGGAKIGNVHLKWAFSEAAVLFLRNNPAGQAHLRRLAGRHGKAKALSILASKLGRTVYFMLSQDRAFEMERFLGRTH

SEQ ID NO: 201127 - protein, 352 aa, unidentified
MSKITTIGLDLAKKVFHVHGVDVAGNVVVARRLKRKEVLAFFAKLPPCLVGVEACGSAHHWGREIAKLGHTVRLMPPRYVKPYVKRGKTDPIDAAAICEAVTRPTMSFVPIKGVEQQGLSMLHSARSLLIGQRTQLINAARGHLSELGIVAARGLLGFAELAAIVRDERDRRLPATARAALMVLVRQIEAISAEIASLDSILMKENKASELGSRLDTIPSVGPVIASAFRARVTDAKLFENGRHLSAWIGLVPENDSTGGKLKQKGLSKKGDRYLRSLLVNGAMAVVRQAQKRPDKHPWVTKLLGRMSAKQAAIAIANKTARIAWAIMVHGGVYETGHRAPPYRAQACAAAG

SEQ ID NO: 201128 - protein, 370 aa, unidentified
MSKLIIGIDISMNDFYACIKVKAEDNSIKIKGTRSFENTDQGFKNFLTWALKQKKDNSWSVSFVMEATGVYYENLAYYLHSQNQKVAVVLANKIKNYIKSLNVKTKTDKVDAKTIASFGIERELDNWEPMSPMYKTLRDLCRELLSLKKEKQRAQSQLHALEKAHEKLHTVIRLKREQIAFFEKAIDLIRKDIKITVKKDPVLEDKIRKLETIPGLGYETVVILVSETNGFTLFKNIRQVISYAGMDVTHNESGMYKGKTRISKRGNSRIRQALYMPSLSACKANEPIKKLYERIHDRNPDTKRKGIVAGMRKLLTISYVLWKKDEEYDSQYQWNNSTMHSLPQRKAELESSALDRHQSKNRPTPSFVQS

SEQ ID NO: 201129 - protein, 409 aa, unidentified
MERQLERCGGLDVHKETVAACVRVGGRTGQAEQHVQTFGTTVGDLLVLRDWLAAHGVTHVAMESTGVYWKPVFYALESDFTCLLVNAAHFKQVPGRKTDVKDCVWIAQLLEHGLLRGSFVPPAPIRDLRDLTRYRKAVIQDRTRVANRLHKALEEAGMKLASVASDILGVSGRAMLAALVQGTTDPAVLADLARGRLRGKLPALRQALANRFRPHHAFVLGQLLTHLDYLDEAIATLSTEIERVMAPLAEPLRRLDTIPGINQRTAEVILAEIGPDMRVFPSARHLASWAALCPGHHESGGKHKSGKTRKGNRWLRTALIEAAAGASRAKHSALQARFRRVLRHRGPKKAVVAVAHALLRMVYHVLADGTVYREAGADSYDRHHSQRVTRRALQALERQGYRVTLEPAA

SEQ ID NO: 201130 - protein, 340 aa, unidentified
MSEFAVVGIDLGKNVFHVVAMDVQGHIVKRRKYTRPQLFALFRSLPPCLVGMEACASAHYIARTLTELGHDARLMPAQYVKPYLRTQKNDFLDAEAICEAVQRPTMRFVPIKTREQLELQAVHRVRDRLVGRRTAVSNQIRGLLVEHGITMRQGRGGLRGVVQNLLEEENTTVSPAMRTLISGLWAEWQSTDAAVRTLTQELEALAKKDPACQRLMTVPGVGPLVATATIAAVADGSAFGRGRDFATWLGLVPRQMSTGGRTRLGGITKRGNTYLRRMFIHGARSFKMNGNRSTHRIGTWLNDLEQRTHKNIATVALANKLARIAWSVLANETEYRSLPA

SEQ ID NO: 201131 - protein, 390 aa, unidentified
MIYVGIDIAKLNHFASALSSDGVELMKPFKFTNDGDGFQMLDSRLTALSYEDDSIIIGLESTAHYGDNLVRYLVASNYNVCVLNPIKTSVMRKDNIRKTKTDKVDTFIIAKTLLMQDSYRFVSFYDLDLMDLKQLGQFRQKTIKQRTRLKIQLTSYVDQVFPELQYFFKSGLHQKTVYALLKEAPAPQDIASMHMTHLSHLLVAASHGHFKKEQAKELRVLAQKSVGANDSALSIQITHTIAQIELLDSQLNSVEAEMTQIMKFNDSVIMTIPGISYINGGMILGEIGDIHRFSCPAKLLAFAGLDPSVYQSGNYSARRTRMSKRGSRVLRYALINAAHNVVKNNATFKTYYDKKMAEGRTHYNALGHCAGKLVRVIWKMLTDEVEFNLD

SEQ ID NO: 201132 - protein, 388 aa, unidentified
MAARRLPEGPGGIAALHALIARFVPEEWAELDPLAAAARVKVGIETDRGPWVAALSAAGYEVFAINPMSVSRYRDRHSTSGAKSDAGDAHVLAEIVRLDRAHHRPVAVDSTLSQAMKLVARSHQSLIWERTRHVLRLRSTLREYFPAALVAFEDLDSSEALELLAAAPDPDRAARLSKARIAAALRRAHRRKVAERAEIIYSTLRDAALRQPDAIQAAFAVITASEVRLISVLTGEIDSLGEVVAEHFGRHRDADIYASQPGLGVTLGARILGEFGDAPGRYVDARARRNYAGTSPITKASGTKRVVLARYARNRRLSDAVRQWALGSLRGSPGARTYYDTMRDRKIGHEAALRQLGNRLVGILHGCLKTRTLYDETIAWAHWNTLAA

SEQ ID NO: 201133 - protein, 394 aa, unidentified
MGIWVGIDIAKEVHWATGIDDRGQVVLDQQVANDPDAIDALIRTLDALADQPVIGLDLLGGIATLLQAMLGQAGFRLVHVPGLAVNRARQATSGGQHKSDPRDARVIADQVRTRPDLRPITADTELNLEIRLLVGRRSDLTGEQTRRIARLHELLSGVHPGLERALDLTTKTGLSLLTRWVTPAQLRQAGRDQIRAQLASTARLPSRRLDTLADQILAAANAQQLALPGEQLAATLIAELAHEALACRDRLARLDRDLAQLLDRHPDAALICSLPGMGATLCAEFIAQAGPLTRFRSADALAAAAGLAPVLRQSGKVRYNRRPTGGSKALKRVFYQSAFCSLRAPDSKAFYARKRREGKPHHQAVIALARRRIDVLWAMLHTRQAYQPGHTRAA

SEQ ID NO: 201134 - protein, 372 aa, unidentified
MDESSKPLYVGLDVHKDSIAVAYAPDDRGAEVVSLGAIGTRQCDIDKLIRTLQSKGATTLVFVYEAGPCGYWLYRYLTGKRLACHVVAPSLIPRKAGDRVKTDRRDAITLARLMRSGDLSSIYVPGIEDEALRDLSRGRDDAMQDLKRSKRRLKSFLLRQDIRYEGRAAWNPAHLRWLSEVVCPTPPQQIVFQEYLRAVSEQHERVQRVEHELHEAVQGWRLYPVVKALQALRGVELTGAVILMTELGDLTRFENPRQLMSYLGLTPSEYASGARRLQGGITKAGNSHARRALVEGAWAYRYPAKVSRHLQLRLETLPTEVQAISWKAQVRLCKRYRQLTARGKHVNQVVVAIAREMAAFAWAIARIVPLAA

SEQ ID NO: 201135 - protein, 410 aa, unidentified
MRKENIIYVGIDLHKETHTAVMLNCWNQKLGEITIENKPAEFHKLTRKVSRFVTEEKTSIYGLENAYGYGRILAVWLIEKGNIVKGVNTAMSYAQRKSVPMYQKSDSYDAEAVALVLINMLDRLPDAIPDDKYWTLSQLVNRRDNINVHQQKLKNQLHEQLCMAYPSYKKFFEDIGRPTALYFFGEYPSTVHLRGKTAEGLAGELRPVSHNNCSVKKAEKILELVRTDGETLRDCQESRDIITRGLVRDLQHYREQMLEVETAIKELLPYFHCTLMTMPGIDIVTAAEILSEIGNIERFPNASKLAKFAGIAPVNFSSAGKGKDVCPKQGNRRLQAIFYFLAIQMVQVSPSGTPRHPVFREYFQKKQDERKNKQQALICIARRLVNIVYGMLKNHTEYREPERRTEEETV

SEQ ID NO: 201136 - protein, 337 aa, unidentified
MADVYILAIDLAKRSFQVCATDRDGAVLYNRMMSRAKLEQLMESQTACIVAMEACATSHFWGRFTQALGHEVRLIPPIYVKPFVKRQKNDAADAAAIAEAAVRPNMHYVAVKSAEHQARAVAYRTHQCFVGQRTQMINALRSHLAEFGYVFAQGTAHVKDISEAIENEATALPDSVREVARLYLEQIDTLSEKIDALTFRLREAMQVSIEMRRLCTVPGVGPVTAGAIMAFAPDLRSFASGRNFAAWLGLVPRQRSTGGKARLGGMSKMGQSDIRKLLIVGAMSRIRWIVRKGVLPDNWLGRLLARKPRMVAAVALANKMARIVWAMMTREENYRLA

SEQ ID NO: 201137 - protein, 392 aa, unidentified
MEEKAWAGVDVGKGFHWAHVVDAAGAELLSRRVDNDEADLLALIDEALSLAGEVAWAVDQPGGGAALLLVLLWERGQVVSYVPGLSVDRARDGYRGESKTDRKDARVIADQARMRGDLGRLEPGDDALAGLQLLLARRRDLVADRTRAVTRLRETLLAHFPALERALNLNTRGPLELVARYQTAGAIRRAGRKRVAAYLKKRGVAKADALAERAVAAAKSQSAALPAEDVASEIAAELAGGVLVLKQRIDALDRDLERRFFARLEAQILSSFPGMGPILGAEFLVAVGEVSAFGSADRLAAYAGLVPAAHDSGKRVGNHRKGRGGNKVLKRVFYQSAFSSMRGVPESRAFYDRKRAEGKRHTQAVIALARRRVNVLWAMLRDGTTFETGSTA

SEQ ID NO: 201138 - protein, 375 aa, unidentified
MGDYSEAYVGFDTSKSRNSVAIADGGRRGEVRFLGEIENTPAATAKLVRKLATKYERLTFCYEAGPTGYGLHRQIRDLGFECVVVAPSLIPKRPGDKVKTNRRDALSLAKLLRADELTSVWVPDGRHEAMRDLTRARETAMLDLRTKRQHISAFLLRLGKPYPERKKTWSKVHVSWIASQKLEHPQQRLVLEEMMLAMRQAQERQQRLEQAIAAAVPEWSLAEVVTALRAMRGIDLISAATLLAEIGDLSRFRTPTELMAYLGLVPSEDSTGDVIKRGSITKAGNRRARRMLVECAWSYQHPPRVGPAKQPKVDAAPPAVREIAWKAQCRLYRRYRALIRKNKLKTVAIVAVARELAGFIWAVARAATAARAAVA

SEQ ID NO: 201139 - protein, 411 aa, unidentified
MEVLYPRCGGIDVHKTSLVVCLRQQDGRRKHTQVQSFGTTTAEILRLHAWLSEAECTHVAMESTGVYWQPVFNLLEGSFVVVLANARHIKAVPGRKTDVRDCEWIAELLAHGLIRASFIPPAEIRHLRDLTRHRKSLIRDRVKAANRVHKLLEAANIKLGNVVTDVLGVSGRAMLDALVTGQTDHHRLAALARGSLIPKVTQLAEALQGRFTAHHAFLLQQILTQLDQLASLIAACDARILDVARPMDAEIQRLQTIVGVGRRSAEVIVSEIGLDMSRFVSSGHLASWARICPGTHESAGKRRSAGTGTGNNWLRTTLLESAWAASHSRKSYLGAQYRRICKRRGPKRAAIAVAHSILVVAYHVLRQGVVFQDLGADYFDRVDTGKLKRYHLRRLEALGCDVSKVTSASAA

SEQ ID NO: 201140 - protein, 343 aa, unidentified
MQAITTIGLDIAKSVFQVHGVDAEGKVVIRRQLKRRYVLAFFQKLPSCLVGIEACASSHHWSRELQALGHTVRLMPPAYVKPYVKRQKNDAADAEAICEAVSRANMRFVATKTPEQQSCLMLHRTRHLFIRQQTAVINAIRAHLAEFGIVAPVGRNGVEDLLRVVADPSDGRVPEIARACLATLSAQLRVLKAQILEFDRMINAWHRSSETSKRLDELPGVGPALATALVASVADPKAFRSGRDFSAWIGLVPKQRSSGGKDKLGSISKQGDRYLRSLFTAGALAVIRYAKIHGTKHRPWLTALLARRPTKVAAIALANKIARMAWAMMARGERYKEPVALAA

SEQ ID NO: 201141 - protein, 381 aa, unidentified
MLRRGRQQTVRRRAIDRVIRAYVGLDVHKESIAVAEAAGRAARFVGAIRHDVPQSLKVLGRLGHQGDLEVVYEAGPTGYGLQRVLVAAGYSCQVIAPSLIPRRPGDRVKTDRRDCVRLAELARGGELKPIWVPSPEDESIRDLARAREDAVNARTQVRHQLKGYLLRHGLRYPARTAWSKGFYRWLGTLTFDGRPGQIAFAGYQQAVQAADERVARLTEALVSSIEGWRFAPVVVALRALRGIDTVSAIGLVAEIGDIGRFAHPRQLMGYLGPVPTESSSVERIRKGSITKTGNAHARRLLTEAAWHYRFKPRIGCRAQVRQEGLDESLRQLAWKAQLGLTARFARHQGRGLQINKVCVAVARELAAFIWAMAQASAPARA

SEQ ID NO: 201142 - protein, 410 aa, unidentified
MDIEVARVVIGMDTHKRSVTIEVMTGDESVVGGGRFATDAEGYARLLAYARSWPQRVWAVEGCAGIGKHVADRLVADGESVVDVPAKMSARVRVFATGQGRKTDATDAHSIALVGVRMAGLRPVLADEQLELLRMCVDRRASLGREHTRKVCQLHKLLLELIPGGAKRSLSAAQAKELLKKVRPTTTVGKVRKAHAAELVADLATIYARSKAADKELKALVKTAGTTLLDLHGIGPSGAARLLAEVGDVTRFPDRNHFASWNGTAPIDASSGDHTRHRLSRKGNRAINRVLHIMAVVQLRNATEGRAYYDRKKAAGKTSMEAMRCLKRRLSDLVYKALLDDLAGHAATGPGGHSGDDSDSSATGSQPAAGSSDKPLPGPAMSKPTTTPPSRVLTQRGASTGCHLARLSKY

SEQ ID NO: 201143 - protein, 362 aa, unidentified
MEWFCGLDVGMDESAICVVDDKGEVALQTTVVTDPEAIKAALKPYLGRLRRLGHEAGSLSPWLHPELLKLGLPAVCLETLHVRAALKAQRNKTDKTDALGIAHIMRTGWFRKAHIKSEACYRLRLLLTHRRNLKRKFLDLENAVRHSLKAFGIRLNRVGRGGFAQAVRDAVAQDALVSELIDAMLNARAALWKEYCRLHNLVVKLVAGHALCRRFMQIPGVGPIAALSFMTAIDDPSRFRRSRDVAAYFGLTSRRWQSGCSIDLQGRISKAGDGDVRRALYEAASALLTRYKKKDKVKSWGLALAKRSSHRKATVAVARKLAVIMHAMWVDGTCYCGDPDAAKADVSAGAAVKQRRLLAPLA

SEQ ID NO: 201144 - protein, 348 aa, unidentified
MRFYTKTHAHYCGIDLHAKTMYLCILDRDGQILLHKNIKSRPEPFVEAVEPYRQDLVVAVECMFTWYWLADLCHREGIEFVLGHALYMKAIHGGKAKNDKIDSFKIVTLLRGGNLPKAYVYPPEMRATRDLLRRRLHLVRRRGNLLAHIQNTHHQYNLPEPTAKIAYKANREGVAEAFTELDARKSMEVDFLLIEHYDQVIRDLQLHLERRAKQHDPQAYHRLRSVPGIGKILALTILYEIHDIGRFERVQDFLSYSRLVKCDHSSAGKKLGTGGAKIGNVHLKWAFSEAAALFLRHNAEGQKHLRRLAGRHGKAKALSILAAKLGRAVYFMLSKERAFDSERFLART

SEQ ID NO: 201145 - protein, 357 aa, unidentified
MAEGSWVGLDVHARSTVASVLIAASGELRTLRVSTGCEETVKWLKTLPGPVRVAYEAGPTGYGLARACTAAAIACTVAAPSKIPRASGERVKTDRRDAERLARMLRLGELVSVRVPEPHEEAARDLVRARADARVDLMRARHRLSKLLLRHGLVYEASAWSVAHDVWLRAQRFDSRALSLAFEEHYGAMLQAKLRRDGLDRAIAELATEPAYADVVARLVCLRGVSTLTALALTVELGDWQRFRPESLGPFLGLTPSEHSSGERRRLGAISKTGNTHARWLLVEAAWQQRRRLRPSARLERRRAGQPAAVCARADSSARRLHGRWQALERRGKPRTLVAVAVARELAGHCWVLATMS

SEQ ID NO: 201146 - protein, 341 aa, unidentified
MEEISMYAVDTAKSVFQVHGEDAARTMKIQKRLRRGQFLGFFARLPGPVTIVLEACGSAHHWARELSALGHQVRLIPPQHVRPFVRRNKNDARDAEAIFEAALRPGLHFVPVKRVEQQCDRALHRGRDLLVRQRSQLGNAIRSLLSEMGIVAAQGAAGSAALHAMIEADDGAIPTRLLTLLKPLLGQWRGLHTAIQGLEDQIRAAARADVRVRRLMQIDNIGPITAHAMVAAIGDGRQFRTARDFVAWVGLTPGHRASADKIRVGHITKAGDRSLRRLFVLGASSGLIRARAKPDKASPWLRGVLARRPVKVAVVAQAAKTARIAWAVLTSGQDYRSPAKA

SEQ ID NO: 201147 - protein, 394 aa, unidentified
MKEDSANQTSAPIVTERYAAYVGLDVHKDTIAVAVALPGRDEPLYRGEIAHEPKKVSRWLDRLSAEFEGALLQFCYEAGPCGYGLYRRLVAAGHDCQVVAPSLIPKKAGERVKTDRRDALKLARLLRAGELTPVWVPDAEQEAMRDLTRARDDMKGQERKARQQLNGFLLRHGHHWPTGKTRWTATHFNWMASIRFEQPWLQVVLQEYIDAVKAASRRVADLTAQLMQALPNWSLAPVVDALVALRGIDTLAAIVLLAELGDLSRFESPTQLMASPGRVPSEHRRGRRRRHGAIPPTGHAHARRMLVECAWSYRFPARQTMHLKRKAKAAPEQAKAIAWRAQKRLCGRYRTLTQAGKNVKRVCVAIARELAGFIWDIVRQEMPRLGAGNGMVAR

SEQ ID NO: 201148 - protein, 386 aa, unidentified
MVISTVIFSVANSHEGSTQLVKRIHSALTSHSLDTVLIGLEATSVYGDNLVYFLREDATLAPFNRKIHVLNPKQVKKFHDAYNDLPKNDYVDSFVIADCLRFGRINKEVYMGDYRYKALQNLTRARFFAVQNLVKEKQRFMNVLFKKYSTMTQEKVFSDTFSTTALAVYDEFESAEALANMDLHELTDFIMKKGKNRFPDPDAVAKAIQKAARSSYRLPKTVNDSVNQVLSISITSMKALESQIKEFDKAIKAQMELLPNVLISIPGIGPVYSAGIMAEIGDINRFNSQAALAKYAGLAWKQHQSGGFESEVTRLIPSGNRFLKYYLCEAAFSLVRCDKEYSDFYRLKYKEVNRCQHKRALALTARKFVRLVFRLLKDNRLYCPAK

SEQ ID NO: 201149 - protein, 331 aa, unidentified
MKEKKVIVGIDVSKLTLDICVLVDGEIESLVIENGKAPIRRFFTKLGKKHNGASIRVAMENTGLYNWNLYSAVEQSGIDVYVINALHLKKSMGLVRGKNDRVDAVRIATFLQLNQQDMSPSLLPDKSMRKLKLLVTHRKRLIKTRTSLRVSAKELSMFKDPELSKSVQASTKKVVTQIEKEILAVEKTINELINSCQEMDHKFKLVTSVPGVGKVLGWELLIKTDLFRAISDPRKLACYAGVVPFEFSSGTSVLRKPRVSVYADRALKKLLHMAALRVIQLDGDLQKYYLRKVAEGKNKMSVINALRNKIVARVSSAINNNRMYQQNLVMS

SEQ ID NO: 201150 - protein, 370 aa, unidentified
MAEPTPLFVGLDVHKDSIAVAHAQGHSADPPVFVGTVGTRQADLTKLVRRLQAKTPDLVFAYEAGPCGYGLYRDLTAQGFRCQVVAPSLIPKKPGDKVKTDRRDAVELARLLRSGDLTRVYVPTVEDEAIRDLCRARDAARLTLKNAKLRLKAFLLRLGRHYVGRADWTDAHRRYLAKVVCPTPTQQIVFQESIRAVDEQVDRLGRLEAELLERAPAWRLYPVVHALQALRGVQWLVAITVVAELGDLTRFDSPRQLAAFVGLIPSEYSSGQARRQGGITKAGNSRARRALIEGAWAYRHPAKVSEHIQRRIDGLPKPIQDLGWKAQVRLCKRFRRLVARGKHPNVAVTAIARELIAFMWAIAKVVPVMA

SEQ ID NO: 201151 - protein, 345 aa, unidentified
MLSCGKPSQFVGLDVHKRTIYGYVMDEQGNKIFEKEFKTQPHELDMFLLNVKKDDSIVAIESCSCWQYAYDYLYDAGYTLKLAHPVGIKALKKLKKHTDKDDAKLLADLMRSNMLPESYAAPEDVRVKRQITRHRHSLTYLENEIKNKIHAILLRHGHEVPYSDAFCKSAIAYMRNLNLPECDRFELNQYIDTIEHLKEQKNKCTEIIEELAGDDPQIRLAMTMPGMGHYAATTFVAEVGDIRRFDKADKVASFAGLTPKIHQSGEKTKFGSITKQGNVNLRHVMVQAANVAVQHDKTLKKTYNRLKHKGHNKAIVAVARRMVTLLYVMLNNNIQYQALQIHKAT

SEQ ID NO: 201152 - protein, 394 aa, unidentified
MKLVGIDVGKNSHHFCVMDKETGEFNVAPSSFSNNKEGFDFLINSLKPYSKKSILIGMEDTGHYHVALLKFLLSNGYTVALINPKTTDLTRKMEGGITKNDKLDTITICDVLDTPERKKQYRITKVDRFDLYEQRQLTRHHHNLKEELNIYCNRLQKSIDLVFPEFNTLFGSKYGVVYMNLLKTFGSAEAIASTDIRTIRKCFEVKGRGCRISLTPEKLKECAKNSIGISSEVETIQIKHLVGLITLINEQIAEIDKKIEEFSIKNNSPILTIPGISHFSGTSILAELGDIGNYSKPSQIIKFAGVAPYHYESSQYNAQHTAITKKGSKYLRKTLYQIILPVINNNPVFKKYYRLKISQGKGHRCAQGHCIRKLLRIIYHLLETGQSFDPALLR

SEQ ID NO: 201153 - protein, 344 aa, unidentified
MITIGIDPHKASHTAVALDPTGRVVGELRVPATKTTLERLLRWAERWPDRIWAVEGAGGLGHLLAQRLVGSEETVLDVPATLAARARLLARGHGRKTDGIDAASVARVAQSQPDLRRVGPEDHSMVLRLLSDRRDELTGERRRVVNRLHRLLRDLQPGGAPTELSTEAAARLLNRIRPKTAVDLERKMMARALVADLRRADRALVANRARCAAAVAASGTTLTNVFGISDVLAAKILGHVGDVSRFASADRFASYSGTAPIEVSSGEVTRHRLSRNGNRALNNALHLAARVQTMHAGPGRDHYERKLAGHKSSREALRSLKRQLAKVVYRHLVADRAHRLALAS

SEQ ID NO: 201154 - protein, 360 aa, unidentified
MLYLGIDQHRKQLTVSIRNEAGDVTLRRQVSTEWGRVRAFFDELRHNAETECGFAAVVEVCGFNDWLLKMLTEYGCRETVLIQVEKRSKRKTDRRDAHQLSGTLWVNRHRLLAGQRVEGVRRIQPPTDREAEDRQLTALRKRLGQLRTRTINKIKHVLRKHNLEQEQPAKGLDTKRTRKWLATLSLGTMDRMEMDLLLAQWKLWDEQIAKLELEIEKRQAKNATAAVVATIPGCAAYGSLALASRIGSIERFPRPASLANYWGLTPGCRNSGEATDRLGSITKQGSAMARFILGQMVLHVLRRDARMKAWYSRIKRRRGSKISRVAVMRRLATVIWHMVKYNEPYVIGGPPRRKLKGQAA

SEQ ID NO: 201155 - protein, 389 aa, unidentified
MEKSITHVAMDTHKKQHAVALAYPDTGEVQVFTVRNTVTDIKKRVRKIQRKAPGEVRFCYEAGVCGFTLKQQIEAAGSPCAVIAPSLVPRKKGERIKTDRRDARKLLGQFIAGQLTEVYAPNPEQEAAREITRCRQAAQEDLKRIRQQLVKFLTRHGYIYRAGRHWTKGHGQWLLALQFGSSDLREVFDWYYTQLQHCQQRLASLDKEVKALAERPVYKEVVGLLRCLRGVDTLTAITVTTELFEFGRFASPRKLMAYLGLVPSEHSSGEKRRPGSITKTGNGRVRRLLIESSWHYRHRPSVSQALKRRRDGQPAWAVDTADRAMHRLHKRYQRLMRRGKIPAKVVVAVARELAGFLWAMLHEWQRRRNGDIAEAQEVSLATSGESAFC

SEQ ID NO: 201156 - protein, 393 aa, unidentified
MICVGIDVAKDKHDCVILNSEGKILAGVFTIPNNADGFDTLLQKIRSCTSSDDKIKVGLEATGHYSYNILGFLINQGLPTYVINPLHTNLYRKSMSLRKTKTDRVDAKTIATMLMSNVDLKSYTDTAYHNEELKSLTRYRFDKVQERAQLKQSVSRLVTILFPELEKLVPTLHMSSIYALLIEFPGAKQITEAHLTHLKSLLKDASKGRYGRDMATEIRDAAKHSIGSVMPAKSLELRHTIRLIRELDSEIEDIEAAIEAIMEELQSPITTIPGMGFRMAAMILAEIGDFSFFDSPDKILAYAGMSPSTYQSGHLSLAGTYSHMEKRGSRYLRYALYNATKYVCHWDPGFAAYLAKKRAEGKHYNVALSHAAKKLVRLIYAMEKSRQPYKRAA

SEQ ID NO: 201157 - protein, 274 aa, unidentified
MSVSNQRCAGIDVSKGTLDIAISNIASQFTVPNGTDGFTQVLRELKRNETRLILMEATGGLESCVACYLQSEGFDVVVINPRQARDFARAMGYLAKTDRIDARVLLQMSEVINQHPERERYIRPLPDAHRQILAAMVVRRRQLTIMLTAERNRLHPSHPLSHASIRSIISALKGELARIEGEMAIHIKEHFSELSELLNAVKGVGSATVAVLLAEVPELGSLSRREISALIGVAPVNRDSGTMRGRRTVFGGRTSVRTALYMSSPGWDEAQPCN

SEQ ID NO: 201158 - protein, 433 aa, unidentified
MELSECDETMDVSVGINVSKGHSMVSFFRAGDKSPSKPFMIDRDLPGLKFLERKIDQHKARGTLRVYMKCTGRYHLGLADGLQEDGYTVYTVNPKLLADFHDDSLRKPKTDPIDAQKIARYGIQYWNKERRPFSQMDSKRECLKECERQYKLYTDECVTFTNNLLSLTDLTCPGVNKLFSGNTNQNGHLKWVDFVNTWWHVDCIRKISMNAFSTRYCKWCQKHGYEFNKDKAEDIMSWAKKALVAMPKSTDIKKTIQIAVNAIDELLETIQDTKNHMNQLASQLPEYPVVMKMDGVGEITGPIIMGELGDVTRFTKRSQITAFAGVDPQKHESGDDKPKSSRATKIGSPELRRALYLVMTSKLARKPQGDRVYDFIVKKRGEGKKYLVYMTAGANKFLRIYYGTVRDYMQNKQNSSFIQDKAPAGQVSVSKTA

SEQ ID NO: 201159 - protein, 317 aa, unidentified
MNTSIATVGIDVSKDELVVFAEGKRLGGFPNTHAGLSKLRPKLPEGAQVHLEASGGYDRLARALLSEWGFEVRLHNPRKVRRMADGIGFTAKNDQMDAEVLALVGPLVCSKAAKSARQEQLCDISRTIKSLRGEMARHRVQMQASNIPIQCRQAYQAVNKAIERQVKRLEETFVKLVRQSEFRDRYELALSVPGIGEATARVLACELPADLSGFSTKCLSSYAGLAPIDDQSGSRNGPRRVRKGNVQIKAAMYMPAVWALSRLDWANKLYTGLRAKGRAHGQAMVAVMRRLLVIATAVMRRGTPFQGAQPRQIIRLN

SEQ ID NO: 201160 - protein, 356 aa, unidentified
MNYVGIDYHKKYSHVTAIDEEGRVIRSKRLENKPEPFQEFFKRLEGPSEAVLEASRTWGVMYDLLEELEGVESVELAHSLKVRAIAEAKIKTDKIDSHILAQLLRADLIPAAYIPGKETRSFKEMIRQRIFLVRMRTRLKNRIHVLLDRLHIPLPSVTDLFGKRGTDYMRRLNLPGVDGEILRENLTLLETLNTLIKEAEREIGMLLGEDPRVKLLRTVPGVGPILAAVAALEIDRIERFNSPSKLASYTGLVPSTYASGGKIFHGKLIPMSNKWLRWALVEAAWASIRTSPYCRVYFENHKRHKGPHTAAIALARRLSEIIWHVLKENRVYEERPFQKQQRTSITATSPAALALS

SEQ ID NO: 201161 - protein, 341 aa, unidentified
MNTIYYIGLDIHKKVIAYCIKRIDGELVRQGIVAAERKALKKWLSELPGLWYGAMEATIFTGWVYDFLKPYAVELKVAHPAMLKAITAAKKKNDRADAEKIADLLRVNLLPECHMMPGDLRELRRVLRYRNMIVSTAVKMKNKMSGLLMEVGAIYDKKRLHGKKYFGALLERIEDVPDSVKALLKMSRNGFEMFDDIQKKLVVTLRQNRLIRERVERLMSIPGVGEMTALTWVLEIGEVSRFSSSRNAISYCGLCSGQHESAGKEQRGPISKKRNKHLQTKLIEAAKLAPHWNEQLAQLHDKELTSGNRNRATLAVARKLVEFMLAVDRRETDFELLKKAA

SEQ ID NO: 201162 - protein, 417 aa, unidentified
MYVERLEKRVLFVGDDWAEDHHDVEVQDDSGRRLWAARLPEGVEGVAKLHALIARHGGEDLEPGGVVVGIETDRGPWVQALLAAGYQVYAVNPRQAARFKERYGTSGAKSDKGDAHALADMVRIDRAQLRPIAGDSEQAQSVKVVARAHQTLIWERTRTFQRLRSTLREYFPGALAAYAGLELTSTDALELLLKAPTPEQAAKLTKQQITAVLARHRRRNREQRAASIQAALREPQLNVAAPVADAYAAAVTAHARLMITLNEQIDALEGQVKTHFLAHPDAEIYLSMPGIGEITGARVLAEFGDDPTRYTSAKARKNYAGTSPITRASGKSHSVQARFVRNNRLADALQRQAFCALQNSPGARRYYDKQRARDLDYNPALRQLGNRLVGSLHGCLKTRTHYSEATAWAHHANLATT

SEQ ID NO: 201163 - protein, 331 aa, unidentified
MYFSQFVGVDISKNTLDAAIYPAKDKKLDLLHFDNTQKGLGEMLSWLKRRGVKPSEMVICAEHTGVYTNPLIEFADKKGIALSLNSPLDIKHSMGIARGKNDAVDAGRIAEYAHNHRDKLRLYEKPSEAIIQLQYLLTERRQYMRQRTALINLNSAMCKYETPEARTRNESAIHHCEKLVKKVEEQMMSVLRSEPEVKQNFDLVSSVKGIGLINAINTVVYTNNFKAFETPRRYACYIGVAPFDHTSGISVKGKTQVSKICRTQQKAELSMAARSAVVHDPGLKRYYQRKMKEKGGGKDAHGVVLNAVKFKLILRMFAVVKSGQPYKVLNY

SEQ ID NO: 201164 - protein, 433 aa, unidentified
MGGRVLNYSLAICSLVERDPIMETMIERCCGIDVHKLTIVACLLVGPPGKKPAATIKSFPTMTEGLLACRDWLVSAGCTQVVMESTGVYWKPVFNILEDAMEVILAHARQVKHVPGKKTDVQDCQWLADLLRHGLVKGSFIPPKPIRELRDLTRYRQKLIQQRSSEVNRLQKFLEDANIKLTSVVTDIQGVSAQQMIRHLIQDDLTVPEMAQLAKGRLRNKLSSLEQALKGYLSDHHRLLLKLNLQMIAFFDENIETLNREIDQRLEPHRETLERLATIPGVKKKTIESLIAEIGLDMTRFPTHGHLAAWAGVCPGNNQSAGKRKSGRTPPGNTWLKCILAEAALAAAKKKDSYLKDRFRRLAARRGKKRAILAVAHTILIIAYHVIKEQSTYIELGATYFDRLNESHLVTRLQRRMEALGYKVDLVKLPEAA

SEQ ID NO: 201165 - protein, 474 aa, unidentified
MVTKAPEVILDEANEQIVERVCAIDVAKDSGKVCVRVPAESGSGRRVSKVWDVPARTKAVIELGDHLACQGIEKVTLESTSDYWRIWFYLLEARGLDVQLVNARDVKNVPGRPKTDKLDSMWLAKLTEKGLLRPSFVPPRQIRVLRDYTRLRVDLTAERTRHWQRLEKLLEDALIKITSVASRIDLLSVREMIEALIGGQRNPRVLAGMARGRMRLKHADLVEALTGQFDDHHAELARMLLDQIDALTVQIDTLTERIDVVLADIPVPAPQPEPDPDDHGPGTSDDAEVTAVIRPSHGGAPRPRTAAPAVTALDLVDILDEIPGVGRHNAHEIIAEIGLEMTRFPTAGHLVSWAKLCPRTIQSGAKSSAGKTGKGNRYLRAVLGDAAAGAAKTQTFLGDRYRRLIKRRGKLKALVAVARSILVIIWNLLANPGMRYHDLGVDFHTKRMDTERRTRNHIRQLEALGYTVTLTTAA

SEQ ID NO: 201166 - protein, 355 aa, unidentified
MNNAKYIGLDVHQATTVAAVLDAGGKLVLEAIVETKASTILELIDAIRGELNLTLEEGTWAAWLHDLLEPHVHRVVVCDPRKNALLKQGNKSDKIDARKLAELLRAGLLSPVYHHKGASLSLREAARSYLTLTQDASRVMSRIKAVYRGLGIACAGEKVYAARHRSEWLAKLGEPARRRRTERLYEQLDQLLPLRQQARRDLLEESRKHAATRWLRQIPYIGPVRAALLIALMQTPHRFRTKRQLWAYCGLAVETRDSAEYCIRDGQLQRSRKWVRVRGLNPNRNAHLKQLFKSTAISASTKPGPLGDYYARLLDKGIKPAMARLTLARKIAAITLVVWKKGERFDPTKLNMQAA

SEQ ID NO: 201167 - protein, 342 aa, unidentified
MGRHVYHHHISNSYLGVGARIFARKRSRPMTTQPVFVGIDVSKDQLDTSVRPEGSSLSQPYTDEGIRILVEYIVKLQPELVLLEATGGYEVQIVAALAHARLPVVVINPRQVRDFAKATGKLAKTDRIDAKVLAHFAEAIRPEPRLLADEDQRELSALMTRHKQLVEMVTMEKNRLGTTTKLVQSQIREHLEWLGSQLKEVDKDLDKFIGNNPALQRKVEIARSVPGVGPVLSRALVSYLPELGTVSNKQISALVGVAPFNCDSGQYRGKRIIWGGRAHIRSVLYMGALVATQCNPVIRSFYERLLQAGKSKKLALTACMRKLLTILNAMVKNDTLWGEKLT

SEQ ID NO: 201168 - protein, 340 aa, unidentified
MRLIGCDLHASQQSIAMLDRDTGEIVEKTLTHEGEAVRAFYASIPPPVVVGIEATGSMGWFLRLMEELAIECRVGHPTAIRKAETRRQKHDRRDAALLLQLLAEDRFPAIWMPSTEYRDLRSLLLHRHQWVRMRTRVQNALHAIAMAHGVRRGHTLWNRDGQALLASLSLPLHTADRRSELQALYQHLEAQIDRLDDRVQHVATERPRATLLMTHPGVGPVTALATEVFVGDPTRFLDGKALASYVGIIPREYSSGKRQRLGALSKQGNPFLRFLWCEAAAHAVRRDPDLQRFYRRKVVQKGFAKARVAAARKLGIRLWIMLRDQIDYTEFCRRGLARQS

SEQ ID NO: 201169 - protein, 433 aa, unidentified
MPRTIRSAARSRQTKTIMKNEDYAALVAMDWGDKQHAFALRIVGARSIETGVIIASAEALHDWLDQLEKRCGGDKVALAIEAGRNTLLHALLEHPWLEIYPVNPATSARFRRAFTVSGAKDDGPDAGVLLTLLEQHRDQLTRLVLDEPQTRELAALVAARRSAVDQRTDLTNQLRSILKGYFPQALELVGTELASPLALDFLSRWPELAEAKKARPASLRAFYAQHNVRRPEKIAERVALIAPARPFTTDRAVIAPAILQVRLLVALLRVQQTHIATFAERIAAVFAAHPEAAFFRALPGAGPTLAPRLLVAFGDRRERFPNASSLQEYAGVAPVVEKSGNQKWTHWRWQAPKFLRQSFVEWAGQTVVYCDWAHAYYAEQARHGKAHHTILRGLAFKWIRILWRCWHDHRPYDEQAYLAALEQRHSPLAQLLA

SEQ ID NO: 201170 - protein, 410 aa, unidentified
MEVLYTRCAGLDVHKDTVVACVRCVVDGRVEREVRTFSTTTSDLLALSAWLTWLGVTHIAMEATGVYWKPVWNVLDDGEFELTLANAKHVKNVPGRKTDVNDATWLADLLAHGLIRASFVPDRPTMETRTLLRTRKQMTRERTRHVQRLQKTLEEANIKLDSVISDIAGKSGRAMMEAMIAGESDPVVLARLAHKRIKASPQTLIEALRGRINRHHRFLLRLHLDQVDVLDRVLAELDREIEAGLEPFRTFIPLLTSIPGIAELSARVVLAEIGTDMSRFPTAANLVSWAGLCPKNDESAGKRRSTKMRKGAPWLKTTLIQCAWAASTAKDSYLRSLYHRVKARRGGKKAVCAVAASILTAIWHMLRDGTFYQDLGPDHFKRRSSSRQTKNLVARLEGLGYQVQLKPVAA

SEQ ID NO: 201171 - protein, 316 aa, unidentified
MASFLGIDVSSLKLDALVRPQGIKISVSNDPAGFEELLSSLRGISIKRILLEATGGYERDAMHFLQDAGYKVIRVNPKRARAFAESMAVKAKTDAIDAAVLAHYAEVIPDQPALRVSPQRALLRELLQQRDRLVQQRDDDRRRLKQAQSEVVANFLSANLQHFRSQIKLIEHEIKQQTAALNDPRVARLIQVKGIGMVTAGKLVALLPELGRVESREIASLVGVAPFNHDSGKSLGKRSISGGRFDVRRSLYMACLVAVKHNPALKARYEALRERGKLAKVAIVACMRVLIVRLNAMLKAGTPWLDLILPQPRATA

SEQ ID NO: 201172 - protein, 356 aa, unidentified
MSSKLNTAIAVAGIDIGKNSFHVIGLDKRGAIVLRQKWSRGQVEARLANTPPCLIGMEACVGAHHLSRKLQALGHDARLMPAKYVRPYSKGQKNDFRDAEAIAEAVQRPTMRFVVTKTGDQLDLQALHRVRERLVGQRTGIINQIRAFLLERGVAVRQGLRFLRIELPGILAKRTDVLSPRMLHLIEGLADDWHRLDERIEVLSSEIGALACGDPACDRLMTVPGIGPIISSATVAAIGNGAAFSKGRDFGAWLGLVPKQISTGDRTILGKISRRGNRYLRSLFVQAAWVVLVRVGPKHWDRYGLKSWIEAAKKRLHHNVLAIALANKLARIAWAVLNKGRAFECVKTDAMASRPA

SEQ ID NO: 201173 - protein, 344 aa, unidentified
MHQEAIVIAVLNGSGKLVMETILETQASSILQFIHGLRGELHVTWEEGTWAAWLYDLLQPQVEQVLVCNPRRNALLKEGNKSDKVDARKLAELLRTGMLRPVYHGENGLRTLRELGRSYQTISQDLTRVMNRLKAYRGWGIPCAGTQVYAARYREEWLNKIPQAGVRRRAELLYQQLDGLQALRRNLRPEFLAESRKNKAAKLLRQIPCIGPIRAARLIALMQTPHRFRSKRQLWTYSGLGIETHDSAQFRFVGGQLQRSKKPQQLRGLNRNHNHEMKEIFKSTATRASCGRGPFHDFYAALLAKGMKPEMARLTLARKIAAITLTLWKRGERFDAEQLKTQVA

SEQ ID NO: 201174 - protein, 435 aa, unidentified
MEKIRTNVGGIDIGAKKVFTSIEGQPVVSHFTFTEDFYKLRDYLLEHKVESVAMEATGVYWVILYEILEQAGIDVWLVDGRQTKQVPGRKTDVKDCQWIQELHSYGLLNRCLVVDADIKELRSYLRLREDHINSSSMHINQMQKALTLMNIRLKEVLSQIHGASGIAIIEAILNGERDKQLLVSLCHRSVLKKKKELVLKALEGRYTEAGIFELKQAYQGYKFYLQQVNECDKRIDVVINRIGKSGAGQELKKKRKAVRHHKPNVENLGPNLLNIFDGKDATLISGITDYTWMQLLAETGPDLTRWPSEKHFTSWLGLSPGQHRSGKMRRNARKKGRPKAGQIFRIIAQGLINSKDVAIGSFGRRLRGRKGPKIAIKAMARKLAVLYWRVMVNGLDYAEKGIQHYEEQILLNKMKSVHRLAKELDLNIVEKQHVT

SEQ ID NO: 201175 - protein, 398 aa, unidentified
MTESSDYESVQVFIGVDVGKDTHHAVAINRSGKRLFDKALPNDENKLRSLISDLKQHGQILLVVDQPATIGALPVAVARSEGVLVGYLPGLAMRRIADLHAGEAKTDARDAAIIAEAARTLPHALRTLKLADEQIAELSMLCGFDDDLAAQTTQASNRIRGLLTQIHPALERVLGPRLDHPAELDLLQRYPSPEKLASLGEKKLAAQLCKLAPRLGKRLAADIAQALAEQTVVVPGTNAAAVVLPRLALQLITLRKQRDEVALEVEQRVLAHPLYPVLTSMPGVGVRTAARLLTEVACRAFASAAHLAAYAGLAPVTRRSGSSIRGEHPSRRGNKALKRALFLSAFAALRDPLSRAYYTRKMSQGKRHNQALIALARRRCDVLFAMMRDGTFYTPQAS

SEQ ID NO: 201176 - protein, 345 aa, unidentified
MKKVMAGIDLHSNNVVIGIMDTDGKRVTSAKLPCELKEIAKFLAPFKKRLEQVAVESTYNWYWLVDGLQALKYPVVLANPAAMQQYSGIKHADDTNDAFFLAELVRLKILPTGHIYDAQLRPVRDLLRRRMTLVHQRTALMLSFKSLYTRTTGQEMTLSQLKELEIKEAQDLYAHPANQMIAGMQIKHIEQLTESIDKIEKVVMASARELPAYGKLTTLPGIGIILGMTITMEVGDIKRFASPGDFASYCRTVQAQRTSNSKKKGENNSKCGNRYLAWAFVEAANFARRFDEQCRKWYDRKAAKTSKVLATKALACKLAKAAWFLMSEGTEYDAQRMFGQPVTTK

SEQ ID NO: 201177 - protein, 350 aa, unidentified
MLIIGCDYHPSFQQIAFVDTETGELGEQRLIHPKEAEQFYGELKERNIAVRVGMEASGHARWFERLLRQLQFELWIGDAAEIRTKRVRKQKTDRQDAQLLLRLIMEDRFPRIWVADAENRDLRQLLWHRHRLVQMRTRVMNQLHVVALNEGLRRRKALWRPGGRKELELIALAPWAGRRRQDLLDLFDQLTPKIQQLTQALEEEVEKRPVTRRLMTHPGVGPLTALAYELVIGTPERFHNGKQIASYVGLVPEEKSSGDRRRLGHISKQGNALLRFLLVEAAQVTIRSQAQWRSKFFHLAMRRGRKIAKVAMARKLAVHLYWMWRQGWDYGQFKRFGSYAGEPGHPDGKQ

SEQ ID NO: 201178 - protein, 381 aa, unidentified
MFSAAGEEVGELVMGDGVDAPRRHLVCQGDGVELSLKEASVEQTITIGLDIAKYIFQAHGADAAGHVLFRKRLTRAKLLGFLATQAPCVVAMEACAGSHYWGREIGKLGHTVRLIPPAYVKPFVKRQKNDAADAEAICEAAQRPSMRFVTVKDEAQQANGVVFRARDLLVRQRTQCINALRGHLCEYGYVFRQGITHVGTLIAHVEDPNSSLPESARVILRLLIDSFAALEARIAELDAEINRRSKADPVARRLMTIPGVGPITATAVTALVPAPGSFRTGRDFAAWLGLTPLQKSTGGKQKLGAVSKRGERTIRRLLILGASAVVRQACRRGAPTGSWLAQMLTRKPKMLITVALANKMARVVWALLVKGGVYRAPAATA

SEQ ID NO: 201179 - protein, 401 aa, unidentified
MQQDQQHDSVDVFVGVDVGKGQHHAVALDRNGKRLYNKAMPNDEAKLRALISELRAHGRLLFVVDQPATIGALPVAIARDEGVMVAYLPGLAMRRIADLHAGEAKTDARDAAIIAEAARSMPHTLRSLRLADEPLAELTMLCGFDDDLAAQITQTSNRIRGLLTQIHPALERVLGPRLDHPAVLDLLERYPSPATLAAASEKTLANRLTKLAPRMGKNLAAEIVQALNEQAVIVPGTQAATIVMPRLAQQLAALRKQRDEVASEVERLVLAHPLWPVLTSMPGVGVRTAARLLTEVAHKAFASAAHLAAYAGLAPVTRRSGSSIRGEHPSRRGNKVLKRALFLSAFAALRDPISRAYYTRKVEQGKRHNQALIALARRRCDVLFAMLRDGTIYQPKAADNA

SEQ ID NO: 201180 - protein, 456 aa, unidentified
MRSERERGKQKQGKFSTINTAAAGLDVGSTFHVVAVPSDRDDEPVRTFQSFTTDLHALAEWLHRVGVTTVAMESTGVYWIPVFEILEQSGFDVLLVNARHVKNVPGRKTDVNDAQWLQQLHQYGLLRASFRPRDEIVRLRAYLRHRERVLDYAASHIQHMQKALMQMNVQLHHVVSDITGVTGMKIIRAIVKGCHDPEALSQFRDSRCKASEDTIRRALTGNYRDEHIFALRQSLDLYDFHQAKIEECDERIEVVLLQLNADRESPTEAIPEVRHARGRNEPRFDVRAALYTFLRADLSQVHGFGPYTVLRIVAECGDDLSKWPTAKHFTSWLSLAPGNKISGGRVLSSRTKRSSNRAAALLRIAAVNIGRTQTALGAFYRRLASRTGKAKAVTATARKLAVLFYNAMRFGMKYVDPGKDYYEERYRQRVLSSLSRRAKQFGYALVEAAEPQRGVS

SEQ ID NO: 201181 - protein, 338 aa, unidentified
MKLYGAIDLHSNNNVTVLIDEQDQVVYQKRLPNDLPLIAQQLSGYRDRLQGIVVESTYNWYWLVDGLMDQGHRVHLANTAAIQQYEGLKYTDDHSDARWLAHILRLGVLPQGYIYPKEERAVRDLLRKRGQMVRQRTANLLSIQNLITRNTGSSISSNRIKTLDAEQVDDLLPNSDLALAVKANLAMIQCADGQIDILERTVTDRIKLRAAFGFLKTVPGIGQILALTIMLETGEIKRFSTVGDYASYCRCVGSQKLSNGKKKGSGNTKNGNKYLAWAFVEAANFAIRYNARIKSFYQRKKAKSHGVLAIKAVAHKLCRACYYIVKDQVPFDIAKAFA

SEQ ID NO: 201182 - protein, 421 aa, unidentified
MTKRMTEKQWFAGVDWASENHHVYLMDGNGKRLGERQFRHGGAGLAEMADWLIATSGGAPSMIHVAIEVPHGPIVETLLERGFNVYAINPKQLDRFRDRFSPAGAKDDSRDAEVLGDALRTDMRAFRKVELAEAILVELREWSRIADDLTTDKNRLANRLREQLWRYYPQMLELEADITAEWMLDLWEALPTPAKATRVRESTVKKILKDHRIRRIDAAQALAILRKPAVVVAPGTIEAATAHIRTLIASLRLVNEQLKGAHRQLEILCARLAEPVEKTDEEADAGQMSEQRDVAILASMPGNGRIVLATLLAEAWDALQRRDYHALRALCGVAPITKRSGKSRIVIRRLACHPRLRNAVYHWANAAIQYDDKSRAKYDALRARGHSHARALRSVADRLLVVACAMLKNGTLFNPSLAHSN

SEQ ID NO: 201183 - protein, 344 aa, unidentified
MKIKLLGIDLAKNVFQLCALNQANKVLFNRTVRRAQLRSTIAKLEATIIAMEACSSAHYWGRSFEAMGHTVLLVPAQHVTPFVRGGKSDARDALAICEAAQRPNIHLVPIKTVEQQDIQLLHRLRQRQVQHSTALANQIRSLGREYGVIFPAGIKPLISHLPEALEDGSNELSPVARHALADQYQCLLDIRQAMGAFLLQIEQLAAQYPAYDDLQVLPGIGPMTASAYIAAIGNGRQFKRGRQVGAWLGLAPRQYGTGGELKLGGITKSGDRHLRTLMIHGARAVITLGLKTRPELAQWVQPIIDRQGFNKGVVALANKLARISWVIVSTGEPFDMKQAFKPAS

SEQ ID NO: 201184 - protein, 331 aa, unidentified
MHYSHYIGVDISKNTLDAAIYAAEMRRSDTKHLTNDKAGLKELVAWAKAAGAKPKDMLICAEHTGVYGNELQLFCEKKGIALCLESPLQIKRSMGLVRGKDDQIDAIRIAQYAYDHKDKLKLFHRPSGNIITLANLLRERRLYVRQKATLMVQQAEIGSYENATSRNRRESLIDRHAAAVKSVEKQMMEIIKRDDTLKKTYDLISSVVGIGPITAIDTIVYTNNFQNFETPRQYASFIGVAPFDHTSGTSVNGRTRVSQFCRKQQKVSITMAARSAIVNDPWMKNYYHRKMKEKGEQRNQHGVVLNAVKFKLVLRMFSVVKSGTPYKMMKY

SEQ ID NO: 201185 - protein, 441 aa, unidentified
MTKEEVISDGEPQWAAFIAIDWADREHIWKLQAAESGSYEQGKLEQTPEAIEAWASQLATRFGGRPIAVALEQSRGAVVFALTKYCHLHLYPVHPSTLAHFRQAMVPSGSKNDPGDTGLLLELLLHHRSRLRRLKPDTEQTRELQFLVEVRRKLVDDRTCFSNRLTAQLKLYYPQVLTWFYKVTSPVSCDFLMRWPTLQALQKAAPRAIYNFYRRHNCREEEDRLQPIRQAVPATHDQAVIRASVLMVQATVRLIQALKRDIELCDERIEELTKSHPDFAIFDSLPGAGNALIPRLIAAMGTQRERFANASEIQSYTGVAPVVKQSGNMRSIRCRQAYPRFLRQTFHEWAGHSIQTSEWARSYYDELLSRGKRHHAAVRSLAYKWIRILFRCWKDRVTYAETFHQSALARRATPTPSTQSPAVDLQWKKVAGFLKISAASS

SEQ ID NO: 201186 - protein, 387 aa, unidentified
MAKQNDLSRCLVTLEQDATVIAVIEMGQSSWLVAGTVPGLKRNPLKKLSPDPDALLRLLHRWQKESVQAGRAIKRIVVAYEAGRDGFWLARWLRAREIEAYVIHPSSVPVSREHRRAKTDRLDTELLKRAFLGWLRGEPKHCSMAAIPTVADEDMKRPGRERQSLVGERTRIINRVKANLARLGIRGFRPNLAQASSRLEALRTPEGTAVPVNTLAELRRDMDRLRFVKQQIKEIETTRAKRLAEAPNEQGHAMVRLLARVVGVGTETADMLAQEVFSRNIRDRKALARYAGLTGAPDESGKKRRERGLAKAGNARVRRGMIELAWGHLVHQKASALTAWYRKRTSDARGGTRKTMIVALARKLLIALWRLVTTGETPAGLLLRPAA

SEQ ID NO: 201187 - protein, 500 aa, unidentified
MVPGRRLYIGEALRSSPLDQNPQTASLGGRAQKGWGKEMTGKHEVESSEGSRRQLQGLPVVRRNVAGIDLGSERHWVCAPTVDGSGREITSFGATTPELIRLAEWLNQRQVESVAMESTGVYWIAPHEVLEGQGLQVLLVDTRQLARVPGRDKKTDPTDCEWIQRLHSCGLLRSSFRPEEAVCMLRTLVRDKANLVAECGDWLRRMQKSLDQMNVRVHRAVSDLDGVTGMAILRAITGGERDALKLAKLRDPRCSKTEQEIAEQLSGHWREDHLFSLQQALNMYDAVQERIAAYEKEILRKLGDMEREEQRGQTAPPLQNANKTKAIKKRGQEPKRQALYRMSGVDITHIDAIGVETVEVVLSEYGPDLSRFPTEKQFVSHVTLAPHVPTSGGKPLRKRKRNSASTRVAAALRMAALSLRHSQTALGAYYRKMAQRLGGDIAVFATARKLATLIYRLLRWGQPYVDEGAQAYETRYRQQRIGRLAATAKALGYQLAPINA

SEQ ID NO: 201188 - protein, 317 aa, unidentified
MKNISQTAIPGIDVSRDHLDGYFLPDGKRFRLANSGKGHAQLIELLAAYPDVKVCFEATGGQEWRLWSALDEVGIATRQLPPAQIKAFAASRGTRAKTDRIDAELIARFLDFRPEAGRHLPHQKLRLVRALCAKRGQLVEMRKRLLAQTKARMKNGSGTPFEDMDAELKALLGMQIADLEAQIETAIAVDSGMADTARLLRSIKGIGPVTSWMLIAELPEIGQISGEQAAALTGLAPIAHDSGAMRGRRAIGGGRRALRHVLFQAALVASCHNPVLKAFADRLRERGKPHKVVIIAVARKLVTIANALCKSRQICAT

SEQ ID NO: 201189 - protein, 401 aa, unidentified
MACTSEYGRVTDLGCEGTGELGRGPADPGRPWPQARSDVVPLHAFRTPEDTMTATTDHYLGIDVHKRQAQVAVLDDEGEVTEEIRVAKADLDEIVQKYAGSSAAPEAGSNYFTIYDRLDEELDVTLANPVKADWLADQKQNNDRKDAKNLARYLRLGKVPESYVPPEEYRRYRALARGRKKLVDKRSDFKNEVSSLLDQNGVTYDESLWSDQGREFLRELTLDDASELLLGQWLEAIDEFTVKIKRMQRRIEEVAAEVDELDTLMSAPGIAAFSGLMIHGEIGEVGRFDRAAEVVSYAGLDPVIRESGDSRREGRISKEGNGYLRWILVQCANTAVHNAEDPYLSQFYWRLRKNRNKPHKVAIVATARKLLVALFNMLSKNEPYDHAHNARIETISTTSGQ

SEQ ID NO: 201190 - protein, 351 aa, unidentified
MIRRSTVCAVTTIGIDMGKNTLHMVGLDSLGAIVLRERVSRGRITSRLANLPPCLIGIEAGMATHYVARELAALGHDVKQVPPAYAKPFRQGHKNDFRDAHAVAEAVQRPTTRFVPAKTNEQLDLQALHRVRSRLVSQRTAVINQIRGFLLERGIIVRQGPRFLRHLLSDILARRTDVLSPRMVRIVSDLAGDWRQLDERIETVTDEIETLAKSDDSCRRVMTVPGIGPIISSAMVAAIGSGAAFARGRDYSAWLGLVPKQMSTGDRTILGHISKRGNSYLRMLFIQAARVILVRPANWPKHGFGAWLLRAIQRLHPNVLVAALANKLARIAWTVLTQERSYEARITKAAA

SEQ ID NO: 201191 - protein, 389 aa, unidentified
MFYLGIDIGKNTHVASLIDSKKKVLFKAFSFSNSIDGAECLICKLEPFKNQLEIGMEATGHYWLSLYSHLSEKNFTVRVINPIQTDGWRQGIEIRKRKTDIIDSLLIADLLRYGDFVETSLSNEDYLSLRNLSRFRSYLISSIGDLKRKTIALLDQVFPEYASSFSNIFAKTSKEILTNFSSPSDFEDINSEDLQSFLNNVTMKKFATRKLEELSKKASKSFGVNFCMDSFGLQIKMLIGQISFSQNQVLDVEKEIESLLEKLNSPITTIPGIGAVNAATILGEIGDIKRFSNPSKLVAYAGLDSTVSQSGEFESTSNHMTKRGSPYLRRALFQSALRAEFCDPVFSDYYQKKITEGKHHLVATNAVARKLVHTIFAVLTKDEPYQVQS

SEQ ID NO: 201192 - protein, 394 aa, unidentified
MKNLLFAGIDVSKNSFDIMIINQNKEIIMQNKFEMISNDFKTLSENIAELQYDDILFVMESTGVYHLNLYFFLVDNNFKAAVVNPLLIHNFAKSVSLRKTKTDKKDAETIADFALSNHKNIDFSNKTDNSIRSISRERDKLAQNVARLKTEIKNVLQVLFPELSKHTNVFTKTMLRLLLKAPGRFPIMKMKPQQIARFFNNTKGNKIKISPRELKALAKNSIGIKDESLETVLILKTKRLIFIIEQIDELNNLLRLFVKENLQQDFDILNSIKGIGVTTAEKFLIEIADIENFKSHNQLRAYIGTDPSIKQSGSSINVSGRISKRGNAYLRKTIWQMAVGVIRCCSHFAEYYHKKISEGKKYKQAVIAVANKLIKTLYAMLKNKTLFRLQTKPN

SEQ ID NO: 201193 - protein, 401 aa, unidentified
MNCVGVDASKGKSTIAVMRPGGEAVILPYDVSHTVSELNALAERLKSLDGETRVVIESTGNYHAPIAWWLHDAGFYVSVVNPMLTRNYGDNSIRYPKTDKLDARKLGNYGLAYWNELPRYIPEEDVRLMLKTTYRQYQQYSKVQTMLKNNLISLLDTAFPDANRLFSSPARADGSEKWVDFVATFWHCECVCKLTEKAFTAKYQKWCKKHKYNFSQDKALDIYASACGHFGVMPKTPTAKLLVEQAVSQLQATSAALAALRNEMQSLAALLPEYPVVMKMFGVGPVLGPQLMAEIGDVRRFHSKKALVAFAGIDAPPFQSGQMNIRSRSISKRGSSALRRTLFLVMSVILQNSPPDEPVYQFMDKKRAEGKPYRVYMMASANKFLRIYYATVKNYLDSLEA

SEQ ID NO: 201194 - protein, 346 aa, unidentified
MKDVQIIGVDLGKNGCSLVGLDHAGQVVLRRRVRRDGLTALLAKLPSAVVAMEACCGAHHLGRLLVAQGREVRLMSPEYVRPYVKAQKNDDRDAEAIAEAATRPTMRFVALKSEAQLDVQVLHRVRDRLVGQRTSLMNQTRSILLERGLVVAQGRRALLDALQAVEEQGEASKLSGRVRLLLADLLDQWHALDSRIAALDEEFTEMARNDPAARRLATIPGVGVMNATALVAAVGDGRTFSRGRDLAAWLGLVPRQATTGGKPKLLGITKRGSKYLRKLIIQGARAALPSLARSPTPLGAWLRGLLARAHGNKVVVALAAKLIRVAWALLRHGTSWSWALSQLATA

SEQ ID NO: 201195 - protein, 429 aa, unidentified
MNYTQNEKIEQVTDSTMVVGVDIGSQIHYARAFDNRGRELTKRIFSFHNDLEGFNSFNLWAETLKTENKKTAVLIGCEPTGHYWFAFAKYVNDHQKRLVMVNPFSVKKIKELDDNSPKKTDSKDPKTIAKLVVDGRYSIPYMPEGIYAEIRDLVYSRDRIMKQHNISANRIQRWLAIHFPEYLGLYTRFDAISGLAVLEKAPLPKDVIALGVNGIRKIWHDKKMRGRGVTEDRAKTLVEAAHNSVGLDGGIGTKSELYMLLEEHRLWTSQLEAVNKVLEEMILKVPHVEKLLAIKGVGSITIAGFIAEVGDIRRFDSPKQIQKYAGLELVENSSGKHKGRTRISKRGRRKLRKILYQVMVPLLARNKEFRGIYDYYVTRVKNPLKRRQAMVAVSCKLIRVFYAVLTKGVEYDRFKMMSDIHRKSDIIAA

SEQ ID NO: 201196 - protein, 426 aa, unidentified
MSQIHPPEEPNFAAVVGIDWGDKKHAWSLKPAGSDLRERGEIEHTPEAVESWVSELSARFHGQPIAVALEQSRGALVFMLARYAHLHLYPIHPRAAAQFRAALYPSGAKDDPVDGDLLLELVLHHRVHLRPLQPDTEQTRLVQHLVEARRKLVNEKTRQVQRLTDKLKLYFPQVLSWFEKVDSPLVGALLLRWPTLEELQKARPATLRSFLTQHNCRSQELIDERLKKIPQAVPAIRDAAVIQSAVSMTQILVELIATLRQGIDMLEKQIGQAARAHPDFPIFDSFPGAGPALAPRLLAAFGSLRSRYAAADDVQKFSGIAPVMERSGKSEWVHFRRACPKFLRQTFHEWAGHSIAFCEWARVYYEQQKRGGKDHHAAVRSLAFKWIRIAFRCWQDRVPYDEARYLASLRRHGSPLAAALAVKNQA

SEQ ID NO: 201197 - protein, 338 aa, unidentified
MTIVMGLDQHRGQITGEWIDTETGEVRRARVAPADRAGVRKFLQRFRGYELEVALEATTGWRFVVEELRRVGAIVHLAEPAETAGLRGPKKRAKGDRADARHLRELLMLERLPESWIPPDHILDLRARVRLRHTLSEQRREWQQRIQATLYHHGCPQRRELMTGDGREWLQAQPLPATAREQVTVALAMIDGLEGQIAPLDLELRAYARRQAGCQALMAHYGIGPLVAVTILAELGDCTRFSSSRHAVRYAGLDITVYQSDQRRAPGHLSRQGPPALRWALFEAAQSAARRGSPDRDYYGDAAQRLGHNRACLSVARKLLKRSYHTLRELGEEALQPA

SEQ ID NO: 201198 - protein, 421 aa, unidentified
MKPQVSEAFAAFVGLDWADAKHDVCLQAAGTTRREFLSLEHSPEAINAWVHTLRTRFNGQPVAVCLELKKGPIVSALRTYDFLVLFPVNPLTVAKYREAFTPSRAKDDPTDAELQVEILLKHRDKLTPLSPQSPAMRALAQLVESRRRLVGDKVRLTNRLTSALKNYFPQVLQWFPEKDTAIFGDVLSHWPTLKAAQLARRTTLEGFFCAHHVRSTDLIATRIEAIKSARALTTADGVIAPNVLLVHALVAQLRVTLQAIADFDKVIAQRAQDHPDFPLLNALPGAGAVCAPRLLVAFGEQRERFPSADELQKYAGIAPVTERSGKKSWVHWRLQCPKFLRQTFVEWAAESTRHSFWAQVYYQQQRDKGKAHQAAVRALAFKWIRILYRCWQERTPYDESIYLQALKRHNAPLLHNLANVS

SEQ ID NO: 201199 - protein, 338 aa, unidentified
MKLYGGIDLHSNNSVLVLIDEEDRVVVEKRLKNDLALILAELARYRKRIAGLVVESTYNWYWLVDGLMDSGYRVHLANTAAIQQYEGLKHTDDRHDARWLAHLLRLNILPEGYIYPREARAVRDLLRRRHRLVQQRVGNLLSIQNQFARLGMNGFSAQRLKRLQDGELDRLIAEPNVRSAVTANLALVRCLNLQIERLEREVLTQVKLAAQFAPLTSVTGIGKILALTIMLETGEIGRFAKVGNFASYARCVDAKRLSNEKKKGSNNAKCGNPYLAWAFVEAANFAIRYSPRVKRFFDKKCARTNKIVAFKACAHKLARAAFHVMRDRVAFDETRAFA

SEQ ID NO: 201200 - protein, 419 aa, unidentified
MAQGHDKPIISVVHPICCGLDIHKASISACCLTTAADGGEDMEIAEFDTFTDALLRLRDWLIERDCPVVAMESTGVYWRPVHNVLEGFVKVVLVNARHTKHVPGRKTDLADSQWLAGLLRHGLLRGSFIPPQQVRQWREMTRLRKAYQESLADFKRLIHKLFECANIKMGVVVSNLFGATGRYTVNRLATGEAELSADDIAAGAHGQLKQKINELCRAVQGFFTDHHRYQLRLLLATVTELEHHIEQIGQNVKELMADHHPVLSRLQEIPGVSEVAAATILSELGPTLEEFPRSAALTSWSGLCPGNNQSAGKRKSGRSPVRGHRLKTIMVEVAWSAVRKPGSYYKDKFQRLRARRGAKRAIVAIAHRLLKAVYYIIKEGRHFRDLGAEYLTHKHQTGKLGSLKKQAKLLGYELTPLAA

SEQ ID NO: 201201 - protein, 421 aa, unidentified
MTPPNEVVWAGIDTHTDTHTIALLDERGRPLGAETFTADPDGYDRLIGMLPGPGRVAAVGVEGTNSFGAALARRLTAAGYEVREVLRPRRSVRRRDGKSDPLDAVAAARSVMAGDGTSLPKSPDGWVEALRHLNARRSQPVSAMTAIPDSTNGLLAAAPEPIRERYRGLRSETRMNRLAECRPAGGLVERSVLAALKSAAKAWKALKRQAGLLEERMRLILEEHARPLLDMYCAGAVIAATLAIVAGDNPERIRSEAAFAKLCGVCPIPASSGRTNRHRLNKGGNRQGDMALHRIAIVRLRYHKPTRDYMAKKTREGKGKLEIIRCVKRFIAREAYRALISIRNGEVGRGTPAERGAKLRELRVSRNITQQQIGEALCVPSSRISEIERGARDLPELEQRAIQWIHSTTNPKQHTQTLDNV

SEQ ID NO: 201202 - protein, 394 aa, unidentified
MFYCGIDVAKRKHAVAVLDERGQARKAVFETENTQAGMDTLLGVLKDLGGEIAIGLEATGHYWLSLYDVLTKHGYPVTVINPLQIAAYRKSGLRKLKNDRTDAIWIADFLRIANLPASSRDIPSIMQLRELTRFRFWLSEQIGDCKRKLLTILDRVFPEYEKLFSSVFVTSSRALLQEAVSAQDFAEFDLRELTNVLHKASRSRFGAEKAQQIQEKARQSIGVGFLADAARLEMSCLLAQLELLDEQQVELDQAIETLMNTIPQHITSIPGVGLPTGAAILAEIGDVHRFENVDKLVAFAGIDASVHESGQFKGTQMHMSKRGSPYLRLAIWQAASMSVLHNEELKAYYHKKRAEGKAHGVAIGAVCRKLLIRIYVIIQQNRPYVVRELAPANP

SEQ ID NO: 201203 - protein, 346 aa, unidentified
MALYVGLDVSLRTISICIVEAKGKVVWEGKVLCEGPALIAALAPYRKKIKRIGIEAGPLSEWLHGILTECHFNAVCIEARHAHRFLSSRPNKTDRNDARGIAEMMRLGHFKAVHVKSRASQLLRTMLAARKTFVDHMLEIEQAIRGFLKVYGLKLGQVHRYNFSAKVKALVADTPELSTAIAPLLEARDMMRKKKKEIDRELEKRARQDTVCQRLMTVPGVGPLISLAYKATIDDPARFKSSRAVPAHLGLTPRVYQSGEMDRSGHISKCGDRLLRHCLYEAANAHLRVTRKWSALRAWGVKLAKRVGSKKACVAVARKLAIIMHRMWRDGIDFQYGTAPRRPAKA

SEQ ID NO: 201204 - protein, 345 aa, unidentified
MIIGCDFHPSWQQVSWLDTETGETGEQKLVQASGDAERFYRQVPAPALIGIEATGNCHWLVDLLGELGHELWVGDAAQIRASCVRQQKTDRRDAEHLRILLQEGRFPRIWMPSSEVRDLRQLLLHRYKLVTIRARVKNELQHLCLNQGVQRKHKLWSQAGQKVLRELRLKPWAARRREDLLGLMGMLDQQIEPLDRAVKEEAQRDKMALLLQTQPGVGAVTALAYVLTMGEVSRFARGKQVASYLGLIPREHSSGGRQKLGAITKQGNRMLRMLLVEAAQIAVRHDPGLRKQYLHRCHQKPKAVAKVAAARKLAVRLYWMLRTQTGYPEIVRIESSPRVPLVGAS

SEQ ID NO: 201205 - protein, 405 aa, unidentified
MYYLGIDVSKSTSRCVILNNDGERFSKAFSFQNNKQGFNELLVRLEKLNLSFDKLLIGIEATGIWWENLYCLLVEKNFKVIVLNPHQTNKFREALRKKAKTDDIDAYVIAGLLRSNEYAASYIPEENIQILREITKLRFELIKERKNYMHQISSLLALVFPEYESTVIKNPFAVASCAILKKYPTAKHLALAKPKHIEKIVRSIVGNNFNIKEIQHLIDTAKNSIYSGRAKDARGMNLSLLLNLFQQLSYSISELGQKIEDILSPSNDDEFSFPGANLLTIPGVGKKTIAAILSAVGENGQSFASVKQFIGHIGFFPQIYQSGETKRENKISKQGPKYLRWALYISAVACLKHNPQLRNLYHKKISQGKTAKQSLIYVAKKLAQLCLSMLKSGETYRPERVFMPA

SEQ ID NO: 201206 - protein, 397 aa, unidentified
MIYAGIDIGKDKHCIAAISETADVLLKPTFVEQNHESFQKSAESLRRLGNPSQVKIGMEASGHYWTHFFHFLTASGWTVELFNPVLSNSQGRCHLRGRKTDKDDALAIAKTLRDGGYTPWAIPADEHSRLKLLCRQRSFAVSELANAKRRLTGLLDLAFPEFAGLFSDPHGKAPVAVLREAPTAKALAEVSVRKLSGILSRNSNGRHGLEMARKLRKAAQQSIARTQHTEELIGLIQGMLDHLDFFQEQIQKLETRIEEVFKTIDHPIREIPGIGARTAPAILAEFGNFERFTGGYKKLLAFAGLDPRIRQSGRWHGTVKMSKRGSPALRTALFQAASMGRIHNENLQAIYHRHRHIKGKNHRVAISHVARKLVQIIWATCRNRNAFDPMKICPISS

SEQ ID NO: 201207 - protein, 400 aa, unidentified
MRAVFGIDVSKASSEVAILVNGEKVHNYTISNDALGFARLLGDLKTVHKPEIIFEATGVYSRRLQAFLEDNGYAYTRLNPLEAKKQLDSLRVRKTDQIDAEKLAQSQFVLNRKPTYVQEEVYQELRDLSRFYQNLTEDIVRAKNRLHKVLQVTFPELETILSTPTGEQYGNLVVAFPCKDFVLDLSKDELSESIRQSTSKRISDKRVAYLVEKLTALANQSYCAVKKTSPIMEEVRYYAKELLRLSEQRQTVLDQMVELAQPLPEYDILLSIPGIAETTATSIIGELGDIRRFQSANQINAFIGIDLRHYESGNFLAKEHITKRGNPYARKILFKCIHNIASASNTNPCHIADFYEKRKRQSQTTSTKPHTIASIHRLIRTMYYLIMHNKLYDYASTQNR

SEQ ID NO: 201208 - protein, 350 aa, unidentified
MNVNHYIGFDVHKKSISYCVKTSDGKIVEEGKLRATHDVLRQWAGERPEPWRGAMEATLFSGWIYDTLQPFAAELQMGHPALMKAIAASKKKNDKLDARKIADMVRCDLLPACYVAPVEIRDLRRLLRYRNLVVGQAVRMKNKMSGLLMEAGAEYNKRQLHGKQYFTKLLDTLEEVPESVKDLLRLSRGAMEMFETTQQQLLARLRKDPLLAQRVMLLKSIRGVGPVTALTWILEVGDPHRFSSVAHAVSYCGLTSALVSSADKQQRGPISKQRNAHLQTVLVEAAKLAPRWNPQLAAVHARELERGNRNRATLAVARKLVAYLLAVDKSGQRFEIRSTPAAETEAQEVA

SEQ ID NO: 201209 - protein, 424 aa, unidentified
MNLTQNDRLKQVTSDTLIVGVDVGSQTHFCRAFDWRGFELSRRVFKFSNTGMGFLTFLRWTEELMNKTEMKKVIVGCEPTGCYWLTFQKFLQDHDVQLVTVNPFTVNRSMELDDNSPEKSDLKDPKTIALLVKDGRFSTSYLPSGVYAEIREASVCRDQIMKQHVRLSNQIQGWLQKFFPEYFECYADWDSTSGLMLLREAPLPQDILKIGAGGINQIWRDAKVRAAGIKRAQTLVEAAQNSVGLEAGEAARLEIWVLVNDYILKAEQLKRLDEYLEEKVKEVPNVEKLLAIKGVGMSTVIGFIAEVGDIGRFTDPKQIQKLAGLEIVKKSSGKKKGQPRISKRGRRKLRRTMYESAKALMLWNPAFQDVFLYYRNRTKNPLGGMQAKIAVACKAIRIFYVVLKTGCDFDEEKFRKDIIRPEAA

SEQ ID NO: 201210 - protein, 368 aa, unidentified
MFQHTFIGLDVHAVSVVGCALIPETGELVRTQLGPDPAGVVEWIRRFDAPVKAVYESGPTGYVLARSLREAGIDCVVAASSKLLRAPADKVKTDRRDARLLAEMLALGQVTEVRVPTPEQEDLRDLSRLRAGASKDLSHARQHVNAVLLRHGIRYPEKTKWTKVHQLWLHRQRLDSPLLQFTYESEVEQVELLAARLKRVDQRVSTVAANCQYTPVINALMCLRGIDVTGGFGLATEIGDWTRFTGATIGSYLGLAPSEQSSGQSRHQGPITKAGSKYARKILVEASWVDRRPYSRPGERELRQMALVDPATRIRAREGNHRLHHKWEEFDARKKRSVTANTAIAREKAGWCWSLAAPLQEQEHMSEA

SEQ ID NO: 201211 - protein, 317 aa, unidentified
MSNMTIWLGIDVAKDAIDVAYGRAGRVERIIRSAARLPEWAATVPRHACAVVEATGGYERAVATALWAQGVPVCIVNPRQVRDFAKATGQLAKTDRIDARVLAHFGEALQPRITVALAEDVQALRAMVDRRRQLVEARTAEKNRRKQAPEAVIGSIDDHIEWLDKQIDTLDRAIADTIQSQTALCERIAQLRTAPGCGMIVAATLRAHLPELGTLNRKRIAALVGLAPFARESGTCRGHRVIWGGRAEARAMLFLAAQSAARWDPTLRAFYVRLVEHGKPKKAALAAVARKLLTAVNAMVRDQQPWRSPAAPQPSCC

SEQ ID NO: 201212 - protein, 344 aa, unidentified
MLYVGLDLSRKRLDWQALAGDGQRVEIGAVPPDADGLAKLTQRLGDADVVAVIESMSGARFVHDRLELAGWDVRIADAAKARGIAPLACKTDTIDTWVLAELARLELVPEIWLPDPEIRAERERARFRLHLVKHRSALKNRVHAILFQHGVANPLSDLFGAAGRVLLERLRLPEPWTSTVGASLALIDVLDEQISACERELRELGAEHRYIPLLLSCPGIGWVLAFTIASEIGDIARFPSPRKLVGYTGLCPRVDQSGERDRRGPLRKNGPNHLRWALVEAAHTAYRHPLYRPLLERKRAQLGKKRGTKIAAIDVARKLTEASWHMLTRNEPFAPAGATVSLAA

SEQ ID NO: 201213 - protein, 415 aa, unidentified
MDILIRCCAGLDVHKETIVVCVRRLPEGRKRKVFSEVRTFATSTAAILEMADWLASAGVTHVAMESTGVYWKPIWNLLEGQFEMLLVNAQHIKQVPGRKTDVKDCEWIAELLQHGLLRGSFVPEPVQRDLRELTRQRRQLIQAKASVANRIQKVLEDANIKLGSVATDVLGVSGRDMLRAIVSGQDDPKALAELARRKLRAKIPQLREALAGRVREHHRFLLKLLLEEVQQFEIWIGRLNERIVEVLPGPFHDAVQRMATIPGIDERAAENILAETGVDMARFPSHGHLASWAGMSSGNNQSAGKRKTGRTNKANRWLRATLVQVAWAASHTKQTYFAAQYRRLAGRRGKKRALVALGHTILVAVYHILKRKAVYQELGHDYFDRHEKDRLLAALVRRLERMGHRVTLEPAEPAA

SEQ ID NO: 201214 - protein, 353 aa, unidentified
MTSIKYIGMDVHKESISIAVRNAAGKIVMECVIETKANAILDFIHGLRGELQVTLEEGTWATWLYDLLKPHVTKLVVCDPRKNSRDGNKNDQIDARDLSNRLYMNKLSSVYHGGAGVRTLKELARSYLTISKDLARVMCRMKAIYRSWGIPCAGKQVYAPRHRAEWLAKITEVGVLRRAEFYYQQLDALRLLRHDVGRELPAESKKHKATKLLCQIPSIGPIRAALLIALIQTPQRFRTKRPFWKYSGFAIETHSSADYRSVKGELQKSRKQVSVRGLNRDCNHDLKNLFKSAATIASVKPGPFQEFYAALVAKGMRPEMARLTLARKIATIVLIVWKKGVRFDAQYLKPQTV

SEQ ID NO: 201215 - protein, 328 aa, unidentified
MQKDLLYCAIDVSKDKLDLDAAALALPAQLGNDHASFRQLIKAAKKYPGPVQFVFEATGPYHLGLALALWEAQIPLSVLNPARVRYYAKAQGKAKTDPLDNQVIGDFARSFRPPPTPAPDPVRRELTELLQRRDGLISTRAAEQNRLGQCRHKIIKGQIRRLMAQLAEQIGQIDGLMKKLVNSSQELKAKVKALCQVKGVGHLTAVTLLITLPELGTLGRNRIVRLVGLAPLNDDSGTQKNKRYIQGGRARPRCALYMPALSASRHNPVLKEVYERLLKAGKLKKVALTALMRKLLICLNALLRKLADQHPSPRTLPCKALVTQPLNA

SEQ ID NO: 201216 - protein, 358 aa, unidentified
MHKEPIAVAYAPEDRDAEVVSLGVIGTRQSDIDTLIRRLESKGKTLVFGYEAGPCGYWLYRYRTAKGLVCQVVAPSLIPRKAGDRVKTDRRDAMTLARLMRSGDLSAIYVPGIEDEALRDLSRGRDDAMQDLKRSKRRLKSFLMRQDIRSEGRASWKAANLRLLSEVVCATPPQQIVFQEYVRAVSEQQERVQRVERELHEAVQGWRLQPVVEAIQALRGVELTGAVILMAELGDIMRFETARQLMSDLGLTPSEYSWGGRRHQGGITKARNSHARRALVEGAWAYRYPAKVSRHLQLRLEKLPTDVQAIGWKAQVRLCRRYRQLTARGKHVNQVVVAIAREMAAFAWAIARLVPLAS

SEQ ID NO: 201217 - protein, 324 aa, unidentified
MIDGILGIDVSKNTLDVSISSCTKVRTKSFANSSDGWHHLLDWLVAQKIQRVHACLESTGRYSLGIACSLYEAGHVVSIINPAQIRDFVRTKLGRNKTDGIDASRIREYCELFKPSPWAPPSEAHRRLGELQTIRAGIIAGLTEWKNRKNSGIVDTEAQALADATILHFTSQLGAVDKAIALTIDNDSDLRSKRDLLLSINGVGDTLAGVVLAELPGPDVLRSSGEVVAYAGLNPRQHQSGTSVDRATRISKIGNAILRAALYMPALSAMRYNPVIVALVTRLKSRGRLKPKQIVVAAMRKLLVLCFGVLKTGKPFDPAIAMGC

SEQ ID NO: 201218 - protein, 400 aa, unidentified
MEFIFGIDVSRYTSNVAILVDKHLVKQFKISNNVEGFKILDEQLGNFAKPLIIFEATGVYSRRLESYLQQADYPYTRINPLRAKKDMDSFRHNKTDSLDALGLAKAMSMHHYDPTKLSDPVYSEMHDLERLYQEKNEDIVREKNRLHKILSITFPEIEKLLSSTDGDLYWNLVQEFPSPKEVLKYDIQGLSKIILQSTPKNMGTLRSQHIASRFIDLAKESFTISNSIYAIKETTYHAHEVQTIDHMKTQLIDEMAKISENLPEIKVLTSIPGIGLKTAVCLTAEWGDVRRFYSSNAINAFVGIDLIHYESGNYTAGDHIRKRGNSYARKILFKAVLNIISASKHTPTNISLSYNTKKQSSGSKGTKKIVISAMHHLIRTMYHLILNNEMYDTKMFLTEH

SEQ ID NO: 201219 - protein, 344 aa, unidentified
MKISTVGLDLAKNVFQVHGIDNAGKVIVRRSLRRRQMMPFFGKLEPCLIGIEACGTSHFWARELRARGHEVKLMPPAYVKPYVKRGKTDAADAEAICEAVTRPTMRFVAIKSAEQQSVVALHRTRDMLVGQRTQLVNMIRSQLAELGVVLAKGIHHALRLVDQLVEGVVPDIPALACKIIIALAEQIRELQARIAMLEGEIKTWFRGNELARRLETIPGIGVITASALAASVTDPHRFTSARQFAASLGLTPKADSSGGRERKGRISKMGDRYLRRLLVIGMTSQLQSARRKPDAYPWVAGLLASKPNKLVAVAMANKAARIAWVVMTRGEVYRAPRPTTEATA

SEQ ID NO: 201220 - protein, 391 aa, unidentified
MTYVGIDVAKDKHDCYIVNSDGEVLAEVFTIPNDQIGFNRLFQTLQSVAPDLSKVKVGLEATGHYSYNILGFLLDKGLATFVINPLHTNLFRKSTSLRRTKTDKVDARTIAAMLASDVVLTSYTATSYHNEELKSLTRYRFDKVRERAKLKSSVARLVNILFPELEKLVPTLHMNSAYALLSEFPGAKQVASCHLTRLVHLLSESSNGRYKRDKAVQIRDAARTSIGSVMPAKSLELKHTIHLIEVLSEEIDEIEISIREIMDRNPSPILTIPGINYRMGAMILAEIGDFSRFDSPDKILAYAGLSPSTYQSGKLENAYPHMEKRGSRYLRYALYNATKYVCHWDPTFAAYLAKKRAEGKHYNVAISHAAKKLIRVICAIQKSGKPYCQAT

SEQ ID NO: 201221 - protein, 415 aa, unidentified
MMKEENNKVKRYYLGVDWAEEFHQVWVSDPEGKKVIEMMVLQQPQAMSEFGAWLHQRKAEEIELWAAIEKPHGRIVDFLLDHGVVVYPVNPKALDRARDRFRMSQSKSDSFDAYVLAEFLRTDHAHLRALEPNSAQAQELKMLSRDHQRLMRQKTRLLNQIGITLKEYYPRPLEVFGDLESKIARDFLKAYPTPQALSKLNRQSWDRFAQRDHHLSEARSTELWDKLGKAQLPIPEHVIRAKAKLLLALVVQLEALLPEVESYSEEVQRFFASMPAAELVKTLPGGKRGTTVAKLWAELGDNNRWQSFRHLQAEAGEVPVTQSSGKSRVVLFRFACNKHLRHAIYWFSFNSLRRCEWANKYYREQRAKGHSHPRALRALGAKWLKIIFVMWRDHKPYDDNYHLANIARQQMRQAT

SEQ ID NO: 201222 - protein, 416 aa, unidentified
MESLYGTVAGLDVHKKTVVVVVLQSMQPDQDYASGIFGTTRFGLKELVAFLRQHGVTHAAMESTAQYWRPVWMALEGEFTLTLAQARSTGARRGRKWDQADARRIAKRLLSGDLTVGYVPSPEQRDWRLLSRTQVAMRESSVRLRNQIEVLLEQAQIKLSSMVSDILGKSGRRMLDALIQGIDDPAELASLGDGRLHASKEQLADALSGQLTKIQRIVLQLHLQQIDHIERQIADLDQALAAALAQHQDAIERLCEIPGVSVRTAQHIIAETGPRAEVFQSAGKLASWVAVCPGQQESAGVSVSSRSAKGNWMMRRTLSQTAWAAIATKGSEAQRRFRAWRPRLGTQKAAWAVAHYQIRVMWKVLHEGVRYRQPDTEALNHRSLVARAKRALTQLRKLGYDVSITPPQPQASASGG

SEQ ID NO: 201223 - protein, 349 aa, unidentified
MPSIVGGMDIHRKQVTFDYLDLVTGEVKCGQIAPADRAGLRAWLRRFDGVPGVAFAVEACTGWRYVTEELQRAGIDAHLAEPADTAAARGRKMRAKTDKADSRLLRDLLTGGRLPECWIPPAQVLEYRALLETYHDLRREHTAWVQRVHAVLFHHGAPVFHDLSRTDAPQELADLARAHLSPAGQQQIALYLRMLEVTGGEAGVLRAQLAAAAGQLRGAIVLAGQLYGVGPVTALALCCWLGGAGRFSSARKAVRFTGLDITVYSSDQQALPRPPVTAGTAGAALVRIRGRQDPRSHRRPRSRLLRGGERPQGRQARRPVRGPQDRPQGMSHPGRARRRRVRRGVTRPG

SEQ ID NO: 201224 - protein, 354 aa, unidentified
MNKSTSEKLLVTLGVDLARNIFQLHGVDATGKVVVQRAVRRRDFLRMLTGIPRCLIGMEACATSHYWARRLRELGHEVRLIPPAYVKAYVRRQKNDAADAAAICEAVSRPSMRFVPVKSETQQSVLMLHRARELLVRQRIALINALRGHLAEFGVVAPQGAHHVGGLIALLEDVSDGRLLAAVRLALRPLAAQLHNLQTSIGVLDEQILAHHRGDPTSRRLATVPSVGPLTASAITASITDVSMFGSGREFAAFLGLVPRQSSSGGKERLGRISKMGDRYLRKLLVVGATAVLRYAQKGNSASKLWLQRLLAKKPFKVVAVALANKTARIIWALLRRGGVYRAQMSTSSAVQAA

SEQ ID NO: 201225 - protein, 341 aa, unidentified
MNVFIGLDVSLRSVAMCVLSAEGDLIEETNLDCEVKAISDHVRAKSYSVERIGFEAGTMSQVLFHGLTAEGFDVVCMESRQVSAAMSAMRNKTDKTDARGIAQILRAGWYNPVHMKSRESHEVKALLAARKAILNRCIDLENEIRGLFKAFGIRLPSRLSRLRFDENVRPIIEGDDTLAFALLPMLDVRGELYDAYRLMESRVRAVSRQDPVCKLLMTAPGVGPITALSFKAAVDDPTRFKSSRLVGAHFGLTPRRFQSGEMDNTGRISRAGDRDVRATLYIAANSLLIVSGRPSSLKTWGLKLIRTKGVRRARIAVARKLAVILHRMWITNTPFQTEGVA

SEQ ID NO: 201226 - protein, 391 aa, unidentified
MIYVGIDVAKDKHDCFITNSDGEVLFNVFTIANNLDGFNDLCQKIASVMEDVTKVKVGLEATGHYSYNLLGYLIDKGLPTYVINPLHTNLYRKSLSLRQTKTDKVDARTIASMLMSDVNLKSYSDTSYHNEELKSLTRYRFDKVKQRAKLKSSVSRLVCILFPELEKLVPTLHMASVYALLSEFPGAKQVANVHLTRLTNLLSESSKGRYGKETAITFRNAARTSIGSNMPAKSLELKHTIKLIQELSSEIDEIENEIKLIMDEINSPILSIPGINYRMGSMIIAEIGDFNRFDSPDKILAYAGFSPSTYQSGQLDGAYSHMEKRGSRYLRYALYNAAKYVCNWDPTFAEYLAKKRAEGKHYNVAISHAVKKLIRVIYHLEKTNQQYIKAV

SEQ ID NO: 201227 - protein, 355 aa, unidentified
MTSTKYIGMDVHTESISIAVRNSVGKVVMESVIETKASMILQFIEGLRGDLHVTFEEGTAAAWLYDLLKPHVARLVVCNPRRNALLKVGNKSDRIDARKLSELLRGNQLHPVYHGEHGLRALKELVRSYLTISKDLARVMTRVKALYRSWGIPCSGTQIYSRLHRVTWLSKISEPGVRLRAAFYFQQLDALRTLRQEVRQELLAESHKHSAWKRLCGIPSIGPIRAAVALGVLQTPHRFRTKRQLWSISGFAIETRSSADHRHVNGQLQKVKKRVSIRGLNQNHNHDLKNLFKGAAVIASTKPGPFQEFYTALLAKGMRPEMARLTLARKIATIVWIVWKRGVSFDAQYLKPQTV

SEQ ID NO: 201228 - protein, 401 aa, unidentified
MPELWAGTDAGKAAHHCTVIDTDGTKVLSRRVPNNEAELLELIGDVLALAEDSPVTWAVDLNAGGGALLIVLLTSHGQRLLYIPGRTVHHASRGYRGDGKTDAKDAYVIADQARMRRDLQPLQDWDEIAVALKILTARRYDLAADRTRAINRMRAQLLEYFPALERAFDYAASKAALVLLTGYQTPAGLRRVGPSRLATWLKNRKVRGAQAMADAAVAAGQAQHTAVAGESTAAAVVNTLARAVLALDDEIADIDAQIAVRFREHRHAEVVLSMPGMGPLLGAEFIACTGGDMDAFGSAGRLAGVAGLAPVPRDSGRISGNMRRPHRYHRRLLRVFYLSAQIAARFCPTSKTFYDRKRNEGKSHKQAILALARRRLDVLWALIRDHRTFTTDPPHPDLTSA

SEQ ID NO: 201229 - protein, 340 aa, unidentified
MDKPDLCGMDVSARELVVMVRRDGKTEPARSFANTKAGHQEVKRYLTRQRTGVRVCLESTGLYGLDIALLLQADTRIEVMVANPRAVKDFARALMHRSKTDPLDALVLLEYAARMPFQAWQPPAPAALQVTALGRRIHALTQQCTMEKNRLHAAASTQTTLPAIMRDLRRSIASLETAIARLSREAHKIIAANAPLARRFLLLQSAPGIGPVSALQLLGELSLVPANCDARQWVAYAGLDPRQHASGSSVHKKVGISKVGNRHIRRALYMPALTAARHNPHLQCFYLHLQTLGKCKMVALVAVMRKLLHAIFGMFKHNALFDGAKLCPCFSHQEVFAQTS

SEQ ID NO: 201230 - protein, 378 aa, unidentified
MHSMKEDALVVGGVDAHADTHHAAALDQRGALLATQSFPATTPGYLELLAWLRSFGEVDVVAVESTGSYAAGLVRYLRGHGVRVLEANQPHAHTRRRRGKSDPIDAEMAARLALAGKATTVPKQTDGIVESIRLLRVARQSAVKSRSAAMVQLRDLTVTAPQELRDQLACRKTIRGKAALCRRLRPSTGELGQPAHAAKFALRSIAVRIKALDAEVAVLDRQLEELVSGAAPRTSQLLGISTGHVGRLLVTAGENIDRLRGEAAFAALCGASPVPASSGKTSRHRLNYGGDRQANRTLHLIAVCRLRYCARTRAYARRRTAEGKTKPEIMRCLKRYIAREVYYALRADLARLDHPRRPTRVTTIICGAGPIGITRRRT

SEQ ID NO: 201231 - protein, 355 aa, unidentified
MNDVKFIGLDVHKTSISAAVLEESGKLVMQAVFTTNAAAVLSFLRGLRGTLRVTFEEGTHAAWLHKVLKPQVAEVVVCDPRRNALLKSGNKNDQTDARKLADLLRADMLKAVYHDDTQTLTLKELGRTYRSLTDDCTRVMRRLKALYRSLAIDTGGKKLYSKRHREQWINQLQQPGQRYRAERLFEQFEQLKTLRRQVRGDLIHEGHKHAATPVLSSIPFVGPIRSALLIARVQTPFRFRTKRQFWAYCGLALETRSSADHQIVNGELRRKSKPMFIRGLNLNHNHDLKNIFKSAATTASASPGPFRDFYENLLGKGMKPEMARLTLARKIAAISLSVWKKGERFDPEQLTAQAA

SEQ ID NO: 201232 - protein, 361 aa, unidentified
MKKPAQHLTAEVPRRQAKVEITIGIDLGDVWSHYCTLNQDGEVVDRGRFRTSPKAIEKWFTDVPPARVAMEAGTHSIWISAQLQELGHEVIVANVRELRAISHSDRKSDQVDAEKLARYARLDPNILRPIAHRTVQQQEALTLVRARALLVRLRTAAVNAVRGLTKSCGYRMPASATTCFAQRSLAVMPPGLAQALGPVLQQIAEMTVKIKQYDRQIQQLGQTEYPETQALLKVHGVGHLTALTFVLTLGSKERFGRSRDVGCYLGLRPRRSQSGDHDPQLGITHAGNAYLRSLLIECSNHILRPHGRDSALRQWGLHLAARGGKQAKSKAVVAVARKLAVLLHHLWSTQKPYMPFYEQAA

SEQ ID NO: 201233 - protein, 349 aa, unidentified
MIIVGCDYHPGFQQIAFVDSGTGDCGERRLEHREAAEKFYRDLAAQGIEVRVGMEASGHARWFERLLAELNFELWIGDATEIQRKRERKQKTDRQDAQHILRLLLKDDFPRIWVPSWENRDLRQLLWHRHRMVQARTRIMNQLQAVALNEGLRCKKRLWREHGRKQLESIRLAPWASRRRHDLLELLDRLNPTIAELSQAIEQEAEKFPEARYLMTHPGVGALTALAFVLIIGRADRFQCGKQIASYLGLVPLEDSSGKRRRLGHITKQGSSMLRFLMVEAAQVTVRSLPEWRSKYFHLMVRRGPKIAKVAMARRLAIRLYWMWRKGWDYEQVKKFGSHAGQLGTGDGV

SEQ ID NO: 201234 - protein, 311 aa, unidentified
MAAPRSLGLDVAKATVELASEPAGLTGQFATDAAGLRALVAQCQAEPVTLIVLEATGGYEAPVAAALATAGLPVAIVNPRHVRAFAQALGRLAKTDRLDAQVLALFAAHIRPTPRPLPDEATQELEALLARRRQLLEMLHAERQRLPRARGREVRRNLRTHIRWLEQSVIDADAGLETLIQASPLWRVQDALLQSVPGVGPTLARTLLGLVPELGHLDRHQIAALVRVAPLARDSGTLRGRRTCWGGRPAVRTVLYMAALTAARYNPVLRTFYQRLRAAGKPAKVALTAVARKLVVLLNAMLRDQRPWRYA

SEQ ID NO: 201235 - protein, 344 aa, unidentified
MTKIIRVGVDLAKNVFHIHAVDENEKTVWQGKYNRNNWIKAIVKRTPQAATIGMEACGSAHHWARELIKLGYDVKLVAAQFVKPFVKTNKNDKVDAEAICETISRPNMRFVSVKTVEQQDLQAMHRIREELISQRTSKANQIRGLTAEYGIFAPVGIHHLKKYIPVWLEDAENSLTPLFRELLQMMYNDLTLLDESIDSITNRIRISLNNNPAAQRLMEITGVGPLVCSALLIDLGDGLAFKKGRDFAASLGLVPRQHSTGGRDRLLGISKRGNGYLRKLLVHGARAAFRHVNDKADPLSLWIKKLSLTKHANVAIIALANKIARISWALVARNAKYDVSLAAA

SEQ ID NO: 201236 - protein, 313 aa, unidentified
MAEGEVYVGIDVGKARLEVAIRPSGEQFSEANDARAVRRLIKRLAPLGCTRIVLEASGGYEALQAALYAAGLPVVVVNPRWARDFARGIGQLAKTDALDAALLAQYAALPQLKVRALPDARTRELKALCARREELIDMVVAEEHRLAHVPQRPRREINGHIDYLRKRLKHLDHDLDQAVRDSELFRERSALLTSVPGVGRVLCVALLARLPELGRLNRAEVAKLAGVAPLNHDSGKLRGVRMIAGGRAAPRRVPYMAALSAIRANPTRRAYYRQLRDRGKPGKLALVAVMRKLLLMLNAIIKTQTPWRPPCPA

SEQ ID NO: 201237 - protein, 412 aa, unidentified
MFYCGIDWAERTHDVALVDDTGHLVAKRHITDDAAGYQVLLELLAEYGDTEENPIPVAIETSRGLLVAVLRTGTRKVFAINPMAAARYRDRHSVSRKKSDPGDALVLANILRTDMHTHRPLPGDSDLGRAIAVLARAQQDALWNRQQIANQLRSLLREYYPAALEAFATWANGLCRPEARELLKVAPTPSRAARLTRTQLQAALKRASRKRGIDAEADRLRDVFRAAWAHQPPLVEDALGKQMLALLIQLEAACTAADQLAEAVDEAFPQHPDAEILLSFPGLGIQLAARILAEIGDDRARFADARGLKAYAGSSPITRASGKKSSITRRWVKNDRLNHAGYLWAFSALRHSPGAGAHYRRRREVGDWHAAAQRNLFNRMIGQLYHCLKHRKLFDENTAFPASGQEMETATA

SEQ ID NO: 201238 - protein, 342 aa, unidentified
MTEITRVAIDTSKSVFTIHAVDAQDRPVLRRNLRRREVEAFFSKLPPVDVAIEACGASHHWGRTLIAMGHRVRLIPPQYVKPFVRRGKNDRNDAQAISEAAARPDMPCVPIKSAERQAEAMLLSVRELLVRQRTQLANALRGHAAEMGLAAPLGDKGLAQLRAEIAADAAMPPAALLALKMLGGEIDRIEARLAEAEARLMALHKAADGVGPVSRRLAEVPGVGPMSALSFALRVDAAAFSSARGFAAWLGLTPRDHSTGGKQRQGGITKAGNERLRQLLVLGASAAIRHARPGRASAWLLALLARKPRRLAAVALANKMARILWAMMTSGEAYRQEMPAQA

SEQ ID NO: 201239 - protein, 410 aa, unidentified
MRFYTTPHRYYCGIDLHARRMYICVLDAEGQIRVHRNGPATPEHFLTTIAAYREDLVVAVECIFTWYWLADLCAQEGIAFVLGHALYMKAIHGGKAKNDKIDAHKIAVLVRGGMLPMAYVYPREMRATRDLLRRRCHFTRKRAELLTHIQNTASQYLLPTLGKIAYHGNRVGVAEHFRDPEVRKSVETNLALIDEYDRLLTELELHLTQTAKVHDVNAFYRLRSVPGIGKILALVLLYEIHDIHRFPRVQDFVSYCRLVKCAKQSDGKHYGYSGTKIGNAHLKWAFSEAAVLCLRKNPPAQRYVARLAHKHGKGKALTILAHKLARAVYYMLRRGQAFEVTKFFSGTAGGDRLPRAPRMAAAPAGNDLDGGRYLDPPEIKRRGARRRRHERDGVTTKRVVDAAARVAEER

SEQ ID NO: 201240 - protein, 288 aa, unidentified
MIIVGVDYHPSVQQVVFLDMETGETGERRLNHSDGEAERFYRDLQRRQVKVRVGIEATGHARWFERLLAELKFELWIGDPARIKAARVRKQKTDRQDAQLLLRLLIEDRFPQIWVPSPENRDLRQLIWHRHRLVQMRTRAMNQIQAVAMNEGVRRKKTLWSKTGRKQLEALPLAPWATRRRQDLLELVDRWNTTIVELTAAAEQEARKRPEVLRLMTHPGVGPITALAFVLVLGSPDRFGCGHQIGSYLGLIPCEDSSADRQRLGHITKQGSSLLRFLLVEAAQAEAA

SEQ ID NO: 201241 - protein, 348 aa, unidentified
MRQETMLYVGLDVHKEFCQACVIDERGRALSNERFPSTHESLDVFLAGIKHAKFVLESTGIWEYIYEGIEDRGFEVVLAHPLRVRAIAEARIKTDKVDAETLAQLLRADLIPRSWVPSRDIRDLRQLVRQRTYLARQSTSFKNRISAELLRRGVRRPPELKTSFTKKDIERMRSLNISTVTSSLDCLERIQAQIEEMNQQLLVEFKRRPDAQLIATVPGIGYYGALLIHAEIDDINRFPDPEHLAAYAGLVPTVSQSASTVHYGGISKEGSAYLRWILIEAVHIHNHLHPESRLSRFHSKLEKRRGKNKATTATARKLAHIIYWMLKTREPYHGQGFNPVTKPARTSA

SEQ ID NO: 201242 - protein, 314 aa, unidentified
MILALRCVGIDVSKHRLDIFDDAIGAAESIANAPQPITEQVARWRCGSVFVVFEATGVYDQELAEQLHQAGIRFARINPARARDFARASGRLAKTDAIDARMLADFARVMLPQQDPAPEPARAALAMLAKRRDQLVQMRAQEKNRRSEARDYTMIEGIGRLIDFLDAEIAMIEARIAAFIEAEAPIAEDARLIRSIPGVGPVACMQLIAQMPELGQIGPKQVAALAGLAPLNVDSGTHRGKRTIGGGRKRVRDALYMAALNAIRPNGSFRAFYQRLRTAGKPAKLALIAVARKLLTVLNAMLRDRKPFRTAPET

SEQ ID NO: 201243 - protein, 399 aa, unidentified
MKSPCVAVDVSKGKSYFQGFIEIDKPASKAAPIMHDLEGFKSMYQLGQALKQAYGDVIYVFESTGIYHKALETFLMNQEEKSIILNPLEASKIRKTDLRSTKTDARDCKSIAKAYFMKAYRLHSSKDELYGKLGSMNAHYNFLVQQLREMKVHFRNTLDIVYPRFDEVYPDPYLDIPTAILKRYPHPDELKGKRVETITKYIMKDTKYREPKSMDEAKKLKTYIDNVSSGCRSDAYDVTILKTMVNKMSDQEVEIELCLDEMRDLVIDLPMFHQLMSIPGIGDNLAIRLIGELGDLNRFERSEQLVAYAGIDPRVCQSGQMTGEHLHITKKGNKHLRTLLFLAVTSNIRTNKQNTITDFYNKKRQQANPLAYKAALIACANKLLRIIFGMHQSGMNFHK

SEQ ID NO: 201244 - protein, 340 aa, unidentified
MNATTYGLDIAKRVFQMYWVDAQTGEIVNRRFGRDELIGFLAQRPAGRVALEACGSGHWWARKIKALGHEAVLLHAKFIRPFVQTNKTDAADARAIWTAVQQPGMRTVAAKTAEQQAMLSLHRMRALLVKFRTMQVNQLRGLLYEFGATFRTGRAAGLAAIRASMAELEDALPGAMICSLQDQLQRIDGLEQEIDRLEQRIGVWQKQEAACRAIAEVPGIGKLTATALVAMIGDAKTFKSGREFASFLGLVPRQSGTGGKIRLGSISKRGDPYLRTLLIHGARSVMYHAKVPTTWQRNIQARRPANVAAVALAHKMARTAWAILAHGQAYRKDYVSVKPA

SEQ ID NO: 201245 - protein, 361 aa, unidentified
MPTQKNDLNFEGQNIYAGFDAHLKSWQVTILTDGLNLKTFVMPPKPEVLNDYLRRNYPGATYHSAYEAGFSGLWAHYRLCNLGIHNIVANAADIPGTQKDRLQKEDRRDSRKIANALRGGTLTPIYTPSESTLNDRSLIRSRRALVRDLVRFKLRIKSFLNFYGIEYPEEIKTSGKYWSNRFLDWLGELPMQEESGRQALDILVSEAKTQKKLLKEVTSQIKQLSESDRYSKRSKILRTVPGIALINAMAILTEVEDINRFPNAERFASFIGLIPMTRSSGEKEKVGEITFRSHDFLRCMFVESAWVAIRLDPALLMAYQKLVRRMEPNNAIIRIAKKLANRTYSVLKYDKPYELCKTDNL

SEQ ID NO: 201246 - protein, 405 aa, unidentified
MAQTAQTDVTTSPPALHPPAPTLYVALELSKDTWKLGFTTSRTKKARIRDVKARDLPGFLAEVLAAKKRLELPDDAPVRSCYEAGRDGFWIHRFLEANRISNLVVDPASIEVNRRSRQAKTDRLDAQKLAQLLARHSEGEGVLRVVRVPPPKAEDERLLPRQLKTLKRKRTQATNQIRAALFQHGVDLDPRKGDFKKREFLRELRSARQWDGSRLPAELLRVVRMHWDQYALLVRQIKQLEQRQRQALREARRGSPKATIAQRKAARLSQLRGVGDTGSYVLATEFFGWREFRNRQEVGALAGLTGTPHQSGGSAREQGISKAGNPRVRTLMVELAWLWLRWQPESRTTRWFHEHVGKAGSRGKRKAIVAVARKLLVEFWHFVEHGVVPEGAQLKADGAQARSAA

SEQ ID NO: 201247 - protein, 349 aa, unidentified
MRKFCLTDKSGVYGALTIDLHSNNSFVVVTDDADKVLYSRRLPNNLADICGALSPYLKNLFGVVVESTFNWYWLVDGLIEAGHSVHLANTVAIKQYDGLKYRGDESDARHLAHILRLGLLPEGHIMSQPLRALRDLSRKRMQLVQQRTTQILSIGTCLAQQTGGQISGDSIKRLTEADIDKMPIGGTEAIGVKANLAVMHALQTQIDGIEKALAANCHDSPGYRLLNTVPGIGAILATVILLETGDINRFADVGNYASYCRCVSSVHLSNGKKKGEGNTKNGNRYLAWAYIEAANFAIRFSEQARKFYQHKKAKRNGIVATKAVAHKLACACFLMLKTGEEFSVELCFT

SEQ ID NO: 201248 - protein, 378 aa, unidentified
MNTIIINLGMDVHTTNFTLCCYTFYNDTFFAETSVAPDYREVVKYMENIRTAQKLSTGLDVKFICGYEAGCLGYTLYHQLTRAGHECVILAPSTVPSFKTGEIKTDKRDARKLARCLAFGTYSAVYIPTARDLAVKEYIRMRDDHKLSLKRVKQQILALCTRHGFQYRSSDSRKAYWTQAHLKYLHGITLEGYAQDALEEYLLTYMELTDKIERFDRKIEEIASGDEYREKVKKLQCLMGIRTYTALAVVVETGDFRRFASAEQYASYLGITPGEHSSGETRRRTGITHAGNSHIRRLLVEAAQGYGRGRVGYKSRALRARQSGSSTETIAYADRANERLRRRYYNLTFSGKAANVAKTAVARELACFIWGMMTDHTA

SEQ ID NO: 201249 - protein, 344 aa, unidentified
MDHFGGLDVSVKETSICIVDDTGRITKEVKVTSEPDALLKVLGNPTYRFKRIGLEAGPLSQWLFSALAEAELPVVCVETRHMQAALKAQINKTDRNDARGIAQMMRVGLYRPVHVKTLRSQKLRMLLTHRKLLQSKAIAIENDLRGTLRNFGLKVGMVGKVRFEARIQELVENIPDMAVLVESLLIVRRALREQIVILHRRLLAIVRDDEVCRRLMTIPGVGPVVALTYRATVDVPARFRKSKSVGAVFGLTCASYQSGEIDWRGKISRCGDEMMRAMLYEAAQSMLRSKKWSWLKAWAMQIARRRGIKKAIVALARRLAVIMHRIWIDGTEFRWTREQAAAAA

SEQ ID NO: 201250 - protein, 370 aa, unidentified
MLNVTTFVGLDVHARSIKAVALDAMTGEVRSATFAYDAAAVAEWVRSLDPAAKCVYESGVTGFDLQKRLSSMGIDCVVGAVSKMIKPSADRRRKNDRNDAEFLARMLSVGNVVEVWVPDDGCEAARDLVRALDDAREDLRRCKQRLSKFLLRHGLVFSEVNAKGQRRKNWTAAHWAWIRSISFPDKADDEVLAYYIDAARQAMEDKARLERLVEAEASKPRWKKRVDSVRCLKGIDVMSAADLVFEAGEFSRFKNARSFAAWIGLTPSEHSSGESVRQGGITKAGNKHLRRVLVEAAWHYLGCSPHSKDLAKGQAPDPGARRHAAKGVRRLVGRRAAMLERGVHKNKANVATARELACWCWAIGCMVESA

SEQ ID NO: 201251 - protein, 406 aa, unidentified
MEVLHPSCAGLDVHKKTVVACVITPEGQETRTFGTVTRELLALADWLAERQVSHVAMESSGIYWRPVYNVLEDDERTLLLVNPQHMRAVPGKKTDVRDSEWLADLLRHGLLRGSFIPPAPIRAVRELTRYRKTLVQERTDEINRLQKTLEGANIKLASVASDVLGMSSRAMLTALLDGERDPDVMADLAQGRLRNKLPELRQALSGRIQPHHMILVGQILAHIDFLEQVIAQMQTEIERCLLPFEEALELLQSIPAIKAVAGAAILAEIGTDMSRFPSAGHLASWAGLCPSNKQSAGKRMKGPVNRGNVWLRAIMGEVAWNAVKMRDTYFHAQFQRVARRRGRQKAVIAVAHSLLIVIYHVLRTGRPYEELGGNYFDQLDATRVERHHVHRLEQLGYTVTLTPLAA

SEQ ID NO: 201252 - protein, 400 aa, unidentified
MLSPTRFIGLDIHKAYFVAVGVDSQKQVVFGPQTVPNHQLDAWVEKFLLPTDAVVVEMTVNTYLFHDVIAPHVHSFIAVHPPNVTLVTGVKVKTDKKAALTLAQLHAVGMLEGVWIPPEPVRSLRAAIAQREKMLRLSTQAKNRLSSLLHRRHLVFSGEGSQYAPEQKEWWLALPLPDLEKLIVQSDLDTLEFARAQLEIIEQALKREAAKDDRVPLLAQLPGVNILTALTILAAIGTIERFEDAKHLVGYAGLGTRVHDSGQVHQNGRITKAGRKDLRRAMVNAANVAVQHHPFWKEELARLEVRLGRSKAIVAIARKLLVTVWHILTYEAVDRHANERSVAASFINLAYRMGTKNLPNGISAKAFARQQLDRLKIGAGLTTIPWGSKRITLPPSRLKG

SEQ ID NO: 201253 - protein, 331 aa, unidentified
MTNAAREAAADARPVDYIGVDMAKARFEWGVHGARSTQGAGNDAAGFETLLADLHPRRVGLIVIEATGGLEHALASVLLELGLPVAVVNPRAAREFARSMGHLAKTDAIDALALAHYAHTLANKADQAGVRLRPVPEHLEALQVMVLRRKQLMDMRTAELNRRGGAMRVLRKSIDAVIKTLNEQIAALDKDIGAHLDEHFKELDQRFERIKGIGPTTCASVIAFMPELGRISNARAAKLAGLAPLNNDSGNSRGKRSIWGGRKLVRSALYMATLSAVRFNPVIKAFYQRLIAAGKSRKAAMTACSHKLLRILNAMARSGKPWNAELHGVAA

SEQ ID NO: 201254 - protein, 445 aa, unidentified
MQVRETRKHSEAEPEYAALVAIDWGDQKHVWALQAAGSDRIEQGELEHSPETVAAWASGLVERFGGRPVAVCLEQSRGPLIYGLGHYEAFVLYPVHPSSLAKYRQTWHTSGAKDDPDDAALLLEMLDKHRDRLRRLEPDSDQTRTLRLLVEQRRKLVNEKTRQSNRLKAQLKQYFPQPLKWFTRVDTALVGELLERWPTLEKLQQADQRKLRSFLRQHRAGGAGRIESLCEQIRAAVPATRDRAVIRAGELSAGCLVRLLATLRESIAEFEHQIDQLAQAHPDFAVFDSLPGAGKALAPRLMVAFGDRRERFGAAAEMQAFSGIAPVLERSGRQCRVHYRWACPKFVRQSLHEWAGHSIAQCQWARAYYDRQRLKGKPHHIAVRALAYKWIRILFRCWKDRVPYDEQIYCRSLSQHGSPLANAPAVVELQFKSAAGFWKISPANP

SEQ ID NO: 201255 - protein, 408 aa, unidentified
MNQTLFVGIDVAKLTNHVYCLNLDRKKLLSINIPNTQDGANQIETHLLKLLEKHNLTKVIVILESTGVYSAHIATYLSTSKYLTLFEIKVYIINPKISKNYRNSFADMDKTDPKDAYVLADIARVGRCDELTPFKGSQRLALERLTRHRLHIAEKLSNEKVYALNNVFLKFSNFETLFSNNFGVTAVDLLLEYKSIDDIINSSLEDLAGFLAKSSRNRFDSSFDIAAKIQKAARASYRLNKTAYDPINISLASSINVIRCYQDELKSIDKAIINQVAGFNHNHYLGLTSIPGIGKVYAAGILAEIADINQFDSHSALTKYAGITWRKNQSGKYTADETYMTKTGNKYLRYFIFEAANMARINIPEYRDFYHKKFNEVTTHQHKRALALTARKLVRLIYGLLSTNRLYK

SEQ ID NO: 201256 - protein, 349 aa, unidentified
MSHNFNCTIAVIGIDIGKNSFHLVGLDERGAIVLRQKWSRGQVEARLANMPPCLIGMEACVGAHHLSRKLKALGHDARLMPAKYVRPYSKGQKNDFRDAEAIAEAVQRPTMKFVATKTTDQLDLQALHRVRERLVSQRTGIINQIRAFLLERGVAVRQGLRFLRAELPGILATPPDVLSPRMVRLIEGLANDWRRLDERIDHISSEITALARQDPGCERLMSVPGIGPIISSAMVSAIGRGEVFSKGRDFAAWLGLVPKQISTGDRTILGKISKRGNRYLRVLFVQAAWVVMIKPQSWERHGLKRWLDSAKRRLHRNVLAIALANKLARIAWSVLARGRAFEASKLQVA

SEQ ID NO: 201257 - protein, 337 aa, unidentified
MDYFAGLDVSMEETHICVLDRDGVVIHEATAVSTTDAITDALTKAPRCRCIVFETGRMAPMLYHGLSQRGLPVVCVESRQAYLALRSLATHKTDRNDARGLAHLARTGFFKPVHVKSLPAHAIRSLIIARKKLVGQRVTLENQIRGLAVVFGVRLPRALSAAFIKQALTASEGIPGLSAAVRGLVAARSAVLAAVVTIDADMKRMARASQACRRLMTIPGVGQLTALAFTAAIDDPERFKRSRDVGAYLGLVPRRYQSGEVDYTGSISKRGDRRVRTLLYEAANVMLTRYKGQLKLKDWAFAIAKRSTMRKARIALARRLAIIMHAMLRHGTEFNPA

SEQ ID NO: 201258 - protein, 388 aa, unidentified
MPTVTDRTEEPTAIQTNLAAIFTSLELSRSIWLITSLSPGGGEKMSKHSVPAGDIASLLARFSELKQKALARTGTSFPIVVIQEAGLDGFWVHRVLQSEGIESHVVDPASIATSRRRRRAKTDRIDGEALLRALLAFKRGEPRVCAMVKAPTPEEEDRRRLCRERKVLIAERVKHVNRVKGLLFSQGVSGYEPLRRNRRQRLDELTTGDGRTLPIHLKTQISRELDRVELLLGQIKQVESERDALLTAQQATMPAPAAMLLDIKGVGPEFAAVLWSEGLFRHFDNRRQVAAYAGLAPTPWQSGSVDREQGVSKSGNPRLRTTLIQLAWLWLRHQPQSALALWFKERVSRNGGRMKKTTIVALARKLLVALWKYVTAGVVIEGAVMKAG

SEQ ID NO: 201259 - protein, 347 aa, unidentified
MQVTTVGIDLAKNVFRLHGCDAQGRPVLRKQLARRQLLSFVANLPRCLVAMEACASAHYWAREIEKLGHQVRLISPRFVKPYVKANKNDASDAEAICEAASRPSMRFVAVKSTAQQEVQAVHRVRQQLVKTRTALVNQARGRLAEFGIVVAQGVGRLRRALPTILEDRENGLSGVMRELLGEIGERLRFIDDRLHKYDLTIQRLFRQDERCQRVAAVEGVGPLTATALVAAVGNATDFKSGRELAAYLGLVPRHRASGGRTVLLGISKRGDRYLRTLLIHGARSALLRIERRRSARAIWAARLKLRRGSNVAAVALANKNARVLWALLNRHQSYQPAPFPARVPQSG

SEQ ID NO: 201260 - protein, 350 aa, unidentified
MSKNMTIGMDLGDKNNTVCVLDSEGEVVLKKEIVNTKEALVKFFKPYKGSLVAIEAGTHSPWISRALEGLECEVLVGNARKLRAIWSAKDKCDDHDAEMLARIARLDRNLLCPVYHRGVEAQQDLAVLKARDALVGVRSQLVNHVRSTVKSVGGRIKKCGTDSFFRQALEDIPEGLLPALKPVIDEIDALTARIRAYDKQVQSLIDKRHPDAKRLSQVPGVGPVTSLGFVLSLEDASRFKKSRSVGPYLGLTAKRDQSGETDKQLHITKAGDEFLRRLLVGCTHYILGSFGPDSELKQFGKKIAMRGGKNAKRRAVVAVARKLSVLLHRLWVTGEEYDPEYQKNKMKKAA

SEQ ID NO: 201261 - protein, 353 aa, unidentified
MRTYYVGLDVHRATIAIVVVNGAGKVVEQLVVETSAPRVRSYLKQLQGRVYVTFEEGRQAQWLYDVVRPLVTAVIVCDPRHNKLLKGGNKSDRIDAQKLAELLRNGSLKAVDHRDHGVRALKELVRNYDSLVSDTTRVMNRLKAMFRGQALACGGHEIYRQDQRERWLAKLTERGAQERARSLYQQLAALQALRHEAKLAMVREARRSAAYRWLMSVPRLGAVSVAQLLAVVGSPHRFRTKRQFWSYVGLAVVTSSTADMEVVAGVLRRSRRPVATRGLNRNHNHLLKRVFKNAARSACQHEPFKQHYERRLQKGMAPALARLTVARQLSAITLRLWKRGEEFQAERMKRPAA

SEQ ID NO: 201262 - protein, 386 aa, unidentified
MEGRPLLSAILTMDRVPEISPTHMPHSVDEESSGKACTASTADLTARSRRHVSTPAIHTLALGDTAMQTGLVITTFIGVDVSKATLVTCVHDSSTRCTLANQRGAIAAWLKSLPAGSAIGVEATSTYHELLADLAHSHGLLVYVLNPKDVHRYAKGVGIRAKTDRVDAALIARYIAHEHANLHLYRPASLEQRQLQRLLTRRAKLSRARISVQQSLQGLPGLKVPLRKLLERFDALITVIDARIQALVNACPQRQDACQRLRSIKGVGPVVGPALLNTLERFAFKHADSFVAYTGLDPRPDDSGQRTGRRRLSKHGPSELRRLLYTAAMAAVTSPAWKSLYQHYLDKQLSRTQALVIIARKIARTAWSVYTHNTTFDPQRLTSGLT

SEQ ID NO: 201263 - protein, 448 aa, unidentified
MSTPPSSTPRHLQPDPEFAIVRPHAAGLDIGAEEIWAASPPGEHAQTVGKFGTFTADLTSLVIWLKERGITTVAMESTGVYWIPIFDVLQRAGIEVFLVNAYHVKSVTGRKTDLQDCQWLQKLHGCGLLKGSFRPDDLTVAVRTLFRHRADLVREAAASIQRMQKALTQMNVQLHHAVSDITGKTGLAIIDAIMAGERCPATLAKLRDRRCKSDEATIAKALTGTWRDEHLFAIRQHLATWRHFNAQIENTDAELATALGQIPDDPNAGPLSGPVKRDQTDLAFDARTVCHQKFGVDLTAIEGIGPNTALTILSEVGTDFSRFKNSGAFCSWLGLAPNKRITGGKTISSHTKRTRNRVNQALRAAANALRKSKSALGSIARALERRIGATKSIVAMAHRLARYVYAMVTRGEAYLQRSLADLEEKRRERQTALLRTLAAELKYAIVPQ

SEQ ID NO: 201264 - protein, 328 aa, unidentified
MSKGILYVGVDVGQEDLWVAIEGIKPCSFKHTIAGIRGLYNLVRKIDTKATLHFCMEATGVYSLKLATSLSAYPDAQVSIVNPAQIASFAKAQLKRSKTDKIDAQVILAFAQSQNPRPWTAEPKSLQQLYELVVQADALLETQRRWVNRAHTQTYIPELPTAVSKSTSALKRHLERQIAKVEKAILKLCETNPILKTQMELLCTIPGVAERSASRLLAYGKIALTDYSARALVAYAGLAPKHRQSGTSLLAKSHLAKEGNKRLRHALYMPALVGIVYNPLLKKYYKRLVAKGKPKMLALIACMKKLLIMIRAILIQKIPFNPDIQCLT

SEQ ID NO: 201265 - protein, 482 aa, unidentified
MKAKQKEPTEKSTGQSSQLNWRQMNRKQRRDLERKIQSADLTLQLVHPDASGIDIGNESHYVAVPPDRDSQPVQHFGCTTAELRAMADWLKQCRIRTVAMQSTSVYWIAVYDVLEQAGLEVYLVNARETKNLPGRKSDVQESQWLMKLHTYGLLRNSFRPPQEIRMMRTYWRQRNDLVRSAARHIQRIQKTLTQMNMQLANVLSDVSGVTGQAIIKAILAGERDPQKLAAFRDPRVKASEKDIARSLEGNWQEDLLFVLKQEQAAFEFCRKQMAECDRQLEQYLQKMEDRSQGATLPEEKRKDRLQKKKGNQPQFDLQQQLFRMTGTDLTQIDGIDVMTATTILSEAGWDMIKWKDEHHFVSWLRLAPDNRISGDRIIGKGRLPTSNRVTVALKLAASNLRTSQSYLGAQFRRLRARLDTPVAIKAMAAKLARLIYRMLRYGTRYVDHGSRHYELQQRTREIRRLKLKAATLGFHLVQSTAA

SEQ ID NO: 201266 - protein, 319 aa, unidentified
MNNSSSNTYVGIDVSTSALDVALGTDGEYWQASHDQVGIQRTIARLIIIQPALVIVESTGGLEKALITELYKAGLPFALVQPRRVREFARSIGLLAKTDKIDAHLLARFGEAVKPPLTRLPSEAEQYLNALMVRRRQLLDMVVIENNHLSTTRLSMRPKVEEHIDWLNRELEELDKEINDHVHQIPQFSEKEKILRSAKGVGPVLCAKLLSGVPELGTINRKKIAALVGVAPFNDESGHRRGKRRTKGGREDVRNVLYMATVAAARSNPVIKSYYQHLVNAGKLKKVALVACMRKFLTILNAMIRDMQPWRTISTPIYP

SEQ ID NO: 201267 - protein, 346 aa, unidentified
MKIIGCDFHPSFQQIAVFDTETGEITEHKLVNGNGEAERFYRSLPVGSLIGIEACGNSHWFIDLLGRLGHQVWVGDAAKIRASYVRKQKTDRRDAAHILTLLLEKRFPKLWTPSRQERDQRQLLIHRHKLVQIRTRIKNSLQHLALNQGVQKKQKLWSKEGQKLLIQLPLQGWTAVRRQDCRELLAQLDERIAKLDKAAELAAEAHPQASLLLQQKGVGPITALAFALTLGDVSRFPHSNQVASYLGLIPSEHTSSSKRRLGSITKQGNSFVRMLLVEAAQSVTRLDPQFRKHYVHLCRNKPKAVAKVAAARKLAVRLYWVLRTDQNSQKAVPIESSPRVPLVGAS

SEQ ID NO: 201268 - protein, 410 aa, unidentified
MTEIVIAQDAPVLVAIDIAKARHEVLIAIPGKKRRRRLTVLNQMEDFQRLITSLASYGRPVRAAFEATGNYHRAFAYHLATAGFEVKLVSSVALARTREALHNSWDKNDPKDAQVILHMMEIGNEQFYHDPLVCGTNDIQELSKTHDIVSKSKTELWHRVLTHYLPLYFPEADRFHRSSRSDWFFAFLERYPSPHFISAMSKDAFTADAWDVVGRKVAKERLLADIYETAKASVGLPVAPDSDAIGMFRLVLGEGRSLIAQRNQIEDRAVALLKDLPDYQLLTSVPGIGPINALTILAEAGDLRRFAHHRQFLKFCGMDLATIQSGTFRGQTKLSKYGNARLRRTLWMAGQVAILQRTNSFRDKFERYIAKDRHNKHLRRKAYTAIAAKMARTVHGIIKHGEPYRPFFEG

SEQ ID NO: 201269 - protein, 343 aa, unidentified
MYYIGLDVHKKTISYCAKDAAGHVHREGKIGSTRCELDAWIKTLPQPRMMAMEATIFTGWIYDCLLPHAEKVKVAHPLMLRAIAAAKKKNDRIDARKIADLLRCDLLPECYMASTEIRDRRRTLRYRGLVLRQTVQMKNRVSGLLMESGVSYDKQRLHKMGYFSELFSTNEEISDSIRPLLRLGREHILRGQRLDRALTSSLERDPLLSERLRRLRTIPGVGPITALTWALEIGDYTRFPSVKEAISYCGLCSAEKSSADKVMRMPISKQRNKHIQHVLVEAAKMAPRYSHELALVRDKEMQRGNRNRATLAVARKLVAYMLAVDRRKQDFVPAEALAAKAVA

SEQ ID NO: 201270 - protein, 436 aa, unidentified
MRGCRCSMIMGFTKPIEHFNLKRKKVITMNTLYVGIDVSSKSNVVYLMLPNGDKHSNFSVANSHEGSTQLVKRILSALTSLSLDTVLIGLEATSVYGDNLVYFLREDASLAPFHRKIHVLNPKQVKKFHDTYNDLPKNDYVDSFVIADCLRFGRINKEVYLGDYRYKALQNLTRARFFAVQNLIKEKQRFMNVLFKKYSTMTQEKVFSDTFSTTALAVYDEFDSAEALANMDLHELTDFIIKKGKNRFPDPDAVAKAIQKAARSSYRLPKTVNDSVNQVLSISITSIKALESQIKEFDKAIKAQMELLPNVLISIPGIGPVYSAGIMAEIGDINRFDNQAALAKYAGLAWKQHQSGDFEAEVTRLIPSGNRFLKYYLCEAALSLVRCDKEYSNFYHLKYKEVNRCQHKRALALTARKFVRLVFRLLKDNRLYCPAK

SEQ ID NO: 201271 - protein, 320 aa, unidentified
MSVTSVTVGIDVAKAHVDVCVLGAKSSAQRFDNDAEGHSALAAALQPLDVGLVVMESTGGYEAALACALQATGLPVAVINPRQARDFAKSMGRLAKTDAVDARTLAELAAVLLRRDDLQRFLRPLADERQQWLAALVTRRRQLLTMLHSERQRLQITPKKLHASIEAIEAAIKAQLDEIEEQMVTHVREHFGELDTLLQSAAGVGPVASATMIAELPELGRLNRREIAALVGVAPMANDSGGSKGRRRVQGGRFEIRRVLYMATLTATRYNPAIKAFYERLKAAGKLPKVALVACMRKLLTTLNAMVRTGKPWDKSLHCA

SEQ ID NO: 201272 - protein, 311 aa, unidentified
MYYIGIDVSKKDLSVFDGKDLKFINKEGLTSFKKYLKKKVNFSDLVIIFEPTGVYSLYLKEFCAENNIKAYIVNPKQSHNFTRVLGKRSKTDKIDARILYQFHRLIDSKDIKVPKIDQQAKALSSYLVSYEFALKQRISLSHHLESLRDKRLIALMKKDLKRAKKLEDRIFDDIKEYLGKNQDLKEDYQRLSTIPGIGEKAAIALLTLFKTYQGTNRAQITALAGLDPVKRESGTSVKYKVRISKNGKGIYRKILYLPTLCATVHNQKIRVFYQRLLAHHKTKKLAVIASMRKILLIAHAMYRDKTEYVAV

SEQ ID NO: 201273 - protein, 445 aa, unidentified
MFIQSQDDSHYCYSFFTKVVILMMKLKYSICCGLDVHKNVIVATIVITNKDGVSEYKQKSFSTISSDIQKFHNWLIENHCYHVCMESTGKYWIPIFNYLENDIEICLTHPKYVKAIKGKKTDKKDSKWIADLYKFDLVRCSFIPPKDFRQLRELARYRFKLVCMKSSEKNRIQNCMTVSNVGIASVLSDPFGKTATEIMSYLLEHTADSIDEKAVRKLIKKGAKAKSDEIIEAIRGYNIETDQAKKLELARAHLDFLDDMITQTEVELYVRIKPYYEFVEFVSSMPGMTELSSTIVLAETGVDMNIFDNAKHLCSWCGLSPANNESAGKKKSVRIAKAGDYLKPMMVQCALAAVKSRKQPYFAIKYGRIKKRRGHKKAIIAIARMMMVCIYHMVSEKKPFTPTDYEELMDPQNHVERVVLNENNVFAYLETLGYDSSKLVKRSDN

SEQ ID NO: 201274 - protein, 341 aa, unidentified
MRQYVGLDVSQREAAVCVVNETGEAIFEGKAKSHPGDLSKLLRKHAPLAERIGFETGAMASWLWHELRRVELPVVCIDARHAHAALSVRMNKSDQNDARGLAELVRVGWYREVKIKSEESQKVRAILVARFRLVSIRRDIENQVRSLIKECGLLFPRAIGQQFRDQVGELLGEDHQLLSVIAPLLSIHELICQQQSKFDDEVRRLAKSDETTRRLMTVPGVGVVTALTFRHTIDDPSRFRSASTVGAYLGLTPRRNQSGETDTSGKISRWGDRLLRTYLYEAATVLLYRTKKWSSLKAWGMKLAKRIGMKKAKVAIARKIAVILHCIWVDGTSFGWGNAPA

SEQ ID NO: 201275 - protein, 338 aa, unidentified
MYYSGIDQHKQFSYFTTVNDEGIIIKQAELKNNEFDILNYFYTLGKNHIATVETTGGWYWMNDLLSNHGINLKLAHAKYVKAIAYAKVKTDKVDSHILAQFLRLNFIPEAYKISDNLRPLRDTLRARLRLSQKRTSCLNFMNRMLEKFNINSPSQLTEFYKLQYQQFDNQEQLLKQQMLTLEKSLYTSLIPNEDIQRLLRIPGIGKLNAFSILLEVGDINRFQSEKNFFSYCRLVPSARNSAGKSKQRSSKDGNKYLKLVFSDAAVHSLQYYPAIKKYHDSKLRKKKKQVAHAIIAKEIARIVYYVLKNKSAFNNHFKGIELEHKKSVQWPRTSSPDV

SEQ ID NO: 201276 - protein, 408 aa, unidentified
MWFVGDDWAEDHHDVEVQDGSGRRLARARLAEGVAGVARLHELIAGAGGIDAEPEQVLLGIETDRGPWVAALVAAGYRVFAINPRQVARYRERHGTSGAKSDAGDAHILADMVRTDGHQLREVAGDSPLAEGVKVTARAHQNLIWDRHRQLLRLRSALREFFPAALEAFDDLTAPDVLELLAAAPDPARAARLSRSRIAGALKRARRRDVAAKAERIQAVLRSPQLTQPGELAGAYAVTVRAAVAVITAFNAEIAALEGQVEAHFDRHPDAEIYRSQPGLGEILGARVLGEFGDDPDRYDGARARKNYAGNAPITRASGKKKVVLARHVRNRRLADALHQQAFCALTASPGARAYYDSLRTRGTGHHAALRQLSNRLVGILHGCLKTRTLYNEHTAWAHHTQDQHVAA

SEQ ID NO: 201277 - protein, 398 aa, unidentified
MKDLKCIALDVSKDSSHIQAFSSDLLKLSKVEVIDHTLEGFNEVIRLYELLDHPMVVFEATGVYHRGLQKFLIDSEIPYVMINPLVSAKIRKQSLRSIKTDKKDCRTIAKAYFTADLKDTLVEPLVESLHNQMRQLNRYYVDSMVHLVKAKVSFNAQLDCVFPGLKKVFPDLYSDAAVVLITRYKHPDIIKGKKSDDIAKYLKKNTRHGEAYCKRKAIAVLEYSKRTCSGCKKDDIDCDILVDLMGTVSFFNAKCKNILSQLVELSRETDIFEPILSIPGIGENLAARIVAEIGDITRFKGPKQLIAYAGTDPHVYQSGIRDGLHLSISKKGNKNLRTVLYLAVSCHLRTKTKNTTVITEFYEKKKQQGKPHRVAQVASLNKLIKVIYSVSINKTIFE

SEQ ID NO: 201278 - protein, 349 aa, unidentified
MSMVCGLDLHRGQITFDTVEVDSGEIWKGRLWKPDRPRFRRWLHDEVAPRAVDGHVAIAVEGCTGWRYVVEEIQAAGFEAHVAEPADTQAMRGRKKHAKTDRTDARLLRDLLHAGELPESWIPPEPVLEWRERTRLYKSLVDQRAVWVQRIHAELYQHGVALPEEHIRSENTRQLLSGPDVTLSDAACQRIRVGYRMIDAIHAEAEALRDQIARFARRQKACRTLIDQIYGFGPTAAVVVWSELGDCRRFSRSRQVVRHTGLDVTVDASDTRRGGGYLSRQGPGTLRWALFEAGLCASRATSPDRDYYRSVKERSDGKLAAICVARKLARRSYHILRAMEPDDVYAIPI

SEQ ID NO: 201279 - protein, 403 aa, unidentified
MNSVGIDISKGRSTIAVMRPFGEVVISPFEVRHTDSELSELARQLKSLDGETRVVMEATGNYHTPVAKLLHDAGLYVSVVNAKLVHDYGNNELRRVKTDRKDAVKLANYGLDRWLTLPRYIPEEDTRLLLKNCYRQYRQYSKVQTVLKNNLISLLDTVFPNANCLFSSPIRGDGSEKWVDFVAEFWHCRCISEKSERAFTCKYLHWCRKQGYNFSEAKAHTIYAEASGHIGVMPMSETTKLLVEQAVAQLRATSTALAALKHKMQALASQLPEYPVVMDMFGVGPTLGPQLIAEIGDVRRFYSKKALVAYAGLDAPPNDSGNVTGRHKSMSKIGASSLRRTLFLVMTVYLQNAPLDEPVYQFMDKKRAEGKPYRVYMMASANKFLRIYYATVKAYLESLEHTA

SEQ ID NO: 201280 - protein, 385 aa, unidentified
MANQNDLSRSLVALEQNNTIIAVIEMSLNYWLIAGIVPGVDRHPLKKLNVDEKALLQLLRQWRDEAAKAGHVITRMAVAFEAGRDGFWLARWLRARGVDAHVIHPTSVAVPREHRRAKTDRLDTELLKRAFLGWLRGEPEHCRMAAIPSLQEEDAKRPTRERENLVGERTRIINRMKACLVRFGIRNFKPTLRKAPERLNHLCTPEGDPLPPNTLAELRRDMARLRFIIDQINEIEAARLLRLEQARVEGPTAMVRLVARVIGVGIETADMLVHEILSRDLRDRRAVARYAGLTGAPDESGSKRREKGLAKAGNARVRRGMIQLAWRFLLHQKDSALTQWYRARTASAGRKRKTMIVALARKLLIALWRLATTGEVPTRVVLRAA

SEQ ID NO: 201281 - protein, 316 aa, unidentified
MIHVGVDLHQRFCYMTALETRGKLLQSGAVNNERLALKRYFRQFRGQAVEVAVEACGFWPAFREVVEPEVKRLVLVHPQRVKAIASAKLKNDRVDSATLAHLLRCDLLPESWKADRDTQARRQQVRLRATLVRQRTRLKNQVHAVLHQQGQRSPVTDGFGKRGRQWLGQVKLPEKARQTLAVCLRMIDYYTQEIEEQNRQLSVEALKDARARWLMTIPGIGVYSAMLLLAEIGNIERFADKAGLCSYAGLVPRVRESAGKAARGGITRQAHPTCAGSWWKQPRWQRSVRRRPRLTSNDCARRSTRMWREWRWHESY

SEQ ID NO: 201282 - protein, 353 aa, unidentified
MSHHSEAFVAFDTSKLRNAVAIAETGRAGEVRFVGEVDSTGIATAKLVKKLAAKYDRLTFCYEAGSTGYGLYRQIRTLGHDCIVAAPSLIPQKPGDRVKTNRRDALSLAKLLRAGELTAVWVPDERHEAMRDLSRARGAAVEDLRGKRQQVSSFLLRHGLHYPGKKTWTKAHTVWLASLKLAHAEQRIAFEEMLLAVRQAQERIERLEQAIRAAVADWSLAEVVTALMAMRGLDLISATTFLAEIGDLSRFQTPRELMAYLGLVPSEASTGDTVRRGPITKTGNRRARRILVECSWSYQHAPRVGEEEAREGGGGTIGRARDRLEGAMPTVCALSGVDQEGKAQERRRHGDRA

SEQ ID NO: 201283 - protein, 312 aa, unidentified
MTCWVGIDVSKQTLAVWVLPQEASIEVSNTTAGHRQLVALLADKAVERVVLEATGGYERGVMSTLSAAGLCVVRINPRRARAFAIALGKLAKTDPIDACVLARMAQVLKTPAQVSASPQREALRDLVQRREQLVQQRDDERRRLAQGHSARVQARLCACIEHLKSQIQQLDRAIAQAARTADAERTEQLTAIAGIGPVTVSSLLAYLPELGQLNRQQIAALVGLAPYNNDSGKYAGKRSIQGGRPAIRRVLYMAALSVIRKQDDFKRRYEQLRTRGKCAKVAIVACMRVLLIRLNAMIRSQTTWKTEPVPQT

SEQ ID NO: 201284 - protein, 352 aa, unidentified
MISSQITAIPKLFIGMDVHKKSWTVHFKTDLFDNKTVTMPAEPAALINYVSKNFDGHQVSCCYEAGCCGYWIARELQQHNWLVSVVNPADVPRNNKQDWQKTDRIDSRNLCKHLSDGNLKGIYIPGEQQEQLRSLFRRRIHLARQLRTIKNHIKSQLLYYGIKLPGHYDNPNWSRDMKDWIKNLQWKYSSAAISMQSRLKQLEFVWYEELHISNELRAYCRKHYHKDYYLLKSVPGIGGITASAIIAELGDLRRFNRLDELASLVGFVPGIYQSSDNKINLGLTKRSNSYLRSLLVEASWVAVRDDMALQQYYRKYAQKEPNKAIIKVAHKLLSRIRAVIITGIPYQNGTIK

SEQ ID NO: 201285 - protein, 447 aa, unidentified
MEVVYRRCCGLDVHKKMVVACLLSVDERGQRQKEIRVFTTMTKDLLALADWLAAAECTQVAMESTGVFWKPIFALLEGQCGVILANAQHLKAVPGHKTDIKDAEWIADLLQHGLLRPSFIPPLAQRQLRELTRYRSTLVAERARLVNRLHKLLEDTNLKLTAVVTNVTGVSARAMLEALLAGETDPAALAGLARGKLRKKRAQLEQALEGRLQAHHRFLLTTQLAHLDDLDAYIAACDQEIAQALSRDVAPTEPEQPTQAAARMPSSAAEAGAADPAAGPPSYLQAVQLLDTIPGINQRLAEIILAEIGPDMRHFPSARHLASWVGICPGNHQSAGKRLSGKTRQGDRWLRQALIEAAHGAMRTKDTYLSSQGRRLGQRRGKRRAVVAVGHSILIIAYHVLKRQQPYQDLGSNYFDERDRAIVARQSIRRLEQLGYKVTLETPSQVA

SEQ ID NO: 201286 - protein, 482 aa, unidentified
MKAKPPEKIQKATNPSTRGHWNEMNRKQRREMMRKIQSEDISLEVVHPDAAGIDIGNESHYVAVAPSRDKQPVRCFGCTTGELKAMTDWLKQCGIRTVAMQSTGVYWIAVYDILEQAGLEVYLVNARETKNLPGRKSDVQESQWLMKLHSYGLLRNSFRPSQEIRTMRTYWRQRNDLVQSAGRHVQRMQKALTQMNIQLANVLSDVSGVTGQAIIKAILGGQRDPHKLAEFRNPRVRASEEEIARSLEGHWEEDLLFVLQQEQDGYEFCQKQMAECDRQLNHYLEQREDRSQGAPLPEEKRKGRRKKKSGNKPQFDLRTGLFRMSGTDLTRIDSIDVMTATTILSEAGWDMSKWETEDHFVSWLRLCPDNRISGNRIIGKGRLPTNNRVTIALKMAASALRLSDTYLGAQFRRFRTRLGAPVAIKAMAAKLARLVYRMLRYGMKYVDKGAATYQEQHRQLQIKQLKWKAATLGYQLIGVPAT

SEQ ID NO: 201287 - protein, 398 aa, unidentified
MKTAGLDVHKDSIFCAVFDGKHYSDVEVFETFSTSIRKLGEYLRTSDVKRVAMESTSIYWIPFWNILSEMGFDLMLVNPFLIKQLPGRKSDVKDAQWIAQLLHKDMLAGSFVPGERIQELRSYTRAYGKLQQRIARMLTKMDNILVQAGIRLGSLVSDIGGKSMLSVIDALIAGETDPARFSKLVYASKKNKENGKLASALTGCMKEHHRFNLQMAKAEYDLLNKQSGEYLEKIEAICRRDFPRQSALLKTIPGVSRISSAVIIAETGADMKVFENSGKLSGWVGLRPKNDESAGKYKSTAITKGNRYLKPILVQVAWAASRCKGSYFKDKFNRLSIRKSSKKALIAIARKISVVVWNILKDLTPYNPALQVIYEPAKLDVRIRYHQKEMERIAKLKP

SEQ ID NO: 201288 - protein, 343 aa, unidentified
MKAVKTIGLDIAKSVFQIHGVDADGKVVVCRQLKRRYVLPFFKKLPPCLVGIEACATSHYWSRQLQTLGHVVRLMPAIYVKPYLKRQKNDAADAEAICEAVARPNMRFVETKSVEQQGCLMLHRTRQLLVRQQTAVVNSIRTYLAEFGIIAPVGPNGVEELLDVVADPDDDRVPEVARECLTALGTQLRMLKAQILDFDRRIIDWHRSNEMSKRLDEIPGIGPTLATALVASVPNPKVFRSGRDFSAWIGLVPKQNSSGGKERLGNITKRGDRYLRTLLMVGAMAVVRYAKIHGTKQRPWLRALLARRPTKVAAVALANKIARMAWALMSKGERYREPAALAA

SEQ ID NO: 201289 - protein, 338 aa, unidentified
MRKFIGIDLHSNNSVVVVTDDDDRVVYQKRLPNSLEAIEAALAPHREETVGVVIESTYNWYWLVDGLMDRGYRVHLANPTAIKKYEGLKYSGDFADAAYLAQLLRLGLLPEGYIYPREQRAARDLARKRMQLVRQCTAQILSIEGILMRQTGARKSCAAIKRLNAEQVEAFAFAPDVALAVQANRAVSAVLQQQIAVLEARLKERVSLRAEYRLLRTVPGIGEILATTIMLEAGPVSRFAAVGNFASYCRCVDTVRESNGKKKGEGNGKNGNKYLAWAFVEAANFALRYCPQAKSFYERKKRKTNVVVALKALAHKLARACFHILREQKPFDVNRCFA

SEQ ID NO: 201290 - protein, 358 aa, unidentified
MKEETAGHPGIVGGVDTHKDLHMAAVVDEHDRVLGSECFATTRHGYRQMLIWMRSFGELLRVGVECTGTYGAGLLRYLQHAEVTVLEVTAPDRSDRRKRGKDDTLDAENAAHAAFAGVRTVTPRTRDGMIESLRVLKVCRKTAVAARRVALQLIHSTVVCAPDELRESLRTMTRMQLIRTLVAWRPDLSDYRNLTSAYRITLKSLGRRYLELHDEIADLDVMIAALVNELAPDLISRNSIGYESAAQLLMTAGDNSERLQSEAGFAALCGVSPVPASSGKVTRHRLNRGGDRAANSALHIIAIGRLRTDPRTKAYVERRVSEGHSKLEAIRCLKRYIAREVYYVIRKRNHQIGQVQVA

SEQ ID NO: 201291 - protein, 331 aa, unidentified
MVAWALGPEDTRVRFMKREKSTTDVAGLDIAKLKLDLAFARSDGHRLFENKPEGFGELISCLREHGVNRVGMEASGDYERDVREALEKAGFEVVVHQPQDVRAYARYRRIKVKSDKMDARVIAQATENWEGIVARRDPYLVELAEMVTYYEHISDLLAKSKTVAEHHRLAIVKKKSSALRATMRAEKQSILKLILKKIRARTDLLERFDLLKTMPGIGPVIAAILVVRMPELGTLEHGKAAALLGVAPFDHDSGTMKGKRFISGGRARPRTFTYLAALAAKRTKSPFKDFAERLKKAGKPAKVVVVAVMRKLIEAANLVLKRKTEWVPKIS

SEQ ID NO: 201292 - protein, 355 aa, unidentified
MRQQAIQYLALDVHQATTVATVREQSGPVRMRATVATEARAILSLVRGLGSRVHVAFEEGTQAQWLHDLLQPHCERVLVCNVRGRSETTNKSDRIDADWLSERLRLGALKSVYHGSPSVGTLKELVRCYTNLVDDSTRVMLRVKALFRGRAIGTSGEAVYRPSQRAAWLARLKGRGARTRAASLLAQLDLLLELRAKARAAMIAEARRQPGWKLLRSIPFFGPVRVALVLAIIATPFRFRGKRHLWPYVGLAVVTRTSSEQEFVEGKLRRRKRAPLTRGLNRNHNRVLKNVFKGAANAAAAKAGPLKDCYDRCVAGGVREEMAKLTLARKLASIVLRLWKKGELWDPTKLTMQTT

SEQ ID NO: 201293 - protein, 405 aa, unidentified
MNKLKRVCGLDVHKDIIFACVKKGKYQSEIKQFSTTTQGLSELNHWLQGEHVLKVAMESTGVYWMPVWRALEDKFSLLLVNPYFIKQMPGRKSDVQDAQWIATLADKQLLRGSVVPCKTIRVLRSYLRRYAQLQGQTTRCLQQMEKQLSQCNIKIASLSSTIGSKTVIGIVESISKGNYAPEQLLKLVHGRILNRHKENVIQSLQGIIEEHDVFLLRQIYEDYQHIERQCNELLAQAQKIAEAHYHEQLNLLQTIPGIKQLSAVIILAELGGNIQLFGSAEQLTGWCGLRPKNDESAGKIKSRSITKGNKYLRRILVQTAWAASRTKTCYLKTKFEQLSIRKSSKSALIAIARKQLVIIWNVLAKQQVYQEPKIKLSPEQIIRKQKYYREKLNKLQAQQIFEKAD

SEQ ID NO: 201294 - protein, 345 aa, unidentified
MLHVGMDLSRKKLDICVMDRQGRVLEECPWPPDADGLAHLVHHLETRGEPVVAVIESMNGARFVHDTLELAGWQVEIADAQKVKGLAPLACKTDRIDARVLAELSRRDLVPAIWLPDPDTRAGRELARWRLHLVRHRTALKNRIHASLLAFGKPCPVSDLFGSEGRELLGRLDVPEPWLGDIEAALHLIDALDFQIDELEEELRADGVNHPYVRLLMTVPGIGWVLAYTIAAEIGDIARFQSPKKLVGYSGLCPRVYQSGGQDHRGPLRKNGPKYLRWALIEAAVHATRHPAYADRYKRTAARLGPQRGKKVARVDLARSLSEAIWQMLTKGETFNPFIEPAKAA

SEQ ID NO: 201295 - protein, 346 aa, unidentified
MYYTGIDQHKRTSYLTTVDNEGVIVKQADIKNTTHDILNYFNQLDGPHQATVEATGGWYWMSDLLHSHGINLSLTHAKYVKAIAYAKVKTDKVDSQILAQLLRMNFIPEAHKIPNHIIPLRDTLRARLRLSQKRTSALNFMHRMLEKFNIDSPSELDPYYSLQYQQFDEQATLLKEQMLILEKSLYPKLIPDDDIQRLLWIPGIGKMNAFTMLLEVGDINRFPSENNFFSYCRLVPAASNSGGKTRQKTTPKDGNKYLKIVFSDAAVHAVQYYPVIRRFFDSKLRKKNKNIAKTIVSKEIARIVYHTLKNKTDFNHCFKGIELQHRKSKQWPSRLVGTGMGSCTLA

SEQ ID NO: 201296 - protein, 410 aa, unidentified
MKIAGIDVHKKVLMVVIVDGSAPEEKPTRRRFATMPSQLHQLLIWLQGQGVEEAVMESTAQYWRSVWLELEPHMRLHLAQAFSNRAPRGRKHDFKDAERLVRRQIANELILSFVPNGEQRIWRSMTRMKLQLTRDRVRLQNQMECLLEEMRIKLSIVVSNLLGASGLRILQALAQGETDPKKLAELGDERLQCTEEQLVDALTGRVQPMHREMLSLQLQRLQLIDQQMAQLNGMIAQAMKAHQDAVIRLAEVPGLGADSAQQIIAEVGAQASTFPSAAELTSWVGTCPGKEESAEQNRSSRSAKGNKYLRRVLNQAAHAAVMKKGSYFQGVFRRLLPRLGYQSAIWAIAHRLCRLVWKILHEGVRFIERDCEADPRAKKQRAQMLVRALRKLGYQVTITPLNQVTATNAI

SEQ ID NO: 201297 - protein, 506 aa, unidentified
MTDKKLWRNRKERKEWARRLQSEDPGLEVVHPHAAGIDVGNGVHYVAVRPDRDPQPVRRFECFTADLHRLADWLRSCGVKTVAMQSTGVYWIPIYEILEEHGIQVYLVNARHTKNLPGRKSDVQESQWLLKLHTYGLLNNSFQPPSEIRVLRTYWRQRGEHVRGAATCVQRMQKALTQMNVQLANVISDISGLTGQTIVPSIVAGEHDPWKLAELSDPRIQASREEVAKSLEGNWRPELLFVLQQEVAMYDTYQQRIAECDQQLQEHLASFANIIPPQPTEEEPQRKKTKPAKNAPRFELPSELQRISGVDLTRIDGIDVMVAQTLISEVGLDMSRWKTEAHFSSWLGLCPDNRTSGDKVLARGTRRVVNRAATAFRMAAVTLMRSRTYLGAQYRRLRTKLGAPKAITAMAHRLARLVYRMLKYGQHYVDKGAEYYEHRYRRQQIEFLRRKQPNWASRSHQHKLEGVSGEHRPALRAGCMSLKLLQRAGGPWRCAATIRGTTWLGS

SEQ ID NO: 201298 - protein, 406 aa, unidentified
MPITVGIDWAEAHHDVAVLDEAGRILGRRRIDTGVAGFTELMTLIAEHSEDPTAVPVAIETDKNLIVVALQSAGLTVHAINPRAVARYRERHGQAGKKSDPGDAALLADVLRTDRHQHRPLPELSERALAVKALARQHQEAIWAEHETLSRLRSVLLEFYPQALQAFPKLKHKAALTVLSAAATPALGERLSERRLVTLLHRCGRRNDPSLVEQILRDLHRPALRQTPAVEAALGTTTRTLIRIVLQMQAAVTELEAALAEVFDAHQLAPILTSAPGLGAVLAARVLAEVGDDRERFSTAGGLRAFAGTAPVTRASGRSHRVRARRVRNKRLADACHWWAFAMLTKSPGARAHYDRRRAVGDTHNAALRNLANKLLGRLWWCLRNEQPWNEHTAWTQARPAPAIAA

SEQ ID NO: 201299 - protein, 346 aa, unidentified
MEHYVGLDVSLKLTSICIVDRTGKIEREGVVASDPEAIATFIKLHAPHVVRIGLETGATSTWLWTELNKMGLPVICIDARHAKAALKMQINKSDRNDAVGIARIMQCGWYKEVCVKDLDSHATKALLVSRALLVKIKRDIENQIRGLLKNLGLVIGRAKMNMFAVRAAQLAEDRSELFAAVDPLLKAREAVEQQILDLDRKVLRLARNNAQVRRFMTTPGIGPVTALCFLATIDDPARFKRSRSVGAYAGLTTRRYASGEIDWTGRISKCGDKMLRSYLYEAANVLLTRVAKWSALKAWGGRLAKRSGLRKAKVAVARKLAVILHRMWIEGTEFKWSSKEVADQPA

SEQ ID NO: 201300 - protein, 372 aa, unidentified
MNYNTVYVGMDVHKESFTLCSCKYEDEKASHYQRTPASYKNVLRYLAFLRTIYGEDTRFVCGYEAGCLGYSLYHQLENFNVECVILAPTTMLEQRSKRRIKTDKRDAEIIAKSLAQHNYSPVHIPTKMDNQTKEFIRMRDDHKAELKKIKQQILSFCLRQGYQYDGSGNWTAKHVKWLRSLKPAGLYKEILDEYLLTYTILTDKLNRLDQRIEELASKEEYKESVSKLTCFLGIKIHTALSVIVEVGDFQRFVSARKFAGYLGLVPGQHSSGDDRNGLGITKAGNTHVRRLLVESAQSYTRGKIGYKSRVLRSRQAGNSPQVINYADRANERLRRRYYKMVLKDGKKYNIAKTAIARELACFIWGMMTDNIY

SEQ ID NO: 201301 - protein, 343 aa, unidentified
MYYIGLDVHKKTISYCVKDAAGCVHQEGRIGSTRRELDAWIRTLPQPRMIAMEATIFTGWIYDHLLPHAEKVKVAHPLMLRAIAAAKRKNDRIDAGKIADCLRCDFLPECHMASTEIRNRRRILRYRGLVLRQTVQMKNRVSGLLMETGVSYNKLRLHRMGYFAELMSTNEEVSESIRPLLRLCREHIDRAIKLDTALLRSLEQDPLLSDRLRRLRTIPGVGPITALTWALEVGDTSRFRSIKQAISYCGLCSAEKSSADKVMRTPISKQRNKHIQQVLVEAARLAPRYSDELALLHEKERQRGNGNRATLAVARKMVALMLAVERRNTDFVPAGEFRRTAAT

SEQ ID NO: 201302 - protein, 339 aa, unidentified
MNKVSTVGLDIAKKVFQVHGVDAAGVVKVRRSLRRSQVVTWFAKLAPCLIGLEACATSHYWGRELRKLGHEVRLIPPAYAKAYVRRNKNDAADAAAICEAVSRPGMRFVAIKTEAQQAIGGVHKVRALLLKQRIMLINHLRGLMAEFGLVVATGPQHVGELLAILADPEEGGVAEPLRGALLGMTEVLRGLERRIEAIDRQVVAWGRSNTTYRHLITIPGYGPILASAVAALVIDPTTFRSGRDFSASLGLVPRQEGTGGKVKLGPISKRGNGYLRRLLVNGAMSVLGSKRARQNPWIAKLLASKPRKLAAVAVANKLARIGWAIMMRQEDFRTQPAAA

SEQ ID NO: 201303 - protein, 336 aa, unidentified
MVQIYGIDLGMSSFDVSFLSESGSVRHLSGVKNTVHGISKFLLSLPSSAVLCAEHTGVYGDLLLRLCTLNRTCLCFVPGYQIKHSLGLQRGKSDPLDACRIREYAERFYDLLRPCFYPGEEMSELQELYRTRSLLVESRKRLDTLNIGDNCKSSVSLAADHARRAVLAELNTQISGLDHEIEALIQNSSEFSRNYQILTSIVGVGPVTSCELIIKTENFRKLDTAKKCAAYAGIAPYPKESGKMKCGHKISPMGDKQLKTLLFLCARSAKEHNKEIRLYFLKKHKVEKKHFFVAMNNIANKLLRLIYSLIQKQQTYDRDYIQKDPRCVVISDTHKC

SEQ ID NO: 201304 - protein, 343 aa, unidentified
MPHYVGLDVSQKTTAICVVDAQGKRLWRGVCATDPGPISARISQHAGVDAKVGIETGSMTPWLVHGLRAAGLDVACLDARRVKAALQMQLNKTDENDAEGLAQIMRTGWYRAVHVKSLDAHRARALLGARAQLVGMTTRLSNMIRGVLKTFGLLPGAGRGLRFDRKVEALLEGAPEIALVVRPLLATWRQLRQQIAVFDKAVLQQVRADPICRLLMTVPGIGALSSLMYVSTVENPSRFSRSRAVGAHLGLTPRRYQSGETDRSGHISRCGDGLARTLMYEAAVVILHRVKRSLHLKDWAEAIERRSGSGKARVALARKLSVILHSVWRSGEPFRWAAPAMAA

SEQ ID NO: 201305 - protein, 411 aa, unidentified
MEPLYRWVAGIDVHKKMLAVVVRAPQGEYVQRKFGTTKTEIGHLAAWLQDHQVSEVVMESTAQYWRPVWYGLEAHFKLHLTHPLKTRAPRGRKADFRDARRLADRWHSGDLEDSFIPGAEQRSWRWLTRSRVHLKRMLGVIRNQVEGLLEQGGIKLSAVASDIFGVSGWAILERIAAGESDVDKLVDEARGVLKRKKSKLREALQGKLDPIYRLLLKQHLAQAQLLCQQVEELNQALAEALKEHVAVLCRLTKVPGINLYAAQELLAEIGPGAVAFPSPEQFASWVGVCPGSQETAGVNYSRRSAKGNRYLRRLLCQNAWGAIHTKNTFFAGLFARLKPKIKGKGAAWAVAHRIAKLVWLILHEGVEYVEKGTAPLNPRTLVRKFKRLLREFDRHGIDAKSLLEQELVATS

SEQ ID NO: 201306 - protein, 407 aa, unidentified
MVGGDAMSGSRRPFQGFVGIDVSKDKFDACGIRGDGAKLFQFSTTMDRKGFEKLKSHHSFVSPGSVLIGMESTASYHVNLFSFLASEGYAVVVINPLLISNYVKMQLRKTKTDKKDAWVIAQFLLANRDSLIRRATSPLILDLRELARQRESLVDQMTSLKNDIKRILNVTFPELEHMTGIFTKSILKLLQHYPSAYALKDIDLDQLTQMLIEDSYGRKRGAFAEALLKAARSSIGTPSPMKDVILKQKVSLHLHLDEALQEITEMLLQTSRGMMGDDMDLLNSIKGIGDKTAAGFLIEMGGDIRQFEDPNKIIAMAGIDPAVRQSGKYEGSSRITKRGKRHLRRIIWLMTTQVIHYCDVFRVYYRKRRKDGLPYKKAVLATAHKLIRVIYAMLTQRTAFCPVVNSY

SEQ ID NO: 201307 - protein, 403 aa, unidentified
MNAVGIDVSKGKSMVAILRPFGEIVYSPFEIKHTSHDINSLVDLIHSVNGESRVVMEHTGRYYEVLAHQLSEADIFVSTINPKLIKDFDNDSLRKVKSDKADAVKIARYALDKWLNLKQYSLMDELRNQLKTMNRQFGFYMKHKTAMKNNLIGILDQTYPGVNTYFDSPARSDGSQKWVDFASTYWHVDCVRKMSLNAFTDRYESWCKRKKYNFSKSKAEEIYGKAKELVPVLPKDEITKRIIRQAVDQLNSASSTVEELRTLMNDTASKLPEYPIVMAMNGVGPSLGPQLIAEIGDVTRFTHKGAITAFAGVDPGVNESGAFSQKSVPTSKRGSADLRKTLFLVMDVLIKTMPQDDPVYQFLDKKRSQGKPYYVYMTARANKFLRIYYGRVKEYLASLPQSE

SEQ ID NO: 201308 - protein, 409 aa, unidentified
MEAIVERGAGVDVGQATVVATVLLGPAHTRPRKETRTFRTLTRDLIALRDWLLSLGVTHVGMESTGIYWKPIYAILEGHVGEVIVGNAQHIKNVPGRKTDVKDSEWLAELVRHGLIAKSFVPPQPIRELRDLTRYRRKLVESRTAERNRLLKLLETANIKLSSIASDVFGVSGMLMLRALVAGVAPPPEIAQLAKGRLRLKLQELAWALEGRLEVHHRFILNLQIRRLDLLDDDLTALEQEIDRRLEPHRAEYNLLRQIPGVDGVIAAVILAELGTDMTVFRGPAAAAAWSGVCPGNNQSGRRRRAQRVRRGNIHIQTALFEAAMAASRTKGSYLKDKYHRLRSRRGAKRAGMAIAHKILIAAYHMLLERCAFKDLGDHYLDSLEPKRTTKHLVRRLERQGYRVTLTAA

SEQ ID NO: 201309 - protein, 310 aa, unidentified
MDVFIGIDVSKDRLDICVRPSGEAFVVTRDDEGLERLVERLRALAPILIALEATGGYETVVASALAAAHLPLAVVNPRQIRDFARSTGKLAKTDRLDAAAIAHFAEAIRPPARPVADAEAQALGELVARRRQVIEMIVAEKNRRRLAGQPRVLKAIDRHVDLLQVELSELDRDIDGAIRKSAAWQADADLLASVPGVGKATLRTLIAELPELGRLDRRKIAALVGVAPINRDSGVQRGRQTIAGGRAPVRTALYMAALVASRSNPVIAAHYQKLRANGKAAKQALTACIRKLLVILNAILRDRKPWSLSA

SEQ ID NO: 201310 - protein, 323 aa, unidentified
MTSPSPETNIGIDISKETLEVAVHETNTHWTIKHEFTEFSGLIKSLRSFTPTRIIVEASGGLEHLLVSYLATAGLPVIVINPRQARDFARAIGQLAKTDRLDAFVLAHLGATLKPAVRPLKSAETQELEALVTRRSQLVEMLTAERLRLQQAQQQRRPSVSRDIKAHLSWLKKRLNQCEHDLSQRLRSSPIWRETDERLQSMPGVGPITSLVLIAELPELGHLSNKQIAALCGLAPHARDSGKWHGKRTTRGGRARVRATLYMATLVATKHNLVIKTFYRRLLQAGKQKKVALTACMRKLLVTLNAMFRNQTSWQPSRFVPGA

SEQ ID NO: 201311 - protein, 426 aa, unidentified
MTYKIVGIDVHKKMLAVVVADVAVEGEYQFERCRFGTSPDQLRLLAEWLIQQKAEEVVMESTAQYWKPVWAALERQWKPSCGKREGGDPISGTLHLAQAQSNRGRRGRKRDFPDAERLVKRLVAQELTLSFVPDAEQRLWRTLTRRKYQLTCDKVRWQNQLEALLEEAHIKLSSLVSDLLGASARRMLKALADGETNPAALAALADQRLRATPAQLCDALGACTELDPVYRRLVKMMLEELHLIEQQIDKLDQEIATRLRQGQDAVQRLAEVPGLGVNSAQQIIAEVGVTAATFPSAKQLSSWVGACPGDEESAGVNQSHRSPKGNCHMRRVLNQAANAAVKHKGSIFAIVYRRLEPRLGHNQAIGAIAHRLCRLIWIILHQAVRYEERGPAVKETSKRRRRMKMIRELRKLGYRVEPMAVQFNPA

SEQ ID NO: 201312 - protein, 350 aa, unidentified
MIIIGADYHPGFQQIAFVDTDTGELQERRLEHREEAETFYRGLAQPGRTVRVGMEASGHARWFERLLAELQFELWIGDAAEIRTKRVRKQKTDRQDAQLILQLLLEERFPRIWVPSGENRDLRQLLWHRHRMVQARTRIMNQLQAVALNEGLRCKKRLWRDSGREQLESFLLAPWASRRRHDLLELLDRLSPTIAELTQAIEQEVEKCPEAQRLRTHPGVGALTALAFVLIIGRTDRFRCGKQIACYLGLVPVEESSGERRRLGHITKQGNSLLRFLLVEAAQVTVRSDQEWRSKFFHLALRRGRKIAKVAMARRLAVRLYWMWRKGWDYEQVVKFGSHVGKLGTGDGVQ

SEQ ID NO: 201313 - protein, 451 aa, unidentified
MATKRKKRVQDLPVLHPDAAGIDVGASEIFVAVPADRDAEPVRSFATFTRDLNSLADWLRACGIRSAAMESTSVYWIPLHQILEARGIEVCLVNAQHVKNVPGRKTDVSDCQWIQYLHSVGLLRASFRPPAVICAIRSLWRHRDSLIQMAAEHVMHMQKALDQMNLQVHRVLSDITGFSGLRIVDAILAGERDPIKLAQLCHSRVKSSQDTVAKSLEGDYRIEHVFALRQSLAGYRYYQGLIAEVDQEIQRQLADLKTADGDSKPPKRTKKTPYQRYRYEPAGFDLRGELYRILGVDLTDVPGISSVTAHTILCEVGTDVSRFRNASAFASWLGLCPERQISGGKVLYTKSRRVRNRVALALRLGANSLHHANNYLGEFFRRITRKLGKAQAITATAHKLARIVFHLLNTKEAYNESVFRRCEEEAMKHAELRLRKHAARMGFQLVSAAND

SEQ ID NO: 201314 - protein, 415 aa, unidentified
MFYVGIDIAKAFSVCSVINDKEEMIIKPFPFNSSSGGFKKLINNIVSLNCDTKDIIIGMEATGLLFENLYRYLSDLNYNVILLNPYQTAQYRNMVTMKYVKNDNIDSLIISLLIKSGRYSKGYVNEEQLQSLKVLFRHKENIKDHLKSLKRETSSLFAVVFPELDKIIKDPYNVSSLILLDKYPTAKHFENVTVKMILKLFRKVKGNNFNEAKAQLLLSYTKDTIYSGVAKDARAFFIRSNITLIRALQEQIKSLEDEMLKIFDKPIDQEAIVTKEDEDYISSVLDNLRTIPGVSDKTLLAVLAECGHLDRFKDAKSLIGYLGLYPTQEQSGNTLKYGRLAKRGAKYAKKALYLASVAAVRHNSELKQIFRNHVASGRAKKEALIVVARKLAYIIWAIYNHNKPYDPARVFVAHP

SEQ ID NO: 201315 - protein, 402 aa, unidentified
MRTVGIDLSARDEHKAVIVDEAGHFVSLVFRFGTTPASLRRLLEMAQENNPDQQIQAVMEPTGMAWFPVAVFLIRNGVTIYLVNSQQVADLRKYFKKHAKSDRIDARVLAKLPFVDEEKLHRLELSDAQTLACQRGCKQLERLMKQRTACQNRLIALDRFAWPGLEEVVFPDLFCRAALWFREHWYSPLRVWQAGAEAIRQEWLSSGLDSTDSGEWIRYFVQLAEQILEIYDKDCAYLDYELLQAEAIREQGYFAFVHEMHHRLLLKTVRPLYRQLHPSRNLETIPGVGQDGAAVYLSFIGNPKRFHGLRELRGWSGMVPNSKQSAASQASGLKITQAGPGLVKKFAFLDANAARQCDPQIAAIYYDQMVHHGKHPARRSSLPTSGCGWHSHHPRTRPPDHC

SEQ ID NO: 201316 - protein, 331 aa, unidentified
MEIKETIGIDVSKLTLDAHIHSSGDRDRFENNTNGFKKLVAWAYKRSLFPKENVLFIFEHTGLYSRGLSLFFGERKLPCHIAAGLEIKRSLGIARGKNDQVDARRIALYAYRLREEIQPSKVADVQIRKLRTMFSLRSKLIKQRAGYKTTLKEQKGILSGKDYNIIFEIQNNMVDTLTGEIHKLEQMMMEIIKGDKGLSDLFKLVTSVKGVGPMTAMLVIIYTNRFTKFHTWRKFASYCGVAPFPHQSGTSIKGRSKVSHFANKELKAILNMCAASAIQYNPEMKRYYERRTEEGKNKMSTLNVIRNKLIARVFAVVNRGTPYINVYRQAS

SEQ ID NO: 201317 - protein, 322 aa, unidentified
MQYIGIDVSKATFVVAYSSDKGGEIRTFNNTTAGIKQFIGTLPKDGSIHCVMEATGNYSALLLYMLNVAGITVSMENPLKVKNFARAMLSTVKTDKIDARLIALYGEKMNPQPFKMQGEAILRLRQKRTVIRQLTKQITAMSNLRGSLACLPVPDKGATHTVDETIKFLEKRRDRLQSELTDLVEVEFSRQLALLTTIKGIGITLATALILTTGGFTYFQNAKQVSRYLGICPTYEQSGTSVNIRGHINRNGDAYTRGLLYIAAWPASRFNAQCKETYTRLRQNGKPGKLAMIAVANKLVRQAFAVVAHDKEYIDGFVSNRP

SEQ ID NO: 201318 - protein, 326 aa, unidentified
MEHELHYIGIDTAKEKLDVDVLRPDGRHRTKKFANTTKGHDELVSWLKGHKIDHAHICIEATGTYMEPVAECLYDAGYIVSVINPALGKAFAQSEGLRNKTDTVDARMLAEFCRQKRPAAWEAPHPLERALRALVVRHQALTDMHTQELNRTETAREVQKPSIDAHLLWLEAELKRLEKQIKDLTDDDPDMKHRRKLLESIPGIGEKTSAVLLAYIGLKDRFAHARQFAAFAGLTPRRYESGSSVRGASRMSKAGHVSLRRALYMPAMVATSKTEWGRAFRDRLAANGKKGKVILGAMMRKLAQVAYGVLKSGVPFDASRHNPVAA

SEQ ID NO: 201319 - protein, 367 aa, unidentified
MEKSSTVFAGMDVHQESIDITLAEPGGEVRRLGQIGGDRGSLRKMLRRQQSKGRKLVFVYEAGPCGFWIYREITALGHACMVVSPSLIPRRAGDHVKTDRRDSERLASLARAGELEAIHVPDIRDEAIRDLVRGRDDAVIAQRRVRQQLKALLLRNDIRYVGRTSWTGAHRRWLSELKLPEPAQRIVFEEYVDAIVVATARIERLTRAIETEVAGWRFALGVGALQAMRGIQFVQAVTLIAELGDLTRFASARQLMGYLGLVPREDSSGEHRHQGSITKAGNSYARRALIEAAWAYRHPARVTRIIATRQTGIPKAVCDIAWRAQLRLSAKYRRMNARHVNHNKIVVALARELSGFVWAIGQSVKPQ

SEQ ID NO: 201320 - protein, 322 aa, unidentified
MNTYTDYLGIDMSKQTFDVVNRAGKHYQYENTTKGFRKFKRVIGDNSLCVMEATGIYHLPLAKFLYSKEIAVSVVNPIQIKRFSQMKLQRNKTDKADAQMISSFAQDQEVSQWEPSPEDMEEGRDTAQVIEQYIEFRAGLKNKIDGLRSKKASQVLIDAVLSQISHMSEIIAELQKKLVDIVRNYDDSLLQNLTSIVGIGENTAALLIITTDGFRNFDNAKQLSSYFGLAPTENSSGTSINGTRKISKMGNPLVRKKLYMCSLQASRHNKTCIDLYQRLLAKGKPKKLALIAVVNKLLKIIFAISKSGLPYDREYRSYMKTR

SEQ ID NO: 201321 - protein, 350 aa, unidentified
MLYTGIDLHRSFSYITTMNDKGEVLGQKKLPSNGEIAEFLREFDESMEVAIEASPSWYWLYDHLEDEGFDVKLSHPLKTKAIAYAKIKTDKVDSATLAHLLRSDLLPLSYVPERTVRLNRELLRYRASLVKIQTRLKNKIHTILAKNNVNHSYTDLFGKQGMAFLRSLTLAENYKIALEGYLTVLDTVRQEIHAASKEVRLLAEKDADALLLMTIPGMGYYSALLTKSEIGDVNRFPSAKQLCSYAGLVPSTYASGNTCFHGHITKQGSRWLRWILVEAAIHAVKRPGVLRRFYFKIERKKGGQIAKVAAARKLLEWIYHILRDGRTYPEMEKIADLLGRGELGNHSGRA

SEQ ID NO: 201322 - protein, 391 aa, unidentified
MFRYFVGIDISKYKHDCCIINAADQSIVAKFTIKNDKDGFNELLASLQSLSTSEDIRIGFESTAHYALNLELFLEKAHHSFMEVNPVLISEYKKSTSLRRTKTDSVDCESIARWLMTVEYKPHSKGFYHAYSLKSLTRLRDRLIRQRSFYLVKITNVLDHTFPEFKPFFGERFSKTALYLLENYGSAEKMARMNSTSYDNLRRISRGKFTPQKFIQLKSIAANTVGVNNSIFDTELNCLLTLFNEAAKQVSVLEAQITELIKEVHPHYMSIPGIGPLSAAVIYAEYGDISNFSSPAQMLAFAGLEPGISESGTESHKGRMVKRGSSQLRYTLMNCALPLIRFDVTFAAYYAKKRSEGKPHRVAISHVTKKLVRVIFALERQNTDFAAIHLR

SEQ ID NO: 201323 - protein, 340 aa, unidentified
MTITTVGIDLAKNVFAVHCVDQHGKTVLIKPKVPRAALPELIASLPPCVIGMEACSGAHYWARLFRQYGHEPRLMAAKFVSPYRMAGKSGKNDAADAQAICEAVRRPHMRFVPVKDESQQAMQCLHRTRQGFIEEKTATYNRLRGLISEFGVIAPQSTDALRHMVSEQKKSLPLQVQQCVDDLLEHIDRIENNVTEYDRLLSRMAKADHRSQRLMELKGIGPTTACALVASIGNAHDFKNGRQLAAWLGLTPSQYSSGGKSKLGRITKAGDSYLRTLLVQGARSVLIGAEKKTDSFSRWVCSLVERRGYWRAVVAIAAKNARLCWASLHYGDDFRLYSVS

SEQ ID NO: 201324 - protein, 418 aa, unidentified
MAKQQKNEVSFEEVVARGCGLDVHKKEIVATVSGTNIKKETRTFQSTTRSLTQLKEWLLELGVTHVAMESTGVYWKPVMNILEPGGFTIMVVNARHIKYVPGHKTDKKDSAWICKLLRAGLLKGSFIPRRDQRDLRDLTRYRRKLVQQRAAEHNRMIRIFEDANLKLSSVFSNVRGKTCTAVIDEVINGETDPQKLAELCTHPRLKHSQEEIAEAVEGHFTEHHKFMIRAIRKSIRNIEDEIEVLDKEIDRRMKPLQGRIEQLCEVPGMQNSSVKELLAEIGVDMEVFPTEEHLTSWAGLAPGNNESAGKKKSSHTNHGNKATKAIMTECAWCATRTKGTYFSERYKRLAARRGKKRALVAIAAEMLKVIYHMIKDGTAYQELGPDYMDDKRKQAQIKYYQDQIKKLTGEDSPGKESA

SEQ ID NO: 201325 - protein, 299 aa, unidentified
MSDVPCFIGIDVAKAQLDIALRPAGERWTVPNDTNGVTMLVEQLQPLSPTLIVLEATGGLERLVTSALATAGLPVVVVNPRQARDFARATGQLAKTDALDARALAHFADVIRPTPRPLPDAQTQELRGLLGRRQQLIVMRTAEQNRLAGTSGRLQTDIAAHITWLNERLATLDDDLETVLRGSPLWRENDDLLQSAPGIGPVCARTFLLELPELGTLTRQQIAALVGVAPRHGDRGTLRGRRTLWGGRAPVRTVFYMGTLVATRDNPQSTVFDARLLTAGQVKKVALTADIEQPYPGKI

SEQ ID NO: 201326 - protein, 350 aa, unidentified
MIIIGCDFHSRFQQIAMLDMETGEIVERRLEHETGEAQEFYAALPKGTRIGMEATGYARWFQRMLSEQGHELWIGDAAEIRAAMVRKQKTDSRDARHILELLVQKRFPRIWVAKPEDRDTWQLLRHRDKLVRFRTSMRNQLHALAMGEGICRKKKLWSERGRKELEGLALGEWASRRRKDLLQMLDRLDPAIAELDQAVREQAQRRSEAVLLMQQDGVGAVTGLAFALLVGPVKRFATSRKLVSYLGLNPSEASSGGKQRLGAISKQGNTLVRFLLGEAAQMASRKDPELRRDYQRLKFRRGTAVAKVAMARKLAVRLYWVLRQAAQPQPPARMQGSPASPVVEETLPTF

SEQ ID NO: 201327 - protein, 316 aa, unidentified
MEQPAVYVGVDVGKQQLEVALRPSGEQFSLPNDERAVRALVKRLAPLGCVRIVVEATGGYETLLVAALHAGGLPVVLVNPRWAHAFAKAIGQLAKTDRIDARILALYAERVELKLRELPDEQTRELRALCARRDDLLDMLGAEQNRLEHAPKRLHREIRSHIDYLRKRLKHLDRDIDGAVRGSELWRQKDELLDSVPGVGPVLRASLLAWLPELGTLNRAEAAALVGVAPLNHDSGALRGRRAIEGGRAPLRRVLYCAASAAIIWNPHLRAYYDHLLAKGKPHKVAMVATMRRLLLILNAIIKTGTPWKAPCATAA

SEQ ID NO: 201328 - protein, 412 aa, unidentified
MQKWVNTKGTLYAGVDVALERNYAMVITEQAQVLAQFGFPNGRDGYDYFYRRLEILEEQRQAPALLVGMEPTNYFWKLLAADLERRQIPYRLVNPFTVKRHREGDQLDDSKDDPRDAFTIADLLRTGKYTETRLLHGPYAELRQYVVLHDRLQRDIRRHKNLIRNSVGQLFPELPRVFKDFSGSTALAMLRSCAAAAVIREMSAEQFVRRVRAEFRGQRLQVSQLRRAYDLAATSVGLQDVIPALQLGSRLYIGQLEKLESQAKQVRTALTDTFLELPESPYLLSVNGLGLLTAATILAEIGDPRHYRRAAQLVKLAGIQPVPNTSGRKTRSKTPMSHKGRPRLRTALFFAVMRLVQVNQAFAHTYRYYQQREKNPLTKMQALGALMNKLLRVLWALMKHQTFYNPSFGLAD

SEQ ID NO: 201329 - protein, 400 aa, unidentified
MSGLKGGFDSFVGIDVSKDKFDACGITGDTEKLFQCSATMDRKGFEKLKDHLAVVSASSVLIGMESTASYHVNLFSYLVSEGYNVLIINPLLISNYVKMQLRKTKTDKKDAVVIALFLLANGSTLIQRVTPSVISDLRDLSRQRESLVDEMTALKINIKRLLNITFPELEHMTLIFTKSMLKLLQQYPSAFALRSADLVQLSQMLIADSYGRKREAFATELIKTAHSSIGINSPAKEIILKQQVTLLLHLEDALQEITGVLIEMSRKLMEEDINILTSIKGIGDKSAVNFLVEMGGDITQYDDSGKIIAMAGLDPAVYQSGQHEGKGRITKRGNRHLRRIIWMMTTRVIHYSDIFKVYYLKRRKEGLPYKMAVLATAHKLIRVIYAMLTQRTTFCPQVNS

SEQ ID NO: 201330 - protein, 357 aa, unidentified
MTSMTSTAVFVTGGVDTHGQTHHAAVIDQVGRQLGDHEFPTTPAGYRALLSWLQEHGPLERVGMEGTGAYGAGLARHLHDEQVDVVEVDRPDRKARRAHGKSDPLDAYAAARAALSGTATGTPKTRNGAVESIRALRVARSSAVKGRTQATNQLKALLLSGPAELREQLRQLSTTTLIATCARLRPTAELADPEQATKTALRRLARRHQQLSEEIAEADGELRALVAEAAPRLLALPGVGVEVAGQLLTSAGDNPDRLRSESAFGQLCGVAPVPASSGKVRRHRLNRGGDREANKALYIVVLGRLRTCQRTRTYVERRTKEGLSKPEIIRCLKRYVAREIYLALRPLPARNENASAA

SEQ ID NO: 201331 - protein, 351 aa, unidentified
MMLIGVDYHPSFQQIAFFVEETGEYGEQRLNHDGGEAERFYRGLQQRGIRVRVGMEATGYARWFERLLAELGIELWIGDPAEIEAQRVKKRKTDREDARLLLRLMREDRFPKIWVPSPENRDLRQLLWHRHRMVQMRTRIMNQLQALAMNEGKRWKSKLFSQQGRAEFERLALAPWASRRRSELLELLDRLNPSIEELTAAVEQEVHKRPEALRLMTHPGVGPITALAYVLIIGTPQRFARGRQIGTYVGMIPSEDSSGDKQRLGHISKQGSSLLRYLLVEAAQAATRFNPHWRRRYLHLAIRRHKSIAKVAMGRRMAIRLYWMWRNGCEYSPSFEFGSYAGQLGIRHGVH

SEQ ID NO: 201332 - protein, 424 aa, unidentified
MAGVVIGIDPHKGSHTAVALDVHEKQLGRLRVRASSRQVDGLLEWASGWPRRRWAIEGARGLGQLLAQQLIASGERVLDVPPKLAARVRLLDSGQINKNDPNDARSVAVAALRAHELPELAAEDHAMVMRVWARRYHDLARLRTQVVCRLHAVVCELVPGGVRKYLRASQATDVLDRIVADSPVAQAKLELARELVADLERIDAQRREAKRRTARAVAATRTSINDVYGVGPIVAGTVLGYVRDIRRFPTRDRFASYNGTAPIEVSSGDRKIYRLSRRGNRQLNHAIHMAAISQIRHHDSEGRAYYEKKIAEGMTGTTALRALKRKISDALYARMIDDARRLAAKDPGGHTGNDSASSAAGSHPETPALRKSHSRATANSKTGTGQRPLTLRPAPDRRRTSRRAAGVQLAPRPGPHRGRGQDRP

SEQ ID NO: 201333 - protein, 382 aa, unidentified
MQPINTVNPTIYLAIELSASTWLIAARLPGSEKPHLHRIEGGDTAALFALISSLRARVARRLDAAIGVVCCFEAGRDGFWLHRLLTAHGVANYVLEPTSILINRRARRAKTDRLDAIGILRVLAAYLRGDRQSCSMVRVPTPEDEDAKRIHRERENLVQEKLRIENRIEALLFTQGIRKRPSLRSWERDLAVLRTGDGREMPRHLRAELDRLRRRLVTILELIREVEAERDEVVTTNPEHQTSRKIVALCRIRGLGENFAGVLTREVFYRSFDNRRQIASYVGITPMPYQSGSMDRDRRISRAGNPRARTTMIQLAWLWLRYQPGSELAEWFRKRVGTLAGRTRRIAIVAMARKLLIALWRYVETGVLPAGAEIRPESVAAA

SEQ ID NO: 201334 - protein, 331 aa, unidentified
MKIYDVIGIDVSKLTIDVAIHQTKDYQQFENTNKGFGVLCKWALSQSKATKETLLFVFEHTGLYSHNLAIYLSTKEFNFLMVPGLEIKRSLGIARGKDDKIDAGKIARYAYRLRDEISPTTLPSDEIRNLKHLLSLRDRMVKQRAGYKASLKEMKRVLKRSENSVLFTSQESLIATLDKQIDKMDNQMDEMILQNKQLKRQYDLITSIKGIGPQIALYVIATTEGFLKFNTSRSFASYCGIAPFPNTSGTSIRGKTKVSNLANKKMKSLFDLAAKSAIQHNQEMKLYYHKRTGEGKSKMSTINIIRNKLLARIFAVVKRDSPYVDIMMYAA

SEQ ID NO: 201335 - protein, 388 aa, unidentified
MIPSQRQEITGSTTGPRRIFAAIELSKSTWVVALQLPTIDKVSLFRVAGGDIEGLFALLDRARFRVGEPVEVCTCYEASYDGFWIHRALGARGIENTVLDSASIQVSRRGRRVKTDRTDAESLIRVLTALYRGEHQVAKTVHVPSPEEEDDKRLLRGRDKLLRERIRHTNRIRGLLNLQGVHHINPNLGGWTEALKKLRTGDGRPFPRQLMREIRREAKLLAMIKRMLADVEAEIAGMIRDSRKRRHPAQRGQSHPIAIRLAAIRGIGAQAAGVLATEVFYRKFNNRREVASYLGLTPTPYNSGSVTRDQGISKAGNRRARTAAIELAWIWLRNQPDSALSRWFHARVGDANGRVRRIAIVALARKLVVALWRFLEDGLIPEDAVMKA

SEQ ID NO: 201336 - protein, 490 aa, unidentified
MNNIGSNRVIGLDLGVTSAHSAVVLDVTGQVLLRRRVVSTVESLAELEQAALRGAPEQTHLTVVIEPTGPMWLPIAVYFGRGGHTVLRVSSAKAADLRRFLSRHAKSNGIDAETLARLPMVAPAGLHPVELSGTDRASLDRRVRTVARLTREIGQRKVRIRALAQTLIPTIGQALGDGLNRTDLAVLERYGDPRALLGAGRARLLRLVRTESRGKLGDDKVRVLRTAAEQALQLWGDDPAIALSDLAEEITTEIRLLRLAETERARHEATRDDALTRVDPDGLATSLPGLGPVGATQLLAAMGRPGRFRNAAAFKSFTGLAPKASETGNTDRKSQPMSKAGNSALRSQLIQSANTARQLDPQLAAIYYAQMTQRGAPHLKALCVVAARLAERAWLTLSKAEPYIIRDLQGRPISPQRARELIAEQFTVPADVRRRRRSNKLAGRAPQQCSGHAKSRHTAGHEATLPSNTITPPNPAVNPTQHTALTPTPA

SEQ ID NO: 201337 - protein, 358 aa, unidentified
MQRNEISFKGQKIFIGIDVHAKSWKVAIAPEVGAVKGHSQKPSAKELFDFLKKNYPDGEYLAVYESGFSGFSTYYALKKVGIECMVIHAADVPTTQYEEVMKTDRIDAAKLARSLKAGQLRYNYVPEKQYIDDRSVVRIRRTIQKQLSGYKSRVKHLLHCHGVEMPERFSRVQTHWSRAFITWLMNDVKLMSDSRTSLDLLIRQVEVIRGTLLEATRQLRLMSQTERYKRRHDLLRTIPGIGPIVSMCILVEVCDVKRFHNENQFAAYLGLIPTSHSSGEKIVHGEKTFRGNKQLGPMVVEAAWVAITRDTGLGSQYFQYKQRMEPQEAIVRIARKLSNIIFSVLKNEKEYVPYQPGN

SEQ ID NO: 201338 - protein, 455 aa, unidentified
MPKTTTGGRPELKPVNVGAAAIDIGSKMHMAAVNPVCTDVSVRTFGTFTQDLHSLADWFKTCGVTSVAMESTGVYWIPVYEVLEQRGFEVILVNARYAKNVPGRKTDVSDAAWLRQLHSYGLLRGSFRPDAEIATLRAYLRQRERLVEYAAAHIQHMQKALMEMNLQLHHVVSDITGATGMRIIRAIVAGERNPDVLATYRDVRCHSSIATIRAALVGNDREEHVFALTQSLELYDIYQAKMLDCDRKLEVLIAALSNREAKPVGKLSKPRVKTKQVNTPTFDVRTALYGVLGVDLTEIHGLGPSLALKLVGECGKDLRAWPSAKHFTSWLCLAPGNKISGGKVLSSRTRRSSSRAAALLRLAATTVGRTDTALGAFYRRLSSRAGKSKAVTATARKIAVLFYNTLRHGMSYRDPGADHYEQQYRSRVLANLQRRAKSLGFVLQAIPGDTNPAVS

SEQ ID NO: 201339 - protein, 335 aa, unidentified
MQIYGIDLAKEKFDVSFFDLTSKKVSNQPSHKVVKNNLKSIGRFLETLPSDAVLVAEHTGVYGDTLLKCCMDSNVKIAFVGGYVIHRYRATPDRAKTDVLDCALLRDFGERYPDKLKYKTFPEEALYELRQLARHREMLVEQRKQLITADKSEDCRPIRSLAVKRSMDRIKEMLDTEIAETEKEMLKVINGHESIHHNYELVKSVDGVGLITAVELLVKTENFTKITTARQYAAYAGTAPYEKSSGKMDKGAHISKIGNRRSKTLLYICAESARLHNKEIKLYYERRTLIDKKPRHYVLNAIANKLLRIIFTLVEKGEYYDANFIRQDPRVVKYN

SEQ ID NO: 201340 - protein, 401 aa, unidentified
MNQLYAGIDWATKTHAVGVVDDQGGIRARFQVANTGKGFGGLVRRLVRLQVAGVAIERPDGPLVEAMLEAGLRVVVITPRQVKALRSRYAAAGAKSDAADALLLADVLRTDGHRLATLHQDSDATQVLRALSRTRKDLQKARMALCNQLLAQLERCFPGAVGLFADLHSAVAICFLRRYPTSQAAAGLTQAQLAAFLRRIHYPGHTPVAVLLQRLATAPAAKISQAEAAGRAVCVAALLGAIQACHNRERELEAEIIERLEVHADAKVFTSLPKAGHGVRAAALLAEIGDVRSRFPDEEALAALAGVAPVTKQSGTRRQVGFRWACDKKLRNALVDFADDSRHASPWAANLYAQALQRTRRHPHAVRILARAWIRVIWRIWQDHTTYDPSKHGGAVRLLAT

SEQ ID NO: 201341 - protein, 354 aa, unidentified
MIFKGHKLTIGLDLGDRWSFYCVLDEAGQIILEQKLATTPEAMKQTFESIPRSLIALETGTHSPWVSRLLRELGYEVLVAHAQKVQLISKSNRKDDRHDARTLARLARIDPELLGPVRHRSAKAQIHLTVIRARAELVSARTALVNAARGLAKSYGERLRKCGTQQVSRELAAELSVELREVLEPLLQEVESLNERIKQYDARMEQIAKESYPQVELLQQVKGVGTQIALTYVLTLEDPHRFPKSREVGCFLGLRPGRRDSGESQPQMHISKEGDPYLRTMLVQGAHYILGPFGQDSDLRRWGLKLAARGGKSAKKRAVIAVARKLAVLLHRLWVGGEVYEPLRNSHQAMRAVA

SEQ ID NO: 201342 - protein, 318 aa, unidentified
MAAADYVVGIDVSKDTLDCAGLPDPTRKPLANSAAGHTRLLTQLRPLAAAGRRVLVVVEATGGFERALHARLTEAGVACAIVNPKRVRDFARSKGWLAKTDRLDARMLQAFGEANQPRPTPLPSPARTALAERLAYREQVQAEIAARRQQLRRITDARLRARAAQALEGLAQENREITEEITASVTTEPEFQERAALLRSFCGVGALTAAMLLAWLPELGQLSGKRVASLAGLAPFACDSGTLRGHRRIYGGRAKVRLALFHIARAGLRHNPVLKAFYARLAAKGKPGKLALTACMHKALLILNAMLKTNTPWSPAAA

SEQ ID NO: 201343 - protein, 430 aa, unidentified
MKSNTQNAKIEAITEKTLVLGIDVGSETHYARAFDYRGIEYSKKPFKFSNTEAGFVTFKEWILDLKERHEKDKVVPGMEPTGHYWFNLGKFLQDNEMKPVLVNPHHVKKSKELDDNNPTKNDRKDPKVIAGLVREGRYMIPYLPDGVYADLRTASNIRFQLQAELTRIQNRISRWFNIYFPEYKTVYGKPDAKSGILILKAAPLPEDILTLGIDGVNQIWRDAKLRAVGKARAKILIEAAEHSVGSKEGAVAARMEIRMLLEDYESRNICLQEVMTLIEGLVKQIPMAEKLLEIKGVGIRTVSGFLAEVGDISRFNTPKELQKLAGLALVESSSGKHKGETTISRRGRKRLRYLLFEVAMSLVAKNPEFRELHNYYTTRRRNPLKKMQSLMAVATKLIRVFYAMLTKGVDYDPKKMVSDIKRPAVYLQAA

SEQ ID NO: 201344 - protein, 456 aa, unidentified
MPDYFFGIDASKGYSNFVMLDSLKHYVEDDFQLDDTFDGHQKLYSILSEFCVRHPKANIFSAVESTGGYENNWFDALVRFQTHLPIRTARLNPCGVYNNSKAELNRNITDKISAENVAKYMIEHPEKVQYQQQDPLAPLRKQWGFIKMLKKQKTQMLNQLESNLYTANPEILAYCKDHTPAWVLSLLQRYPTASKLAKAKKSSVALIPYVTPQKAKKLVETAKQSVASATDETTSQIIKAIVQQIRQLSKTIDAQTKAMADKCSIPEVELLKTFIGIGNDSAVGLILEIGSIERFKRAKHLASFFGLHPVYKKSGDGSWGFHMSKKGRTVPRQILYMVAMVAIQSNPLIREIYEKHTEKGMEKKAALGVCMHKIIRIIYGMLKHNQPFDPEIDKANRKKQNPQDEKKVGLDKSRRYQAYDVKAPISRRQAKKREERKQSQSVNNAKCGIKAPVPVL

SEQ ID NO: 201345 - protein, 398 aa, unidentified
MSNYIIVGCDLSDRSMMLQIAHQGNRPRKKAFANGESGRFRMISYLHAQARKAGGARIVFAYEAGPHGFGLHDALTDHGIACHVLAPSKMPSSPKKRGNKTDEKDALDIFEALRGHLLAGNRLPSVWVPDPRTRQDREIVRARLDAGDKARRLRTQIRMLLKRAEVGKPKSLGKNWTAKHLAWLRGLTGSASPLGDGSRLMLASLLRQLAFLDEETATLDAAVATLARQERYRAKAAALQDEIGVGILTTMVFLTEMGDLGRFSNRRQIAAYLGLAPRSNETGQRSDRKGHITRQGSARIRWVLCQAAWARVRNHPGEKAVYDRIVEKNPKKKKIALVACMRRLGIRLWHDGIEAERRTRTAPPSRPPGGGKRQLALTAPRPKRRRRSPAEEERRRAV

SEQ ID NO: 201346 - protein, 339 aa, unidentified
MFYFAGIDLHSNNLWLCVLDAAGRAVFEKRVPNDLNVVLAILSRWSKEEISVVVESTFNWYWLVDGLEGAGYGVKLAHINAARAYDGIKHRDDRKDANWLAELDRLGLVPKAYICPRPLRDIRGLLRKRRQLVRQRTALWLSMGTYWQREQGVRLSRQALSAVTAEQVRETWAERPLVGLAVKTSWKVVQTLEIQIRQLEKAVLAQLKTCEPVRRLETIPGIGTILAWTIHLETGTIERFSKVGDYASYCRCVESRATSNGKRKGAGNRKNGNGYLKSAFQEAAVHAVRWEPAAQKYYERKRRQRNAVVAHAALASKRCRAAYWIQRNGVAYDPTRSFA

SEQ ID NO: 201347 - protein, 344 aa, unidentified
MNDITILGIDLAKNTLQLIGVDKHHKEVFKKRVSPQGLLTIATKLKPCLILMEACGTSNHWGRTLTKLGHEAKLISPQHVTPYIGHHKNDYKDTQGIIEAGTRPKTQFVAIKTLEQQDLQSINRLRDRLISNRVSLSNQIRGLLLEYGIVINKGMKAFTKKLIELLETGNESISGLLKECLLDIYEEFKELSKRIETYNKKIELLCKNNDKCELLRTIPGIGPIIASSLYAAVGNGSHYKNGRQMAASIGLVPKQYSSGDRQRLGGIIQMGNRILKALLIHGSRAVVNSAQSKTDKRSIWIQKLLLTKPYNVVTVAVANRIARMAWAILQSGTPYNATEGYTSC

SEQ ID NO: 201348 - protein, 326 aa, unidentified
MHTIGIDVSKAKLHCSLLTNPGLRRSRNKAAANNPAGFSALLDWACRHGQCEAVELHFIMEATGVYHEALAEFLVEAGCRVSVANPFQVKRFAESHGFKTKNDRHDGLILALFGHERQLAAWTPPPPEVRHLKALLNRLAALETDIRRELNRLEKAQVGRAPAQVMDSLTKSLAFLNKEKDRLLKEINTHFGNHPKLREERDLLLSIPGVGDKLATQLLALFASKNFSKAPEVAAFLGLVPVEKQSGTSVLARPRLSKAGNSKLRKALYMPAIVATKCNPDVQALYERLIRAGKTKMAAVGAAMRKLVHIAFGVYKNHTPYQPQNP

SEQ ID NO: 201349 - protein, 391 aa, unidentified
MTILVGIDVAKDKHDCFFMNSEGEVLAKPFTILNNKEGFNFLYEKIQSVSSSDNIKVGLEATGHYSYNIIGFLLNKGLATFILNPLHTNLYRKSLSLRKTKTDKIDSKTIAMMLLSDVSLKSYSDISYHNEDLKSLTRYRFSKVEERAKLKTSLSRLAQILFPELEKLVPTLHMTSIYQLLEEFPSASAIASVHLTRLTNLLSKASKGHYDRETAIKIRDAAKNSIGSNMPAKSLELKHTIKLIRALTIDIGEIEAEISKMMDMIASPITTIPGIGRNIGAMIISEIGDFSRFSSPDKILAYAGFSPSIYQSGKLDNCYAHMEKRGSRYLRYALFHAAKLVCHWDKTFADYLAKKRAEGKHYYVAISHAVKKLVRVIFHIEKTKQAFLKAS

SEQ ID NO: 201350 - protein, 422 aa, unidentified
MLEQSQDDEQIIARVAALDIGKAEVMCCIRVPRDAPAGRRRQEVQAYSTMTRSLLVMADRLRELGVTRVVMEATSDYWKPVFYLLEAHGFDPWLVNAKDVKHLPGRPKTDKLDAVWLCKIAERQMIRPSFIPPPPIRQLRDLTRYRVDLVSARTAEKNRAEKLLEDAQIKLSVVATNIFGVSGRDMMAALIAGERDPRVLAQMARVRLRAKMSQLEEAFHGHFTDHHAFLLAKMLARVDAISADIAEIDERIEAQLRPFADAVTRLQQIPGIGPVAAAVIIAEIGTDMGRFPTAGHLASWARFTPTVKQSAGHNQGNGSTGRGNPYLARILGEAVVAAGRTRTFLGERYRRLARRRGKQKAIVAVGRSMLIITWHLLSSPSTQFADLGPSFYDSRIQPDRKKREHIRQLEALGYKVNLEPAA

SEQ ID NO: 201351 - protein, 314 aa, unidentified
MPQLVQSAGIGCGKRFLDVAVYPGGEQIRLENEPADHQRLVVWLKERGVTRVGLEASGGDERAVRDVRCAAGLEVHILDPARVRHFAKAKGRRAKTDPIDARVIAEFTATLVDTPPVTVEPAREDLAKLIRTRRLLVAKRADMTKALKDLPDAARTVVETALASLGAAIAELEQLIDRQAGADAALAKRVEALCSAPGIGQTTAVAVAVLLPELGRVSGCAIAALLGVAPFADGSGDRKGERHIAGGREDVRQLLYMSVLRAATQGQGVLRAFYLRLTGRGKPAKVALTACRRKMIVRLNAMLAAHQTWKEEPA

SEQ ID NO: 201352 - protein, 358 aa, unidentified
MNKPTRISRVDKLFDRAGATATFVGLDVHKKTIQAAVWANERIVGTWVMPADVDKVVAMLRPHRGAITQVVYEAGPTGYGLARALRQAGLVVEVVAPGRSPRPAARQQKTDRLDAERLAEYAAKGLLVAVAVPTETEEADRQLVRLREQLVRKRRRVKQQIRSFLLQHGVVEPRGLSGWSRAALVALRALSLRPTLRLCLDVLLDGLDELVAHVRRLERALRDLAATARHAEAVAIARTHPGVGAVVAMSYVVEVHRGGRFDEPGEVASYIGLAPRVRQSGETRRDGPIGRTGRGSVRALLVEAAWRWRLRDASARRLFARLMRNTGSAKKAIVALARRLAVNLWAMLTRREPYRAAT

SEQ ID NO: 201353 - protein, 331 aa, unidentified
MSHIIGIDVSKATLDCAWLRDPDQSKAKRKSCQNEVDCFESIITWAEAFSELPRQSLAFVIEPTHIYHEQLVQFLHTLGATVYLVNPGRVRKFAEGIGILSKNDVIDADLLARYGLMAKKLTVFEPAPQEVNDLRSLLNRLDVLERNLRRELNRQEKTGKSLTFHRLEQQSITRSIKRHKAEIVSFKNAARDCVNASPWLQRGVELLCTVPGVGERTAWLMMVVLSSRQFHCAAEVASFLGLNPIEKRSGKSEYRKPRLSKSGSSHYRQALYFPAMVATRRNPDVQALYERLVDAGKPKMCALGAAMRKLVHICYGVYKNQQPYQPLVSLT

SEQ ID NO: 201354 - protein, 420 aa, unidentified
MKEPIVNDFSALVGIDWADKKHDVCELIQGTKKMTFSVISCKPEALNDWALSLKKRYPGKQIAVACELKKGPLIYALRRHPHITLFPIDPSTVAKYRKAFTPSGSKNDPTDAAIITEILSIHRDKLTCIKPESSDIRALSQLVEYRRKLVQDRVDLSNRITATLKNYYPQVLDWFKEKDTIIFCDFISRWSSLPTVKAARKSSLQTFFNQHNSRYPATNDKRIAEIKSALPLTDDSGVIEPNRILIEILIPQLKLLIESILRMDSEIRQYYKKQDDRIIFDSFPGAGPQLAPRLLVAFGINRDKYNSAAELQKYAGVAPVIEQSGQHSWTHWRYSCTKFLRQTFVEWAGQSVRFSFWAKAYYDMQISKGKPHNTVIRALAFKWIRIAFRCWKTSMPYDESKYLKALKQRGSPLLEYAINS

SEQ ID NO: 201355 - protein, 374 aa, unidentified
MSNIASLETERHRFLYVGMDIHKDNHAAAATNCFGQNLLETEIKNSKKDFDNFVALVEQLSKQNNLIPLFGLEDSSGYGQRLAGYLYRNGYQVKTIPPILVDKARKRETHPEKSDSLDALQVARVLIQRIDRLPNYSLSEEDEIAKQIKELTLDREFLIKEQTRIKNQLHRLLHKSYNSEYKDKFKDSFSLKALKYWKANPLPRKTDDIAGDPLILKNQIKRKIIRLLDIKNETKEIEQETAVLMKQTNQKIETLNGCGLVLGSKLIAEVKNIKRFRSSNSLAKYAGLCPKEKSSGKTIRHIKTKSGNRKLNMVIHRIALSQISKSGNERAREYFQRKLTQGKTKAQALCCLKRRLIDIIFMMLKYKQEYIYQT

SEQ ID NO: 201356 - protein, 366 aa, unidentified
MKKISTVQVFGNEIFKEQKLTIGLDLGDRWSLYCVLDEAGEVILEQKLPTTPEAMRRTFEKLPQSRIVLETGTHSPWVSRLLTVLGYAVIVAHAQKVQLITKSSRKDDRHDARTLARLARIDPQLLGPVRHRSPQAQIHLSVIRARAELVSARTALVNAARGLVKSYGQRLPKCGTQQVNRELAAGLASELREVLEPLLREVESLNERIQEYDKRIEQIAQEVYPEVYLLKQVKGVGTQIALTYVLTIEDPYRFPKSREVGCFLGLRPGRRNSGESEPQKGISKEGDRYLRTMLVQGAHYILGPFGEDSDLRRWGRKLAERGGKNAKKRAVIAVARKLAILLHRLWVSGEVYEPLRNSKGAMGAAA

SEQ ID NO: 201357 - protein, 412 aa, unidentified
MEVLYERCCGIDVHKSSVAACIVLERGQKPQRHLRRFGCTTHELRELAEWLRSFDVRHVAMESTGVYWKPVWNVLEEHFHMVLANAQHIKAVPGRKTDMMDCQWIAELLRHGLLRGSYVPSAVIRDLRDLTRTRATLSQEQSGISSRIQKLLESANIKLASTVTHTMGKSGQAILDAVVNGEESPERLADLALGKLRSKIPQLQLALDGRIRDHHRFLLDSLLRQYRFLEAEIQALDTRLEQLGEQHQELADAVARWITVPGVERVAAWTLVAEIGSDMTAFPSAAHLASWAGLCPGNHESAGKRLSGKSRKGSPWLRRMACQSAWAAVRTKNCYLSAQFKRLAARRGSKRALLAVAHSLLVIGYHLQSKGCVYQELGGNYFDQLHEERLKRHLVKRLESLGVSVTLQTQAR

SEQ ID NO: 201358 - protein, 347 aa, unidentified
MTNITSLSIDLAKNVFQLHGTDIKGKKVLKKKIKRLELLEFIVKLKPCDIYMEGCGSANYWGRKFKEHGHKVKLINPRYVKPYVKRNKNDANDAAGIAAAARDPDMRFCEVKTKDQQDIQSIHRIRSLLIQQRTALTNQIRGLLAEYGLVIQRGISSIRSKLPIIIDDNSANLSESILDCLMETYDRFIFLDKQIAYYDHKIVILFKSNEACQRLEKIPGVGALGATILCSILGNGSGFKNGRHFAAFLGLVPKQHSSGGKERLLGISKSGDTYTRTLLIHGARSVVMHVAKKTDKQSIWIKKLMMRSCYNKAAVALANKIARTAWSIIHDGHEYNANHKPDFLKAA

SEQ ID NO: 201359 - protein, 309 aa, unidentified
MKPSLSQYIGVDVAKSCLDFDLPAPIDRIANTAAALAAALPGLPPGAHLVCESTGGYENALVAAAQAAGVPISVVPPQRVRSHARSTGRLAKTDRLDARLLSAYGRAHTPAPCRAPEPSRQQLKELVRVRAQLLELKKTEAGWREHPPALPLLQAQAQQREALLDAQLAEVEKAIRALVQAAPGRAEMERMQQVQGVGEVTAWTVWAEVPELGQMESGQPAALVGLAPYARDSGQQRGPRFIQQGRPQVRRVLYMAAVTACQHNPVLKAFYRRLRARGKPAKLALVAVARRLIELLNLLLRNPNFVLAR

SEQ ID NO: 201360 - protein, 343 aa, unidentified
MEHFAGLDVSVKETSVCIVDDTGRIVREVKIASEPDALLQELTNLAYHFKRIGLEAGPLSQWLFSALAEAGLPVICVETRHMKAMLKAQINKTDRNDARGIAQMMRAGLYRPVHVKTLRSQKLRMLLTHRKLLQSNAVAIENDLRATLRNFGLKVGVAGKVKFEARIKELVENLPDLAVLVEPLLIVRRTLREQIGVLQRRLLAIVRDDDVCRRLMTVPGVGPVVALTYRVTVDVPARFRKSKAVGAVFGLTPSKHQSGESSRTGGISRCGDEMMRVMLYEAAQVMLVRSVKWSWLKAWAMQLARRRGMKKAIVALARRLAVILHRIWVDGTEFRWTQETAAA

SEQ ID NO: 201361 - protein, 372 aa, unidentified
MTPNSITWVGMDAHKNSIAVAALFPDSSEAVEWTETTTPEAIRRLARKLRREAPGEVRCCYEAGPTGYALHRQLEAEGVICEVVAPSLTPVKPGSRIKTDRRDARKLAELLRAGLLTEVHPPSESDEALRDLCRCRDDVRVDLLRARHRLSKFLLRRHCIYRQSKHHWGTRHWAWLEELRFDDGASQATFDSYLLAVRQLEERQAQLDAQLAEFGGRDPYREPVAWLRCFKGIDTVTAVCLIAELHDFRRFRSARELMSYVGLVPSECSSGERERRGSITKAGNRHVRRLLVEAAWHHRHRPMISAPLQRRRAGQPARVLAIADRAQERLCARYRRMTGRGITSPKTIVAMARELAGYLWATLHPASTTTRS

SEQ ID NO: 201362 - protein, 372 aa, unidentified
MTSIIYVGMDVHTTNYTLCCYSMEDDRFFAEVQVEPDAKNILKYLARIEKQQSRDCRIVCGYEAGCLGYSLYHQLHAHGIDCVILAPTTMMTKPGKRIKTDRRDARLISKCLAFHTYSPVYIPTEVDDAVKEYIRMRDDANSALARVKQQIIAFCIRHGKIHDGKSYWTNKHLEWLSSLDLGNKILSEVLQEYLIRYYQLREQMDMYDMRINELAQAEPYRQKVEKLGCFRGIAAHTALSFCVEVGDFRRFATAQQFASYLGLVPGECSSGDKQQYTGITKAGNSHLRKLLVETAQVFGRSATKSGKSVALKERQAKCDSLTVAYADKANARLKKKYFKIAMRSKVNIAKTAVAREMACFIWGMMTDNISCA

SEQ ID NO: 201363 - protein, 366 aa, unidentified
MKKTSTVQVNGNMIFKGQKLTIGVDLGDRWSCYCVLDKAGKILLEQKLATTPEAMKQTFGKIPRSLIALETGTHSPWVSRLLTELGHQVLVAHAQKVQLITKSTRKDDRHDARTLARLARIDPELLGPVRHRSAQAQIHLTVIRARAELMRARTALVNAARGLVKSFGLRLPRCGTEQVSRELAAGLCTELREVLEPLLKEIESLNERIQEYDARMEKIAKESYPHVALLKQVKGVGTQIALTYVLTLEDPHRFRKSRDVGCFLGLRPGRRNSGQSEPQKHISKEGDRYLRTMLVQGAHYILGPFGEDSDLRRWGRKLAERGGKNAKKRAVVAVARKLAVLLHRLWVNGEVYEPLHNSHKEMRAVA

SEQ ID NO: 201364 - protein, 418 aa, unidentified
MGKINEFCAGIDVGKRFLLCCALTGAAQEEPRSQTRRFDATVQDLVQLRDWLSSKRITHVVMESTGSYWVPIYNILEGHFIIVLANPEEVKNRKGHKTDRKDAEHLADLLRHDHIRASYIPPKPIRDLRDLTRRRLQLTQDASRERNRIEKLLEHVNVKIGNVLSDVFGVSGKSMLLALLDGNMSAEQIAGLALGQAREKIAQLTEALEGHCMRDHERFLIRSSLRHLACLQEETEEMDAEILRRMQTPPFQQAFQLSQTIPGIGQLAAASILAETGTDLSAFPTAEQMASWAGLCPGNRESAGRRKGSQTTKGNPYLRSTLVQSAWAATRKRGSIFQLRFSELAPRRGQKRAIVAIAHQMLTVLYFMLKNNTPFLGSEATPQKHRRMRRAHHHLRCLRRLGVTVQVLGSLEDAPSAR

SEQ ID NO: 201365 - protein, 301 aa, unidentified
MHVPQAFMVGIDVSKAHFDVAVEGKRVVRFDNDVPGRAALATAIAGAELVVVEATGGYEMALVRTLMAADIAVAVVNPRQVRDFARASGRLAKTDQVDARVILHFAGAMRPAQIPPIDDGRIALAALVARRRQLIDMAVAEKNRLEHAPQAVAMLIGETIAALKAQLARVDAAIALAIDAEPDMAARRDLLLTVPGIGEIGAAVLIAELPELGAIDDKKLAALVGVAPIAHDSGAWRGQRHIAGGRATSPAAAPPSDVLSTWQRSRPSAAARPSRPFTSGCETPANRPRSPSSPPCESSSS

SEQ ID NO: 201366 - protein, 318 aa, unidentified
MPKPRFAAKSESAVLGIDVAKHSVVLYDSLSRQSRRIDNRPEALIKALGAYRDYVLAVCETTGGYERAVCEAACQVGLPIHRAHASRVKAYIASHGQGAKTDAIDAYWLARYGQARGSCLSHWQPPDPCTEALSDFIRYRHNLIDQRTRAKNQLKAPNSGTIAGFLTEQIRFLNQQILDLEIEIQAHMEQHAQLQKRANVLTTIHGLGPVTRNTLLALLPELGQLSAKQASSLSGLAPHANDSGQRRGYRNMIGGRTGLRPVLFMAALSAARYNPKLKPFYQRLILRGKPKRLALAAVARKLVVMANAELKNYALELT

SEQ ID NO: 201367 - protein, 347 aa, unidentified
MRFYTGQHQYYCGIDLHARTMYICILKHETGEVVLHRNLRCDPDTFLRTIAPFRDDLVVGIECIFCWYWLADLCTREDIPFVLGHALYMKAIHGGKAKNDKIDSHKIAVLLRAGAIPIAYVYPRGMRATRDLMRRRLFFVRKRSELFTHIRITFHQLNLPAPTGQLLYPGNRTGLLEAIREPMVRTSVEADLILATQLDEVIGSLKRAVLRQARIEDPGTLELLQTIPGVGPILALTLLYELHDIERFSRVQDFLSYARLVKSQKASAGKVLGTSGNKIGNAHLKWAFSEAAVCFLQKNPRGQRLLKRIRAKHGKGKALGILAARLGRASYYMLKRSAAFDMDRFMN

SEQ ID NO: 201368 - protein, 314 aa, unidentified
MNAIGIDMSKDSFHAAFDEQEVLKFVNSKEGINEFLEKLKTKNIKLKDFTIGVEATGIYHLLFCTQLSKIKLEVVVINPLESHRMITSTLRAVKTDRHDALAIRKMVLLGSGYLFTDTPSVLALKALVSEREALVQLQTMTKQRKHVHSIRENSIDMPIYDSFYNLTVVLKQEIQNIEKRMQTYSIKTQSLLKTIPGVGKVTAVTLIAFIGDIKRFSSPEKLVAYIGLDCRVYQSGTSIKGKGYISKRGNAYLRHILFNAALVARLHNPTLKRYFIKKTNEGKHYFSAMCAVERKLVHIIWAVWKRGTSYEERP

SEQ ID NO: 201369 - protein, 366 aa, unidentified
MFYLGIDVGKFTHSLCLIDEAGHHDIWQINNDKSGFESLRKKINSLNLLIESRLLVGMEATGHYFLNIYDFLLHLGLSTEQIALLNPLQVKSFRNTNLRGAKSDNVDAEQIAVLLQFGNFDRCNVSTDHIMNLRELTRLKSDLTANLGNLKRKMIAVVDRIFPEFAKIFANKFGLTVVTLLTDYQTPEEFAALSLEELTALIKGLSKRGVNRDKIQRLHEAARNSIGISFGREGFKIELSILLTQLKSIEEQIDFLEGKIAEMVNELNSPLFTIPGIGKTTGAAILAEIGDINHFASAVKLIAFAGLDPKLKSSGTYQGRTPISKRGSKYLRSALWYSAMVLCRVDEKFHKQYQDRKNLANLTAMR

SEQ ID NO: 201370 - protein, 344 aa, unidentified
MSKHSVRSGDVAGLLDQLARLRTKAQARTGKNFPIIVIQEAGLDGFWIHRVLEKEGIESHVVDAASILTSRRRRRAKTDRIDGEALLRTLLAYKRGEPRVCAMVRAPTPYEEDQRRLCRERKTLVAERVEHVNRIKGLLFAQGISDYEPLHRDRRQRLEELTTGDGRPLPAHLKAQIERELDRLELLLEQLKAVEAERDALLAPGRDPAPTPVAVLAGLRGIGPEFAAMLWLECFFRSFSNRRQVAAYAGLAPTPWQSGSVQHEQGVSKSGNPQLRTTMIQLAWLWLRHQPKSELSLWFLDRVKRDGGRGKKTTIVALARKLLVALWKFVSNGVVIEGAVMKAA

SEQ ID NO: 201371 - protein, 355 aa, unidentified
MTKRITAMTPLTIGIDLGDRRSEVCVLDAAGDVHRRFSVATTRAAFEKALAGIERSRIVIEVGTHSPWVSRLLEALGHEGIVANPRRVRSITQSDEKCDRVDAEQLARLGRADPRLLRPIRHRGEQAQRDRALLAVRDELVRLRTALVNQARGIAKGLGQRLPRCAAASFARRMRREGLEGVFPGMETLVATIGWVSERIGALERAIESVSAERYPETELLRQVSGVGRITALAYVLTIEDPHRFRRSRTVGAYLGLRPRRRQSGDTDPLLRITKAGDVLLRRLLVQSAHYLLGPFGPDTSLRRFGLRLAARGGRGAKKKAVIAVARKLAVLLHRLWLTGELYEPLRGAELPAAA

SEQ ID NO: 201372 - protein, 422 aa, unidentified
MNFCPVAGIDVSKSFSDMCILSPDNKIFAQEKIYHDETSINRANALLQKAERLFFSKPVIVMESTSHYHLILFQFFSEHGYDVIVVNPLQSNSMKDFSIRKRKTDRVDAFKLAMMYRTKTLRPSQIPQTATRALRQLCRHRAELLNDVSSYKNRLTALLDQTFPGYDKVFSDVGGVTSCAVLVRFPTPTILLVEEESELVEVIAAASKSGYSFAKKKAGLLISAAQKAQTLGIHSCADETLIVCTIQMLRTLSESVLQIETAIDNLLAQIKEMRNNVSLLQSIPGIGSHSAALLLGEIGDISLFKKPKQLAAYFGLDPTERQSGSFRGTKNKLSKRGSSYARAALHMGIVNSICKRGKDSAANPVLLSYYEKKCKNKPAKVAQAASMHKLVFIIFAVLRDQKPFELKTPEQHAVEQGFVKAA

SEQ ID NO: 201373 - protein, 349 aa, unidentified
MNVIKQTVGVDVAQKELVCVVGVLLDDFSVSLKARKAFANNMSGFKAFLKWAKSFTEASLDLTAVLEATGVYHEKFVHWLVGQEQQVAIVLPNKISNYMRTLSIKTITDNTAAEAIAQFGLESKLETWTPPKPIFRKLKQLTRERDQTVCERVVVANQLHAQNAEAFSNANSLKRLKARKALLHKQEKEIKKEIHLLVKSDPNLEENISYMTSIPGVGELTAVIALAETNGFELVMNKRQLVSYAGLDIREKQSGTSVKGKPKISKKGNRHLRKSVHLPALCAIKNCSLYKNNFARLVGRHGIKMKAVVAVQRKILELMYILYKTKTVFELEYELKKEQQPDAATPLTV

SEQ ID NO: 201374 - protein, 344 aa, unidentified
MLYVGIDVSCKEFVVYAVNERKQKVFDNKIEPTREGLRKLVKDLGEGPKLMVFEAGNQMKWIAMTLKKMKDVYIHVVHPNEVKWISQSNGKTDKVDAKKLAELARSDMLPRAVHIVDGEIRELRELVSARGRLQSKRVALTNTIRAMMLQEGVRLPVKFFQGMEWREKIEKLKIGGVQRLIVESYMKSVDQLLISEEEITARMLEMKDRRIELLESVPCIGKISSRVLVSAIDNVERFDNKKCVANYGGLTPTIRQSGEVKVMGRINRDGRREVRKVLLQCSHALSRTKSIGAKPLKIFYERIERRRGKKKAIVALARKLLTTAYGVLKNNEYYDPQKLTANAV

SEQ ID NO: 201375 - protein, 397 aa, unidentified
MHTLFVGIDIAKLNHQATVIDETGKVLGGSIRFPNTTKGGTTLLDHVTKFCDGDTPIVFGMEATGHYWLALYSFLVGKGHTVIVINPYQSESWRKVYMSAVKTDKEDAFLIADLLRFGSIKKSQVPSEVTIALRNLTRFRVSMSLQLSDTKRRILTVLDQVFPEFPALFSDAFGKTAISILEEYQTPEALETLSSRKLTNLVSKLSRGRFGKAMAQSLHAAASDSFGITFALDSFSLQLKLLLHQLELLVGQLNLLDEEIAKLFKTESKLLTIPGIGPTTAAAITAEIGDIQRFKTSAQLVSFAGINPTVRQSGNFIGNKNKMSKKGSPYLRLALWQASVVASRKNPILKAFYEQKVKEGKHKMTAIGAVSRKLTGIIFAIMRDNKPFMIWDTVSNC

SEQ ID NO: 201376 - protein, 314 aa, unidentified
MITSEEINVGVDTGKTQLDIYIRPLGQAFSVPNSEAGIDAAIRRLKTLKPTRIVIEATGRLELPFVITAQKAKLHVSVVNPLQMRRFAAAAGQYAKADHLDARIIAHYGEALRPGPTALKAAKARLISDLLARRSQLLDMATMEKNRLSILPKALHGSLNRHIKQLQTELTKIESLLDKHIDQEPEWQAKRDLLMSVNGVGKVLTYTLLSDLPELGTLNRKEIAALVGVAPMNKESGNYQGKRRIRGGRAQVRKVLFMAIMSAMQSNPKLKRQYTAMKEAGKPPKVAMVACMRKLITILNTMVKNGESWNPELA

SEQ ID NO: 201377 - protein, 416 aa, unidentified
MKEWKEITHYAGFDWARDHHVVVIVNQQGQIVADFEFEHSVEGWKSFGEKTAGFANLAVAIETSQGAAVDQMLQRDYTVYPVNPAAAASYRQRKAPSGTKTDHIDGWSLADALRVDGQGWRALQPADELSTQLRLLCRDEVALIAQRTLLVNQLQQALVEYYPAALEAFEDWVSPATWDFVLEFPTPEALTKAGKRRWEKFLHTHRLWRPETVEKRLTIFSQADQFKASAPVTKAKSQLALSLCKLLRTLQQQLDQYREQIEALFKNHPDHDLFGSLPGAKKMLAPRLLAAIGSDPGRYGTFQVLQSFAGTAPISFESGKIHKARIRWNCDKFMRHTMHLWADCFHRVSPWGQAYYRKKRQEGMTHACALRCLGQRLLKILFRMISDKKSYDAELHARNQKKHGSWVLALIEKPAA

SEQ ID NO: 201378 - protein, 463 aa, unidentified
MAARKQKRMSARTVEDEDCQLRYERVAGIDVAKGPAMVCLRLPPGPGKTRRTSRTWEVTARVPDIEALAAELKACRVERVSMESTSDYWRIWFVVLEGAGLEVQLVNSSQAKNLPGRPKTDKADAAWIARLTEMGLLRGSFVPPPQIRALRQYTRQLVHLTGDRTRYWQRLEKLLESALCKLTSVASGLAGSKSCLAMLEAMIAGERDPQVLAGYALGPMKNKHAALVAAFTGMQFGPEHAFSASSDLRMIKMLDAEIAGLEQQVRDHLAAIPAAWGVDADGTTGPGAGTGPDAAVLPAVARLAEIPGVSPGIAAGLIAEIGLDMTRFPTPDALASWAGLAPVPNQSGSRKGRGKKGTGSSYARRYAGQAGHGAAHTDTFLGERHRRIRRRPGGGGWKKATIAVGRSILVIVWHLLADPAARYRDLGPDHYARHTDTNRKARGHKRQLESLGYDVVLTPREAA

SEQ ID NO: 201379 - protein, 354 aa, unidentified
MTRATKYVALDVHQATTLASVRAETGRVIARSILPTEAPPLVEFFRGMRGTVHVAFEEGTQAQWLHDLLVPLVHRVVVCDRHGEPRRGNKGDVVDADQLSARLWRGELRAVYHGSAERATLKELTRAYRNLVEDATRVMLRLKALFRARAIPVRGTRVYQIRERASWLAKLPERGVRFRAEALYAELDVLRALRPKAKAAMLAEARRDPAWRVLRTIPFLGPIRVALLLATIQTPWRFRTKRHLWAYTGLAVVTRSSADHEIQDGRPVRRRRAPLTRGLNPNHNRVLKDVFKGAATAATARPGPLQAFYHGMLARGMREELARVTLTRKLAALTLRLWKKGARYDPTQLTQQAQ

SEQ ID NO: 201380 - protein, 371 aa, unidentified
MDSPFADGIECAKLEESTTSNQHKGGVIMKGTTMGIDLAKNVFEVYVEAESGAVIERKRLSRKKLLPWLANRPPSLIGMEACGGAHYWARELTKLGHEVRLIAPQYVKPWVQTNKSDQADARAICRAVQEPGMRFVGMASEAQQTVQALHRVRSRYLDNRTALVNQTRGILLEYGVTIPKGVASVRKMLPLLLTEDRWSALVRQFLADHRAELEEWDAKIQAVTAQIKRENAQQPICQRLEQARGIGPLGASALWAKAAGQSYQNGRHVAAALGLVPKHTGTGGKVRLGGISKRGDRYLRQLLIHGARAVVRQVGEKPDPLSCWIRRVVARRGVNKAVVALANKNARVAFAIISHDQTYDVTKMCGAVSCK

SEQ ID NO: 201381 - protein, 408 aa, unidentified
MERVGERGCGRDVHKKSVTAGVRAPGAGGGRGQEVRTFGTTTAELMLLRDWLEAHGVTTVAMASTGVYWKPVFYVLEDGFHGVLANAGQIAQVPGRKTDVQDCIWIAQLLEHGLIRSSFVPPRPIRELRDLTRYRKAIIEDRTREVNRLHKVLEDAGIKLAAVASNVLGKSGRDMLQALVAGTTDPETLAQLARGALRKKLPALRQALAGRFRPHHAALLTHVMAHVEYLDEAIARVGIEIDAALRPFAEAMTALDSIPGVRRRTAEVLLAETGGDMAVFPSARHLASWAGLCPGQHESAGKRRSGKPRPGNRWLRATLLEAAWAATRTDTALAARYRRVMRRRGHKKAIIAVAPAMLVIAYHVLHDRTTYRALGANYDEQRQATRARRRAIHTLEAQGYRVVLEPAA

SEQ ID NO: 201382 - protein, 363 aa, unidentified
MTRKRLSGNHLLDFIGTDEKAPVWIGLDVHKRSYHVALRRADGVCQSWVSAADPIVLARQLSVILQRISFIVYEAGPTGYCLERVLKANGYKVAVVAPSRIPRPVTNVAKTDKLDCLKLAEYAAKGMIEAITTPSEQESAERSVLRRRNQLVDSTRKTKQRIKSFLLFHGIEEEYGLRYWSRSAKSKLSKLPLQSDLKFVLKSLLRQLSYEEEELAKITNRLTRIAKRRPHWEVVKNLKTVPGVGDIVACAFRTELFRPERFRRAEEVCSFLGLAPAIRQSGEKRQGGWLMRSGQTRLKSLLIEAAWMWQAKDPWARKKYRTHLSRCGISQKAITALARRLAVILWRLSVENRAYVMLKVDSV

SEQ ID NO: 201383 - protein, 475 aa, unidentified
MEPKLRRCCGIDVHKESVTVCVLPAYGQRGGEVKSRNFRTFTADLKQLRGWLKNLKVTEIAMESTGQYWRAVWNVLEGHFEKMILVNPQHIKGLRGHKTDPKDARWIVDLLETGKLRGSFVPEREVRELRDLTRQRVHLLEDLNRVKNRIEQLCQAGNIKISSVATDLFGVSGRRMLKAIVEGKRDAGWMADYARGTLRGKKQELERALEGTFTEHQRWLLSREVRQLEWLEIQIADMEAEIERRLVPFEETTQRLLTIPGIDRKTAWMIIAELGGDLSAFPDARHLASWAGLCPGNRESGGRRMSGRTRKANCYVRRGMCQAAWAASHTRDTYLSSFYRRLRFRKGAPKAVMALAHHLISVVYNVLVRREEYVELGGDFYEQRNRTRVVSKLVARLAKLGYQVELTPSRPPVGMEEAPSMAPIEHLNPLPSIPHSIAQPVKRRGRPCKCAERGIPCKHGRALNAISLQGQGLSA

SEQ ID NO: 201384 - protein, 367 aa, unidentified
MDAPCSGVECAKMEVLLTPQQGTPMSEITVIGLDLAKHVFQVHGADPDGRPVLRKRLRRGQVLEFFASLSPCLIGMEACAGSHYWGRELQALGHEVRLIPPQYVKPYVKTNKNDAIDAEAISEALTRPTMRFTAVKSAEQQSVLMLHRTRELLVRQRTMLVNALRGHCGEFGIVAAQGLSRAGDLIKRIEDPADTALPDLARQALQCLTSQIRAIQEQIALIEKKLLAWHSSCEASRRLAEIPGVGLMTATAVVASVGNATQFRSARQFAAWLGLVPQQHSSGGKERLGHISKRGDGYIRRLLVHGARAHLSWSRRKKQIRSAWLTGLLARRPTNVVLLAMANKTARIAWAMLSRGERYQEMIAAAA

SEQ ID NO: 201385 - protein, 386 aa, unidentified
MKYVGVDVAKQTHYACVTSQNNKILTPPFSFANDIEGYSVFLSKFKKFPKDDVVVGLESTGVYGENLIAFLSEQGYKIALINPIETSGMSRKRIRNTKTDKIDSKGICKYLFQEEYRLLESRELTVLELRGICRFRQSLKKQNARLKVQLVSYLDVVFPEYHTLFSTVHGKASYAVLSEFPSSAAIAKANITRLENVLKSASRGHFGRVKAEELKVMAKKSVGSRGSDKGFQIANTIAQIRLIDSQIDDAETHLTKLWNNIDTVLKTIPGVGVIDGAMIYSEVGDIARFHRPDQLIAFAGLDPATKQSGNFRAASTRMSKRGSPFLRYALVNAAWNVSMNNATFGEYYKQKLSEKGRHYKALGHVAGKLCRVIFAMMKNNMVFNLP

SEQ ID NO: 201386 - protein, 367 aa, unidentified
MKKVSTAATKPSRNFSQPNLTIGLDLGDRSSCYCVLDETGRMVMEQKVSTTAKGLQAALGGMPRSRIALETGTHSPWVSRLLSKLGHEVIVAHARNVRLIGESRKKDDRLDAQTLARLARIDPELLCPVKHRSARAQADLTVIRARAGLVRARTALVNTARGLAKSYGERLRGCNVRNMNPEKAEGLSPELQAALQPLLAALESLSERIAEYNQRIEKLAQESYPQVALLKQVKGVGTLIGLTFLLTLEDPHRFRKSRDVGGYLGLQPGRRNSGQSEPQMHISKEGDPYLRTLLVQGAQHILGRFGVDCNLRRWGLKLAERGGKSGKKRAIIATARKLAVLLHHLWVSGEVYEPLHNSGRITMPAAA

SEQ ID NO: 201387 - protein, 374 aa, unidentified
MPTSITYVAMDTHKKQHRLALKFPGQERLIELSVPNNVREITKMVKKIIKQAPGLVTFCYEAGVCGFTLKRRIEALGPRCIVIAPSLVPKKPGERVKTDRRDARKLLELFQANLLTEVQAPDEKQEADRELTRLRETAMENLKRARHQLLKLLTRHGFVYTDGKHWTQRHLLWLRGLEFHLPKLRKVFDSYFDEMTYGLRRLESLDQQVEQLAQQPEYRDIVGALCCFHGIQTLTAITLLTEIFDYGRFATPRELMSYLGLTPSEYSSGDRQKKGSITKAGNKRIRRLLNETAWHYRHRYLPGKGLKQRRKGQPQWAIEIADNAGRRLTRRHRHLIEAGKMPVKANIAIARELAGFIWALMREYEARKTIKDVA

SEQ ID NO: 201388 - protein, 360 aa, unidentified
MNYVGLDVHKAFSSMEALNPATGEVWECKRLPTDLAGLTQALAQVPAPKTVVLEAGRNSLYLAALLEPLADEVSTVDPGELRRLQKTMPKTDRRDAWGLAFWAAKGVLQPLWRPDADTMNLRELTRGKTALTRIATQLRNRMRSLLARHGCECPHRDLLGQKAQQWLTEVLDRIPGYAGQMLATLWQLLRSAQAAVDQFDQPLRQEAQRHPAARRLQSIPGIGPFLGLSLAAEIGDIRRFASPTKLRGYSGLTAKVDQSSNRLSYGPLTKRGNRHLRYAAVLAAQRMAQMKSADPRLKRAYLAVAFKHGRNPAKVDCARRLLDLAHHLLTHEEDYRAPRSIGAAVAPVKRRPRTRQAAAA

SEQ ID NO: 201389 - protein, 350 aa, unidentified
MDTITSPLASIGIDIGKEVFHIVGFGTDGKIAFRRKIKRLALAETFKKLRPCVVGMEACLSAHFVSRALRQLGHKPKIIPAIYVKPFVKGQKNDYNDAEAIAEASLRPNLRTVREKTQDQLDLQACHRVRSRLVSRRTATINQIRAFLIEQGIAVRTGATALRNSLLAILKNRRDEISPRMSGLIAGLYEDWISLDERINTIASEIEKISEKEANCQRLMSVPGIGPLISTAVVAAIGTGEAFERGRDFGAWLGLVPRQYSTGGRSILGRISKRGSKYLRTLFIQAANVILMRPHNWERFSFGAWLLNAAPRLHRNKLATALANKLARIAWSILRNEKTFDINRHEAMAI

SEQ ID NO: 201390 - protein, 390 aa, unidentified
MYRSDGSFTTHRFSTLLDGLTALREWVVENRCERVLMEATGVFWIPPYMALESSVEVYVVNPLSIKYLPGRKTDTLDAVWLAEIALNGMFKASYIPPRDVREFRELTRTHRKLVEERTAHKNRIHKILERSGIRLSGVLSDIFGKSGLLVITGLIEGKPIEQILATLHDSRILKKRDAIERAICGDLGENEVFIIQQSLESIKHVNAQIAQYEERILWTLARDEESLQIVTSVPGIGFKVGAVILAEIGNISQFDGPKNLVSWAGLAPTVYESAGKTAHGHITKRGSKYLRTVLIETAQVIANGKPNRLKQFFLRIRARKGYKMAIVALARKVLALIHHLLINRERYLDDPGTVKTVNLPKIRPNREMDHDEMIQLLTQAGYVVQKLNAA

SEQ ID NO: 201391 - protein, 428 aa, unidentified
MNEDELSRLKEFRQLKKRIQGSDTHLIVGIDVAKDRHHAFLGTATGRTLVKKLIFANTSVGFAELLARVEAVRAQSGLSEVVFGLEPTSNYHKPLGRYLISKGCHVAMVGGKAVKNNRELLDERWDKHDTKDAANIADLVSRGKCFYYDMPSREIEELRDLHSLRARLKKEEHSLSLRIRNNLLAKHFPELDAFYSACERETLAIVRWCLNPQKIAVMPFEEFFKRVAPNARGIAQKLRLQKIHRLAHESIGCPVGSAVQFQARLLAEKIKEVRGQISDVDHLIAQACAPFPSYEYLLSIPGFGPYVASKVLATIADPRRFDSAKQIIRTSGYDLCADRSGKRSDQAVPVISKKGNSQLRYALYQAAMIASSRHRFFMAYFARMLQGREREQGIRTKMRVKLAAKMLVIAWTLMKKGEPFNPEYLNAQ

SEQ ID NO: 201392 - protein, 412 aa, unidentified
MKEIADKVGGLDVHRDTVVACTRVREPDGMVTLSKETFNTTRKGLEDLARFLIDAGVSTVVMEATGVYWKPVYYTLEGLFPQLWLCNAQHVKNVPGRKTDLSDAEWLADVAAHGMVRPSFVPPPEIRELRELTRYRKTQVDARAREIQRLEKVLQDAGIKLTSVASAVWSASSREIIEALIAGERDPAVLAQMAKSRMRAKIPQLEEALYGHFGAHHAFVAKQIIDHIDYLDTAIEALTQEICERLVPFEIGVALVSSIPGISATTAQVIIAETGGDMSKFPTAEHLCAWAGLAPASYESAGKRRSAGTRHGSTSLRRAMIEAARAAARSKGTYSSAQYARIARRRGPNKAAVAVANSMLNVAWHLLTNGELYQDLGADYFESHNDPTVQVKRLTKRIEALGFDVTVTERVA

SEQ ID NO: 201393 - protein, 347 aa, unidentified
MRFYNKNHDFYCGIDLHSTKMYLCILDKDGEKVLHRNMKASPGAFLKAIAPFRENLVVSAECIFCWYWLADLCEDEGIPFILGHALYMKAIHGGKAKNDRIDAFKIATILRGGTFPEAYVYPRGMRSTRDLLRRRSHLVTMRGDFLAHAQMSHYQHALEKPTARLAYKANRIGVADAFEDDSARRSVEIDFVMAGYLDLEIRALELELKRKAKAHQPESFALLKTIPGVGDILAMTILYEIHTIDRFESVQKFASYSRLVKCAKESNGKRMGSSGSKIGNAHLKWAYSEAAVLFLRCNDRGKKYLAKLERKHGKGKSLSILAHKLGRASYHMLKRKKAFDMERFMAA

SEQ ID NO: 201394 - protein, 401 aa, unidentified
MQQRLWAGIDAGKTAHHCMVVDADGQRVLSRRIDNDESALLELIRAVTSLAEGGHLTWAIDLNAGGAALLITLLLAHDQELLYIPGRTVHHAAGSYRGDGKTDAKDATIIADQARMRRDLHPLRRGDELAAELRILTSRRSDLSADRTRTINRLRARLGEYFPALERAFDYSNNQAALILLTGYQTPAALRRIGTARLETWLQNRHARKVSSVAASAVAAADTQYTVVPGEQLAADLVARLTQEVIDLDAALKEIDVMIEDRFRRHRYAEIIVSLPGFGPRLGAEFLAALGGDIALYDSADRLAGVAGLAPVPRDSGRVSGNLHRPRRFNRRLLRASYLAAQLSIRHDPASKHYYDRKRAEGKRHTQAVLALARRRNNVLWAMLRDRTHYQQPTADPATAA

SEQ ID NO: 201395 - protein, 518 aa, unidentified
MSKSRSPKRRKSVLVHKPLGVLAPRVQAVGPEHFGVALVDVSKRRIQAQVCDFYGKVLLPFDIYGQTKEGSREFFQRLKRVQNDTPLLDLIVAIERTGEYHRPFQRAAIAAGYEARIIHPLVTSHFRKTANPGEKTDPTDLGGMFRAVVTGFGLIERAIPPDYVQLQLLARHRRDLVQKASTLCCQIKESLHAIMPGFEQCFSEFWLNTIAMKIARATGSADAVIQLGSSGLTQLVERGHWQCHQTTFQKILQWAKAAPPCHPQINTLRCVVDHLDDDRLAKNRQIHDLERQLATLLARTPYVRLLVTPGINVVSAAELAGELGPIEHYAHPNAITGRAGQFPSRYQSDTVDCPNGRLVRAAHRRLRASLMQIADNLIACNHYFRAKASTWKAEKKDARWQRVKVVKSFTRIAYVIVRGNGPFRHECLQGDHYVIRKLNAFHVEHQTPVSQVLIDLRAAIEQMPETQYAHEARPWQEEQRRQASRRRGPQPLSEIILEVLARLGMGTVQSTDEGPDLG

SEQ ID NO: 201396 - protein, 349 aa, unidentified
MEAYDGPQIVGMDLHRRRSVLVRMTEDGRKLGTSRISNSPARLAAEIARAGERPRVVLEACYGWYWAADALAAAGAEVHLAHPLGVKAFAYRRVKDDVRDATDLADLLRMGRLPEAWITPPEVRDLRELTRYRQKLVGLRVSCKDQVHGVLAKLGVQVTCSDIFGGWGSAWLDELALPQPYAGKVASLRSLIGTLSAEIAVLEQVIGELLSGHDGYHAIQALPGIGPVLAAIIVAEIGDITRFGGPARLCCWAGLTPRHRESDTKVVRGRITKQGSRVLRWAMVEAVQRTPAGTAVREAKDAIIARRGPQARNIAKVAAARKLLTCVFYALRDGQARCLAARAAARQAA

SEQ ID NO: 201397 - protein, 342 aa, unidentified
MTQFKYFVGVDIASSTFTVSVGIMPWKVVLEPQEFENTEDGFQSWLDWLARHQILPHQTVVCMEATGVYGEGLAYFAFAKGYRVAVQPPLEVKRAFKPNLRKTDAVDSLQIAEYAGRYADKLGFWLPRNDVLEHIKVLLATREQFVAQNTAHKNSLRAIQRKTVKTPVAEQAHLQMIDFFKKQVQALDLEIQRLIESDPTFKQMLFLLLSVPGVGLLLASHMILLTQVSLDYKQLNSFLGIAPNEHSSGSSVYGHPTSRHFGPAAIRKLLYLAACSVIAHRDQFRSYFLRKTQEGKPSRLVLNNVENKLIKIICAVLRSNTPFNSNHVSIQPLTLKNTLTLS

SEQ ID NO: 201398 - protein, 409 aa, unidentified
MQVLYERCAGLDVHKKSITACALWFNNDGEKEKEVRSFSTMTSSLMAMADWLKQRGVTHVAMEATGVFWRPVWTILEGQFQLVLVNPAHFKSVPGRKTDVKDCEWLADLLQHGLLRGSFVPPTDIQDLRDLTRYRAELTQTQNRVANRIQKVLEQANIKLSSVASDTLGISGIRMIEAIIAGEEDPEILADLAKQRLRHRIPDLQMALHGRVRPHHRFLLEEHLNEWKALAERIQRVEKEIERRIAPFEYAVTLWQSIPGVNRVTACCLVAEIGVDIRQFPSTRQLASWAGLCPGQHESAGKRVPVATRQGNRWLRRVLCQAAWAASRKKNCYLSALFRRIASRRGVKRALIALAHTLIVIAFTLLKRRQSYFELGEQYFEQMHKDRLKNELLRRLRRLGLTVTVEAPA

SEQ ID NO: 201399 - protein, 344 aa, unidentified
MLYVGADLHKKSISLCVVKVENGKQRVLRRQTVACRQTDAIRRFFAGLGPFRLAVEATAAYEWLFQLIEDLAERLVLVHPKKLRVIAESTRKTDKIDAYVLALFLALDMLPEAYRPSPRVREHRTLVRHRHYVQGRITSVKCKLRHKLAQYNEDIVHLFSRAGREHLRKVAMSAADRFEVEQLVQQLEFFQEQLVAAERALIAFGQQAPPAEQQARKLLDDMPQIGDVTVNVVLSELGDWRRFRSAKRAVAYAGLAPGVRQSGSRRHDLHITKEGSRLLRLALVEAAWRLVGFRVPGWCQQFIRLQKRTGSEKKAIVALSRRLLCVMFAMLRSGQPYRPLAAAA

SEQ ID NO: 201400 - protein, 438 aa, unidentified
MADPNERCEPDFAAFIGIDWADQRHAWALQTTIKGAIEHGDLDHTPEAVDAWATELGRRFGGRPVAIALEQSRGALLFMLTKYAHFVLYPIHPTTLANYRLGFRPSGAKSDPSDAGLLLDLLVRHREKLRRLNPDTVETRTLQFLVEGRRKLVNDKTRYSNRLTACLKMYFPQVLDWFAEVSSKIAGDFLERWPTLPKLQKARLETLRTFFIEHHSCRPESIQRRLEEIRRGVPATHDQAVIDSCVAAVTALVPLLRELRRAIQSYDEQIETTARQHADFVIFDSLPGAGAALVPRLIAALGTQRDRYSSASELQCYSGIAPVLASSGKQSWVHWRWACPKFVRQTFHEWAAHSIGSSAWASAYYTQQRAKGKTRNTAVRALAFKWIRILFRCWKDHTPYQEELYGQALARRAARTNGAVNVQWKTGEGLSKISGFIS

SEQ ID NO: 201401 - protein, 386 aa, unidentified
MLYVGVDISSESFDVCFYLPEKKKMKSMKYKQDREGFREFLKELNAYKDEKQVGMEATGSYHSNLYGFLRSKGIDVQLLDPYTLSKFMKAMSRSKTDKKDAKSIAVAMYRIFDLLSVSQVPEEEMSAFRDLVRMRSTVVANCSDLQRKLKSKLKIHMPELLKTFRSVSSPVLLHLLSVYPSREEILANEEDAVKLLSSHRNWSEKKAREVIDSLKDSIGKPDTFGTYSTITSTFIAEIKLLKDHVEALNEEIKRFLEKFPDNPLRTIPGIAEVTEAEIVSEVGDIDRFSSGKAFVSYIGLDPVIKQSGNMTRGLSISKKGNKHLRRTFYHLAKNLIANTEKYRNKYEKMKKRGVKNKVALIATARAAAEMVYQLLKNNVPFDLSLS

SEQ ID NO: 201402 - protein, 396 aa, unidentified
MRNDVTIYVGIDFSKEKFNACLLMEQGVMGESEFPNSKTGYLKLTKWVKNTSELGRSFASSLVLFCGEHTGTCSIGLCEYLYAKGLKIWLESALKIKYGSGLKRIKDDKADAEMIAYYAKRFYEPGSCALFEPDSADFKTLRTLYQFRNRVVCDRVAIGNRISSGAFDCSTLVRNRMVKHHKEAQKDEKDIEKEMVKLMETSEELASNYQILISFKGIGPITAAALIIYTSNFKKFDNPRKFACYCGIAPFGKQSGTSINTKPHVSRFAHIGIKAAIVQACKSAMQHNAVIKAYAQRLYAKGKHEGIVMNNVKNKVMHIIFKMIQTQTLWEQEYQQKHMKECKAIPGKNGIGATEAAPIINATLKTSSSVVECTFLEEHSFQKNSKKTSSFSCVET

SEQ ID NO: 201403 - protein, 320 aa, unidentified
MPYIGIDVSKDSFIAAYPAKSGYTTKTFKNTTSGVRQFMTSLPEGCHCVMEATGNYSMLILYLLQQANITVSMENPQKIKHFARAMLSTTKTDEIDAKLIAMYGEKMEPAPYKIPSESIMLLKQKRTVLRQLKKQLTAMINLQHSLSVLPKQDSTAKVATEQTIKFLRKQISKLEDEITHLSNKEFKRQMELLTSIKGIGENIASALIMATGGFTYFSSAKQISRFLGLCPTYQQSGTSVNVKGHINRNGDTHLRSQMYVVACSSIRANAACREMYERLRSNGKSAKVALIAVANKLIRQAFAVVTNNRPYIDGYVSTLA

SEQ ID NO: 201404 - protein, 411 aa, unidentified
MADTAVDISGIGLFLGLDLGKEFHHARGLTGQGKTVHDKRLPNTESRLRELSDKLNAKFGTVLVIVDQVANIGALPLTVARATGCRVAYLPGLSMRRAADLYPGEAKTDARDAFVIADTARTMPHTLRAVDRDDEALAELTMLTGYDNDLAGEVNRTTNRLRGLLSQIHPTLERVVGPRLGYPYILALLERHGSPARLKKLGRGRCEVLLKAHGSRKAHHLATEIFDALAEQTLVVPGTEASALIVPGLAAQLAAAHTQRRQAEQEIAALLEALPLFHLLTSMPGLGVRTTAAVIVAIGDGTAFPTAGHLASCAGLAPATKSSGTSIRGEHAPHRGNRLLKRALFQAAFAAIGCKSDPSSRTYYDRQRARGKTHTQAILRLARQRVNVIHAMIRTGALYEPRTPDDVDLAA

SEQ ID NO: 201405 - protein, 421 aa, unidentified
MRSVMHPIACGIDVHKKKLACTIIIAESMQVEPVYHHRKFSTHNYDLVKLVVWLDHYDCHCVCMESTGKYWIPVFNYLEDRDFNIVITHPKYVKSPKGKKTDFLDSIHIAELFQMGEVQPSYIPNKEFRQLRDLSRYRYKITNFISSEKNRVQNCQTVSNISLASVVSDPFGVSASAVFSELLTSSDVDEVHIRSLLRGSLKKKSEEILNSIRGFHLDDDQSYKSLLSLGHMQFLEDMKSALSSEIDKRTSKYHVYIDLATQLPGIGHLSATTLVSETGVDMSVFSDAEHFTSWIGLTPTNNASADKKKSVRISHAGTYLKPMLIQCALAALKDKKCPYFKIKYDKIKKRRGHKRAIIAVARMMAVCLYHMFKDLKDFHPSDYEELMNPIPPKPRKQDIQDALELLQSVGEYKITPILAAS

SEQ ID NO: 201406 - protein, 392 aa, unidentified
MYIVGIDIGKNHHEASIVSPEGKQIGRSLRFATTHKGADSLMSFIFKNIGNSPCVFGMEATGHYWYPIYSFLKAKGYTIYVINPIQSDSLRKMYIRQTKNDSIDSFLIAEVIRFGQFGTTSMADENILAMRQLCRYRDSVISSRTEIKLRIGTIMEQIFPEYEKQFSSLWVSTSMGILEKYLTPENIENAPIDELFEIIKDKSHNRLTKAKAISIKEAAADTFGIKIAQDAFSFQLKQLIDRMNFLDKQIEALDIEIMKYYEQFDCYLHTIPGIGIIAAATILAEIGDINRFKSSSALVAFAGIDPTVRQSGEFNSTHNHMSKRGSPYLRHAIFLAATTCSFHNSPLNAYYKKKRDQGKHHLTATGAVARKLTTVIYAVLRDSKPYEPKKFC

SEQ ID NO: 201407 - protein, 345 aa, unidentified
MDKIIRIGMDTSKHVFQLHGVNAEEKSVLREKMRRKEMIDFFTTCPPTLVAIEACGGSHHWARLLASFGHEVKMIAPQLAKPYVKRNKNDAADAEGLCEAMSRPTMRFVPVKTVDEQAALMLISVRTRLIANRTQLANAIRGYANEFGVSAAKGLAHIPMLLERIQADATVPELAQELFMSQAEEYAQLEKKIADVEAKVKAWQRNDERSRRLNTIPGIGPIGSALLIMKTPAPELFQSGRQFAAWIGLTPKDHSTGGKLRLGGITRAGDEALRAVLVAGATAVIHHARRSGKASQWLAELLRRKPPKLAAVALANKMARIAWKLMISGQTYSAQSGAALTGCAA

SEQ ID NO: 201408 - protein, 608 aa, unidentified
MSTTTALDRIGVGIDTARYGHRVSFLRPDRQPAAKPLTVMENRDGYESLKECLNRLHQQHPQAHFHVRIDAAGQYAVNLELFLRDLKLPMTISVGEPKRNKDYQKAHFPKRTTDDTESQAMARFAVVELPDATPAPSDPMILLREVAGRLQAQVKQTTRAINRLHNLLARVFPELATLTEDIGVGWVLKLLDKYPTAERIAAAHRSSLEKIPYLPAEQAEALHQAAQQSVASLRGDVAEALVRDLVEQLRHSQRAEEKLRQMLIAAFADLPDSPHVQVLTIPGIGDATAAVLVAKIVDIGRFATPNHLVSYFGVFPEESSSGVDKHGKPLPPGTLVMSPKGNDLVRGYLWNAARAAIRWNPAIRALYRRLRARGKRGDVAFGHCMRKLLHLVYAVWKTNRPFDEKHFPWDGSSDTSLSTTTPLAADADATPSANENAVGHKRDLPAEPVVTTAASTVEPAPPAVKPAPQGTVATRPKVDFACLREHVTIEQVLQHLGLFASLRGRGQQRRGPCPVHSQPTAPERTFSVDLGKNVFQCFHADCGLKGNVLDLWAAVHRLPLYEAALHLAETFQLPRNREEEPVMGTRSPRTETARQSAPAAGPEAGGCE

SEQ ID NO: 201409 - protein, 360 aa, unidentified
MEKITRSVSGAGTVRVGVDLAKRVIQVHAVNAAGKVQTTRALRREQFIEWCAQLPAGCMVAMEASSSAHHWARKLVAMGLDARIISAQLVGPYRLEGHTGKNDANDAAAICEAASRPQMRFIPVKSVEQQSMLCVHRLREGIKADRTACINRIRGLLAEFGLVVAQGAAELQDVLSEMLEDAGNELGTLARLTLQRAQTQWHELDAHMAWCDERIAAHAKTNPTVKAAATLIGIGPVGASAAVATVGDFKQFKNGAQFGAWIGLTPRQHSSGGKSKLGGITKRGDTYLRTLLIQGAKSAVMTAHRREDRISQWAVALRERSGWQKAVVALANKNARILWAVMTKGEAFDANHLSVKPTSA

SEQ ID NO: 201410 - protein, 430 aa, unidentified
MTVITIAQNTPVLVAIDIAKARHEVLIAVPGKKRRRRLTVLNELADFTRLIAALKDYGHPVRAAFEATGNYHRALAYHLATAGFEVKLVSSVALARTREALHNSWDKNDPKDAQVILHMMEIGNEQFYHDPLVRGTNDIQELSKTHDIVSKSKTELWHRILTHYLPLYFPEADRFHRSSRSDWFFAFLERYPSPHFISAMSKDAFIADAWDVVGRKVAKERLLADIYETSKVSVGLPVGLDSDAISMFRLVLGEGRSLIAQRNQIEDRAVALLKDLPDYQLLTSIPGIGPINALTILAEAGDLRRFGHHRQFLKFCGMDLATIQSGTFRGQTKLSKYGNARLRRTLWMAGQVAILQRANSFRDKFERYITKDRHNTHLRRKAYTAIAAKMARTVHGIIKNGEPYRPFFEGVIDRRRTFLCKGRRGSELTS

SEQ ID NO: 201411 - protein, 367 aa, unidentified
MKQVTTYVGIDAHKKDLFIAMLIGNQTTPVTWQLANEPQAVRRLVRKLEREAPGPVQMCYEAGPCGYALQRQVTTARVTCQVIAPALIPRKPGERIKTNRRDARKLVELHRAGLLTEVRPPTPEDEAVRDLCRARDDAREDLQRARHRLGKLLLRRGLHFSGRNWTQAHRRWVDGLEWTHAAERVVVDDYWLAIDHLQARLIELDARLTEIAQAEPYREPVGWLRCFRGIDTLTAILILAELHDFRRFQSPRALMAYLGLVPGEDSTGEKHRRGRITRTGNTLVRRLLVETAWHYQHRPSIGVALTRRRKGQPGRVIAIADKAQQRLCRRFRRLMEQHKPAPKVAVAIARELAGFLWAALQPAVPAR

SEQ ID NO: 201412 - protein, 346 aa, unidentified
MLYAGLDLSRKRLDFHLLDREGATVEVGACPPDADGLHGLTERVDRHGAPIRAAIESMNGARFVHDQLELAGWQVEIADAQKVKGLAPLACKTDRIDAWVLAQLARRDLVPAIWLPDPQVRAERERARWRLHLVRHRSSLKQRVHAVLLTHGTPCPVSDLFGVRGRQLLARLGLPEPWQATIEASLRLIDDLDREIGDCERELRRLGADHRYVPLLCTVPGISWVLAYTIAAELGDINRFPTPRKLAGYTGLCPRVYQSGDRDLRGPLAKQGPRYLRWALVEAATHACTHPIYRERYQQTKARIGKQRGAKVAQIDLARRLSEAIWHMLSRNQAFAPKGATDPLAA

SEQ ID NO: 201413 - protein, 397 aa, unidentified
MIAVGIDISKAKSTVAVIDSDGTVLASPFTMAHTQPEMEAFVSYLKGLGEPTTILMEYTGHYHYPVLKKLQDEGFPVCIVNPYQMKKYGDVEIHKAKTDKKDALRIAAYALEKSYKLVPYSSMEQKYEDLKFLSRQYNQRISYVAKLKVQLIALLDQTMPGITRILPLNSRNPEKCALLLFIKRFKSFDEIQRIGKARFLASYDVLAKKTSERSASSKGLSIYELAVDSITTRGEDPYIWLSQNQCVDLLSTTQNAADEIISQMRNIAETIPEYKVLRAMHGVGDRLGPIILAEIGDVHRFHSGKALNSYAGNDAPPYQSGQFESRNRHISKRGSSALRKACYEVMQALKLIKPQDDPVYLFMLKKEQEGKPFNVAKMAGVNKFLRIYYARAMELYK

SEQ ID NO: 201414 - protein, 354 aa, unidentified
MIEKLSSVIAVIGIDIGKNSFHVVGLDGRGAIVLRQKWSRGQVETRLSNMPACLIGMEACVGAHHLSRRLKLLGHDARLMPAKYVRPYSKGQKNDFRDAEAIAEAVQRPTMKFVATKTADQLDLQALHRVRERLVSQRTGIINQIRAFLLERGIAVRQGIRFLRAGLPGILATPPDVLSPRMARVIEELADDWRRLDERIEGLSSEIEALARQDSGCERLMSVPGIGPTISSAMVAAIGTGEAFSKGRDFAAWLGLVPRQISTGDRTILGKISKRGNRYLRVLFVQAAWVVLIKPKSWERYGLKAWIEAARKRLHRNVLAIALANKLARIAWSVLAWGRNFVARKTDDAAAQSV

SEQ ID NO: 201415 - protein, 330 aa, unidentified
MNAAGIDVSAKTVTLVISREGRTGKPREFKNTPQGHTALSNVLRKTRVTRVCLEATGSYHLDLAVALDDAGLEVMVINPKAAKEFAGAMQTRSKTDAVDATLLAEFAQRMPFKPWERPDDLALGIRACARRIAALNKQRTQTKNQLHAAQQTALTPDFLLANLRHNIEYLDAQIEHLRQRVLDLIAADAHLQQSFDLLTSITGIAAASAIQLLGELLVLPPDMKAKQWVALAGLDPQVHDSGSSVHKKPRLSKAGNRYLRIALYMPALSAASHNPHVRGYYRHLIADRGLKKIQAVCAVMRKLLMAIHAMLKTRSTFDSRRFYSLTETTA

SEQ ID NO: 201416 - protein, 404 aa, unidentified
MEQFSRIGIDLGKNVFHIHALESECGPAVTRKLSRTGMGKYFASISPCLIGMEACGSAHYWARELIAMGHDVRLMPPTYVKAYVKRGKNDAVDAAAACEAVSRPDMRFVAIKSEQQQAILMVHKARDLLVKQRTMTVNSLRGSLAEFGVVVAKGVHRVEELAEKAAAARLPETAMLAANVLLEQLVRFDAAIADLTRQIGKAKSDNATARLLTEIPGVGALFASRVTASVPDATVFKSGRDFAAWLGLTPRQNSSGGKARLGHISRMGQRDLRRLLIIGAMAVVRWAARRGAPAGSWLARMMVRKPRMLVAIALANRIARIAWALMAKGGVCKYAGILQADAYAGFGVFATPRASRGRSPRRRAGATDAVSSSSLPTSPGRRRDRRRGMPTGRRWRARQCAGST

SEQ ID NO: 201417 - protein, 342 aa, unidentified
MSVYVGIDVHRKRSQVAVIDQAGQVLANRNVPNGVQPILKVIGGLPPGTPAAFEACYGTSWLAVLLEDYGFDPHLVHPSRCKAIASARLKNDRVDAAILGQLLRADLLPEAWIAPPPVRALRALLRHRVALVRLRTRLRNRIHAIVADYGHDRPAGGYWTGPGRAWLASLNLPAVSRELAGDYLGLIDALQGRIDRLDWEIRQRARPGPRVKVLTQLPGVGPFTALVILAEVGDISRFGSARQLASWAGLTPTVRGSDRVAHYGHISKEGSVWLRWVLCEAAQTAKRSPEFAAAFQRIAKRRGKKIATTAIARKLATRAWHLLADAGHAAAPQPATPPAAAR

SEQ ID NO: 201418 - protein, 361 aa, unidentified
MAQVRSWAGLDVHARSVVAVTVDGASGEMRSRRLPGTTSEVVAFCASLPGPTRAAYEAGPTGYGLARALQAAGVGCVVAAPGKIERPAQDKVKTDQRDAERVLRLLMIDGLHAVRVPSVEEEALRDLVRAREDLRGDLMRARQRLGKLLLRHDILYDERASTWTAHHRAWLSRIDLGGGAQLTLLDYLGAVDALVIRRGVLENSITEIVPTSPWAQTVARLRCLRGIDTLSAVGLCCEVGDFERFERPGRLMSYLGLVPCEDSSGPRRRQGAITKTGSRHARRLLVEAAWQYRKRPARGKALERRQDGQPAAVIAISWQAQQRLYRVWRRLEGERGKRRTIVAVAVARELAGFCWAITKAD

SEQ ID NO: 201419 - protein, 358 aa, unidentified
MNEGSCVGLDVHARSVVAGVIDMGSGEVRSLRVPPGNEGTVAWLKTLPAPVRVVYEAGPTGYGLARGCAEAGISCVVAAPSKIRPAADRVKTDRRDAERLARLLRLGEITPVRVPGPEEEAARDLVRAREDARGDLMRARHRLSKLLLRHGVVYEATAWTRAHDAWLRRNRFGGGPLAIVFDECYARMLDAKTRRDSLDAAIAELAASEPYVDVVERLVCLRGVSTLTAFALTVELGDWNRFRPESLGAFLGLTPSENSSGERRRQGGITKAGNSHARRLLIEAAWHQRSAPRLSVTLERRRTGKSLAVRAQADRSARRLHGRWGALEARGKPRLIVVVAVARELAGHCWALATMTME

SEQ ID NO: 201420 - protein, 357 aa, unidentified
MTQVKQLDFTGTTIFCGVDVHKKNWRVNIQDVEFELEDFSQDANVVLLHKHLNRKYPGATMKVCYEAGFSGFSAQRWLSQHGVDCQIVNAADVATTDKEKRQKSDKIDARKLCEHLQSKKMKGIYVPTSQWEHGRSLVRARARIVSNQTRCKNRIWQLLYFSGLSFPQDYEAGQYWSRNFIKKLQAIDCGTEELKITLGLYIKDFLQTRRLLLEAMRAIHKLCKQPEYEKQITLLRSIPGIGKINAAVILFELQDINRFKRFDNLCSYVGLVPDTHDTGETKKSKGITNRSNQYLRMALVESSWSVVRKDPALLMKYKKYCRTMEKNKAIIRIAKHLLSRINYVLKNKKEYVSGVVA

SEQ ID NO: 201421 - protein, 412 aa, unidentified
MKCFVGLDVSSTKLDVCIMLSDTTTPFTASLTNDLVGASEIKKQILELNDSYSFERIVIGMEATSLYSFHPAMFFHEDSDLKALKVEVMVEQPNKIKKYREAFEENKNDTLDAFYIADYFRIERFSPAFLKEEKYMALQHLTRTRLQLIEQLTKTKQHFIENIYYKCNTLSTEIKNENLSTNLWSSTIISLMTEDYSLDELATIALEDLAEFLQKLGRGRFKAPEKLAKAIQAAIRGSYRLSKLQQDSVNVILGLLAREIRNLEQMIKDIDKAIEDMVEVIPEYQCLTSVPGVGKVYAAGIIAEIGQIERFKDHPQVAKYAGLNWKQYQSGNTNSQNTELVKRGNRYLRYYLVEAANSVRRHDSEYQTFYMKKYQEVPKHQHKRAIVLTARKFVRLVDQPPTLYATKKAYGR

SEQ ID NO: 201422 - protein, 319 aa, unidentified
MFNLGIDVAKAKLDCALRLPNGKHRNKVVENNHQGFTALHAWLLKHAAGSPRVCMEATGTYWEGVAEYLAGLGMVVSVINPAQIKAFSASRLVRTKTDKVDAQLIADFAHERQPEPWQAPSPAEQSLRALVLRLDALQAMRQQESNRLEVARAAVRQGIEDHIAWLDAEIKALILAIRRHIDDDPDLRGKRELLDSIPGLGERTIPVLLSYYANPERFDSAKQAVAFAGLDPRQHESGSSVRGKPRMSKVGHSFLRKALYMPAMVAVHKTPWGKRFGQRLRDAGKAPKLIIGAMMRKLVHVAFGVLRSGKIFDPALHAA

SEQ ID NO: 201423 - protein, 400 aa, unidentified
MQLWAGIDAGKAHHHCVVIDADGNRLLSQRVPNDEPALFQLLAGVLELADGDEVVWATDLNHGGPALLIALLVGHGQNILYIPGRTVHHASKIYRGEGKTDAKDAAVIADQARMRTDLQPLRAGDEISTGLRLLTARRADKAADRVRAINRLQAQLPEYFPALERAFDYSRSKAALLSLTKHRTPDGIRRAGEARIHAWLKKNGARSSAAVAAAAVEAAKSQHTTVPAQHVGEGIVAALAREILILNEELAKLDALIRDKVTEHQHTQVLLSMPGFGPVLAAEFLGATGGDLTVFQSADRFAGVVGLAPAPRDSGKISGNHHRPRRYDRRLLRVFYLSGLSALKSCPASRGYYDRKRIEGKSHIQAMLSLARRRLNVLWAMLRDGTTYSPAPTQEPRLAS

SEQ ID NO: 201424 - protein, 355 aa, unidentified
MDSKKYIGMDVHKESISIAVRNAAGKVVMECVIETKASMILQFIDGLRGDLHVTFEEGTSAAWLYDLLKPHVTKVVVCDPRKNASMREGNQSDKIDARRLAELLRLNHLNPVYHGEHGLRSLKELVRSYLTITKDLGRVMSRVKAIYRSWAIPCTGKQVYAPRHRAEWLGKIGEPGVRRRAEFYYQQLDALRMVRQQVRRELLAEGQKHQAWKRLCQIPSIGPIRSAVLLGILQTPHRFRTKRQLWTYSGFGIETQSSADHRSVNGQLQRAKKQISIRGLNRNCNHDLKNLFKGAAIVASSKPGPFQEFYTALLTKGIRPEMARLTLARKIATIVLIVWKTGACFDAQHLKPQTA

SEQ ID NO: 201425 - protein, 329 aa, unidentified
MNGSKNVVGIDIAKRVFQLHSIDMETGEIVSLQLKREQFLEHFANRQTCLIGMEACGGAQHWARKLTAMGHQAKLLPGKAVKGFVTGNKNDRHDARAIWTAVQQPHVKAVAIKTEEQQAILALHRMRSQLVKFRTAQINGLRGLLTEYGEVMPQGKAGVRKGITEALARLSDRLPAMVIDTLREQWARIGKMDEEIATIEQRIKRWLKNDDACRRIAEIPGVGPLTATAAVAIMGDAKTFKSGREFAAFAGLVPRQVGTGGRIKLLGISKRGDTYLRTLLIHGARSVLTHAKDPGPWVTELRQRRQATTQFGLSTEILAQGYNRNVHVE

SEQ ID NO: 201426 - protein, 397 aa, unidentified
MYIVGIDIAKRKHEAAVIDGEGAVIIKPFSFTNNCSGYNRLLAMLAKAKLPLDEVSFAMEATGHYWLALFTRLQKEGFRVQVINPVQTNSIRSFYIRQAKTDPRDALLIAEVIRFGHFSESTLHPENIYELRELCRGRHAIVSMQADVKRKVVALLDQVFPEYETAFTNLFGDTSMAILQACPTPKELSEMPLEELCYLIEVSSHKRFRMAKAQELQALARNSFGFAMAGDVFSTMIRLYAKHLDFLKQQVREMDRKIAEIMETLDTPITTITGIGPTLGAYILSEIGDISRFSSAAKLAAYAGIDPTMRQSGEYNGVRNRMSKRGSPYLRHAIWLATSSAVLHDPALKLYFQKKRDEGKPYMASVGHACRKMVSIIYAVMRDNKAYTPCIPNEISA

SEQ ID NO: 201427 - protein, 320 aa, unidentified
MSDSSVMIGIDVASEHLDVVAIGAAIPLARYGNDPEGHSALAEALVAIEAALVVMEATGGYEAALACALQAAGLKVAVINPRQARDFARSMGRLAKTDRVDAQTLAELAATLARRPDAERFLRPLPDAVQQDLAALVTRRRQLLTMLLSERQRLRLAVAVVRPSVEAVIEMIRKQLDDIEAQMTDHVHRHYAELDTLLQSAGGIGPVASASLIADLPELGRLNRRQIAALVGVAPYAKDSGQHHGRRRIAGGRFELRRAVYMATLTATRHNPVIRAFYERLLATGKLKKVALIACMRKLLTILNAMAKTRTKFDPLHAHT

SEQ ID NO: 201428 - protein, 388 aa, unidentified
MFHVGIDISKFKHDCFIATNAGDKIGSFEFKNDHDGFQTLKKELESLGEQSQIKIGFESTGHYGINLKSFLSKLGYTYLEFNPQLTSKFSKATSLRRAKTDKIDAKLIASMLGHFDYKSLHTSFYHENDLKELVRLRDKYLESRSKELVNLTNILDKVFPEFKPFFRNTLGKTPMYILKRFKTKEKIANLNNSHYETLRKMSMGKFNYPRFSKLRHLAKTSVGVSSEVYEIIIPIIIDNYYHFNDLIEQLDQQITTLYNKTGSLIHTIPGIGIITAASIYAEIGNINRFNNAGQLTAYAGLDVSVSQSGLKEHRGNIVRRGSPLLRKKLFNYSFISLRFIPQYHDYYHRKKSLGKHHKVVLIHLCRKILRMIFHIESNKTSFNINKVK

SEQ ID NO: 201429 - protein, 399 aa, unidentified
MLAVGIDISKSKSVAAILNQDGSMHTSPFEFHHTQPELDAFIKYILNSKQSATILMENTGHYHYPVLKAFQEAGLPVCMVNAYQIKKFGDMDLRKAKTDKKDAVRIARYALEKSYSLVPYTSMEQKYEDLRFLARQYNQRMLTLKTNKVFLLNLLDETMPGITNILPLTTRTPETSLSVLFINRFKSYDRIKKMGKSRFLDAFEKIARKSRNRQTKTYGLAIYEAALRNITTRGENEYTLAAQDQCLELVCESQKAADSIILKMKTLAETLPEYAVLRSMAGVGNRLGPLILAEIGDIRRFHSGKALNAYAGNDAPPYQSGTFESHNRHISKRGNAALRKYCFEVMQALKLTRPQDDPVYLFLLKKEQEGNPYNVAKMAGVDKFLRIYYARAMETLKQQ

SEQ ID NO: 201430 - protein, 401 aa, unidentified
MRRVKGKRSASSIVGCAPKCAEPHAETPEGVLPQTFRGGRPVSETITSFVGLDVHKDSTAIGEAEAGRENPDLGQLLKALKSLGKPETMLVVYEAGPCGYGLARQLRSRGYSCEVVAAGKIARRPGERIKTDRRDALTLARLARSGDLVKVIVPDEGDEAMRDLSRAREDGVRARLKARQQLKALLLRHGHRYGGKSSWTLAHERYLAAVSFAHPAQDIAFAEYRQAVREGHERVERLTEALRTQAEHWRLKPLVAGLATLRGIDFVAAVTLTAEIGDFGRFAHPTELMGFLGLVPSEYSTGDTRRQGDITKTGNSHARRVLVEAAWNYRFPARLSRVLQIRQEGQPKAVREIAWRAQLRLAHRYRRLSSRKLHPNKICVAIARELAGFLWDIARQVKLAT

SEQ ID NO: 201431 - protein, 423 aa, unidentified
MSAVDREVLNVEMEVIVDRCAFLDVHRDTVMACARTPDGHGGRREEVTEFGTTTSQLLALADWLAERRVSLVGMEATGVYWKPVHWVLEASVPEVWVINARHMRNVPGRKTDVADAIWGASLLEHGLVRPSFIPPEPFRALRDLTRYRKSVIEERARESQRLHKVLEDAGVKLSSVASSVLTKSGRKMIDALIAGQRDPEVLAEMAKGRMRSKIPQLQDAMAGRFNEHHALLCRAMLARIDQSDATVETLGVRIDELLDPYEAAVTLLVTIPGVARRSAQVILAEIGADMSRFPTAGHLASWAGMCPGNNESAGKHRSGRTRHGSKWLRKALIEAGQAAGRSKDTYLAAQYTQIRSRRGPQRAAVAVGHSILVIAWHLLTTGEPYNDLGGDYFDKRRNSAARQRRLVAQLEAMGHRVTLEPAA

SEQ ID NO: 201432 - protein, 399 aa, unidentified
MVNVGVDLHKTQFTVCVRYNGEEKFDQYSTTEEGYADFLSKATEWQTIGEEVRVGVESTGNTRYFKNRMEVAGIGVTVVNPMKFKVVNESVNKTDKRDASTIAEFLEANMLPESKLCSRESEQLRRLLKVRTMLVKTVTVIKNQIHALLLSEGLPDVKSAALQSKKGRKETLNALNQCINGLVAQPLLEMIDRLEENVNSIEKQLRILVKGDRTVELLMTIPGCGEICAWTIRAYTDDIKRFANPKKYASFAGLAPWVQNSNETIRHGRITKRGPKELRTALVQVVMGLRRMKAKTITWHMIKRYDLIKQSKGSGKAIIATARKIAVIIWHMLTREEMFQLERMTDPKLVKKSATMRKTMGEIIEESQIDLQEKPVKVLNITKIVKKTGVARKQKKKVG

SEQ ID NO: 201433 - protein, 348 aa, unidentified
MALTIVETRAITGGVDTHADVHVAAALDPVGGLLGVREFPVTPAGYAGLLGWLGGFGTVCLVGIEGTGSYGAGLARHITAAGVRVVEAGRSDRQDRRRQGKSDPLDAVSAARAAQSGRARGAPKGRDGSVEAIRALMVAKRSARAERTQTTSQARSLIVTGPDDVRARFARHTVAALVAETAALRPRPGSTVGYATRIALRELGRRAEFPGGQLERPGELIVPLVTARAPGLLALYGVGPDTAALLLIAAGDHPGRLRSEAARAHLCAAAPIPASSGKRTRHRLNPGGDRQANHALWRIVITRMSSHPPTRAYVERRTGEGKSKTEIIRCLKRYAAREIYPQLRAAAD

SEQ ID NO: 201434 - protein, 376 aa, unidentified
MGTPSAQTLDDVGVRKMFQELEEVPMTMVGGLDVHRQQITFDYVDDDGLVHWGQIRPATRKTLRGWLAEHCPDGNGEFALEGCTGWRYVSEELAAAGLGVHLGDPAEIAVLRGPKKRAKTDRADAKLLRTLLLEGRFPESWIPPAHVAEIRSLGRLYYTLMDERRAWQQRIHAQLFHQGCPPIKALLSASGRDALARAPLSAAGRQYVDTALRRIDELSAEIEPLRTQLANFARRQRGCQALQRHYGIGWLCAAIIWAEIGDTRRFTSSDQLVRFAGLDISVYSSDSKRSPGHLSRQGSPELRWAAFEAAKCAARRGSPDYAYYHRQAAKHDGHNGKNPTLAVERKILRRCYHTLRDLGDAALALPDTRPQQEVAA

SEQ ID NO: 201435 - protein, 403 aa, unidentified
MTIFVGLDWGGSSHAVCIVDSVGKILDHFSVAHDRDGLVDLVARLRRYGPPGTTPIAIERPSGLLVDVLVEAGFAVTAIHPNAVKACRPRYRAAAAKSDAGDAYILADILRTDGHRLAPLEPQSDAIKALRALVRGRDDLIATRLVLANQLRALLESFWPGPAGLFADIASPISLAFIQRYPTPESASRLADKRMAAFLAQNQYCGRRSVADVLGRLRSAPSPIAAEVEADAKGELVRAIASTLESLVTQIAKLSSRIEHAVAELPEGRIVMSFPRAGKICAAQITAELGDVRTRFQSEDHLAAEAGVTPVTYQSGKSRGVAWRWACNKRLRAAVTCFADNSRHASPWAAKVYQDARTRGCRHPHAVRILARAWLRILWRAWQDRMPYDPQKHTAARAICAQG

SEQ ID NO: 201436 - protein, 296 aa, unidentified
MEVQTIGIDLGKSVFHLVGLNRSGEVVMRKKFSRAQLLRFTANVQVGLIGMEACAGSHFLGKALRDQGHEVRLMPAQYVKPFVKTNKNDFIDAEAIAEAVNRPSMRFVPIKTDEQLDMQSLHRVRERWIMRRTAVVNQIRGLLLERGITVRTGRCHLDAALPGILEDGSTSLSGALRFLLAELKQELEQLAVHIEQAEALIQRAAQQSEACQRLDAIPGIGPLTATALIAAIGNGQAFRKGREFAAWVGLVPREHSTGGKQKLLGISKRGNCYLRKLFVQGSLPEAKCIGHPLRLT

SEQ ID NO: 201437 - protein, 364 aa, unidentified
MNSVCNNTELSSREGTRCQFNGSTGVIKLGIDVHQQFYVVVLQEGGTNPKPPQRFSKEGFLHWAARLKQHGGEVHAVYEACGFGFGLQRQLSALGISCHVVCPQKLDEHNKRVKTDRLDAKALCLKLDRFVQGNRDALALVRVPTEQEEQLRAIHRQREQLVKARKQLEAQGRSLMVNQGIEPVRSWWKGRTFVALPVPTWLKELLANSQPILLALEQRIRALTVQLQSGADPDQPRGLGLLSSVVIDREIGNWHRFHNRRQVGSYTGLCPGEHSSGNTRLQSCVTKHGNPRLRAALVELAWRLVRFQPNYRPIVKWNEVLRKGALATGAARKKAIVAVARQLAVDLWRIRTGRVSAETLGLIN

SEQ ID NO: 201438 - protein, 411 aa, unidentified
MERIVERPGALDVHKESVTACVRVWDGRKLEEHMAEFRTTVQGLLALRDWLEALAVKQVAMEATGVYWRPVWAILEDRFELMLVNARHVKAVPGRKTDIKDAQWLCQLLEAGLLKASFVPPKQIRTLRNLTRYRKAQINDRSREAGRLHKILEDTGIKLDCVASDILGASGRAMLDALVSGTTDPEVLADLAKGKMRKKIPALREALIGRFDTEHALIVSQILAHIDFLDEAVDRLSVEIDERIAPLARQRDLLMTIPGVKQRAAEVLIAEIGVDMSVFPTPKHLASWAKVCPGNDESAGKRRSGKTGKGNKWLRATLTEAANAATRTKNSYLAAQYQRLRARRGHSKAVTAVGHSILTAAWHMLQTGELYNDLGGDYFVRQNPDRITKRLVRQLEALGHTVTLEAREVAA

SEQ ID NO: 201439 - protein, 427 aa, unidentified
MNNKLVAGVDVSKYFSDMCILAPDNTIYARVKIYHDITSMKRSLTFLEEANHTYNDKPVIVMESTAHYHRLLEQFYKKNGYDVIVINPMQSHAINNFKIRKVKNDKADALKIAQLYRLQSINPTKTICAELLDIRDLCRERRKLIKLRSSYVNKLTAFLDQSFPGYAKLFSRIYGGSSLAVLSLYPTPKDVLSARKSQLRKVIGIGAKRGKKSTYGLKKANLLIDIAKQAIEICIDRSSFDLLIKAQANMLQSLIANIKALEKVIDQLSSSNEFINHNIELLTTIPGIGRYSATVILSEIGDFTSFKRAKQLVAFCGLDPGISQSGLFTSTGNKISKRGSSHIRAILDMCTHVAVHPMRTVDPINPVLAEYYNRKKEAKPPKVAKCAAMRKMVSYIFSVLKHQKPFEIRLPQQHCESMRFTTSKPAA

SEQ ID NO: 201440 - protein, 402 aa, unidentified
MNFSVGFDWASQEHAVSVLDATGQVCWQGRVEHSADGLAELLRQLARFGPPAGLPVAIERPSGLVVDILMDAGHPVVPIHPNALKASRPRYSAAGSKSDPGDAFILADLLRTDGHRFRPLQPLSDATRALRALVRSRDDLVVQRGALANQLRALLERFWPGAAAIFADIATPIDLAFLSRYPTPHSAERLGEKRLAQFLTQHAYCGRRPVPDLLARLRTAPLSQTGELEAEASGEVVRALVAVLLPLLAQIQQLSAAIAAALSQHPDGALLQSLPLRGSVNAAQILAELGDDRTRFPTNEQLAAEGGVAPVTRESGKHRGVAFRRACNKRLRQALTTFADNSRHGSPWAAAIYAAARRRGCRHPHAIRILARAWIRVLWRCWQDRRPYDVTHHRGAQGAAAA

SEQ ID NO: 201441 - protein, 394 aa, unidentified
MKLVGIDVGKNSHHFCVMDKETGEFNVTPSSFPNNKEGFDFLINSLKPYSKKSILLGMEDTGHYHVALLKFLLSNGYTVALINPKTTDLTRKMEGGITKNDKLDTITICDVLDTPERKKQYRITKVDRFDLYEQRQLTRHHHNLKEELNVYCNRLQKSIDLVFPEFNTLFSSKYGVVYMNLLKTFGSAEAIASTDIRTIRKCFEIKGRGNRISLTPEKLKECAKNSIGISSEVETIQIKHLVSQITLIKEQIAEIDKKIEEFSITNNSPILSIPGISHFSGTSILAELGDIGNYSKPSQIIKFAGVAPYHYESSQYNAQHTAITKKGSKYLRKTLYQIILTVINNNPVFKKYYLLKISQGKGHRCAQGHCIRKLLRIIYHLLETGQSFDPALLR

SEQ ID NO: 201442 - protein, 391 aa, unidentified
MILVGIDVAKDKHDCFITNSDGEFLFDPFTIANNKAGFNDLLKKIQSVSKDFSKVKVGLEATGHYSYNILGFVLDKGFPTYVINPLHTNLFRKGQSLRKTKTDRIDARTIANMLLWDQSLQPYSLESYHNEELKSLTRYRFSKVQERSKLKTSVARLVNILFPELEPLVPTLFTASAFALLSELPGASYVADCHLTRLTHLLQEASKGHYGREKAIEIRDAAKNSIGSVMPAKSLELKHTIALIRILDDEIREIESEIKTLMDKTNSTITSIPGINYRMGSMILAEIGDFKKFKSPDQILAYAGLSPSTYQSGQLTSSYAHMEKRGSKYLRYALFNAAIYVCHWDPVFKAYLDKKQKEGKHYYVAISHAAKKLVRLIYAMEISGRPYFKVA

SEQ ID NO: 201443 - protein, 397 aa, unidentified
MSMLFVGIDVSKDYSSSQGVDPEGKKIFYLEFPMNGEGFSRFLNTVKSHCQNLSEVTVAMESTGCYHINLFAFLCSEGMACVVINPLLIANFARLSLRKTKTDKKDALTIAQFLLANRSKLSKVSYSQSSQDLKDLARERESLAVMIAGLKNDVRRLLQMTFPELEHQCKLFTETMLRFLMKFPSARAIQMAKIKEITKALIHVEGKRKRVGIGAEEIMALAKASVAPESVANEWILSEKIETVLYLEGKKKRMTEVLIDVCRSMWVDELDIITSVDGINVITGSTFLAELGDIHAFSSSKHVIAFAGLDPSIHQSGQYERISRISKRGNRHLRRIVFLMTLCVVRSQNVFREYFLRRKEEGLPPKKAILATAHKLLRVLFAMLSSKSYFRKGVVEV

SEQ ID NO: 201444 - protein, 354 aa, unidentified
MEHYVGLDVGLEETSLCIVDSEGKTVREVKVSTEPAAIRFALEGYADRLSRVGVEASSLGLWLHRELHAGGLPIIVVEARHMRVSLSTMRNKTDRNDARGIAQMMRLGWFRAVHVKNIEMQKMRTLLTNRKLLKRKLVDIENHIRGALRTYGLFVGAVGRGGYDARVRELIKHTDFVFATMIETMLDVRRAIFDGYSRLHRVVLQVVQHDPICRRLMTVPGVGPVASLSFKVGVDNPLRFTRSRTVGAHFGLTPRRHQSGTSIDYEGRITKQGDVSVREALCEAAASLLLRVRKWSALRAWGLRVAKRSSMLCAIVAVARKLAGILHRMWIDGSDFKVGFGAKVTQRLKLKPAQ

SEQ ID NO: 201445 - protein, 323 aa, unidentified
MSLSVVLGIDIAKQKFDAALLVDGKTKHKTCKNSAEGFETLTLWLERQGVEKVHVCMEATGSYGEDLAVYLHEAGHMVSVVNPARIKGFAQSELIRTKTDKMDAALIARFCLAMKPREWIPPLPEIRSLKALVRRVDSLIDMRTQEKNRIGTAHESVTFFIKDHIVYLDQEIAKIRRQIADLIGQNPHLKEKEELLNSIPSLGKATIPRLLAELDDLEKFNHVREIVAFIGLAPREKLSGSSIKGKPRLSKIGHARLRKALYMPALVSIQCNPVMIAFYKHLKDKGKNGKVIVCAIMRKLVHVIFGVLKSGKKYDPNFNQVLA

SEQ ID NO: 201446 - protein, 344 aa, unidentified
MGEIMTVGLDLAKNVFHRIGCNERGKEVKRKMLKRGQVLAYFANLPPCLIGMEACASAHYWARQLKELGHEVRLIPPQHVKAYVRGNKNDYNDARAIAEAVRRPDMRFVAVKTVAQQDVQALHRLREARVGERTALCNQMRGLLAEYGIVLPQGVGAVRKRVPELLEEAENGLSDFFRPLLGDCYQQLKELDAHIDFYTQALKEHARDNDAVQRLQTIPGFGPVVASVFHAFVGDGQGFGKGRDLSAALGLVPKQHSSGGKTVLLGISKRGDRYLRSLLVHGARSVVRRAVGKDDRLSRWINRLRSTRGYNKAAVALANKMARIGWAILRHNSRYPAPLAEAAE

SEQ ID NO: 201447 - protein, 344 aa, unidentified
MTTIDYIGLDVHKKSISFCAKAQDGRILDEGKIAAQHKDLNAWAKARPRPWVGALEATLFTGWIYDDLKPLAQDLKVAHPAMLKAIAASKKKNDRVDARKIADLLRCNLLPECYMAPSGIRELRRVLRYRNLVVRQSTRMKNRIAGLLMETGTIYNKERLHGKGYFHDLLGNLQETPASVRDLLKLSRKQLEFFETIQKRLLKGLREHGELKERVERLQTIRGIGEVGALTWALEIGEVHRFPSIGDACSYCGLTSAQRNSAGKEQRGPISKQRNKHLQTILIEAAKLAPRHNPQLAAVHERELQRGHCNRATLEVARKLVAYLMAVDKSGQPFQVRTGGAEQL

SEQ ID NO: 201448 - protein, 339 aa, unidentified
MNITAIGVDIAKNVFQVHYVDMETGEIINKPIKRANFLEFFANRPPSLVGMEACSGAHHWARKMREQGHQVRLMQARFVKAFNVGNKSDAADARAIWLAVQQPGKDVAVKTEAQQAVLAMHRMRQQLIKFRTMQMNGLRGLLTEYGEVMGRSRGALDRAVPEVLVRLENRLPKMLIDSLREQWKNLAEIDQQIHEIERRLKEWKKGEASVKAISEIPGVGLLTATAAVAAMGEANAFKSGREFAAWLGLVPRQTGSGGKINLHGISKRGDCYLRTLLIHGARVVHHHHGQTNPWLKQMGTRRPTNVVIVAQANKMARQIWAVLAKEQTFQPDHISARPA

SEQ ID NO: 201449 - protein, 388 aa, unidentified
MIYVGIDIAKLNHFAAAVSSDGEILIEPFKFTNDYDGFYLLLSKLAPLDQNSIIIGLESTAHYGDNLVRFLISKDFKVCVLNPIQTSSMRKNSIRKTKTDKVDTFVIAKTLMMQDSLRFMTLNDLDYIELKELGRFRQKLVKQRTRLKIQLTSYVDQIFPELQYFFKSGLHQNSVYALLKEAPTPTAIASMHMTHLAHLLEVASHGHFGKEKARELRVLAQKSVGVNDSSLSIQITHTIEQIELLDSQLFHTELEMANLVTCLHSVIMTIPGIGFINGGMILGEIGDIHRFSEPKKLLAFAGLDPSVHQSGNFQAQRTRMSKRGSKVLRYALINAAHNVVKNNATFKAYYDAKRAEGRTHYNALGHCAGKLVRVIWKMLTDEVEFNLE

SEQ ID NO: 201450 - protein, 413 aa, unidentified
MEVVHRRCAGIDISKTDAKVCVRIQGSASRPTAATVTTWGAMSNQILALREHLLAEQVTCVVMEATGDYWKPFYYLLEDRLTVMLVNAHDARNMPGRKSDVSDAAWLADLGAHGLLRASLVPPPPIRRLRDLTRARTALTRDRSRAVLRIEKVLEDAGIKLSSVATDIMGVSGRSMLDALIAGRDDPTQVAQLAKGRMRPKIDALTEALTGRFTPHHGFLIRMHLDLIDRYGQALTELDARIAEAITPFAAARELLSSIPGFSTIVAEVFLAETGADMSVFPTAGHLASWAGTAPGSNESAGRVKSTKTRPGNRYLKGALGTAALAASRSKQTYFSAKYKRIAARRGPMKALVAVEHSMLVAAWNMLVNGDFYRDPGADYFTTRKPGQARARALRQLEALGYRVTLEPLADTA

SEQ ID NO: 201451 - protein, 396 aa, unidentified
MIYVGIDVASNKHDVCIMSNDGEIFGRKFQIHNSSDEYKKLLSKINEAKKFFKDSNVRIGIESTGVYSSTILNYFSKFDNFEVIFINPVLTNMFQLSQAVHYAKTDSIDAEGICIYLQDKRKKLFTYTPPSYHSLQLKSLYREMIKMNKLITQSKNRLTGLVHTVFPEFLTVFPKINGNAVYFLLNKYSTPNSYKGKRAETICKLVLKEGHGRTSIDNIEKIISLSKESIGTYNHSDALLIKQLSSLISVLEEQKKELIEEMTNIIKEHFPKILSIPGIGGNTAAGIIGEIGDISNFHSSDSLLAFAGLNPLVYESGKFKALHTRISKKGSSYLRNALTLVARSIIKHDETFSKYYLKKRNEGKSYNTAICHVRKKIVRVIYSILKNNNEYKSLNN

SEQ ID NO: 201452 - protein, 407 aa, unidentified
MAPVNKVHHVHTVTRVAEMLGVDEDWLCDVATEMDQEDGLICWCGRPPTASMCQNEVVVDLRQRGPSVDQITRIGMDTSKHIFQLHGVNAAEAPVLRKKLRRKDMVALFEKLAPTVIAIEACGASHHTARLLQSFGHTVKLIAPQWVKPYVKRSKNDAADAEALCEAMSRPTMRFVPVKTAEQQAALMLVSVRDRLIRNRTQLANAIRGYAAEFGLTAAKGMAHLVPLLERIEGDESLPALARELFAIQAKEFLQLQARIDDVDAKLAAWHRTDECSRRLAKIPGVGPIGATLLRMKAPDPAQFKSGRRFAAWIGLTPKDHSTAGKVRLGVITRAGDEALRSVLVVGATSVIRHAQRTGKASPWLAALLKRKSPKLAAVALANKTARVAWKIMLTGEAYIGKSVVAI

SEQ ID NO: 201453 - protein, 396 aa, unidentified
MLSTNLQNPIDFNGQKFYVGLDVHKKSWAVTIRSLGIEIARFTQPPSADALSSYLQKNFPGGQYYSAYEAGFCGTSIHEQLCKLGIKNILVHAADIPSTDKQKKNKTDLHDSRSIADYLEKGSLKSIHVLTQEQQELRSLFRFREAKVIEVTRSNNRLKSFLMYYDIKIPETVSKKEYLSLKALAWLNFEMTTAAGTIALQELIEEFKYQRKRLFEITKQLRKQIQVLHAESYKCLLSVPGIGAVTAMGLIAEIADFGRFDDPDEYCSFLGLCPWEDSSGETIKTKGMQPRCNQHLRPILIEASWTTIKKSRTLFAYYSKHAGKDSKKAIVKVARKLALIARGVVLKQQPYQEDYLQKKKAEQSLQKEPSNRRFSSGITEQHINKQPGNALTSWPG

SEQ ID NO: 201454 - protein, 343 aa, unidentified
MQAVTTIGLDIAKSVFQVHGVDAEGKVLIRRQLKRRYVLAFFEKLQPCLVGIEACATSHHWSRELKALGHNVRLMPPAYVKPYVKRQKNDAADAEAICEAVTRANMRFVETKTPEQQSCLMLHRTRQLFIRQQTSVINAIRAHMAELGIVTPVGRKGVEQLLAIATDASDRRLTEVARACLAALGAQLRMLKAQILEFDRRIMAWHRANEMSRRLDAIPGVGPALATALIASVANPKAFRSGRNFSAWIGLVPKQHSSGGKDKLGSISKQGDRYLRSLFTAGALAVIRYAKIHGTKHRPWLTALLARRPTKVAAIALANKLARMAWAMMASGERYKEPVALAT

SEQ ID NO: 201455 - protein, 355 aa, unidentified
MERYIGIDVHAASCTLAVISEKGRKLKDFPVETNGQALVEAIRMIAGHKHLVIEEGLQSAWLYETLNPHVDELVVAGITTSRGPKSDKRDAYGLAEKLRVGNLDKHVFKAPRQFTQLREFSRTHMTLVGDVVRAQARIKSVYRSRGVMVTGVDVYSSRRRNEWLKQLPSTTQLRATRLYDHLDFLLEQKKQAEADLLREGKKHPIVKILETAPGFGPIRAARLVPIVITPHRFRTKRPFWSSCGLGIVTRSSSDWVQTADGAWIKARVPQTRGLSRQHNHFLKSIFKGAATTVITQRNKDPIHARYERLLDGGTKPTLAKLSLARMIAATVLRMWKNEEEYDPGRAGLPTQTRKG

SEQ ID NO: 201456 - protein, 371 aa, unidentified
MNSIVYVGMDVHKEQYTICCYSYETDKVEYKQTIPSDYKLVLKYMEQVRSRYDGEVTFVCGYEAGCLGYSLYHQLKEHAVDCKILAPSTMAVTNTHHIKTDKRDAANIARCLAFHTYSEVYVPDNDDNDVKEYIRMRDDQKLYLKKVKQQILAFVLRQGKRFEGGKTYWTIAHLKWLKNLELSALQRETLDEYLLTYEYLTEKINRFDERIEELASAERYEEKVKHMSCLLGIKTHTALSMIVEVGDFERFEKAPKFASFLGLVPSEDSSDTRVNRYSITKAGNSHLRRLLVEAAQSYTRGNVGHKSVALKQRQKGNPPEVIAYADKANERLRRRFYKMTLNKGVSRDVAATAIARELACFIWGMMTEHVS

SEQ ID NO: 201457 - protein, 342 aa, unidentified
MQITTIGLDIAKNVFQVHGIDADEKVVVRKQLRRSQVLAFFKALPPSLIGMEACATAHYWARELTKLGHEVRLMPAKDVKAYVKRNKNDAADAEAICEAVRRPTMRFVRVKSAEQQGRLMLHRARDLLMRQRTQVINALRAHLAELGITAAQGTAGLKELLKIIASDEDERLPVDAHASLVVLAAELQAMQTLVGSLEKRIMARHRGNEASQRLETIPGIGFIGATAIEATVTDPTAFRSGRDFAAWIGLVPRQDSTGGKQKLGPISKQGDRYLRRILVVGAHAVLRYAKQNPEKYPWLTQLLARRPFKVVAVALANKMARMAWVLMAHGGTYRAPEPAAAA

SEQ ID NO: 201458 - protein, 328 aa, unidentified
MDGRRCVGIDVSADEVVVAIAGKAERLTLANDIEGHARLVKLLTRGKSGARVCLEATGIYHLDLALALHRTPGIEVSVLNPASVRDFGRALMERSKTDRVDAGVLLAYAERMPFSAWQPPAPEILDLRAIVRRMGALTVTRTQERNRLHAAGHCAELTEAIAWDIEAHLEHLAQSLERLSEQAVAIVNAQPELARRFARLISVRGIATTSALAILAELAVLPPDMTARQWVAHAGLDPRHMESGTSLRKPTRISKAGNRHLRAALYMPAMVSTRHEPNIRGFYQRRIANGLKPIQALVAVERKLLHAIHGMWSSDTDFDGSKFFVMSA

SEQ ID NO: 201459 - protein, 364 aa, unidentified
MKDVYYVGLDVHKETIEMSVFRNWDKEPEFEKRIANGTQDLIKIIRKLKKHGKVETCYEAGCMGFNLKRELDNEGIECRIVSPGKIPRKPTERIKTDRRDARLLAKTLRAGEAAAIHVPTIHDETVRDYIRARDDVKLDMRRAKQQLLNYLLRLGYRYENNRYWTGKHLQWMKGIKFSDTIQEETFTVYFTRIVELEERLGLMGKRIREFAESERYKSNVGKLRCLKGIDYLTALALVTEVGDFQRFKNAESFMSYLGLVPREQSSGEKRRQGGITKSGNGHLRRLLVEASWHYRYHAVPSKQLVSRREGQGFETIAYADRAMRRLQRKFSKIVFRGKSKNVAVTAVSREMAGFIWGLMTGNIA

SEQ ID NO: 201460 - protein, 379 aa, unidentified
MATTKQALLNDTSVTLMLYMALELSGAKWKVAVADGKRAASQHALVAGDVGGLLLLIDKAKKRCGVQGKVRVMSCYEAGRDGFWLQRWLLEQGIDNVVVDSSSIEVNRRKRRTKNDALDAAKLYEMLVRYVAGEKRVWRVVRVPSVQQEDERRLHRELERLKRERNAHVNRIRSLAVLHNVRLQRVGGKDWSERLEQLKGQLPAGMVAEIERQSARAKLVGEQIAQLEKSRQEQLQTMIEQQQDGPLLALLKLRAIGVQTAWVLVRELFSWRRFSNRRELAGCVGLNPSPYDSGASQREQGISKAGNRRVRALLVEIAWYWLRYQPHSALSAWFNRRFGGAGKRMRRVGIVALARRLLIALWRYVEQGVIPEGAQLKRP

SEQ ID NO: 201461 - protein, 428 aa, unidentified
MRYVGLDVHKHTVHACILDSAGKKVFTGDIACTRQGLRHFAARRLQQDDKVVLEATTNTWAVVGELKPFVASVTTSNPLRTKAIAEAKVKTDKVDAEVLAQLLRCDYLPSVWEPDGTTCRLRKLTGLRASLVNERTRIKNRMRSVLAQLLIEPPVSWLFGDDGLEWLKGVELPEDERVMIQCQLQWLDLVQKQLENLDLQLQRLAYEQDKVRLLMTLPGVSHTIALSLLAALGDVSRFRDGDHAASYLGLTPSTRQSAAHCYHGPITKAGNSHARCMLVQGAQHLATHPGPLGVFFRRLAKKKNRNVAVIASARKLVTIADLMLKNNEPYRYATPYATDRKLSCIRFRATGVRRKPATNPAKGKTAAAGKGGQPARDARATRSLPEIYQGEGLPPLKTIEQLPAGEQRVLKAAGVERFVRQVHAAPAR

SEQ ID NO: 201462 - protein, 387 aa, unidentified
MNKSNRVIGLDVHPDSFTGAVLLKGKDAASARVVSTSRRVELPELEKWAARHTGEQDVLVLEASGNAFAVAERLRVLQRQVVILDSHRAGKVGKAYCANDRVDAIKVARIYLTALSPVVWQPDAKTRERREVFSAYQAVVKEATRLKQQLRSMLNEHCVRLESGFRLSHPSAINRLLKLREWTPVRAMLLEQLHRGLVSAQARRTRLRRYMAQEVLDEPELLRLTRLCGISLITLYGLSASIGDIKRFSNSRKLSAYFGLNPSVEQTGNWEGEGALKRHGRGALRALLVQSAKKLLRVNNPLQKWGLAVATRRGRNKAAVAVARKLCVAVWHVMQGHVIGAIERMTTLHTKLHKLATELGLNTIKSQGYETKEAFVQKKLYLLRSYA

SEQ ID NO: 201463 - protein, 341 aa, unidentified
MERLYYIGLDIHKKTISYCVKKVDGTVVQQGKIAAERKALLKWMEGLPGPWVGAMEATLFTGWVYDFLKPYTVDLKVAHPEMLKAITAAKKKNDRADAEKIADLLRVNLLPECYMFSEELRELRRILRYRNMIVRTAVKMKNKISGLLMEVGASYEKRKLHRRKYFNNLLERVEDVPDSVKDMLKLSRSSLEMFEAVQKKLVHTLREDKLIHERVERLMSIKGVGEVMALTWVLETGDSSRFHSARQAISYCGLCSAQRESAGKEQRGPISKKRNKHLQTILIEAAKLAPRWNPQLAALHEKELNRGNRNRATLAVARKLVEYMLAVERQQKDFVPVELAA

SEQ ID NO: 201464 - protein, 394 aa, unidentified
MKLVGIDVGKNSHHFCVMDKETGEFNVTPSSFSNNKEGFDFLINSLKTYSKKSILIGMEDTGHYHVALLKFLLSNGYTVALINPKTTDLTRKMEGGITKNDKLDTITICDVLDTPERKKQYRITKVDRFDLYEQRQLTRHHHNLKEELNVYCNRLQKSIDLVFPEFNTLFSSKYSIVYMNLLKTFGSAEAIASTDIRTIRKCFEIKGRGNRISLTPEKLKECAKNSIGISSEVETIQIKHLVSQITLIKEQIAEIDKKIEEFSITNNSPILSIPGISHFSGTSILAELGDIGNYSKPSQIIKFAGVAPYHYESSQYNAQHTGITKKGSKYLRKTLYQIILTVINNNPVFKKYYLLKISQGKGHRCAQGHCIRKLLRIIYHLLETGQSFDPALLR

SEQ ID NO: 201465 - protein, 344 aa, unidentified
MEAMYYIGLDVHKRKISYCVKDSSGKIYAEGSLPATRMDLDLWMKTLPQPWSGAMEATMFTGWIYDHLKPHAAALKVAHPLMLRAIAAAKKKNDRIDANKICDCLRCDFLPECYMAPTAIRERRRTLRYRNLLVRQMVQMKIKISSLLMEAGVSYNKQRLHKAGYFRELLASNPDIDEGLRALLRLCRETVVRLQKTESAMVRSLERDSMLIDRVERLMTIPAVGPITALTWALEVGDVQRFSSIKKAISYCGLCGAERSSGNTVQRTPLSKQRNKHLQTTLIEAAKMAPRNSSDLAMLYDKEKQKGNANRATLAVARKLVAYLMAVDRGQRNFQVVESDVIAA

SEQ ID NO: 201466 - protein, 355 aa, unidentified
MSIVGGLDIHRKQLTFDYVEVDTGRLERRRIAPADREHLAGWLSRFDGMSGVTFAMEGCTGWRYVAEEMRAAGVEPHLAEPADTSALRGPKRRAKTDKADAQLLRELLAAGRVPECYIPPSQVLEWRALLELYHDLRAEHTGWAQRIHAVCFHQGTTQLGEAGVIRGSRERLDRIVEDQLSPVGRLQVNTALAVMDTLAEHLDRLRRRLVATARHVKGARTLMDAIYGVGPMTALGCAPGSPARNGSPPPAKAVRFTGLDITVHSSDGKRSPGRLSRQGPEVLRWLLFEAAKTSARSCAPGYRYYTDVKERDDANRAALSQARRIVRQAVHILTALGDDAFTIIRQPSSSTVVTR

SEQ ID NO: 201467 - protein, 311 aa, unidentified
MEHSCVVGIDVSKDHLDVHLCPTGVAFRGAHDEAGLVTLITRIRPLSPTVVALEATGGYEVTVAATLAGAGLPVAVVNSRQIRDFARATGQLAKTDTLDARVIALFADAGRPAARPVPDQQADALGELVARRRQLVDMLGAEHNRRRLLREPRLQRNVDAHIAWLEEALRRLDDDLRTLIRAPPLWRAADDLLRSVPGIGPVTACTLIADLPELGQLDRRRIAALMGLAPIARDSGAFRGRRMIMGGRSHIRRVLYMATLAAITHNPVIRAFHQRLVAAGRPGKVALLAAMRKLLTILNAMLRDRRPWVPA

SEQ ID NO: 201468 - protein, 386 aa, unidentified
MFAQPAQLTRLFVGMDVHKDNHAAVATNCFGEKLWQEELGNSPSDFRKLVAHIRLLSVKQNLSPVFGLEDTSGSGNFLARHLFASGLEVKTVNPVLVKILRKYETHPEKSDLADALGVAKVLIEKIDTLPAFSITETTELARDLHALVKDRETIVKEQTRLKNQLHKALHTAYGSPYKTMFKNIFAKKALLFWIEFPSAKNIFSTKKRVAKPAWIIQAKKEELPTTTIPLEHQIQRKAKRLIAIWDELNEIEKETKELVEQTGQKLNTLRGCGTTLSAAVLSETKDIARFATPAKFAKYAGIAPKRYESGKKKRCVKTKSGNRRLHKALYQIALTQISNQGLLKAKEYFKKKVEEGKSKKHALVCLMRQISDIIYSMLKNKRAYYP

SEQ ID NO: 201469 - protein, 334 aa, unidentified
MENIALIGIDLGKNSFHIHCQDRRGKAVYRKKFTRPKLIEFLATCPATTIAMEACGGSHFMARKLEELGHSPKLISPQFVRPFVKSNKNDFVDAEAICEAASRPSMRFVQPRTESQQAMRALHRVRESLVQDKVKTTNQMHAFLLEFGISVPRGAAVISRLSTILEDNSLPLYLSQLLLKLQQHYHYLVEQIKDLESQLKRKLDEDEVGQRLLSIPCVGTLTASTISTEIGDGKQYASSRDFAAATGLVPRQYSTGGRTTLLGISKRGNKKIRTLLVQCARVFIQKLEHQSGKLADWVRDLLCRKSNFVVTCALANKLARIACALTARQQTYVA

SEQ ID NO: 201470 - protein, 313 aa, unidentified
MAKIICGIDVSSFSLEACIGPAGPTHSFPNTAEGIVELIAFCRQHGVELAAMEATGGYEKQPFALLWAHGLPVALLNPRAVRRFAEGMGLLEKTDRLDAGVIAWFAAVKRIAPCAPLSAEQQRLKALVTRLRQLTELQSAQRNQRLLVSETMVLSSFREVLALVASQIRTLEAAIAALIAADPLWQKLDEAFRSIKGVADRTVARLMAEMPEIGTASNKAVSKLAGLAPLARDSGKHQGKRMVRGGRRDVRAILFVVAGVVRRYDADFAAFHQRLTAAGKPKKVIRIALAHKLLVRLNAKARQVRNEFAALTA

SEQ ID NO: 201471 - protein, 370 aa, unidentified
MLDTTTFVGLDVHARSIKAVSLDVMTGEVRCATFGYDAGAVAEWVRSVDPKAKCVYESGVTGFDLQKRLSGLGVDCVVGAVSKMIKPSADRRRKNDRNDAEFLARMLSVGNVVEVWVPDDECEAARDLTRALEDARDDLSRSKQRLSKFLLRHGLVFDERTPTGRRKGNWTRAHWSWIESIRFAEGADNDVLAYYVDAVRRAAEEKARLEGLVGAEARKPRWRRRVDSLRCLKGVDTATAADLVFEAGEISRFRNARSFAAWVGLTPSEHSSGESDRRGAITKAGNKHLRKALVEAAWHYLTCSGRPKDLARGQAPDRVARRHAAKGVRRLVERREALLARGVHNNKANVATARELACWVWAVGLMAEEA

SEQ ID NO: 201472 - protein, 351 aa, unidentified
MMGLMRKAERPEHMNPRELYIGVDVHEKESQVAVYDPNGTLIEEKRLPTEKLPAYIASHPGEKHVALEAIGFIYPIHDALAEVGCDVAVANPHNIQLIAKTRIKHDKVDARVLGELLRTNFFPRSRIPDAETREKRLLVKDRVKYGVKRADLKNTVKWLLKRRGIKVKSPFSREGRDRLRSLGLREVEIRLRELELVDTIIEELDRRIRFTALRDHGARLLDTIPGVGPYTALYLSTALHGVERFPSSKQACAHVGLVPSLHQSGDKVMLGHITRQGDKWLRRNLVECARWSVRKDPHLKEFYLRVRHRKGRKKALVAVARKLVSYAYWMLKRDVTYEELCPWKTDWGVSP

SEQ ID NO: 201473 - protein, 429 aa, unidentified
MNYTQNEKIEQVTDSTMVVGVDIGSQIHYARAFDNRGRELTKRIFSFHNDLEGFNSFNLWAETLKTENKKTAVLIGCEPTGHYWFAFAKYVNDHQKRLVMVNPFSVKKIKELDDNSPKKTDSKDPKTIAKLVVDGRYSIPYMPEGIYAEIRDLVYSRDRIMKQHNISANRIQRWLAIHFPEYLGLYTRFDAISGLAVLEKAPLPKDVIALGVNGIRKIWHDKKMRGRGVTEDRAKTLVEAAHNSVGLDGGIGTKSELYMLLEEHRLWTSQLEAVNKVLEEIILKVPHVEKLLAIKGVGSITIAGFIAEVGDIRRFDSPKQIQKYAGLELVENSSGKHKGRTRISKRGRRKLRKILYQVMVPLLARNKEFRGIYDYYVTRVKNPLKRRQAMVAVSCKLVRVFYAVLTKGVEYDRFKMMSDIHRKSDIIAA

SEQ ID NO: 201474 - protein, 370 aa, unidentified
MKPNFEPGKWFMQCVGIDIAKSTFTACLCMYEFDMGCATNPIVFSNNNTGFNQFVKWSRKEALKGYPLRYVMEPTGVYYEQLAAHLNKLSLDVCVVLPNKAREFAKYEGILTKTDDMDAYTLGMLGCLDKRLKPWTPPFPIYRELRQMTRFVADINKVRTELRNHLEALAHSETAEKSIVKHYNKLIDEIDKQLVSNQKAIREKIKQEPGLSERIDRITTINGIGFMTVVTVVAETNGFALITNRKQLARYAGLDVPAHQSGPVDPKRHISKQGNVHVRTALYFPAIVSTQCNPQMKDFYGRLCARNTQSKMIGVTATMRKLLLLIYSLWKSGEKYDPTRDKPACGRQKKEAETTEGQPHGIDVGTLAEE

SEQ ID NO: 201475 - protein, 359 aa, unidentified
MNKNSMYFVGLDLGDKYSYIAILDKEGELIEETRLPTTKTSFHQRFSMLSPCRVAMEVGTHSRWASHLLTGLGHDVLVANARKLRAIYHNPRKDDRADAETLARLARLDPELLSPIHHRSPQAQADLDVLRSRDAIVRSRTLLVNHTRSIVKSSGARLPSCSANCFASKAAPAVPETLRPALSPILETIASLTQQIREYDLQVEQLCQDQYPETKLLRKVSGVGPITALAYVLTLEDPKRFLKSRDVGPAIGLVPRRDQSGDRDPQLRITKTGDAFLRRLLVSSAQYILGPFGPDCDLRRWGLKLAERGGKNAKKRAVVSVARKLAVLLHHLWKTGEIYDPFYLAKKHDQAPEAVPAAA

SEQ ID NO: 201476 - protein, 340 aa, unidentified
MTITTVGIDLAKNVFAVHCVDQHGKTVLVKPKVSRAALPELIAGLPPCVIGMEACSGAHYRARLFRQYGHEPRLMAAKFVSPYRMAGKSGKNDAADAQAICETVRRPHMRFVPVKDESQQAMLCLHRPRQGFIEEKTAKYNRLRGLISEFGVIAPQSTDALRHMVSAQKDSLPLQVQQCVDDLLEHVARIEANIAEYDRILSRMAKTDHRSQRLMELKGVGPTTACALVASIGNAHDFKNGRQLAAWLGLTLSQYSSGGKSKPGRITKAGDSYLRTLLVQGARSVLIGAKKRTDSFSRWICSLVERRGYWRAVVAIAAKNARLCWASLHYGDDFRLYSAS

SEQ ID NO: 201477 - protein, 344 aa, unidentified
MDHFGGLDVSVKETSICIVDDTGRIVKEVKVASEPAALLKVLGNPTYRFKRIGLEAGPLSQWLFSALAEAELPVICVETRHMQAVLKAQINKTDRNDARGIAQMIRVGLYRPVHVKTLRSQKLRMLLTHRKLLQSKAIAIENDLRGTLRNFGLKVGMVGKVRFEARIQELVENIPDLAVLVEPLLIVRRVLREQIVILHRRLLAIVREDEVCRRLMTTPGVGPVVALTYRATVDVPARFRKSKSVGAVFGLTCSRYQSGEIDWSGKISRCGDEMMRTMLYEAAQSMMHSKKWSWLKAWAMQIARRRGMKKAIVALARRLAVIMHRIWVDGTEFRWTREQATAAA

SEQ ID NO: 201478 - protein, 349 aa, unidentified
MDRTTYGLDIAKNVMQLHWVEAETGEIGRKKLARAKLAAYFAQLQPVRIAMEACGSAHHWARVLGGLGHQVELLPAAQVRAFVRSHKDDAADARAIWVAAQQSDIRRVPQKSVEQQAVLALHRTRQHWVSVRTATVNSLRGLLYEFGVVLRGGRQAGLKALAEQRVAIDEQIPATMRTLVDGQLNTLEQIGQRIEQLEREIAALHKKLAGARELDRVPGIGVLGSTALAATLGDAKAWRSGREFSASLGLVPAHAGTGGKVRIGHLSKRGDPYLRTLLIHGARAVIEHAKDKPKWLQQMLVRRPPNVVVVALANKMARTAWALVAHGRAYQREWQSAKPGCSTAQAAAA

SEQ ID NO: 201479 - protein, 345 aa, unidentified
MHIASIGIDLGKTTFHLVALGERNKILLRKKFSRAQLLAYTANLPTSLIGLEACAGAHFLGAALREQGHEVRLIPGQFVKPYRKSNKNDFLDAEAIAEAVTKQNMRFAQLKTQEQLDWQAMHRVRDRLVQRRTALINEIRGFLLERGITFAAQPIHLRKNLPTVIEDAEQNLSLRLRWLLDRMWQEWKQIETDVEAITDEIERISNEDARCRQLRQIPGFGPLVSTATVAAIGNGSAFRRGRDFAAWVGVVPRQYSTGGKQKLYGISKRGNVYLRRMLIHGARSVLFRVKYDTGGFGQWVHRLAQRAPHNKVIVAIANKLARIAWAVLSSGQDYRHQPLQQRAAA

SEQ ID NO: 201480 - protein, 349 aa, unidentified
MVTLGIDAHKRTHTVVAVDEVGCELGQKTTTATTSADHLEMLRWAERFGPDRTWAVEDCRHLSRRLEADLLAAGERIVRVPPKLMAHARDAARTYGKSDPIDALAVARASLRYPDLPAAQLDGPARELRLLVDHREDLVAERTRCINRLRWHLHELDPAWDPPARSLTRVKNLDATAARLAGHDGAVARIADEIVAHARDLTVRERALEREITALVAGLAPTLLALVGVGALTAAKIVAETADVRRFRSKDAFARHNGTAPLPVWSGNRERHRLSRTGNRQLNAAIHRIAITQMRCHDHARTYLKRRITNGNTKTEALRALKRRLSDIVYRALLADSQPVAPGCLAEAA

SEQ ID NO: 201481 - protein, 418 aa, unidentified
MGIIKPKKVKVVNSKTLIVTVDIGKETNMGYCRCPDKSEIKPFEFRNDRRGFTKLWEVMVKAKLANNLDETIVGFESTGAYGEPLQHFLKDKPVRLVQVNPMHTKRLKELQGNSPAKTDHKDPKVIADIIELGHGLTVIIPEGAAAELRRLTQARERAMKRRTALLNQIQDLVFISFPEFLLVMKGVKTKSAQYLLRHFTTAQDIVGLGLERLAAALQQVSKGKLGMTKAQALYEGAGQSVGIREGFISVSLEIQEMLSFLEACDRLVVLLEKEMSRRLSEVPYSHLILSMKGIGKVTAAGLIGEVGDFAKFNRSKELLKHAGLDLFEISSGKHKGNKRISKRGRPQLRKLLFFAALGTVRRGGVMHEQYQRHLQKGMKRMKALVAIARKLLCVIFALVRDECEYLENYRPQQLKKAA

SEQ ID NO: 201482 - protein, 354 aa, unidentified
MKKIFIGIDFSKEKFDATLIKAEGLKECAPSVHEVFDNKTSGYRRLVKWVKAHTEGFAADAWLFCGENTGGYSIGLSNYLYASGYDMWLECAYKIKHSAGIQRVKNDKADSRAIAEYAMRNYDKMTLHKPQSASLTCLREVFLYRHSLVRQKVALTVRRDEKRLTQEKSDARAFMSFTSKHLITEVNKAIAKCDEKIKEIIASDDELREVFDIITSMPGIGIQNATCLMVYTDNFQKFDLDSRKIACYYGIAPFGRQSGTSVNSRPQVSPFANRMIKSLLSQAALAAIKFDMNVHNYYQRLIERGKHPLLVHNNIKNKMLHILVAMVRDRVKYNPDNVYRKSNEVSLAPQVLNI

SEQ ID NO: 201483 - protein, 345 aa, unidentified
MKIVGCDLHTRYQQIAMLDQKTGELVECRLEHESGEAKAFYASLAGPVRVGIEATGHPRWFERMLAEQGHELWMGDAAQIRASVVRKQKTDARDAAHVLQLLLSERFPRIWRPSLAERDLRQLVWHRQKLVWMRNAVGNQLHALAMGEGVCRKKRLFTKKGRAELQSLGLGPWASYRRQELLTMLDQLDTSLQQLDQAVGEQAEQNPAAQRLMTHPGVGPVTSLAFVLTLGPVSRFERSKQVVSYLGLNPREHSSGGRQQLGAISKQGNPMMRSLLVEAGHTAARLDVELKQDYQRLKLRRGSGVAKVAIARKLAVRMYWMLRTPASYAQLVRMQGSPRGTLVGQ

SEQ ID NO: 201484 - protein, 437 aa, unidentified
MHHHAAGIDIGSRKVFVGLENSPVRWFETFTSDLESLKDYLLEHKVSTVAMEATGVYWYVLYDILLDAGLDVWLVDGRQTRQLPGRKTDVKDCQWIQQLHSYGLLNRCYVSDGLVKELRSYQRLREDHLRSAAMHVQHMQKALIAMNIRLPEVLSQVHGVSGMSLIRAILEGERDTEKLIALCHSKVRENKGEELRKALKGHYTPQGLFSLNQALKAYQFYQEQILECDRQIDATLQKINRDKSLPPGAGSGKRKPIRHNKPDINGLGDHLLKIFDGRDATKLPGFTDYNWLQLYAEVGSDLSKWPSEKHFTSWLGLSPGQNSSGKKNKSKSKGKPAVGQIFKQMAQSLLNSKYIGWGAFARRLRGRKGPAIAIKATARKLAAQYWRLIVKGTEFVERGMQAYQTILIQQKKKRLEKLALELHMQLVPAYLIMSCVV

SEQ ID NO: 201485 - protein, 378 aa, unidentified
MRVIKHVGLDVHAASIAVAVVDGEGIRELGKVPHDVPTLKKLLAKIGEPEELRIVYEAGPTGFGLCRALRSWGADCVVIAPSLMPTMSGDRVKTDRRDALKLAQFSFGKLLQEVHLPEPEQEALRDLVRAREAAKKSQTQARHQLSKFLLRHAIKSKTTMTNWGAAYMAWLPTLRLNHSALQHTLEEYLAEVIHQTERVRRIEGHIEKAAPGLGEEQQAVVAALQGFKGVRFLSSISIVSEIGDMTRFSHPTALMSYVGVVPSENSSGDSVRRGAITKSGNAHLRRVVGEAAWAYARGIATPGPSIRQRRAGLSPAIVEIQERADHRLRTRFRALSAKGKHRNKVVTAVAREFLGFIWAAAVQAQVEVAQRRKAQAAA

SEQ ID NO: 201486 - protein, 297 aa, unidentified
MGGVNAAVEVGKHTLEIALGSEGALFSEPNQPRAIARLAKRLAASSCERVLIEGGSYQNLLVGALRAAELPVVIINPRRVREFAKSIGQLAKTDRIDARLLARYGEQIQPPVRALADEQNQALRGLWVRREQLIEMLVMEENRLEHAPKTLHRSLRAHIDYLRKQIKQSDSDLDSAVRNSALWDKYELMSSVPGVGRVLSVALLSDLPELGRLNRREIAALAGVAPFNCDSGTLRGQRRIQGGRKRLRRVLYSATLASVRCNPVLRPFYQVCVRAVNRPRWRWSPRCTSCCSFSTPC

SEQ ID NO: 201487 - protein, 340 aa, unidentified
MKNTKYFIGLDVHKKKTTYVVRDKIGNILLEGETSTLYSDLHERLEPYLNSSIIGLESSTSYYTLYKGFLKNGYNIKVANTIQLRQLITKNDKLDAKRLSEMLRLGTFPSSYIPDEKIQHLRSLLQVRHSLIEEKTRCNNRIQAFLDRNGIMMPDQEAFGKKWRQKLLQYIGSGEVSLELRYEYDHFVYLEEKSEHLGYEISGYTKRHWKKEYRLIQSITGFGPVLSCYVIAHILPISRFSSNRKLRRYAGVVPAFHESGSKKSKGHIPKTSSRKHLRWALIQAANAAGRTNTKLGYYYRKKKKQKNNAGIAHVAVASSMIDIIYKVLTTKKPYNPKNIC

SEQ ID NO: 201488 - protein, 370 aa, unidentified
MSDLSKVFVGLDVHKDSISIGVAQAGQQPARFVGKIAHDVPKLLKQLERIAQPADMLIVYEAGPTGYGLQRALTARGYTGQIIAPSLIPRRPGERVKTDRRDCLRLAELTRAGELKAIWVPQPEDEAIRNLARAREDAVNLRTQARHQLKAFLLRAGVAYSGKTSWSKSHARWLATLSFAHASDQIAFTEYCQAVSSADERVQRLTGALSQAIAGWRFESVVRALQALRGIDEVAAIGLVAEIGDIGRFAHPRQLMGYLGLVPAEASSGDRVRKGAITKAGNAHARRLLTEAAWNYRFTPRLGYRAQRRQEGLSESIRAHAWKAQLRLTARFAKLRARNVQINKICVAVARELAGFIWAIARTTAQPATK

SEQ ID NO: 201489 - protein, 366 aa, unidentified
MKQISTVAKRGNEIFKEPKLTIGLDLRDRISHYCILDEADNVILEHSLPTTSKGIHRVFCRIPRSRIALETGTHSPWVSRQLTSLGHEVIVAHARNVRLIGESSRKDDQLDARTLARLARIDPGLLCPVRHRSAKAQIHLTVIRARAGLVSARTALVNTARGLTKSYGERLRKCGSGQMSREIAKGLSQELRDALEPLLEEIESLNERIAEYDRRIEQIAKEVYPEVALLKQVKGVGALIALTYVLTLDDPHRFRRSRDAGCFLGLRPGHRNSGMSEPQMHISKEGDGYLRTLIVQDAHYILGPFGEDSDLRRWGLKLAERGGKNAEKRAVVAVARKLAVLLHKLWVSGEVYEPLRNNHRLVNAVA

SEQ ID NO: 201490 - protein, 408 aa, unidentified
MKPSYCLGLDLAKHKLRAALAGGDGRVAFEADLPASASGREELLAQLRARVSTPEQLLVVLEATGVLHLNWSAALTQAGYAVVVINPLIARRFYPVENALRDSKTDPIDARGLCALGLLQGEKLLCKYRFHLEPERLALQRLQTVRKALRTSLTNLKKTYTSLLDLSFPELGQLLEVDGTGIRALLQKAPTPEAIAQKRLRTLEKDWKLRPKAARLKTLAADSLADPELAAAGAPALQSILQSIASLEAQLRALDKQIEARASQGPLAHSQALLQTIPGFGPTLTSKVLAYLPQEVLHSGTRRQAAARLQAFMGNEPRLQESGQWKGQTKMSKRGVEPLRTAFFQAAFSAAQHDPELRGYYLRKCAQGKCHHLALTHLMRILTRRLVAVLRSQQPYQPQEVFFLEHAA

SEQ ID NO: 201491 - protein, 339 aa, unidentified
MENNYVGIDLHSTNSYIGIIDQNGNRIFNKRVINDLNMIINTLKPFKEKIKGIAIESTFNWYWLVDGLMDAGYKLHLANVCAMKQYEGIKHTDDQSDAFWLAEMLRLKILPTGHIYPKEQRPIRDLLRRRLQLVHHRTALSMSMTSMIQNCTSINLSRYDKKNLTHHEITGLLDHPYQVMSANSINNVILEINENISKIEKEINMKVKLTQRYKKLNSVWGIGEILATTIMLETGDVRRFKDVGNYASYCRCVPTIKLSNGKTKGRGNKKCGNQYLAWAYLEAAYCMQRAYPEAKKWFLRKLNKKGRFVAIKALASKIARACYLIMKNNIEFDPSKLFA

SEQ ID NO: 201492 - protein, 318 aa, unidentified
MVKGIGVGIDVSKATLDVATSDGTVALHVTNDTEGFDCIIAALRDVSVHRVVLEASGGYERDALIALFEAGQPVVLVQPVRARNFARALGRHAKTDPIDAAVLATMAALVVDEVPLWEPTEEALADLEALVERRRNLVEVKAAEEKRLRLARTIVRADIDMFIAELKLKIRDLERRIDCLIAEVAALANDAEVLESVEGVGRISAATLLVSLPELGTLSRGEIAALAGVAPMNRDSGTWSGQRAIHGGRAQARNALYMMALVGTRWNPVIRERYAHLLSRGKKPKVALVACMRKLLIHLNGLMRMHRNGPTKSALQAC

SEQ ID NO: 201493 - protein, 411 aa, unidentified
MRVRILPANLSAGVSVMVYVGIDIGKNHHEVGAVNEEGKKLGKTLRFANTSEGFQKAMAFISAKQESETFPRICMEATGHYWLALYSFLFEQGFSISVINPIQSDSIRNTRLRPAKTDVIDAYLIADVLRFGQYEETHLADEDLIALRNLARFRMAIVDTCSDFKRRVITLLDQVFPEYEKIFSNVFGQTSKAFLKTCGTPEQCIDIPTKTLSALLKKASRGRFSSAKAQQLKDAARNSCGVKLANDAFAFQIHLLIEQIEFTEGQVEQIDAQIAFQLEKVNSVVMTIPGVGPSLGAMIVGEIGDINRFTTPSKLVAFAGIDPSVMQSGNFSGTHNRLSKRGSPYLRRAIWQAAVIASRTDPVFEAFYEKKRSEGKTHGTAIGAVARKLTYTIFAVLKADKPYEIRLQILG

SEQ ID NO: 201494 - protein, 357 aa, unidentified
MTDVRIAYGTNGVVVGVDTHADVHVAAALDPLGRMLGRLEVGTSTRGYAQLLKWAHTFSPTTTFGVEGTGAYGAGLARFLIDAGCEVIEINRPDRRARRGHGKSDPIDAEAAARSVLAGGKLCIAKRDHDRVGMIRTLRVARRSALKMRTQVGNQMHALVVTAPDSLRHQLRDLPLVKVVAVTAAARPGTVTTPSAASKLALRSLAIRHQGLTAELVVLDRELGRLTLEAAPALCDLTGVGPDVAGALLVAAGDNPERLRSDAAFASLCGVSPVPASSGKTNRHRLNRGGDRIANNALWRIVMVRLTCDQRTTTYVARRTAEGMAKRDIVRCLKRYVAREVFHALLATVPALTRISA

SEQ ID NO: 201495 - protein, 347 aa, unidentified
MSYSFHCGIDLGSRQSQVAVLDDCQAVLLNVKLPNRLDDIRRVLKPYEGKMQAVVESTYNWYWLVDGLQAAAIPVTLAHTAGLAAISSAKVKTDRRDAVTLARLLRAGMVPPAYIYPPDDRPIRDLLRHRWDLVAMRATEYRRLRLLLNQHGICEIGLGDLKAMDEEEVHGLLNHPLVRMKALLEVEHAALFTQQIALVEKQLEDMAVERPEYALLNTIPGIGRILGMTILYEVGNIARFEDHRKFCSYCRVVPGCADSSTMRRKGRNDKSGNPYLKWAFTQAAVKAVPFYPRFKSYFERHAKTHNGRAKKIIAYSITAHLIAKATYHVLKANEPFREEILFKNQSL

SEQ ID NO: 201496 - protein, 339 aa, unidentified
MALYGGIDLHSRVSWLVILDGALKVVRQIKLTNDLMEFLRVLEPYRSDLAGLAVESTPNWYWLVDGLQAAGYRMHLTNTCAAQQYSGLKYTDDRHDARWLAHLLALGILPEGYIYPAHERPLRDLLRRRGFLVEKRTSMLLSLRSAFECHTGHRVNSDTVKKWTAVEVEELLDNATVARGLTCLLEPIKVMTTQIKMLEKEVLAQAKLRDEFTLLRTVWGIGPILAMTIMLEVGDIKRFEKVGNFASYCRLVKTDRLSVGKRKGSGNAKNGNPYLSWAFSEAAHFAVRYHATAKRFYQRKLAKTNGIVAIRALAHKLARASYYVMRDKVEFDQDRLFTS

SEQ ID NO: 201497 - protein, 314 aa, unidentified
MTTLPATYVGVDVAKDSLAVCSSPTAKTITVPNTAQALDGWLAGLPATTHLICEATGRHHRMLQQLCAKHARALSCLNPARVRDFAKSLGKLEKTDPLDAAVLWRYGHERQPTPTPVPSPALQRLGDLLMARQAVTEQICAFHSRNDLLSAPTRRQLQCVIRTLTTHRVALERELAAWLDSAEGSPWQDRVYTLCLAPGVGVLSALALIAYLPELGTLNRRQIAKLAGLAPLPWESGKMKGLRRIQGGRAPVRRVLYLCAMVAARWHEPTRDHYRQLRARGKTATAAYVAVARKLLTYLNSLLRPAHAAERPAA

SEQ ID NO: 201498 - protein, 398 aa, unidentified
MYFVGIDWADLHHDVAVFDEKGQELKYFIVPHKREGLEQLKQKLLSLDPEPENFACLEETKNGLLVQFLLEAGFPVYPLNPKVVDYRRKPSGAKSDPIDARLLANIGRADLSQLKRLKPDTELISELKMLTRDQDGLIQEATRLTNKLIACLKEYYPAALEFFSKPTLPVALEFFKLYPTPDLIREATVPEIAAFLKAHKHPRPNQTAVSIWQKAHEPQLQASAPIVRAKCRLLLAIVRQLEVVKEQIAAYDEEITRLFQLHSDSRIFASLPGAAGRLAPRLLAEWGDDRERYENAAVVQALAGTSPVLFQSGKYRFARQRKSCVKPFRRAMHLFAFQSIKQVCWAREYYDAKRSQGKTHHEALRALANIWVRIIFGHVEKRYLLRRSHVYDRPRQAS

SEQ ID NO: 201499 - protein, 465 aa, unidentified
MKNKNDTIKKKKQKITIDPDWEQINPDAAGIDIGSREHWACVPPNRQPKNVRKFGTFTGELDALADWFAQCGVTTVALEATGVYWIPVFQILERRGFKVVLVNPRQTKNVAGRKSDVQDCQWIQRLHTYGLLPASFRPDDAYCVLRTCLRYRDELVTARSTQSQHMQKALQAMNVQLHHVLSDVTGVSGLAIIGAILKGERDVAKLAGMVDRRVRATQPTIQMALTGDYRSEHLFVLQCAFELHHTYEEKILACDQRIVAEVSQLPQQVDPALKPLPARKEGRWAAKDKLCGQDMRQPLYEKIGVDLTAIEGIGITTSLIILTEVGPDVSRFSSEKKFASWLGLCPDNRISGGKVLSSRTRRVINRVSDALRIAAMTLERSQSALGAFHRRMKAKLGAAEAVTATAHKLARLIYRLIKYGEAYVRQGMDDYERKFHEGKLNRLKKTAAAMGFELTAKQPVTLTVS

SEQ ID NO: 201500 - protein, 358 aa, unidentified
MLIIGCDFHSRFQQIAMADTETGELMERRLEHRNGEAAEFYTSLQKPVRVGMEATGYAQWFERILAKLGHELWIGDAAAVRAAMVRKQKTDARDARHILDLLLENRFPRIWIPTPVERDLRQLLRHRHKMVRLRTSLKNQLQALALGQGTYRKQKLWTSLGRAELEALVLDPWAHRRRQELLQMLDQLAPVIAELDRAVAEEAEKRSDARRLMEQLGVGPVTALMFVLTIGPAERFRSSKQVVSYLGLNPRESSSGGRQQLGAISKQGNSLARYLLTEAAQTAARYDEELRRNYRRLKFRRGSAVAKVAIARKLAVRLYWMLRNQSAPPARMQGTSRKPAGRPMPIVSVIGGPASSSQ

SEQ ID NO: 201501 - protein, 307 aa, unidentified
MAFKILRKNCCGLDIHKTWIFACIGITDSNGRTEYKQARFSSFSNGLRDLADWLAKNSCSDVCMESTGKYWIPVFNILEKTCWVTLAHPKYTKPQKGNKTDRKDAKWICDLYMCGMVKPSFIPPPDIRQLRDLMRYRVKLTNMLTGEKNRAQNCLTVSNLKLDDVFSDVFGKSSRSIIQYILEHPGEQFDVTPFIHRRCKHPVEEIQAAVDGVVSREQAANLKECLLHIDQLNAHRERIEAEILRLAEPYPYQLELIRTVPGFAAAPLTAVALISEIGVDMSVFPSAKHLASWAGCCPRNDQSNKKK

SEQ ID NO: 201502 - protein, 370 aa, unidentified
MHQSSTLYIGLDVHKESIAVAYVAQEHHAEVVSLGNIGTRQCDIDQLIRKMQSKSKHLIFVYEAGPCGYWLYRYLTKKGHVCWVVAPSLIPKKPGDRVKTNRRDAIKLARLMRSGDLTPVYVPQVEDEAIRDLCRAREDTIRALKAAKFQLKAFLLRHDIRYTGRATWSPAHLRWLSEVVCPTPAQQIVFQEYIRAVTDHTERLTRLEQALTDQVQTWRLAPVVDALQALRGVQCTVAVTTVAELGDLTRFDNPRQLMHYLGFTPSEYSTGERRQQGGITKTGNSHARRALVEGAWAYRSPAKISRHLQLRLEKVPKAIQDISWKAQVRLCKRYRQLSARGKNPNQVVVAIARELSAFMWAIAQEVPLTP

SEQ ID NO: 201503 - protein, 338 aa, unidentified
MKLYGAIDLHSTNNVTVVINEQDQVVYQKRLPNDLSLIAQQLSTYRASLEGIVVESTYNWYWLVDGLMEKGHRVHLANTAAIQQYNGLKYTDDHSDARWLAHLLRLGVLPEGYIYPKQERAVRDLLRKRGQLVHQRTANLLSIQSLISRTTGNSISAKYIKALDIQHVDGVLPNPDLVLALKANLAVMNSADAQIEILEKAVQDRVKLRPQFRFLKTVPGIGPILALTIMLETGEIERFASVGNYASYCRCVGSQKISNGKRKGSGNTKNGNKYLAWAFVEAANFAIRFYPRIKSFYQKKKSKSHAIVAIKAVAHKLCRACYYIIKDQVAFDITKAFA

SEQ ID NO: 201504 - protein, 428 aa, unidentified
MNYNTQNAKIASITEKTLIVGIDVGSETHFARAFDWRNYEYSKKPLEFSNSESGFATFKAWVENIAEEHGKDVVIPGMEPTGHYWFNLGAYLQDNGMRPVHVNPHHVKKSKELDDNNPNKNDRKDPKTIAALVNEGRFLYPYIPTGIYAEIRSFSNLRLQAQEEITRIKNRIARWFNIYFPEIKDVYKKPDSVSGLMVLKEAPLPQDIVKLGVDGINKIWRDAKLRAAGPKRAKTLLTAAEHSIGSQEAPDSARIELKNLLNDYEIYRKREEELMKLLEEKLSKIPYIDKLLEIKGIGLKTVSGFVAEAGDITRFDDPKQLQKLAGYAIVECSSGKHKGESHISYRGRKRLRYILYEASISLIARNEEFKEVHRYYRTRKKNPLKKMQSVIAVACKVLRIFYMILRKGVTYDGAKMLQDIKRPQIHAA

SEQ ID NO: 201505 - protein, 446 aa, unidentified
MSRRKEPPAEPAPERERERERETVGFRRRREKRERAAAFLTGAPLLVGLDLAKRSHAAWLTGKDLVPIERKMVPHSHAGLTAFLDHADRVRAKHELDRLIVFMEATSYFWQNVANLLEARGVAYRTVAPLAVDRQREIEHLTYAKSDYRDAELIARLGAGGQWLHRVLEADRLWLDLHALAIEHEVLLEAETAEQLRICDLLGVALPEFHEDFKDPLGETARHLLRRLAAAPRPETYDALIDRARSLDGHRLRLGKVRALVGRLEAAPRFGVERVLPVALTRVGLAVDRYETFEAQRAGLRRTLVELYERTPYRPVLDTIPGVAAESHALLLGFVGDPRRYDRATCLSKLAGIEPRDNASGDGEGAHSISHRGRTGLRSVLYRIVFGCQRKNTELTGYLNRLRTREDNPLAWHQAAMATANKYLRLVHHLCVSGEAYDASKLVARR

SEQ ID NO: 201506 - protein, 355 aa, unidentified
MTRPTYLPKDFETFIGLDVDKNSFSYTITDDSKTLKSKKMPSNPEHLYNYIQKHFNHEKVICAYEAGPTGFHLHDYLTEKDILCLITSPASIPRPRNKKVKNNRIDSEQITKHLMSGDLNPIRVPQGPYRELRDLVKIRIQYATDRKTARQRIKAYLLYSNLHTNLKDPDSKWSNKYINELKQIECSVVQRQRLFMLIEDLEYARNKLLIIQRTLRSFCRENDEINQYIGYLRSIPGIGPVTATTLLGKIGNPANLKSPRELASFVGLTPKEKSTGDSVHRGSITHMGDKTLRFLLVEAAWTTIRKDTQLSQFFHRIRRKNNPKIASKIAITAVARKLTQIIYRVLKDKREYIQH

SEQ ID NO: 201507 - protein, 374 aa, unidentified
MADIIEAFVAFDTSKLRNAVAIAEAGRTGEVRFLGEIENTGAAVAKLVRKLAGKYGRLTFCYEAGPTGYGLYRQIKSLGHECIVVVPSLILKKPGERVKTNRRDAVSLVKQLRGGDLTAVWVPDPRHEAMRDLTRAREVAVEDLRCKRQQVSAFLLRQGLHYPGERTWTKAHRNWLMSQKLEYAEHRIAFEEMLLAMRQAQERIERLEQAIRVAVPDWSLAEVVTALMAMRGIDFISATAFLAEIGDLSRFPTPRELMGYLGLVPSEASTGDTIKRGPITKAGNRRARRILVECSWSYQHPPRVGKEKQERVAAAPQAVREIAWKAQCRLSARYRALTRKGKLKTVAVTAVARELSAFIWAINRQIANPRAVAR

SEQ ID NO: 201508 - protein, 341 aa, unidentified
MRYIGADLHKHSITFCVVETDQQNIRVIKRQRVMCCEIHRIEEFLKSHAPYELTVEATIGYEWFAELAGKSAAKVVLAHAGKLRIIAESTRKTDKIDAYVLAEFLARNMVPAAWQPTARVRQHRALVRRRCKVQSRMTSIKNTLRGILTRYNQDLGTLFSRVGREHYENIKATLLSEDAWVIDDLFDELKEQQTRLKKVDARLVEFATSASLKEREAREILKSLPGAGPVTIDTILAELGDWTRFRNADSVVSYAGLDPGVRESDGRRTDLKISKAGSPLLRWILIQLAHRMKRTSTRWARVFEQISRRAGRKKATVAVARRLLLVIFAMLRDGRSYQLAA

SEQ ID NO: 201509 - protein, 376 aa, unidentified
MERGSLMLNTTTFVGLDVHARSIKAVALDVMTGETKSATFAYDAAAVAEWVGSLDPAAKCVYESGVTGFDLQKKLTALGVDCVVGAVSKMIKPSADRKRKNDRNDAGFLARMLSVGNVVEVWVPDDECEAARDLVRALDDARDDLKRCKQRLSKFLLRHGLVFSETTPSGQRRGNWTAAHWAWINAISFKEGADNEVLAYYIDAVRQKLEDKKRLEALVKDEASKARWRKRVDSIRCLKGIDTMSAADLVFEADEFSRFKNARSFGAWLGLTPSEHSSGESVRQGGITKAGNKHLRRVLVESAWHYLNATARSKDLVKGQIPDPAARRHAAKGVRRLVKRREGMLERGVHKNKANVATARELAAWVWAVGCIVEGA

SEQ ID NO: 201510 - protein, 323 aa, unidentified
MTKPHPPVKYAGPPRILGLDVGKASVALHDLATGRAWTVPNTLKALCAALTGYAGHDLAVCEATGGHERTVLDAALAVGLPAHRADAAKVKAFVRSWGGRAKTDPIDAYWLAVYGAERGPGLLRWTPPDPERQAFAQLVRLRAETISRRTAVKNRRGAPGAAGPVVAFLDAELAFLDRQIDALDAGIAHRIAGIQDLQRDALALQGIKSIGPVVASSLLAFLPELGRLSRREVASLAGLAPHPRDSGETRRRRVMTGGRAELRPVLFMAALSAARRHPQLKAFYERLVAAGKPKRLALAAVARKLVVIANAVLRTPQPTHQLT

SEQ ID NO: 201511 - protein, 278 aa, unidentified
MNEITTIGLDLAKHVFQVHGVDASGVTVVRKRLRRSEVLAFFTRLPRCLVGLEACATAHYWARELQTIGHEVRLMPAQYVKAYVKRNKNDAADAEAICEAVQRPTMRFVPVKTAEQQAALLLHRGRERLVRQRTALVNALRAHLAEYGVIAPLGLHNVARLIAIVRDEIDTRLPAPARQVLEVLATQVEQLEAAVAALEKQLIAWHKANPVSQRLATIPGIGPIIATAVAATVVEASGFRSGREFAAWLGLVPRQHSTGGKARLGGISSAATGIYDAF

SEQ ID NO: 201512 - protein, 418 aa, unidentified
MTDQITIPQKRFIGLDVHKHYLIALGVDAELNVVLPAQRVELFRLEAWMKKTLTKQDAVALEMTTNTWEIYDELSPCAHSVTVVHPPHVALITRSQVMNDKMAASILARLLAKGLLVSIWVPPVEVRELRALVAQRSKMTRLATQAKNRLHAILQRHHIVPPEGNLFHADQTEWWCALPVGKLEKINLQSDLDTLRFAETQLTRLASTMNQLAVKDERVTRLIHLPGFGAVVALTVLAAIGEIARFEDAKHLVGYAGLGARIHDSGLTTRTGRITKAGRRDLRAALVEAAQVAANSHPHWKAELARLEPRLGRNKAIIAIARKLLVAVWFVLSKQTTDRFAQPEMVARKLMQFAYKVGKHNRPANQSAAQFIRQQMDALQIGADLSAIPWGTKNRSIPLPPSALLENKMSDVPNTQPC

SEQ ID NO: 201513 - protein, 395 aa, unidentified
MFIVGIDVAKRSHEVCMITSDGQTVQRPFSIRNSCTGYNLMLEKIRKHTNIKSQIVFAMESTAHYWLALFTRLRKDGYHVILLNPIQTSAMRDMFIRKIKTDAKDSFIIAELIRFGRYAESNVAQDRLLALKELCRNRFYLVDMAGDLKRKLIALIDRVFPEYEAQFDTIFCKSSVALLKKYPTPQKLSNAHLDKLTELLWNSSNGHFGEWKARELKELARNSFGVEDCDGAYSTLILLMLDQIQSLSGKADALEKEISRLFQSFDTTVTTIPGVGPIIGAVILSEVGDISRFSSADKLAAYIGVDPSVNQSGEFQAAHAHMSKRGSPYLRRCIWMASQVAVQRDPMFRAYYEKKAAEGLKYMTIIGHVTRKMTAVIFAILRDHKVYEPVLPTAA

SEQ ID NO: 201514 - protein, 422 aa, unidentified
MRSIGLDIHRDFCEVAIAEGGEIRSPGRIEMTPAALELFAASLRHDDRVALEVSGNAWEVARIIRPHVGQVVVISPADTGIRSARAKTDRLDARALARLLAAGSLDAVWVPDEGTQAMRRRLSRRSQLVRVKTKAKNEIHAALMRRLIAKPSFSDLFGLKGRRWLAEVELPACERETVDGCMRQLDFCESEIAAIERVIAAEALRSAEIRRLMTVPGVNVITAATFIAAIGEIGRFPDRKKLVGYLGLDPKVRQSGVSAASRGRISKQGSASARHALVEASWSAVRAPGPIHAFYERIRARRGHRVAIVAASRKLACLFWCLLTREEDYAFGQPSLTRKKLRRLELTAGAPKGKVKPGIWAANKAMREAERELARQAEVAYRRTVADWQAQKKGAGATPERASCGPSSGHAARQGSAPEPAL

SEQ ID NO: 201515 - protein, 394 aa, unidentified
MKLVGIDVGKNSHHFCVMDKETGEFNVAPSSFSNNKEGFDFLINSLKPYSKKSILLGMEDTGHYHVALLKFLLSNGYTVALINPKTTDLTRKMEGGITKNDKLDTITICDVLDTPERKKQYRITKVDRFDLYEQRQLTRHHHNLKEELNIYCNRLQKSIDLVFPEFNTLFGSKYGIVYMNLLKTFGSAEAIASTDIRTIRKCFEVKGKGGRISLTPEKLKECAKNSIGISSEVETIQIKHLVSQIMLIKEQIAEIDKKIEEFSIKNNSPILSIPGISHFSGTSILAELGDIGNYSKPSQIIKFAGVAPYHYESSQYNGQHTAITKKGSKYLRKTLYQIILPVINNNPVFQKYYRLKISQGKGHRCAQGRCIRKLLRIIYHLLETGQSFDPALLR

SEQ ID NO: 201516 - protein, 337 aa, unidentified
MKYSAIDLHSNNSVVTVTDEEDRVVVEKRLPNDLAKILGFLLPWREELAGVVVESTFNWYWLVDGLQAAEFKVHLANTTAIKKYEGLKHSGDEADARYLAHLLRLGILPTGTILPPEQRAVRDLARKRMQLVRSRTAHILAVENITARQHGTRISSNQVKRLTAEAVDQMPLPDDVALAIKANVAVITTLSAQIDLLEKRLQEKVGARAEYGLLTSVPGIGQVLATTILLETGPIGRFAAAGNFASYARCVDSVRTSNGKKKGEGNTKNGNKYLAWAFVEAANFALRYCAEAKRFYERKKAKRNNVVAIKALAHKLARACFHILKERKPFDVTRCFA

SEQ ID NO: 201517 - protein, 351 aa, unidentified
MENSITETIGCDLGDKTSEICVLRADGTMQRATVRTTRAAMRLFFTRMPAHVVMEVGGHSRWASALVTDLGHRVTVANARRVQLISQSNNKTDQNDAELLARLGRADTGLLSPIVHRKPETQADLAVAKARDALVATRTRLVNHVRGTTKSFGDRTPKCRAETFVRHTRELVPELLKPALDPIYEALDAIEKKIREYDKTIERLAERHPDVAAVSQVTGIGALTGLVYVLTLEDKHRFVKSRMVGAYLGLRPRKRASGNDDPQLRITKAGDPFLRRLLVNGAHYVMGPFGPDSDLRRWGLELAKRGGRNAKKRAVVAVARKLAVLLHRLWVTGEVYEPTGYRARQLEMRAA

SEQ ID NO: 201518 - protein, 346 aa, unidentified
MRNNFLYAGIDVSKLKLDIAFTLNGEKIIKHRVVSNDFKGFNTIRELSENLLKAKSLDKVHYVIESTGIYSEDIFEYLSEQVNSIVSIINPRQSKSFAISDNIRTKTDKVDAILLAKYCYEKRPKESKKTPKTLKKLRSLSRHLDFFIKQRALLSGHLESVKDVFIADSINNMISKFNEEIKKIEQEIDKIIKTDDELNRKSKLLLSIPGVGNKLSVTFLTEMMQTDEEKISTKVQSAHAGLSPRHKQSGKHTGYSSICRAGNSRLRKALFMPALTAIKYNPLIRNFYLRLLDAGKRKMVAITACMRKLLCLMVGVLNSHQKFDPDWVEKRKFSQEGELARPCVSG

SEQ ID NO: 201519 - protein, 315 aa, unidentified
MNDVPLFVGIDVSKDRLDVAVRPTGEAWQVPHDPQGIGSLTQRLRELAPYLVVLEATGGMELALTGELAAAGLAVAVVNPRHVRDFARAGGQLAKTDSLDAQVLAHFAQAMRPEPRGLPDAGAQELRALVARRRQLVEMITAEKNRMRTATRRIRPKVEEHICWLEENLEDLDQELGDFIRSSPLWKDKDELLRSTPGVGPILSTTLLSGLPELGSLNRGEIAALVGVAPFNRDSGTLRGKRKVWGGRGQVRAVLYMATLSATRYNPVLREFYQRLCAAGKPNKVALTACMRKLLTILNIMVKHHRHWNPVVQNS

SEQ ID NO: 201520 - protein, 387 aa, unidentified
MVFAGVDVGKRNHEACLMGQDGHEVSKPLRFSNTVAGVSSLIDVLRSLGQPATIALEASGHYWLGIHRKLVQAGYPVVVVNPLQTSAYRSTSMRKVKTDLRDAFVIADFLRIGRVMANYVPDETILKLRELTRFRFELIDQIGDAKHKALATLDRVFPEYAGLFSDIFLKSSREILKNAVAAADFASFDLSELTAILKSASRGRFGASKAEEIKLTAGNSLGLPCLGQVASLKLCSLLAQIELLESQAAQVGGAIEEVMDGMEQHLTDIKGIGPVLAAIILAEIGDISRFRSLKSLVAYSGIDPSVFQSGDFTGTKRHMSKRGSPYLRRALWLAAHSARIYNNDLNQYFHTKLSQGKAYNVAMGALCHKLLTRIYVILKEGRHYEVR

SEQ ID NO: 201521 - protein, 341 aa, unidentified
MKNLFIGIDFSKEKLDVAVIPAVGLSETAQRECYEFKNSVSGFRQLVKWVERNSNGIATSSWLFSGENTGDYSKPLCNFLYGKGYDIWLENAKSIKDASGIRRLKSDRADALMIAEYAMRNYDKAFMYEPLSASLSQLRELFLYRQMVIRHRCSFQVRRGEKRLAMEKSPVKTIISQSGRHIVSELNKEIEKIDKRIAELIDSEEELKEIYHIVTSVPGIGCQNAVCLMVYTDNFRRFNYDARKIACYYGIAPFGKNSGASVHTDPHVHYLANRQIKAMLTQAALAAINHNPVLSQYYLRLVERGKKKQVAMNNVKNKLIHLVTAMVRNRQVFSPEYKISA

SEQ ID NO: 201522 - protein, 341 aa, unidentified
MQVYGIDLSKDKFDVNFFDATGKINTRTVKNGLAGISDFLSGIPSEAILCAENTGSYGDLLVFLCGQYGVQIALVPGYTVKHSLGLVRSKSDPIDAGRLREYGERFFDKLSFKTYQSETMSELRQLYSLRSQLVKARKELRTGAHARQTMPMQSIRTNQILKNTLGSLDAQILEVEKEIELIVKSDSELKENYTFSISVKGVGPVIATDIIIKTGNFKVIDTARKAASYAGVCPFPNASGKMVGKARTSHFADKELKCLLYMGAKSAVKHNKEYNLYYQKKKLEGKPHYLIINNIMNKLLRTIYSVVKNKNAYTPEYMCIDPREKNVNSSDKKSGKKIVFN

SEQ ID NO: 201523 - protein, 362 aa, unidentified
MPKSTTIIAFDHHAATTVAAVLLPGQRTPALHSLLSDSPTILRFVDRLRRTGPVQCCYEAGPCGFELQRALTTHGIACDVIAPALIPRRPGDRVKTDRRDAAQLAVLYRAGALTAIHIPTEQEEAARDLLRCREDIRADLLRARHRLSKFLLRHGRRFTATKKAWTKRHAEWLQAQRWPLAALEQTHRAYVRAVDEGVARLQAVDTELRDLLTIDPLRSRVERLRCFRGIDDLTALTIAAELGDARRFPSASRVMAFTGLVPSESSSGAKQARGHITKTGNAHLRRVLVESAWHYRHHPFLGDALRHRQRGAPADVIDRAWHAQHRLHRRYRRLAARGKPKQHIVTAIARELSGFLWAALTQ

SEQ ID NO: 201524 - protein, 391 aa, unidentified
MQSATSATAVATTARANDTTLFASLELSKSKWVVTINSPGSEKFSKHLVEGGDGAGLIDLLSRSRAKAEQRCGMQVKAIVIQEAGLDGFWIHRLLLAHGIESHVVDAASIAVDRRHRRAKTDSIDGEMLLRALMAWARGERRVCSMVRAPSLEEEDRRRLTRERGTLLKERIQHTNRIKGLLSGQGVRDYNPLRRDCFERLEAFRTGDGRELPPMLKAEIRRELDRIAVVTTQLATVERARDALIGTDAEERNNPAALLLKLKGLGPEFASLLWLESLFRNFGNRRQVAAYGGLAPSPWQSGGVERDQGISKSGNRRLRKTMIELAWFWLRHQPDTALSRWFHTRVGAAKGRVRRIAIVALARKLLVALWRYVTQGVVPEGAVFKAVFKAA

SEQ ID NO: 201525 - protein, 402 aa, unidentified
MQVDDIDVFIGIDVGKSEHWATALTTAGECLHDRPLPNDEARLREVYEHLGEHGRLLVVVDQPATIGALAVAVAQDMGITVGYLPGLSMRRIADLSPGSAKTDQRDAAVIASAARTMPHTLRSITSSDEDAAALSMLTGFDLDLARQVNQVSNRIRGLYTQIHPALEGVLGPWLEHDSVLEVIATWPTPAALRKAGRARIDAKLKANGCRRHAAWAQAIVEALSKQTVTVAGTDAAGVVLPHLARQLIALHTQRADIAAQVEALVEAHPLYPVLTSMPGIGGRTAAVFLAGTLGKTFTTGAHLASYAGLAPVTRRSGSSIRGEHVSHGGNKRLKRAMFLSAFASLRTDPVSRTYYERKRAQGKRHNQAILALAHRRILTLHAMIRNGTLYNPQPAQPLTTTA

SEQ ID NO: 201526 - protein, 344 aa, unidentified
MTIVTIGLDLAKNVFQVHGVDETGRAVLRRQVRRNDVATFFRNLPACLVGMEACGSAHHWARLISAAGHDVRLIAPTRVKPYVQRGKKNDANDAAAIAEAITRPHMSFVPVKSADQQGVLMLHRSRDLLVRQRTMLINALRAHLAEFGIIAAKGRGKVKDLISGLDDAAIPDLARVALRQIAEQIDAGDTHIEALETQIVAWHKTNEASRNLATIPGIGPITASALAASVPDPSAFENGRKLAAWLGLVPRQNSTGGKDRLGSITKAGDSYLRRLLVIGATSVIRYARGKAPGEAEWLKRLLDRKSPRLASVALANKMARIAWSVLTRGEVYSKTCPNPVAVAA

SEQ ID NO: 201527 - protein, 316 aa, unidentified
MTATPVFVGIDISKAHVEVAVRPAGSPFTVPYDDAGMALVVERLSALAPVGIIMEATGGLEVVLAGALATAGLPVVVVNPRQVRDFARATGRLAKTDALDAQILAQFAEAVRPACRPLPDASTQQLAALITRRRQLVEMLTAEKNRRGRAPRGLRSQIQTHIDWLAQHVTQLDQDLTTAVQASPIWREHEELLRSVPGIGPVVTRTLLAELPELGTLTRQQIAALVGVAPRNRDSGTFRGKRTIWGGRATVRAVLYMGALVAARHNAVLKAFYQRLRGAGKAPKVALTACMRKLLTILNAMLKHRTPWRERSPQTS

SEQ ID NO: 201528 - protein, 417 aa, unidentified
MDTLHFRAAGLDIHKKFVMACIRLTDPTTGQARESVKRFGTMTDDLQSLLKWLQEAGVTHVAMESTGVLWKPLWNVLDDQRLELVLANPQELRQVPGRKTDVRDCQWIAHLLSCGLITSSFVPSRAQRELRDLTRYRACLEDERVRTVNRIHKVLEDANIKLGVVATDILGKSGRDMLSALAEGETDAVRIAEFARGKLKAKIPDLRRALTGCMKDHHRFLLKHLLKDLDHTETQIAELDARVQELRRPFVDEATLERLDEIPGVNVRTIENVMAEIGCDMTQFPTAGHLSSWAGICPGNESSAGHVKRRAVTRGNRWLRRALVEAARAAARKKGSYFNAQYHRIAARRGANRAAMAVAHSLIVVIYHLLKNPDQPYQDLGTAWFDTLDPQRLTRHLVKRLEQLGFQVQLTPKDNAA

SEQ ID NO: 201529 - protein, 315 aa, unidentified
MSDTFVGVDVAKAEFVVACRPGGSTWTATNDPAGIAATVARLRSVAPSLIVAEATGGYERALVAALAAAGLPLVVANPRQVRYFAKATGQLAKTDRLDADLLARSAERVRPAPRPLAAPVLQHLDALLTRCRQLLDMLTAERNRLEHATLAVRQSLIDHIRWLERELADVDQDLDRTIAESPVWQAKENLLRSVPGVGPVVSRTLLAELPELGCLNRKQIAALVGVAPLARDSGTHRGKRLVWGGRAPVRAVLYMGALVASRRNPVIRGFYWRLVGAGKPKKLALVACMRKLLTILNAMMRSNHGWRETTQPANA

SEQ ID NO: 201530 - protein, 338 aa, unidentified
MKYSAIDLHSNNNVVVVTDETDRVLVEKRLPNELDRVMELLAPHRDDLAGVVVESTYNWYWLVDGLMAAGYCVKLANTGAIKQYDGLKHSGDEADARHLAHMLRLGILRTGYICPPAERALRDLARRRLQLVRSRTSHILSVENQLTRQTGKHLRSNDVKRLTSVAVADLGLPDDVARGMAANVAVIQTLNQEIDKLEARLLEEVKKTPGGVLLNSIPGIGKVLATVIVLEIGTIGRFADVGDFASYARCVDSARMSNGKKKGQGNTKNGNKYLSWAFVEAAHFAMRFSPEAKRFYAKKYAKTNGAVATKALAHKLARACYHMLKTGQPFDVKRCFAG

SEQ ID NO: 201531 - protein, 351 aa, unidentified
MEGYAGRQFVGMDLHRRRSVLVRMTAGGEVLERVRIVNDVDRLAAVMARAGECPEVVLEATYGWYWAVDVLREQGAVVHMAHPLGVKAFEYRRVKNDERDAADLADLLRMGRLPEAWIAPPATRELRELVRHRAKLVGLRSHCKAEIHAVLAKCGVPVRMSDLLGLDGTALLDQLRDSSQLAAPYAARIGSLRRIIDLLEFEIDHTAGMVRGRLARHPGYVAAQTIPGIGPTLAAVLVAEIGDIDRFTRPEQLTCWAGLTPKHHESDTHVHRGRITKQGSRLVRWAVVESVQVLPDTTMVGQFRDRVAARRGRNIGVVAAARRQLEYVFYALRDHHVRALNHTSQHARPAA

SEQ ID NO: 201532 - protein, 348 aa, unidentified
MDRKTIAIDLAKDVFELAIDGGGAIERQRLTRKKFQQFAALLPPSRIVMEACGSANHWARWFITRGHEVLMLPAQHVKPYRRGNKTDRADANALLQADRVGGIRPVPVKSVEQQNLQHLHRLREQWKRTRVARINALRGILREHGHAFPAATDTFLANALETVDADPALAMLRPALHALQAEITFLEDQMAEIERQLRALTRHNSEVRAMQTVSGVGLLTSTATLAAVGTPHHFRNGRQFSAWLGITPREHSSGNRRSLGRITRRGNVYLRTLFIHGARSALLSAKRTAKLNPEKLTRLQRWALDLEQRVGHNKAAVALANKMARITWAVWHHAREFDGNWQPATCAA

SEQ ID NO: 201533 - protein, 349 aa, unidentified
MTSSMTIAVDLAKTVFEIAIADSEWRIVERHRLSRSQFQQFFFNREPATVVMEACGTAHYWGRWLTELGFSVRLIPAHYARPYRRRNKNDAADAAVLVEASRSAEIIDVPVKSSEQQAIQGLHRIRSQWMTTRTARINNPRGLMREQGINIPVGAATAVSAAPGLIDSDAVPEALRAALQEIVSEIHSLEERMKTVERQLKQYAATSRDVQSLQQVPGIGLLTATALVAAVGTPDNFRDGRHLAAWMGLTPRHVGSGHRMHLGGISKRGDRYLRMLLIHGARSVLIRAQMNAKSGQPLNRLQQWVMDLRQRSNHNKATCALANKLARIAWAVWAHDRAFDGNHSLAQAA

SEQ ID NO: 201534 - protein, 346 aa, unidentified
MEQIIRIGMDTSKHIFQLHGVDAAEQVVLRRKLRRSQVLSFFAKLPPTVIGMEACGAAHYWARELCKLGHEVKLMAPQHVKAYVKRNKNDGRDAEGLCEAMSRPTMQFVPVKSEEQQAALMLAGIREQLIARRTQLCNAIRGYAAEFGLTAAKGLDKIEPLLAWIAQDETVPAMARELLALQGKDYARLQIELKAIEARLMAWHRANADSRRLAQIPGVGPIGATALVMKTPDPRAFPSGRHFAAWLGLTPKDHSTAGKTRLGKITRAGDERLRSLLVAGATAVIQQAKHGRGHPSPWLIALLKRKPPKLAAVALANKIARIAWKLMVTGESYDGARMPGASGFAA

SEQ ID NO: 201535 - protein, 425 aa, unidentified
MSIMARTRDSATPVGVDGGGEFVVAGVDTHADTHHVAVIDQRGRHLDDAEFPATAAGYTQIRGFLTGFGAVTAVGVEGTGSYGAELARRLSKAGLRVVEVTCSNRAERRLRGKSDPLDAYAAARAVLSEQASAVPKSRDGAVEAIRVLRVARGSAIKARTAGINQIKAVLVTAEDEVRARYRGLSVTRMLAVMGRARPAGSLDGPQYATVLTLKILAGRCRALTAEVAQLDGHLDRLTDQCAPGLKAVHGVGTETAGQLLITAGDNPHRIGTEAQFAALVGVAPIPASSGKTRRHRLSRGGDRAGNAAIHRIVLVRMGKDQRTRDYVTRRTAQGLSTKEIMRCLKRFVAREIFHHLTHPTPPPRFDDLRPARLATGYTLTAAARELGTGPAQLSRLERGLSRNPDLATRYRQWLHDRLPVTSVAA

SEQ ID NO: 201536 - protein, 406 aa, unidentified
MDKPSVETAVLKTDRGGNQLYFVGIDISKFKHDCAIVDELGDVITPSWSFQNDCEGFSLLRELLDALDGEKKIGLEATGHYGQNLKLFLENNGFSFMEFNPLLINRFVRSKSLRKTKTDSIDALMIARYLMTVEYKPYPPSFYTLEKLKSLTRFRDSLIRQRSRQLVELTNILDKVFPEFKPFFKGRFSATALYILSHYASPEKISNMNSKSYEPLRRLSRGRFSMVDFVELKTLARNTVGSTCDYLLQEMGITIDIYNQLQSKVEEIELQINDCVLGLAPPMLTIPGIGVASAAVILSEFGDLSKFCSPSKLLSFAGLEPGYFQSGTSESTGKMVKHGSSHLRYAIMNCAQTVINNEPTFAAYYAKKRAEGKEHRVALTHVAKKLLRVIYTLQTKELSYNPDLVR

SEQ ID NO: 201537 - protein, 366 aa, unidentified
MSNVLYCGLDVDDKAFHAFLINESGEFFEFTSRPNLKSLLDKLSKFQNYHLKIFYEATYLGFSLCRSLRGKGYDCDVIAPNLIPELSGAKVKTDRKDARKLATYAMKDLLTIVHVPNEEDEYERDLTRSRAFIQEQMKMIKNHIQSNLRRAGINYKEETNKSNYWTDDYLKWLRGKVASMPEGALKINTNMLVNYFYQQKELLQNYDFELTKLCQSEKYASRVQALQCYRGIAELSAITIVTEIGDIKRFPHPRKLMSYLGFDVAEYSSGGKERKYGITKAGNSKVRRLLVEATQRCNLPPKVHYGLNTRRSKTPLELIGVADRCMNRLYKKSYALEQRGKNRNKTKVACAREMVSFIWESLNKVA

SEQ ID NO: 201538 - protein, 400 aa, unidentified
MNVNELNYLNLRVCGIDPHKRFFKAVIVDMNTLNTLYESNFPNNKSGVTELEAKLREYRCNLVVVENTNNFSSALYYYLKRHNFDVKSVSPKNVPQKPKKSDRIDAKWIAIVYAKGLVEEDYVPPEDIQHLQDLVRARERLVDMRTALKNRVHTLLTRGALHLNKLYSDIFGKKGREAINAIVSSNLDDVDERVSQVIGDAFLELINKRVMNLFMGLIEILLDRRIKELEEVIAAYVDTHSSIKAMVERIMTIPGISLVTAAIIVAEVGDFTRFPDKKQISGWAGIVPRTRESAGVQRGYGITKRGSPYLRHALHEVANVIILRKEPKELYAFYWRVRRRSGKYKAITALAHKVLIVLWGMMTTGSNLEMDSNMRRLYNRKLKRFNNMAELGKRVLLEVT

SEQ ID NO: 201539 - protein, 332 aa, unidentified
MYYLAFDVSKNTLDGVLTNLKTKTEYFQIENSKESINKWLNEIELPKKILAGCESTGNYHLALQNTFVRSGFLFKVINPLLVKQFTRTTIRKKKTDMSDSLIIAKLLSQKEGRAIQENELDVTLKTLQRTLKKISNEKHKFSLIRKSLKYIENNKDVEYLDELLEDLEKSISVKIIEYVCYLESKCSNNEDIKLLESIPGIGFRLALVISTEIGNIDKFNDSKELIAFSGLDPKIRQSGHCLNSQGKLTKRGSPHLRTALFIAASIARRFDPELREYYEKKRKEGKRYTVAICAVSRKMACRVYAVLKRKTPYVKKEVFPVVLIKELSTVDV

SEQ ID NO: 201540 - protein, 325 aa, unidentified
MSSIVIGIDISKKKFDVRILNLKTKKISKIFSNDSNGFEQLKAMLPDGLEVVAALEATGCYGENLTRFLYNNGIKVFVLNPAQVKNYAKSMMLRNKTDKVDCETIANFVTLHKERLQDWAPPLASVEKLRGLYRCSEDLKGDMTRIKGRIEACQNTDDLGKQEALITYKDQLKSIEKNIIEVEAKILLIIKECHELSRKFTLLNSIPCVAHKTAIGILAELPETSNFNNAKQLAAYAGLNPAIRESGSSVKGKSRISHIGSAHLRKLLFLPAMTSLRYNPTIKEFGDRLKAKQKNGKVVIVAAMRKLLHIIFGVLRTGEAFKISA

SEQ ID NO: 201541 - protein, 341 aa, unidentified
MGIVTVGIDLAKNVFALHGVDQSGKAVFIKPKVVRGQLLEMVAQLPPCLIGMEACSGAHHWAREFSRFGHTVKLMAPKFVAPYRMSGKRGKNDGADAAAICEAVTRPNMRFVPVKDVDQQAILCLHRTRQGFIEERTALYNRLRGLISEFGIVLPQKVERLRREIGAHLEELPGWANRCVGDLLVHADRLNERIEEYDKAIAQAAKQDQRSRRLMQLPGIGPTTASALVASLGGGHDFKNGRQLAAWAGLVPGQYSSGGKARLGRITKAGDAYLRSLLVMGARAVLAGLGNKQDRFSRWARNLVERRGYWKAAVAIAAKNLRLAWAVLHYGDDFRLIEETA

SEQ ID NO: 201542 - protein, 351 aa, unidentified
MSHKTAATVAHAIGIDTGKNTLHLIGLDDKGAIVLREKIARGRIAARFANVPRCLIGIEAGMATHYVARELIALGHDVRQVPPAYAKPFRQGHKNDFRDAHAIAEAVQRPSTRCVPVKTDDQLDLQALHRVRSRLVGQRTAVINQIRGFLLEHGIAVRQGLRFLRQQLPDILAKRGDVLSPRMIRIIEDLSGDWRRLDERIQHVTEEIEVLANSSESCRQLMTAPGIGPLIASAMVAAVGNGAAFAKGRDFAAWLGLVPKQMSTGDRTILGRISKRGNRYLRTMLMQGARVILLRPKNWAKHSFGLWLTAAAQRLHHNVLATALANKLARIAWTVLAQGRSYEARVEPKVA

SEQ ID NO: 201543 - protein, 336 aa, unidentified
MKESYLGIDVHKKWCVFTEIDSTGKVVRQGRFGNTFEDVSTFASSLSPKVQVVLEPVLNYLWILDQLEPYAGSVHVATPFKVRVIAESKSKTDRYDSRILAELLRTNFLPESWVPPAEIRLLRGLIRQRYHLVKSVIMNKNRIRHLLFQHGVDLKVFNIASPKARLAIQGLCLPEVTRETIRECLKVIALLDDLVAEVDQRTRRCVEENPTVALLQTIPGIGPTRSAVIYGEIGDIARFRSAKALASYTGLTPTVRSSGESIWTGGITHLGSRPLRHALVEAAIDAIRKSPALRRMYCRILYRSNVQKARVAVARKLAIIIYAMLNRDEPFRAEAA

SEQ ID NO: 201544 - protein, 429 aa, unidentified
MRTESTPGARGPVFCGVDTHADSHWLCVLDWRGRKVLSRRFPADAAGYEALAGAIAAAGEPACVAMEGTSSYGAGLTRHLASLGMPVREALSPARMQRRRPGQGKCDESDAERAARAAMSGSKLGTPKSQDGWVDGVRCMLAARSGAVKARTSAINTARSLLTTAPEGLRSRFRGMAGPRLMEELPSVRAEGALGAALGALADLWAAARDAALDMERAIEASLEENCPALLAMYGCGPVSAAKLAVAAGDNPGRLRSEASFAAICGACPIPASSGKTVRHRLNRGGDRQANSALHEIARQRVMRDPETAEYAERARARGKSDREVMRCLKRYVAREAYRALMRPHEVRRPEDASGLVAARRAAKVSQVRAASILGTSEKYISMLERGQRELKPIRRAYEAWVEAGLPLDWDRQAFEAERKMDSKKHLAK

SEQ ID NO: 201545 - protein, 447 aa, unidentified
MKKKNVSMEVVNPDAAGIDVGSRSHFFAIGQGTEDIKEYGVYNEDLHALAQWLLENEIKTVAMESAGTYWQNLYAVLQSYGIEVILCNGKFTKNIKGRKSDVQDCQWIQKLHTLGLLSGSFLPDEVTEQLRTYCRHRANLLEQAADTTRKMQKYLRLLNLRLDVVVKDVTGLTGLSIIDAICKGTTNPKELASLRNGNCKKSEAEIAKALQCNGRKDYLFALNHEYQMYLTFQSKIKECDQEIEVMLNDQINSDDHKREHYIEKKVYKRVNKNAPKNIDLNLLAYQYFEGVDLLAIEGVSYSTVLTLISEVGTGIHKFPTAKQFVSWLRLSPNNKISGGKVLSNKIPKGSNRLKIALRNAANAIGNLKDTALSNFFKRIAFRKGRISAISATARKLAIIIWNMIVKKIPYKPATEYQFLDQKRKKITQMKKLITKFDISMDDLSFQL

SEQ ID NO: 201546 - protein, 349 aa, unidentified
MKRVYLAIDAHARNCVLGSMNPQGKFLGTERFRTTEADLITQVVKVKATHKLLVVEEGPLAYWIARTLRPYVGDVMVCDPRKNKAISSASNKNDQQDVYTLCRPLRLGELSRVYHPQEDHRAVFKAAVQQYIAFRKDECCLKFQIKAQFRSWGVHDVEGQTVFGMKYRKKFLDQVHHPSIRRQLDRRLLFLDEALLGQRMALREAEALGKRYSEIEHFRAMPGVGKIGSLIFDAYVQTPHRFDSKQQLWKYSQLGITDRSSDNKPLGFKRLDKNGNSELKSMSYNAWKGSLITQELNAVSGFFQASLDRTHSRTKARLNTQRKILTVLWTMWKNEEEYHPELILPGMLR

SEQ ID NO: 201547 - protein, 360 aa, unidentified
MHATTVAVDLAKSVFQLVVADEHWRITETQRLTRTQFERWFLNREVGLVVMESCGSAHHWARWLNSLGIDVKLLPAQYVRAYVRRNKTDATDAAALLEAARAADIRPVRVKSVEQQALQGLHRIRSLWMGTRTSRINALRGFCREFGIAIPVGARTGIEAISRVLADPNTALPELIRGSAKLLVEEIRLLEARIAQVERELAAAARLSPACTTLLSIPGIGLLTATALVAATSGDVSHFQDARHFASWFGLTPREFSSGNSRYLGRISKKGDRYLRMLLTHGARSVLRAAKVAEGAGKEVCGVRRWALEVQGRTNHNKAACALANKLARICYATLRDKTTFDEAARLSRKMNRQAFAMPA

SEQ ID NO: 201548 - protein, 387 aa, unidentified
MTVLTVTNLPAATHGETVRCLFAIELSRMSWVIAFNTPLSEKISHRTLTGCKWKRLLELIEEVRARISRETGRAVEVISCYEAGYDGFWLHRQLSAHGIRNYVIDPASLQVDRRARRVKTDRIDTERLLRSLMAYLRGEPKVWSVVRVPSVAEEDARRLHRERDRLVSERVQHVNRIKGLCALQGIYDYNPLRPQAMAGLEQLRTTQGGALPPRLKSEIKRELQRLELVVEMIATLEAERNAIVEDEASTHVNAKKIQNLHKLKAIGPEFAAVLVGEIFHRDFNNRRQLASYVGFAPSPFQSGNVAHDQGISKAGNRKGRTTGIELAWLWLRYQPDSDLSVWFRTRVGTTKGRIRRIAIVALARKLLVALWRYLETGVVPRGAVLKG

SEQ ID NO: 201549 - protein, 359 aa, unidentified
MEIEKSAVRRVVGGVDTHKDLHVAAVVDERDRVLASRSFATTRQGYRQMLAWMRSFGELQRIGIESTGSYGAGLLRFVQKAGTEVLEVTAPDNQDRRRRGKNDDLDAQNAAHAAFAGKRTVTPRTRDGMVESLRVLTACRKTAVAARRVALQMIQNTIVCAPDGLRDMLRAMTRMQLIRTLAAWRPDLTAYRDVEAAYKISLKSLARRYLELHDEIADLDTMIGTIVDELAPDLVARNSIGHTGAAQLLLTAGDNPERLRSEASFAALCGVSPIPASSGKTIRHRLNRGGDRHANSALHIIAIGRLRTDPKTKAYVAKRVAEGHSKLDALRALKRYIAREVFGIITRRQRSINQTRIAA

SEQ ID NO: 201550 - protein, 477 aa, unidentified
MEGERRLVGIDLGISSAHTVRVLAGDGTEVCRRRCVPTVESLEVIEHAALAGAAEGTRLEVVMEPTGPAWLPVAVFFSRRQHTVYRVSSAKAADLRRFLSRHTKSNGIDADTLARLPLVDPRGLIPLELPDTDRAELARRVRATDRLTRQASEHKTRIRDLVRQLLPISPLGAELGKGDLAVLTRTGGHPGRLVEMGWGALSELVREASMGHLGAERAQQWLDAARGALALYGDHPAFAADALADEVQTEIRLLAAIEKELSVHATAREAAYQEVDPGALARSLPGVAEVGGPALVALMGRPGRFRTAAHFRSFTGLTPKTSETGDTDRKGQAMSKAGPGLLRTTLVRSADIARMQDPQLARLYYVQMVERGANHIKACCVVGAHLAERALAVMQRGEPYVVRDTEGRPVDRAAAKALILERWTVPEEVRRRRRSKKVRKAPQKVLMGHVETRRPSSPDMVAPAPVDINLALSAQRR

SEQ ID NO: 201551 - protein, 402 aa, unidentified
MNMNAVGIDVSKGKSMVAILRPYGEIISSPFEIAHTSNDIHSLIHHLKSIDGESRIVMEHTSHYYEPLARELSRANLFVSAINPKLIKDFGDNSLRKVKSDKADAVKIARYALDSWTDLKQYSLMDEIRNQLKTMNRQFSFYMKHKTAMKNNLVGILDKTYPGANTYFDSPVRDDGSQKWVDFVCTYWHVDCVRKTSLNSFVEHYQKWCKRKGYNFSQTRAEEIFKTSKVLVPVFPKDDVTKLIIKQAIEQLNTASKTVEELRTLMNLAAAKLPEYPVVMAMKGVGPSLGPQLIAEIGDVTRFTHKGAITAFAGVDPGVNQSGTYEQKSVHASKRGSPMLRKTLFQVMDVLIKTKPQEDTVYKFLDKKRSQGKPYYVYMTAGANKFLRIYYGRVKEYLAEQS

SEQ ID NO: 201552 - protein, 361 aa, unidentified
MAGTVTWAGLDVHARSTHAAAINVMSGELVRARFGAGLEQPLAWLGTLPGPVKACYEAGPTGYGLYRAAQAAGVEMTVIAPGKTPRGPSDHVKTDRKDAELLARLLLAGSLTAVVVPPPQFEAARDLMRAHDACRRDLMDARHRVSKLLLRHGRVYPESSTWTVSHRGWLGRQQFDQVATELAFLDALACVDAISARKAALAQRLSELALDERWWPTVARLRCFHGIDTLTAFALHLELGGDWQRFARAPQLAAWLGLTPSLSQSGESSRQGQITKTGSTLARRLLVEAAWHYARQPRQGVALSARQAGQPAHVLQISHRARQRLHRTHRKLRSRGKPGNVCVVACARELSCFLWAVATAD

SEQ ID NO: 201553 - protein, 406 aa, unidentified
MQVIYERCCGIDVHKKVLAVCLRRGRKSEIREFGTYTRDLLNLTDWLLESGCQMVAMESTGPYWKPLFNVFESAGLPAMIVNARHMKALPGRKTDVSDAQWSADLLQHGLLKASFVPDRQQRELRELTRYRKSRMEERAREINRLQKMLEGANIKLSGMVTDIIGLSARNLLGLVTSNQPITLERVEECMKGHLKSSAQELLLSLEGVVTPLQRELITEVLRVIDEQTAQIVRAEALIDRYMEESYSQAVDAVDALPGIAKTSAQQIVAEIGVDMGRFPSADHLCSWAGLSPGNNESAGKRKSGRTNHGNKMLKSTMVQCAMVAVKNKKSFFHAQYQRLLVRRGKKRAVVAVAHSMLIAIYHVLSGQSFVDLGADYYNQFNAERKINSYLVKLKNLGWVPPLTTSS

SEQ ID NO: 201554 - protein, 333 aa, unidentified
MQNFYFIGIDVSKKKLDICVMSNSKVLKEEQVSNHPQAIATVIAGIKEELSMSNDCFIICAEHTGQYTYPLICACKSVGSKLWLENASQIKYCSGVTRGKNDKVDARRIAEYAMRFFDKAKPYQRPIEELMRLKQLEAERSLYLTDLAKYKAQLSDQEGFMEDKIFKRKAKRLKEMIKSLEKTLKEIAQEMADVIYSSEELSRQMRLLKSVEGVGPIVAMNMIIATEAFTRFDNPRQFNCYVGVAPFAYTSGSSQHSRNRVSQRAVKYIKCLLHMAAVAIAHKKTGDLKTYFERKVAEGKNKMTVLNAVRAKLVARMFAVIRNNRVYQPILSV

SEQ ID NO: 201555 - protein, 354 aa, unidentified
MPAVVSGFTLGLDLGDRTHHVCVLDAAGQIVRESSLPNTRPALAQLLAEFPRATVAVEAGTHSPWISRYLTDLGATVLVANPRKLHAISRNERKCDRRDAQMLARLARVDAALLHPIQHGSAQAQHALLGLKLRDALVRNRVSLINAIRFTLKSLGHAVRNPSSESFHKAVLADLPADCRPVVQPLLTVLANVTEQIKAMERDLVQRSKKDYPVTQRLQQIAGVGPLTALCFVLKIGDPERFSRGRDVGAYLGLCPRRDQSGGTDKQLRISKCGDGLMRRLLVSAAHYVLGPFGPACALREHGQRLSGTGSAREKKRAVVAVARKLAVLLLSLWKHGTDYEPRVTTSALVLTPA

SEQ ID NO: 201556 - protein, 463 aa, unidentified
MRKNEKKRTAIRFDSGLQQLRRDAAGMDIGAREIWVDVGVENDSEPVRRFETFTADLNRMAEWLIGCRVKTVVMESTGVYWIPACQILEDRGIEVLLVNARYAKNVSGRKTDALDCQWLRTLHCYGLLPASFRPAHEIVTLRSYLRHRQMLIQCAAAHIQHIQKAMTQMNLQLHHVISDITGLTGMKIIRAIVAGERDRQKLAAMRDARTHASQATIEKALEGDYRTEHLFALKQSLDAFDHYQKQIAECDRQIEQHIRSLETKAEPGSNLKPARSAKTRQRKRNLMEFNAREEAFRISGVDLTQINGINETAALSLISEIGINMNPWPTEKHFASWLSLCPNNKISGGRVLNRRTRKSANRARDTLCLCAQSLLASRSALGAFCRRICSRLGKPKGLIATAHKLALLIYRMLKYGRHYADIGQEQYEKQFKERALRSLARKAKELGFQLVSNSDLASEKAVP

SEQ ID NO: 201557 - protein, 418 aa, unidentified
MKLNETQKSKNINEKTLIVAVDIGKAVNYGYFRAPNGRDVKPFPFYNNQRSFRVFWQRICQFKRDERLEDCVIGFESTGPYAEPLFHFLRKKPAKLVQVNPMHTKRLKELTGNSPNKTDKKDPRVISDVISLGHALTLIVPQGTAAQLRRLTQARERAIKSRTAMINQLQHLIFVVFPEFLKIMKKTSSKSAIYLIKNHPTPESIVNMGLESLTIILKKISRGKLGQDRAKRLFQTAQDSIGIDEGKESILLEIKHLICNIENENQFIDNLENEMGYYLKQIPYSDSILSIKGIGEITAAGLIGEVGDFRKFKTIPEIMKLAGLDLYEISSGKHKGQRRISKRGRSLIRKLLYFAAVNMVRPHGIMHQQYHQMVDRGIPKMKAMVAISRKLLRLIFALTRDNTLYKESYGTDTYKLAA

SEQ ID NO: 201558 - protein, 315 aa, unidentified
MATSSETYVGIDVSKDRLDVAVLGERQETQVENSREGIARLVEQMQDLQPELIVVEATGGYQRAVVEALFWAGLAVAVVNPARVRQFARACGLLAKTDKLDAQVLAVFGERVQPRRYESKSEAGKYLSALLGRRRQLDEMLKAEQNRLRTTSASLKSSVKRMITCLKQEKKLLDEQVQQCVAEQEAWQEQTEILKSAPGVGPVTTATLLAELPELGKMDRKKIAALVGVAPMNYDSGKKRGYRKTKGGRGEVRSVLYMATLVATRYNPLICAQYQQLLKRGKLKKVALIACLRKFLTILNAMLRDRQPFRCASTA

SEQ ID NO: 201559 - protein, 387 aa, unidentified
MIYVGIDIAKQKHFASIMDSDGTVLEDPFAFSNDYQGFHNLLSTISSFKKNEMLIGIESTAHYAENLTCFLFSKGFNVCIINPIQTASLRKSNIRKTKTDSVDTFLIIKALSLNNYRLFSQRDYDSLKLKNLCRFRHKLIKARTKVKIQLVSYVDLLFPELQYFFKSGIHTKTCYALLKEESNPDRIACMHLTRLSNLLKKTSKGHYDKSHAIALKELASHSVGIKNDTISLQIFQSIQQIELYNSQLTVVDASIRETMDKIDSVIKTIPGIGTLNGAMIIGEIGDISRFEKPCQLLAYAGLDPSVYQSGNFTAARTRMSKRGSKLLRYALINAAWQTTLVNKTFKDYYNLKISQGRRHYNALGHVAHKLVRVIHKMMTDNIEFNLA

SEQ ID NO: 201560 - protein, 357 aa, unidentified
MAKSIKELVTVLKVIGLDLADVYSDWAGLNEDGKVVRRERVRTTESELRSVFGAVAPTTIVVEVGTHSGWVSRVLTSLGHTVIVANARRVALIHRNKRKNNRIDAEFLARLGRVDKELLFPIRHRGAEAQGDLAVLRTRDVLTRSRTRLINHVRGMCKSFGTRIPKCSAEAFVTRASALVPKELARAMSVVLEQIAGLTAAIKVLNKSVTSMMESHPAAKIVAQISGVGELTARAYVLTIEDPQRIRRSRSAGAYFGLVPGTDDSGEKHQPTRITKEGDPFCRRLLVTAAQYILGHFGKDPDLRRHGQTIAERGGKHAKKRAVVAVARKLAVVMHHLWVHNETYVPLFNSAKTDIAA

SEQ ID NO: 201561 - protein, 482 aa, unidentified
MKKRNVFQNQSQEILSLFEKANDRSKVMCIPIDYAKKDHLAMLCDGNGRIIRKPFSVKNSPEGKNYLIDQVKKSCHHHGISLQHIVFGGEDCGSYTDNFISTLRSENWLVAGVNAHDAKTQRENVQASTDRLDLLGICKMILSCRANCSPAQSGNYLDLRTLVRQRRKMINMTTGVKNRIHTFVDQIFPGFLNEKNSGILPFSKCSLLLMEDRFSVHQILRRRRSTLTKLLTRCAIHQPDNCAKKLQQYAAQVLKPPENHLTTLQISLKQQAKLFNCLQESTEQLEKEIAESLAQTQGAFLTSIRGIGIILAAGVCAEIGNPNKQKSLSNLVSYSGIIPRVKQTGGIQGKPQTKKVGKRCNRILKNYVVQSASHIGLHGPEDLMSDYKRRDTQGQHADFGMGRRYLRMAMGLMRTSQTYLPESLRGKKSSMKGRGLYYLMTWPKLRGKWRDANALDIAFDKDMPLGQWRNMIQELYGIGLKL

SEQ ID NO: 201562 - protein, 345 aa, unidentified
MYYIGLDIHKKTISYCIKDASGKVFGEGEVAATRADVDRWMRDLPQPWTVAMEATLFTGWVYDQLRPQAAAAKVAHPLMLRAIAAAKKKNDRVDAAKIADCLRCDFLPECYMASSATRERRRTLRYRNLMVRQLTQLKNKMAGLLMESGVSYNKAKLHQPGYFTELLATNQEIDASLQPLLRLNREMLVRLERTERGLLKALTRDGQLAGRVKRLMTIPGIGPVTALTWVLEVGDVTRMASVKEAISYCGLCGAERSSAGVAQRTPLSKQRNPHLQTVLVEAAKLAPRWNADLALVYEKEKQKGNHNRATLAVARKLVAYLLAVDRGQRNFVVKTEAAEKQQSAA

SEQ ID NO: 201563 - protein, 358 aa, unidentified
MRSSATAGLVVGVDTHRDTHRDTHTAALCDLAGQALAVRQFIAGPGGYAAALAWARQEAGEAGLAWAIEGTRHYGLGLARYLTAAGEHAGEIDASKHAGKRRNGKSDALDAVRAAREMLARPVAAQMRAAGDREALRLLMCDRDNAVASAKTARTLLTSVIVTAPATVREQLRHLSRDRRATVCASLTSPPGADRQTRVLYQTLARLGQRITTLARTAADLQKQISALVEDMTPGLVAAEAGLGALTAAQLLLSYSHHGRIRSEAAFGMLPGTAPVPVSSGRTDRHRLNRLGDRQLNRALQVIAVARMRSHPPTQAYVQRRLTEGKTLREIRRCIKRYLARHFYRALRNQPGLELDRT

SEQ ID NO: 201564 - protein, 421 aa, unidentified
MPMTNQLNIVCGADIHQRFLVATILCRDGRTWANRFLMNLNGLIDFKSWLVSHGCQKVAVESTGRFWIPVHMILEGTIDVIVANAYKIKHIPKKKTDLKDSEWLAELCLNDMIEPSRIFPKEDRELRNLTRTREAYVRDLSKEKNRIHNVLESCSIKLASVISDIFGKSGMHILKGLLSGTSIDEVLKGIPDKRVREKKSEELRDALMGKLEATDIFLIRQSLQIMSQFEMRIEELDREIRSRIASRPMDIKILRSIPGIGMVSAYTILAEIGNYLDFKKPEKLAMWAGLVPSVYQSADKLITGGITKQGSKHLRWILVQVAHAIAHAKGGKLKKFFLKIRAKKGYLVAVVALARKVLCLIHHLLVNQEMYEEEGCLSKRDAPIPKNKNPAILTIEDMIQCIAQAGYEVKKVNFGGDGQCR

SEQ ID NO: 201565 - protein, 357 aa, unidentified
MEKYLKQSLGIDVSKLNLSLSLGFLNGMLEKEFDSHPDVSNDLKGYKELLKWLKASVDSEVELLVVMEATGVYHQGIAHYLYEQGYSFCVMQSGRVKRYAQSLDQRSKTDALDSRMLSMLGLERNIRLWHPPSKELQELKGLSRERSSLLNDRTMETNRQGAIASSVHSNARALKRHKVRLKLLNRQIAAVEEEMGLLIEDNEELKRKLDYLTSIPGVSFISAATVIGETLGFESIVNAKQLASYAGYDVVLRESGNFKGKTRISKKGNSHIRAVLHMPSMTCVRCNTTLKQFYNRLKPNKAKPLVALVAVQRKLLILMYTLWKNEEKYDAEYEIKKQQKHETLAARDNSLINQPVS

SEQ ID NO: 201566 - protein, 362 aa, unidentified
MSTYRSFVGLDVHARSVSGCALDEATGEVLRHRFGGDVGDVIAWVRGLPGPIRVAYEAGPTGFGLARMLNLIGIECVVVAPSKLMRPSGDKVKTDARDALYLARLLRVGEVTIVEVPSEAQECVRDLVRSREDCRHDLGAAQHRLSKLLLRRGIVYSDGTAWTGKHDAWLRRQRVGDPSFLSAFDAYYETVVQTAARRARLDKDIEAIAANSDYTPIVNRLGCLVGMAPLTALSLAAEIPDWHRFTGKTIGSFIGLVPSESSSGSTRRLGSITKTGNSHLRRLLIEAAWLHQKPYNPGPRSVLQARWAKAPQAAVLRGQAGNKRLNQQWKKFILRRKHGPTANVAIARELSGWCWSLAVMES

SEQ ID NO: 201567 - protein, 343 aa, unidentified
MDYFAGLDVSVKDTSVCIVDGTGKIAREVKVASEPAALLAVLTGSSYRFKRIGLEAGPLSQWLFSALAEAGLPVICVETRHMRAVLKAQINKTDRNDARGIAQMMRVGLYRPVHVKTLRSQKLRMLLTHRKLLQAKVIAVENDLRATLRNFGLKVGVVGTVKFEARIKELVESFPDLVALVEPLLVVCRVLREQIAILHRRVLATVRDDKVCRRLMTVPGVGPVVALTYRATVDVPARFRKSKSVGAVFGLTPARDQSGERDRPGAISRCGDEMMRTTLYEAAQVMLLRSAKWSWLKAWAMQIARRRGMKRAIVALARRLAVILHRIWVDGTEFRWTRETAVA

SEQ ID NO: 201568 - protein, 320 aa, unidentified
MMAQNDQIVVGIDVAKDKVDACIRSLSQRHTFPNTAQGHRKMIALLHKHKVSKAVMEASGGYERNWARVLRLAGIEVRIVDPKRVRSFALSAGRLAKNDTIDAEMIAWFAETFDEAPGQTHDAAHEELVALVKARKGLIDLKTRLQSQDEHAPAGPVQKAHARVLKSLATEITRLEAAISTKIKATPEFADRAEIIESVPGLAETTSATLIAGMPELGTVSKEIAAALLGAAPYDDDSGKRRGERHIKGGRRWVRNAIYMPCLGAATQNNPVLKAFYQRLIDKGKEPKVALVACMRKLIIILNTMIARRQKWNPNRYALS

SEQ ID NO: 201569 - protein, 394 aa, unidentified
MKLIGIDIGKNKHFFCIMDQQTGEIISQPVSFSNDKEGFDFLIQKIKSYPKDSILIGMEDTGHYHFALLKYLLDLQYTVALINPKTTDFNRKMQGGITKNDKLDTINICDVLDTPERKKQYRITKVNSFDLYEQKQLTRHHHSLKEEENVYKNRLQKCIDIVFPEFNKLFNSKYGTVYMNILKTFGSAENIANTDIRTIRKCFEIEGRGNRISLTPERLKECAGSSIGISSSAEVIQIKHLTAQIELIEEQLTEIDKKIEEFSIQNNSPILSIPGISHFSGTSILAELGDISNYSKPSQIIKFAGVAPLHYESSQFNAQHTSITKKGSKYLRKTLYQIILPVIRHNQVFYKYYQLKISQGKGHRCAQGHCVRKLLRIIYHLLKTNQQFDPQLLR

SEQ ID NO: 201570 - protein, 405 aa, unidentified
MTKSCFIGLDVGRYEIFACVLSENLKEITSFSFSQTHVGYNQLIDQVMHLQSQGLFPIVSAEGHDGNISPLDEYLITSQIPFKPLHPTAVSRYKEVLGQPQKTDAYDAFVIADLLWLQHQRIDEKQHHQEAGEFKSLSRTFKNLTRSKTQFTNQLQSELMSYFPELLTDKLFSKITGKAALNLLCEYPLPMQIQQLCVDKLAEFLSIHSKNHLGLETAIALKQRAMAVDRQPTGLESKALIVKTLAAQILAIDDHLGQIKKRIEKIGKASEVIMRMVSVPGISFLLATRLIGELQTFSRFATDSKLAMFVGLAPIAKDSGKVVGKHKTTHRANKIAKDAMMQIAACNSRNCAQSKIYYQKQRKAGKSHWQAIKCLARQLVRVLFAMSRDQTDYQLKALSMRVATT

SEQ ID NO: 201571 - protein, 433 aa, unidentified
MKVLYERVAGIDVHKDMIKVAIRSPGEKPWTRKTEILEFRTFYGVLQAMARELRRRGVTHVVMEASGIYTDPVYYALCEQDFTEVAVINPAHAKALRGHKTDAKDCARLAELFECGLLRGSYIPPAELKEVRDLTRYRMKTVQARASEVQRLAKALESAGIKLGSVASDITGVSATAMIESLIDGERRGAVLADLARGRMRTAGKLTDLSMALTGRFTGHHALLCRLHRDRITVLDEAVAGLDGRIAGKVTRWQREAGLLTSVPGFGDVVTQAWLGEIGPAPHRHFATCEKLASWVTLCPGNNISARKRKHGRTGDAGTYIKPMLIQAAWAAIRVRGRLQARYNRLVRRFGGDKNPAAKKKAITAIAHTLLKIAYQVLKSGTPYQELGADYYTRRESPEQKQAWLERQLQKLHPGCTVTITITSPEAALPPSA

SEQ ID NO: 201572 - protein, 429 aa, unidentified
MDEVDDVELLVERVAALDLGKAVLEACVRVPHPQRLGRRMQELRGYGTTTAQLLAMVAWLRHWHVQRVVMESTSTYWKGVYYLLEAEGFDCWLVNAREVKNVPGRAKTDRADAVWLAKVAERGMCRPSLVQPPEIRRLRDLTRYRRALVQDRTREQQRVEKLLEDAQIKISSVLSDLHGASGRSMMHALIAGERDPRTLARLAKSGARKKTDQLEEALRGFFTDHHATILTMMLDNSDRIGDQIAALDALIEDAISPFSRQATRLADIVGVNTVAAAELIAETGVDMTRFPSAAHLVSWAKFCPQTHQSAGKSTSKGRGKGNPWLAGTLGRIAFANSRADTFLGTRYRRLARRRGKQKAIVATGNSILTVIYHLLSDPDAKFCDLGPGYYESRINKHRRARDLATQLQTLTGQHIAIRDGKAVITDTVA

SEQ ID NO: 201573 - protein, 349 aa, unidentified
MILVGCDLHARDQQVAVLDTATGEIQEQRLTHDGPSVEQFYAALPGPVTVGIESTGYALWFHALLHRLGHAVIVGDAAKIRAMVVRKTKTDRRDAAHLLDLLRHDRFPTVWLPDPAVRDQRTLVAHRMRLVRMRTMVKNGVHAIALNYRLALGPSLFTRAGVAQLQALSLPPHTSCRRSESLELLRWLDTHIKGLDDQIEEAAHAHPEAQRLMTHPGVGPLSALATVLVLGSVIRFPTSKHVVSYVGLAPAIESSAGKHRLGRITKQGNALLRYVLGQAGQAAIKRDPDLRRLYYAVLHRRGRSRAKIAVARKLLVRLYVMLRDQIDYQTFLYRAPAAARRKELMPTTP

SEQ ID NO: 201574 - protein, 277 aa, unidentified
MDTTTTPPSHIWGCDVGKNEIVVFDGARLRRIANRPEALAAFVRPLDRDGLIVCEATGGYELPLLAAALDAGVPAHRADARKVKAFIRSFGTLGKTDAIDARALRRYGYERHAGLTLWRARDEDRVKLQSLVLVRRDLVEDRRCWQNRRDAPGAEALSRHFDEILAVLKRQIVAIDAEIRALTENAEPLAEANQALVAVEGIGRKTSAAMLGLLPELGTVANKQIVALSGLAPHPDQSGTEDRYRKTRGGRAEVKRTLFMAAMAASRSGFCSCCGQF

SEQ ID NO: 201575 - protein, 349 aa, unidentified
MFAGIDTHKDTLAVAVIDDAGRPLAVEEVRNTTAGMAGLQALLERHHVRRVGIEGSGTWGRAAAAHLVAAGGMEVVEVPTSMTSRERTGRPGAGKSDPVDAVAIARITAREPNLTAVRTEAGPAADLRALADYRRQLTNERTALANRTHAELHGLRPGYHAQIPRLNAPTFIAAALALIADDTSVRAALTRRRLARLAALTAEIKDLAGLIEQAVATAETSLTGLYGAGPIVAATILGEVLDVRRYRSRHAFAAANGTAPIPASSGRTSRHRLNRAGNRTLNRALYTIAITQIRADTEGRAYYQRKRAEGKTNREALRCLKRRLSDVVYKTLHADLARHERQQQQRDAA

SEQ ID NO: 201576 - protein, 341 aa, unidentified
MGRFIGVDLHKNSFTSCSYKSEDDHIFKTYRLSPKGLDAFKSSLSKGDEVAVESTGNTAFFVREVESRVKRIRIVNPIQFKAISSSVKKTDDADALTIARFLSRDMIPEVRMRTKEQSQTSSLIGTRDKFVKLRTALKNKVHNILNANGIVTKPEMFTSEKGLEKVLGLELEGSYRFEVGLIITEIRNLNQAIDKINEELKARGQKIEGHKNLTSIKGISDIGATIFLNTIGDINDFKNEKCLAGYFGIVPRVYISNKTVRYGRITKMGNKIARTALVQSTLVAIRYSPYLRRFYEKLKEKKGAGKAIIATSRKMLGIIYNTLKNNWVFEDFTKFKLAGCA

SEQ ID NO: 201577 - protein, 364 aa, unidentified
MDQLTHIGLDVHKDTIAVAVLRPGVTECDERVIPNTPEAVRRLLTRYPDPSVLSTCYEAGPTGYDTHRLITSLGIPCDVIAPSLIPRRSGARVKTDRIDARNLARLHRAGELVAVRVPTPCEEAVRDLIRAREDLKNDRRIARQRIRSFLLRYGKRYPAPSSRWSTRFEVWMRALRFDEPAAQAAFEHLLGAYFVRDSQLTAVDRQIEDLAALDPLAEGVACLRAFRGIDTLSAVTILTETCDFRRFASAGSYMAFTGLVPSEHSSGASRHQGSITKTGNCHIRRVLVEAAWAYRHAPAVRGAHAKRLEGQPPDIAAYSWAAQCRLNTTYRKIAAKKGPNKAVVAVARELSGFVWGAMTDNTGA

SEQ ID NO: 201578 - protein, 313 aa, unidentified
MMTLYNNFVGVDIGKFSFVVAIQGQKQVKEYDNDSSGIKSFIKDYQKYLSQGLCILETTGGYEMRLVLTLCEAGYSVHRANTRKVKHFIRSLGNSAKTDKLDSKALALYGYERGARLECFTPQSQQALALYELVQRRQDLKRLLVAEKNRLKAPRANLVQESCRVMIETIQQQVQLITEQINAFIERDSELKSKKEILKSIPGIGDITANELLVLLPELGTLSRRQIASLAGVAPVANDSGTFKGYRATGHGRSDIKPILFMAAMAARNSNSSLKSFYNRLIEAGKKKMVALTALMRKIIVIANARLKPSIAI

SEQ ID NO: 201579 - protein, 328 aa, unidentified
MAFTPAAEGTPPSPTPDCWIGIDVAKAHLDVATWPAIERWRVTRDEAGVVALTEWLRARTPRLIVLEATGGLETPVVTALVEVGWPVAVINPRQARDFAKATGRLAKTDALDAEVLAHFGQAIQPEPRPWKDEETQELAAVLQRRRQLVEMLTAEKNRLASAHRHVRPDIQTTIAWLEGRLKDLDGDLQRRLRASPVWRERDDLLRGVPGVGPVTVATLLAALPELGTLDRRQISALVGVCPFNRDSGQCRGRRMIFGGRAGVRAVLYMATVTASRCNPVIKAFYQRLRAAGKPAKVALTACMRKLLTILNAILKAKTPWQPPAECTP

SEQ ID NO: 201580 - protein, 345 aa, unidentified
MKVRRTRSKDMTQPAALYIGADVHERESQVAIFEPSGTLLTEKRLPTTNLQTFIDSLPGEKHVAIESTGFIYPIYDKLSTLKSCHVSVANPNKVKLIAKSKLKHDRADARILGELLRTNYLPASYMPDLETREKRLLINDRVRYGLRSGELRGSIRWLLKRRGITVQHPFSPEGKRTLRELGLQEINIRLDELELVQRIIQRLNDQIAKTVPEDPNAKLLDTLPGVGPYTALFLASEIGDVNRFPDSKHLCAYLGLVPSLHQSGDTTVTGHITREGNKWLRRNLTECSRVAIRKDPHLRKFYLNLRHKRGEKKALLAVARKLGTYTYWMLKRNQTYEELFPWIAS

SEQ ID NO: 201581 - protein, 405 aa, unidentified
MKVYIGIDWSSQKHDIVYLTEEGGIIAYQTIPHTPNGFEAFDDQRMKLGVEVEDCLVGIETEHNLFLDYLSLHQYRQIYVIPPTTIKGSRGRFGASKANTDRSDAHLIADVLRTDGARLHVWHADSLLTQQIAALASLEQFLTRTIIQTNNRLRNVLWRYYPNAASVFTGLDLQISLEFICAFPTPQSAAELTFEQFKAFARSHHHSAPSKLPACFARLQKPQPEALQQTVLAFQSEAVRLARLSLQAVQDKAATIRETQELFVEHPDYPIFSSLPGVGKILAPALLAKFGDDRQRYPTPQVLQSVAGTCPVTRASGKHKYVLFRYACDHEFRWIVQQWAKCSIDDSVWAYTYFQSIRPHCDSLSHAYRRLANRWLEIAWRLWQDRVPYDEERHLRQHALRVKPI

SEQ ID NO: 201582 - protein, 353 aa, unidentified
MKPKMEPNIGSLAVIGVDIGKEVFHIVGLGVDGKIAFRRKIRRLGLKDAFEKLPPCIVGMEACLSAHFVSRVLRALGHEPRIIPAIYVKPFLKGQKNDYNDAEAIAEAALRPNLRVVQEKSQDQLDLQACHRVRSRLVSRRTATINQIRAFLIEQGIAVRAGPRALRNSLFAILENRKDEISPRTAGLILGLYEDWCRLDERIETVTGEIEKLSQVEATCRRLMSVPGIGPLISTGIVAAIGTGEAFERGRDFAAWLGLVPRQHSTGGRTILGRISKRGSKYLRTLLIQAAKVLLMRPHNWARYSFGAWLKTASERLHRNKLAVALANKLARIAWSVLRNDKAFDTHPEAAAI

SEQ ID NO: 201583 - protein, 456 aa, unidentified
MSKLKIKKKRKKVKAIDLPIELKHVNLDAAGIDVGSDRHMVAVPIGRDEVSVREFGAFTSDLQTLADWLRKCGVTTVAMESTGVYWIPLFEILEREGFEVKLVDARKSKNVSGRKSDVLDCQWLQTLHTYGLLTGAFRPADKICVLRGYLRQKEMLVQSSSMHIQHMQKALQQMNLLLHNVVADITGVTGMTILKAIIAGERDPKVLARHRDPRCRNSVQTIAKSLVGNYREEHVFALTQAVDLYEFYQGKINECEVAIARCLSTQAHQRDYEPPESQKHIPPQRRIRAGVDLRSRLFKLTGVDLFSIPGLAADTLLTILAEVGFDMSPWNTEKHFASWLAVCSGTKISGGRVLDRKSKRSANRAAQAFRLAAASLARSNTALGAFYRRIRARIGGPQAVTATAHKIAITFYSLLKNGTTYVEIGEQAYNQKFKERRLKAIHKQALALGYQLIPAT

SEQ ID NO: 201584 - protein, 456 aa, unidentified
MKPHGNEVEEIDSDEVEGVLTVAAAIDVAKASGMVCVRRPHPQVEGRRTSRVWEVESTTNSILALGEDLVALGVERVVLESTSDYWRPFFYLLEAAGLSVWLVNARDVKQVTGRPKTDKLDAVWLAKLAERGMLRPSFVPPREIRALRDYTRLRAELVEERSRHKQRLEKLLEDALIKLSSVATDLLGVSARAMIEALIAGERDPAALAALAQGRLNAKRARLLEALNGRFDDHHGDLARLLLDQIDACTEKIDRLSARIEVLVAELPEPSPPSDREPAPPNDVPLDADSDGRRLKTVERLDEVPGIAQRAAQIIIAEIGLDMAQFPTPAHLVSWAKLSPQTIQSGPKVKAGHTGKGNRYLKGVLGEVAVAAAKTDTFLGERYRRLVRRRGHQRALVAVARSILVIVWHLLADPDARYVDLGSDYHTSRLDPDRKTRDLVRQLQALGHAVTLAPAA

SEQ ID NO: 201585 - protein, 369 aa, unidentified
MSVYVGIDVHRKRSQVAVVDQTGEVLVNRNVPNGTETVLSVIGELPAGTPVAFEAAFGWGWLVELLDDYGFEPHLVHPTRCKAIASARLKNDKVDAHILAQLLRADLLPEAWIAPPAVRQLRARLRHRIQLVRLRTLLRNRIHAVLAEHGHDRPAGCWSGPGRDWLAGLDLPAASREVIEDCLGMIDAIEPVVDRLDGEVRDQARTDPRVRVLTGLPGVGELTALVMLAEIGDIGRFGSARKLAAWAGLTPTVRGSDRTIRHGHISKQGSTWLRWILCEAAQSAKRSPEFAATYQAIARRRGKKIATTAIARKLLTRAYHLLTEADAEADAEADVDADTPAEETCTPRRTRAGTQTGRSPQPGRARVSA

SEQ ID NO: 201586 - protein, 351 aa, unidentified
MEERRHRFCALDGRGEVVEEGSLLNDRASLARLTARYPGALAVMEAGTHSPWVSRYLEGLGWEVIVSNPRKVRAIYQHERKSDQRDALMLARIGRMDRALLYPVRHGSEQAQQDLLRIKLRDSLVRARVALINSVRFSLKSLGYAVCNPSSERFHKVAMERLPERVQQMVAPSVQALAELSTRIAVLEREINVVARTKYPQTLWLQQVPGVGALTALYFVLKIEDPQRFENVRDVGAYAGLCPRRDQGGQSDPQLRISKQGDPYLRRLLVSAAQYILGPFGPQSALRAYGLMLAADGSARARKRAVVAVARKLAVLLLSLWKNRSHYEAFPHWQTIEDKRSGTIAMHRVEA

SEQ ID NO: 201587 - protein, 363 aa, unidentified
MTYERSTLVNSEKYIGLDVHQATISVAVIDSKGKLVMESILETKAATILEFFAGLRGTLLVTFEEGTWAAWLYDLLKPHVAKLVVCNPRKNALLKHGNKSDRIDARKLADLLRLNDLEPVYHGETGIRMLRELARSYLTIVKDLSRVMNRLKALYRSWAIPCAGRDVYYTRHRSQWLGKIPEAGTRRRAEQLYLQLDMLQHLRQQARRELLAESRKHTITAKLRQIPSLGPIRSALAVALIQTPHRFRTKRQLWTYSGLGLETRDSGEYCYVQGQLRRTRKQVSIRGLNKDHNHDLKGLFKAAATRASVQPGPFQDFYQRSLAQGIKPTMVRLTLARKIAAITLTLWKKGENFDLEKLKSQAA

SEQ ID NO: 201588 - protein, 437 aa, unidentified
MRVLYEHVAGIGVHKDMIKVAIRSPGEKPWTRKTEILEFRTFYGVLQEMARLLRRRGVTHVVMEASGVYTDPVYYALCEQDFAEVAVVNPAHARALRGHKTDAADCRRLAELFECGLLRGSYIPPAELREVRDLTRYRMKTVQARTSEIQRLGKALESAGIKLGSVASDITGKSATAMIDSLIDGERRGAVLADLAIGRMRTAGKLADLSMALTGRFTEHHALLCRLHRDRIAGLDAAVADLDDQIAGRAGRWQRELDLLKTVPGFGDVVAQTWLAEIGPAPHRHFASHEKLASWVTLCPGNNISARKRKHGRTGDAGTYIKPMLIQAAWNAIRPKGRLQARYSRLVRRFGGEKNPGAKKKAITAIAHTLLKIASQVLKSEVPYQDLGADFCTRRESPDQQRAYLERRLRKLYPGCAITITISPPEAVLTSTVSNAP

SEQ ID NO: 201589 - protein, 390 aa, unidentified
MLAGIDTHKDTLAVAVIDEHGRLVDQVQVPNSEQGFAKLTDLLLGHRVHRVGIEGSGSYGRAVAIHLALAWPPAPDPEHPAGESRPELEVVEVPTLMTSRERRAQLRGKTDPVDALAVARVTAREPKLPPVRLATGPASDLRALLDYREDLLHERTALANRVHADLTGLRPGYQHHIGSLTNRTRVQKALDLLDDLDGAHGARVQITRRRLQRVLAIDVEAAELKQQITRLVATTGTSLTDIHGIGPVVAGRLLAEVVDVRRYPHRNAFAAANGTAPIPASSGRTVRHRYNPGGNRQLNKALYTIAITQIRGDTEGRRYYDRKRAEGKTGREALRCLKRRLSDLVYRVMTEDIADQPATTPTNPLAPDAVTQGIEVAVGAPDANEARLTA

SEQ ID NO: 201590 - protein, 355 aa, unidentified
MLRFRLMIKRGLNVSVKETSVCIVDESGKLCREKKVVTHPDDLVAVLSDPAFNFERIGLEAGPLSQWLFEGLAKAGFAVVCIETRHTKAFLKAQQLNKSDRNDARGIAHMMRVGLFKDVHVKTLTSQKRRALLTARKLLQEKAIAMENDMRGLLRNFGLKVGTIRAFKFDERIRELVEAAPDLAEIIESLLAARQKLREEFVKLDRKIRGEARVDPVCRQLMTVPGVGPIVALAYTSTIDIPSRFRHSRAVGAVLGLTPVLNQSGESSRIGHVSLCGDGMLRGLLYEAAQVLLIRVKKWSWLKAWAMNVAKRHGIKKAIVALARRLAVVLHRMWVDGSEFRWTREATPTTTDATA

SEQ ID NO: 201591 - protein, 536 aa, unidentified
MNSLTSVAAFHYLVAGCPDYRGTPDPAGEFVNLIASRAERPVSYPYKRREGMAKESVYERLTGGNRKQRKDLLRRLYSDDPGLDVVHAKAAGIDIGNESHFVAVPPAMDTQPVREFGSWTADLECMAAWLKSCSIETVAMQSTGVYWFAVYDVLEKHGLKVFLVNASHTKNLPGRKSDVQESQWLMKLHTYGLLRNSFRPPENIRPIRAVWRLRDRHVQDAGRSVQHMQKALTSMNVQLANVISDISGTSGQAIIRSILAGERDPRKLARLRDQRIRASEEEVARSLEGNWQEDQLFELQHAVDEYDFRLKQIAECDSKLQAYLAVLPTRISPGADTGTPPPAPAGVTGKKRKQPKKAQGYAPSSFNLAAELIRVSGVNALRVDGINLITFQTVVAELGTDLANWFPTEYHFASWLGLTPRRDVSGGKVIRHTRQKSRNRVAGVLRMAANALLRSDSYLGARYRSLRTRLGSPKAIKAMARYLACIIYRLFTKGQAWVDRGAEHFEQNRQTRDLARLQAQACSRGFRLVPVTGEQA

SEQ ID NO: 201592 - protein, 362 aa, unidentified
MITIGIDPHKQTHTAAAIDAATGELLAELTVASDRPGHERLIEWARSLASEAERRFALEDCRNINGRLERALLAAGERVVRVPPKLMGDLRRGAREFGKSDAIDATAVARAALREPDLPLATHDPELRELRLLVDHREDLVAERTAIVSRLRWHLHDLDAGLEPAARTLASERIRRGLAQRLARREQSVQVRICRELVARIGEITRRERQLASEIRMLVRDLAPRLLELPGCGGLTAAKLVAEIGPPQRFATDAQLANHAGCAPLEASSGRVQRHRLSRRGNRQLNAAFYRIALTQSRVHPGARAYLARKRAEGKSTAEAFRCLKRHLVRAVFRALRASPEERISLSQFPGQTAPDPELVLT

SEQ ID NO: 201593 - protein, 487 aa, unidentified
MSVVTGHVCDIGEAAKAVIPFERVSITTYPNRCGIPNEMMEEDMAQRKRTALELAHPNAAGIDIGSASHFVAVSPDRDDEPVREFKSFTEDLEELADWLVCCGVDTVAMESTGVYWIPRYEILEARGFAVNLVNARHVKNVSGRKSDVLDCQWLQQLMSYGLLSGAFRPADEICMLRAVSRQRDMLLASQSRHIQHMQKALTQMNVQLANVISNIVGETGQKIVRGIIAGERDGHVLAKMKNARIRASEEEIAKSLQGNWREEHLFALKQAMALYDNYGTLLAECDTKLESMLATLVGDNDSDPGRGRRASNSKNAPQFDVRTYLFRLCGVDLTRINGINPTTALKVIAEVGPDMSRFKSAKHFASWLGLCPGTKISGGKVLSGASKRTTNRAAQSLRLAAAALHKSQSALGAYFRRLAARLDRAKAITATAHKLARLIYTMLTKGAEYTDQGQDYYEERYRQRVMHHLAKRAEKLGMQLVPAPQST

SEQ ID NO: 201594 - protein, 429 aa, unidentified
MSEEKAKELRVSVDVGYRRHSVAIGLPSGEVLEEFEIEHRLEGFQDFFSRIEKHNPKQGYSVAVAMEGYNGWARPLDGMVRQRGYRLYNINNLKLARFKEIFPGSAKSDRIDARKGLELFQLRDHLPLAKEVLQEVSGTPKENEVLKRLTRRRRRLVNERVRVVNNLQADLQAVCPGMLEITSEASNQWFLNFLLSADTLPQLARLRKASLLKIPAVGRKYASLIEDWQKRAHFGAEVQWVSEMIQEDAQRCLDLEEKIKALETKIEQVAKDSKIAKILISLPGFGPVCTSELAGEIGTIERFGKEGSLALYLGMSTLDNSSGKYQGTKAPKHVNTRAKAAMMTAIDRHRKYVPESQKYYEKKRGEGKKHNQAIRALGRHLCRIIYKMLKEERQYEIRPRKGNTTTKVASRSSLKTQMRRPKIASKKTK

SEQ ID NO: 201595 - protein, 343 aa, unidentified
MEYYVGLDVSLKQTSICVVDQTGSVVREGVVDSDPEAISVYVRSKAPDAVRIGLETGPTSTWLWTELKRLGLPVICIDARHAKAVLKMQINKSDRNDAIGIARIMQTGWFKKVHVKDIDSHSVRALLASRALLVKVKRDLENHVRGLLKNLGLVIGRAKFNVFAVRAEELIEDRPELVAAIRPLLEARIAVEQQVNELDRKVMKLAGRDAQVRRFMTVPGVGPITALAFKATIDDPARFARSRSVGAYIGLTSRRHASGEVDWSGRISKCGDAMLRSYLFEAAGVLLTRVPTWSAVKAWGMKLAKRNGLRKAKVAVARKLAVILHRMWIDGTEFNWSKKEIAA

SEQ ID NO: 201596 - protein, 355 aa, unidentified
MKYYTSTTQFNCGIDLHARQMYVCLMDRDGKKLVHTNIKYNDFAYFLKLVAPYKHDLTVCAECMFGWYWLADACSAAGLHFVLAHALYLKAIHGGKNKNDRIDSEKIAHLLRTNLIPPAYVYPAAKRPLRALLRQRLYFVWRRSELLSRIHSHQLAHNRIPPKQTRSNRDPWEQQLLAAEDHPLRQLALKNDLAMIRHFDHQIAQLEEELQRQAKKLAARDYALLQTVPGIGENLGMTILCEIGDIARFPTVKNFLSYSRLVKGTVASVGKIKGLRGAKLGNPYLRWAFGEAAVIAKRDHAVIGPLAQRLEARMNGNKFKANTVVAIKLARAVYFMLKSKTVFDPDRLVAALSRN

SEQ ID NO: 201597 - protein, 309 aa, unidentified
MEIVVGIDVSKERLDVAILPQEEVFAVGNDHAGIDELVERLKGIGVDAIALEATGGFEMLAVAGLSAAGLTVLVVNPAQVRAYAHAIGRRAKTDPIDAAVIAAFVLATKPEIRPLRDAETQALSELVARRRQIVQMVVAEENRLRMALAKQAQESIKRLVKALRRELESLDADLDSHIRKSPVWRVREALLTSVPGVGATTARTLLAELPELGSLDRRHTASLAGVAPWTRKSGKWKGKSFIGGGRGKVRAVLFMAALVASRYNPDLKAFRDRLVAGGQPKIVATVATMRKLLTILNAIIRDGRPWQNA

SEQ ID NO: 201598 - protein, 406 aa, unidentified
MSITCGIDWAEAHHDVALVDSDGTALVKKRIDTGLGGFTELLALIAEHSDTTDVPVAIETDKNLLVAGLQAAGFTVYAINPRAVARYRERSAQAGGKSDSGDAVVLANILRTDRHVHRALPVISELGLAVKALARQHQEAIWARQLTVNRLRSVLCEFYANALDAFPNLTHKAALEVLRTAPTPAHGAKLSHTRVVALLRRSGRGDRPGLAEAIITGLRQPALRQPARVEAALGHAVVGLVKIIETMQASIADLEAALAAEFDQHPSANMLRDVPGLGPILAARVLAEVGDDPSRFATADGLRAFAGTAPITRASGKSRSVHARHVKNRRLADACHWWAFASITKSPGARAHYDRRRAAGDCHNAALRNLATKLLGRLWWCLVNNETWDEQAAWPASAKKPEPVAA

SEQ ID NO: 201599 - protein, 394 aa, unidentified
MNYTQNQKIEQVTESTLVLGVDIGSSEHYVRAFDYRERELTRKVFRFSTDINGFNSFYDWVTQICIKHGKNEAMIGCEPTGHYWYTFYQFVKDYGMKLAFVNPASVKKAKELDDNSPKKTDLKDPKTIAKLVIDGRYSFPYVPEGIYAEIREVTSSRDRIMKELNAASNRIQRWLKIYFPEYLTVYKKFDTTTGMMILEEVPLPTMVTALGVDNIIKIWREHKVRGKGASFNRAKTLVDAAHDSVGKSGGQGAVMEIQMLLEDYKVKKQQLEMVTSVMEELIMQIPNAEKMLSVDGVGLVTVAGFISEVGDISRFKNPKQIQKYAGFELVENSSGKHKGRTTISKRGRKKLRKIIYQVVLPLIQSNKEFRSIYDYYRKRVKNPLKGRQIGRAHV

SEQ ID NO: 201600 - protein, 330 aa, unidentified
MNEKLYGGLDVHKEFITGCIMDVQGLVLREHSFPVRKEAVEKFTEGISNAEITFALEACGMWQGTYRLFSDLGFPVKLANAKKTHDIACNKKTDAVDARTLADLLRTRYLPEVWIPTDEIIQLREITRHKSRLTRMRVQIQNKIKSTLLMKGISYEKNLWTESYLKKLEALDPQLKSFIHLYHVYIEEEKQVKKRIENIARNKGNPALLLSLRGVGPLSALIIYAEIGDIHRFSSPRSLVCYAGLCPGVYQSGGTTRTVKNTMVNKWLKWIIYECSGKAIMLDPRFRQYFNRMNEKKSYQVAKRATARRMLTIIWYMLMKHEPYRYGSSS

SEQ ID NO: 201601 - protein, 360 aa, unidentified
MLSTKVSSNQLKGRCTMKKLYGAFDLHSSNNYLGISDEKDRRVYKQRLPNQPDVILAELEPYREQLVGIVVESTFNWYWLVDLLMDNDYQVHLANPAGIQKYKGLKHSDDKHDAFWLAHLLRLEILPEGYIYPKEERPVRDLLRKRGHLVKLRTSLINSLQAIIHRNCGVKLNARKIKAIREDNVMPLLSGQEDLALSGMVSKEAIDYLGRQIRKVENVVLDRIKLKEEYIYLLTIPGIGKILALTIMLEVGPVSRFQKAGNLASYCRKVPTKWTSNNKKKGKGNKKNGNKYLAWAFSEAAEFARRYDDQARAFYNRKTSKKNFMVAHSALAHKLARAAYYVMSNIINGVRLDICKWGQA

SEQ ID NO: 201602 - protein, 377 aa, unidentified
MERLKFVGLDVHAETIAVAVAEQGGEVRALGIIPNREESIRKLVRKLGPVEQLRFCYEAGPTGYALYWQLTRMGAKCEVVAPTLVPVKAGDRVKTDRRDALKLARNYRAGELTPVWVPDAAHEALRDLVRAREAAKKDELRARHRLNKFLLRHGRRPPMGVKAWTMKYLEWIKREVHFEQMAQEATLLDYLHEVEHAGARIMRLDGAIEEAVKCVPLKMRAVIEALQALRGIARVASVTIVAELGELSRFARAKQLMGYGGIVASEHSSGECTRRRGITKTGNAHLRRVVVEAAWTYRHRPAVGTSLRKRQEKVSEEVKEIAWKAQQRLHQRYRKLLAKGKNKGIVVTAVGRELLGFIWAIGIKIEATQKESLQQAA

SEQ ID NO: 201603 - protein, 385 aa, unidentified
MHRRLAGLAGWPSSAQTLIIVVSRRSRVRAFSRSLELEEGPVSIVGGLDIHRKQITFDWLDLETGEVERGKIAPADREHLAAWLDARMRAGADVHLAFEGCTGWRYVAEELARVGVVGHLAEPADTAALRGPKRRAKTDRADAQHLRRLLADGRIPECWIPPAHVLEGRALLETYRDLRAEHTGWLQRIHAVLFHQGTPCPSRGVCSVDGRAELAVLTSRLSPAGQDQVMVALAMLAASEAQLDVVHRKLLLAARQLTGAKVLAANIYGVGPITGLALTCWLGGAGRFSSTRKAVRFAGLDVTVHSSDGKRSSGRLSRQGPAVLRWCLFEAGKTHARTDATDHDYYSAVKDRIDGKRAALSEARKIVRQACHILTELGDDAFAPT

SEQ ID NO: 201604 - protein, 368 aa, unidentified
MKHSIIFVGLDVHKDSIDIALADDGRNGDVRSYGAIGGDLDSLDKAIRKFRRSDAELRFVYEAGPCGYEIYRHLIAQGFHCDVIAPSMMPKRSGDRIKTDRRDAVTLARLYRSGELTPVYVPREDDEAMRDLVRGREDAVNATRKARQRLSAFVLRHGFRYAGRNAWTAVHLRWLADIKMPHPAQQIALQEYIHSVEESSERVDRLTEQILKLIPTWRLAPVVAALQALRGVAPVVASTMVVEIGDMRRFENPRQLMAYLGLVPSENSSGQTTKRGGITKTGNGHARRALIEAAQAYSHPARVSKVLRNRQQGLPREIKEISWNAQVRLCGRFRKLMARGKNRNRTVAAIARELSGFMWAIAREVPAA

SEQ ID NO: 201605 - protein, 347 aa, unidentified
MKHYVGLDVAMKEVSICAIDAEGGVIGEGKTVADPDAIVAWIARHVDGCERIVHESGPLSIWLTRELAARGAPVVCIDARAAHKALSARMNKSDRADAEALAQLARTGWYREVHIKSEMSDQLRLLLGARDRMIRIRQDIEAQARGVLKTYGIRLGRVSQGRSRASFREQLRSAASGEPILEQVAASLIAVHDTVCAQAAAIEEDLMALARESALARRLMSVPGVGPIVSLNFIAAIDDASRFSRASDVGAYLGLTPRRYQSGEMDYSGRISKRGDSAMRRLLYEAGTVLITKVRRFSSLKAWAVRLAARKGHKKAAVAAARKIAVIMLRLWRDGTTFVAGKQEKTA

SEQ ID NO: 201606 - protein, 339 aa, unidentified
MELLKQNVGVDISKDSFVATFATLLQGQIIKNKRTRNFNNTVKGIKEFIEWVSKLEDPSFDLHVTMEATGVYYEELAYTLYQGDRIIVHVLLPNIAKKYFESLNIKIKTDKVDSKILAQMGLERMLKPWVLSSKIYRKLKTLSREKGQMIKERTMIKNQLHAETHTAEPLSRTITRYKNRIKYLDKQIKSVEKDIEKTVEKDDFVSAKINKIKTIPGIKIATIVGVVAETGGFVNIQSIKQLTSYSGFDVRIQESGKWKGKPTISKKGNSHIRRLMYMPTLSSIQYANTYKTIYNRIKDRKEHNMVAVVAIQRKLLGLIYTLWKNDSAYIENYQKTETV

SEQ ID NO: 201607 - protein, 475 aa, unidentified
MSKSKRTRGSGKSSAGSEVKVRYEDGLNRISSHAAGIDVGSEEHWVCVPYSGGDAAERVRRFGALTCDLLAIRDWLKERGVTTVAMESTGVYWIALYQILEEAGLDVWLVNARYIRRVPGRPKTDRLDCEWIQRLHSYGLMRRSFRPSDDICAIRSLWRYRDRLIDQWSRCVKQIQKALHEMNVLLHKAVSDITGRTGTAILEAIVQGERDPVRLARFRDPRVKATESELAEALRGDFREELVLIVASALRHLRFAESEIATLDAHIEQRMGGLQPRSTDIGEAELVSTELKRNTHRHAPEFDAVHLVLRLYGVPLGEVPGLSATTLTGILSEVGLDLSRWENAKHFGSWLSLSPSARISGGRIIASARTARTGNRAGRYFRQAASSLKHNDTPLGQFYRRMRARNGTKHAIVATARKLAEIFYTMVATGSPYRYLDNSEYDRKLREMQIRNLRRRAAKLGLELKEAEPQKSKTV

SEQ ID NO: 201608 - protein, 339 aa, unidentified
MTEITRIGLDLAKNVFEVHAVNAQEQIVVRRSLRRNQVLKWFAKHPPCLIGIEACGTANHWARELTTLGHTVRLIPPAYAKQYVRRNKNDAADAAAICEAVSRPSMRFVPIKTVEQQADAVTHKARQILIKQRTMAMNSLRSLMAEFGIVVPQGPQHIGKLLAILADPEDTTVAAVARTALNTMSQVLSALELQIGVLDKDIRVRARTDVTARRLDTIPGFGPILSSAIAAIVTDPRHFDSGRDFAASLGLVPRQDGTGGKVKLGPISKRGNGYLRRLLVNGATAVLNGKNARNDPWRAKMLDGKPRKLAAVALANKMARIAWAVMTRQEDFRPRAVPA

SEQ ID NO: 201609 - protein, 354 aa, unidentified
MSNKSNSLVATIGIDIGKNAFHVVGLDRRGAIVLRQRWSRGQVQARLANMPPCLIGMEACVGAHHLSRGLHLQGHDARLMPAKYVRPYSKGQKNDFRDAEAIAEAVQRPTMKFVATKTAEQLDLQALHRVRERLVSQRTGIINQIRAFLLERGIAVRQGLRFLRTELPIILATRSDLLSPRMLRVIEELMADWRRLDERIEGLSEEIEAVARQDPACERLMTVPGIGPIISSAMVAAIGNGAVFTKGRDFGAWLGLVPKQISTGDRTILGPISRRGNRYLRALFVQAARVVLVRTKDSDRYGLKAWIDAAKKRLHHNVLAIALANKLARIAWAVLNKERAFECVSTRATSSQPA

SEQ ID NO: 201610 - protein, 423 aa, unidentified
MMKLKYSICCGLDVHKNVIVATIVITNKDGISEYMQKSFSTINSDIQRFHNWLIENNCYHVCMESTGKYWIPIFNYLENDIDVCLTHPKYVKAIKGKKTDKKDSKWIADLYKFDLVRCSFIPPKDFRQLRELARYRFKLVCMKSSEKNRIQNCMTVSNVGIASVLSDPFGKTATEIMSYLLEHTADSIDEKAVRKLIKKGAKAKSDEIIEAIRGYNIETDQAKKLELARGHLEYLDNMITQTEVELYVRIKPYYEFVEFVSTMPGMTELSSTIVLAETGVDMDIFDDAKHLCSWCGLSPANNESAGKKKSVRIAKAGDYLKPMMVQCALAAIKSKKQPYFAIKYGRIKKRRGHKKAIIAIARMMMVCIYHMVSEKKPFTPTDYEELMDPQNHVESVVLNENNVFAYLESLGYDSSKLVKRNDN

SEQ ID NO: 201611 - protein, 363 aa, unidentified
MLGVLMVKRFEEAPVSEQYVGRQFVGMDLHRRRSVLVRMTESGQQLETVRISNDPEYLRQVMARAGEAPEVVLEATYGWYWAADTLAELGATVHLAHPLGVKMFSLRRVKNDERDAADLADLLRMGRLPEAWIAPPATRELRGWVRHRAKLVGLRSGLKCQIHAVLAAAGVHVPMSDLFGPTGRKLLAAAPLAVESRSRVESLLRIITALEFEIDLYTGLVARRLREDPGYAAIQQIPGIGPVLAAVFVAEIGDITRFHRPEQLASWAGLTPKHHESDTTVHRGRITKQGNRLVRWAAVEAVQRIPTSTRLGRYRDRVGERRGRNIGVVAAARELLALVFYGLRDHHLRCLPPPPQRPRPRAA

SEQ ID NO: 201612 - protein, 346 aa, unidentified
MGALDPSSEPSSALDSNGPSTHGADATGRAVLRKKLRRSEVIRFFSDLPHCLVGMEACGSAHYWAREIGKLGHEVRLIPPTYVKPYVKRGKTDAADAEAIAEAVTRPTMRFVSLKTEEQQSVLMLHKSRDLLIRQRTMIRNQFRAFLSEMGIISATGNKGFAALVKEFYESEEKFPSECRSVLRTLCSQNDSLEKAIQEIEKGIMAWHRSNEVSQRLTTIPGVGPLTASAIVATVPDPSVFASGRHFAAWLGLTPKSHSSGGKNILRGISKQGNAAIRRTLVMGSTALVRQEKIRQKMNKATKGWLGSLLECKPVKVAAVAQANKNARIIWAMMVHKTSYEAPKAA

SEQ ID NO: 201613 - protein, 326 aa, unidentified
MFTVGVDLGKRKSQYAVLDAEGKPLVERALPNRREIVQKFLRGLPGPLEVGCETCINSYWLVEVVEAAGFPIQVGHALKMRLIAESRIKTDRVDAKVIAELLRTRFFPSIAIPPAEIRQARELLRGRVRMVRTRVQQRNRLHGILTRAGIDYTARDLVGPGVEAWLDGLDLAPAPRAMAGIYLGMMQDADSRIRALDRAIREQIRPVEPWAAIMQRLETIPGVGPFSAMLLLLELWDLSRFSDVKHLASYVGLVPSVHQSGQHRWGGPLTKQGNGLVRWILVEDAWVAIRQDSRYRGLYEHHVPRQGRRRAIIPVARQVLADVYAV

SEQ ID NO: 201614 - protein, 294 aa, unidentified
MFFFWGRPSCKTLRLLVSTSASILSTFTVSDKSGKALLCTKFTRTKLIEFLAGCTPATVVMEACGGAHFMARRIADLGHEPKLIYPQFVRPFVKSNKNDFVDAEAICEAASRPSMRFVQPRTEVQQAMRALHRVRESLVRDKVKTTNQMHAFLLEFGISMPIGVTVIKRLSTVLAENELPPYLAQLLMRLHAHYLYLVEQITELETALEQELSRDETGQRLQTIPGVGPITANVLSSQLGDGKQYSCSRDFAASTGLVPRQYSMGGKNTLLGISKRGDKNLRRRLLTNLDDSIL

SEQ ID NO: 201615 - protein, 404 aa, unidentified
MLWGRTLPPRLFKLAGVRNQIGEPAAMPSESTVHIAIELSVSSWLIAARLPGAEKSRLHRIEGGDTAALLALFAELRSRASAKMGGEANVACCFEAGRDGFWLHRLLTAHGVAAYVLEPTSILVNRRARRAKTDRLDAEGMLRVLAAWLGGDRQVCSMVRVPTPDEEDAKRTHREREHLVQEKLRIENRIQALLFTQGIRARPSLRSWAREMAELRTGDGRALLPLLRTELNRLRRRLVLILELIRELEAERAEALAAAANDAMVRKITALQRIRGIGSNFAAVLVREVLYRSFANRRQLASYVGITPMPYQSGGMDRDRSISRAGNPRARTTLIQLAWLWLRYQPGSALAAWFRERVGTLQGRTRRIAIVAMARRLLIALWRYVETGVLPEGVEIRAEAAPIA

SEQ ID NO: 201616 - protein, 310 aa, unidentified
MTIICGVDVCQAWLDAWLEPAGHRRFANSAEGVAELAAWCGVHGVELVVMEASGGIEQDAFLALWKRGQACAIANPRSVRKFAEAMGFLEKTDRIDAMMIAGYAEARRMVPTPPPSAEQQKLTALAARLRQVTTDLGVQKRRLHSAREPATRASLKEAIAFFTAQAKTLVAEIAALIDVDPLWTALDRTFRSVKGVADRTTAYLLADLPEIGTISNRAVTKLAGLAPLPDDSGKRQGQRSIRGGRASVRSILFLVADVARKYDPSLADFRERLLAKGLSKMQVRIALARKLLVRLNAKARDTRAMLANAV

SEQ ID NO: 201617 - protein, 415 aa, unidentified
MEKEEGIVFEQIIERGCGIDVHKKVIAATIRGKGIKEETKTYSGFTESIESMRDWLKENRITHIAMESTGVYWKPIYNILEADFEIILVNARHIKNVPGRKTDKKDSKWIAKLLLSGLLSGSFIPPKHIRDLRDLTRYRKKIIGQISSEKNRIQKILEDANIKLSSVVSDMSGRTATKIINAMISGEEDIQELVKYRHGKMQASEEELASSLKGKLTEHHKFMLTTIKESMQEKESIIEKLDKRIEEQLKQHELILDSELLQTIPGVGEIAAASILAEIGNDMSQFPNEQHLASWAGMSPGNNESAGKKKSSKTTYGDKHLKAQLVECGWAATRTKGTYLRSKYESLVVRRGKKRALIAVGHKILIAAYFILKEKTVYKELGSTYLADSKKEKRIKRYVKLLKEMGAEVEIKKVA

SEQ ID NO: 201618 - protein, 350 aa, unidentified
MSIYVGMDVHRKRSQVAVLDDAGVQQRNRNVPNDPAQLVPILGALPPGTPVAFEAAYGWGWLVDLLEELELEPHLVHPSRCKAIASARLKDDKVDARTLAQLLRADLLPEAWIAPQQVRDLRALLRHRASLVRLSTAAKNRIHAVLADRGIQQQTGLWTGIGRVWLAGLELPPTPRAIVEDYLALLDGLAEPIAHLEHQIHALAKPDPRVQALMALPGVGRLTAMTLVAEIGDIARFPTARKLCAWAGLTPAVRNSDRKVRHGHITKQGSPWVRWILQEAAQTAKRSPMFAPAYAQLARRRGKQIATVAIAHRLLARSFHILNQLEAATTGEGQTAGCARNNRMRLQHGR

SEQ ID NO: 201619 - protein, 370 aa, unidentified
MSVYVGIDVHRKRSQVAVVTEDGKVQLNRNVVNGSEPVLKLIGDLPAGTPVAFEAAFGWGWLVELLEDYGFDPHLVHPLRCKAIASARLKNDKVDAAILAQLLRADLLPEAWIAPPQVRQLRALLRHRASLVRLGTGLRNRIHAVAADHGYDRRASYWTGPGRGWLAELDLPPASREVVTDCLAAIDHLAPVIERPGAGIHRHAKADPRVKVLTTLPGIGEFTALVMLAEIGDIARFPNARKLAAWAGLTPTVRGSDVKVRHGHISKQGSAWLRWVLNQAAQTAKRSPQFAATYAAIARRRGKKIATIAIARKLLTRAYHLLADGQAAGSAPAASACAMAAAAQTGRVTKPRARSPMRHEPAEGRARSFD

SEQ ID NO: 201620 - protein, 326 aa, unidentified
MYFLGIDVSKNKLDCSLILDVSTNKRRAKSINNSPAGISELLIWCVKHQVAVQEIHTVMEGTGVYHETAALALTDAGVTVSIVNPAQVKDFGRSLGVRTKTDGVDSFVLARFGALLNPKPWIPPSKEARTLQALLSRREAISQDLQRERNRLEKADATETPQLIRESIVDSVAFMENQLTKFQQDIDDHINKHPQLKADRELMISIPAVGPQVSNHLLAVMHNHQFQSAEQLAAYLGLVPVERQSGTSIKGRPRLSKAGPAHIRAILYMAAIVGIRHNPHIKALYQRLQERGKTKMSALGAAMRKLVHLCFGVLKTRQPYQANYAI

SEQ ID NO: 201621 - protein, 323 aa, unidentified
MEKAERIACGIDVAKAKLAVCVVVKEGKRKDREFDNDAAGHRKLLSWVENLAGERVVHYCMEWTGKYGTALTKHLDAAGKTVSVVPPQRVKHYGVSRGVMNKTDKVDAWVIAEFCRMIKPPAWQRPQAQVEALTALTRRLQDLEEERLRERNRLKEPGQHREVRASGRRMVKRIEDEIARLRQTIDEHVGRHPRMREDKALLKTIPAIADKTALLLMAELASVENGGTAKSAAARAGLYPVECTSGTSVHKRARMSKAGTSHIRRGLYMPAVVAKRCNPLVRDLYERLLERGLSKKAAIGACMRKLLMIAFGVLRTRTAFSAT

SEQ ID NO: 201622 - protein, 353 aa, unidentified
MDRYIGLDVHSQTCTLAAVGPTGRKLALQVLETTETALIQAVRAIPGPKHLCIEEGTQSAWIYELLETEADEFVVTMPERHAGCKDDARDALQLAEALRTGGIKRRVYKPCGPYSELRAAVRCYGLLRDDVSRAKNRLKALYRSRGLLTGDDVFHADKHLRWEKKLPAPQRESAALLYAQIESLTKLWAVAAERLQAASKPHQIVKILSTAPAIGPIRAAQIVATVVTPHRFRTSRQFWAYCGLAIVMRSSSDWVRGPQGDWLRSKVRQTRGLNRNRQPVLKSVFKGAALQVATRMTSHPLHADYQRLLDAGTKPNLARLTIARRIAGAVLAMWKHEEVYDPTKQRSHIIAQA

SEQ ID NO: 201623 - protein, 521 aa, unidentified
MSTRTSRKRARTPDAVQKPRGTFHPRVQKVGPEHFGIVTVDCAKVRSKWMLADFYGNVLVPPTAVEHKRPAFDEAIATIRDAARRHDLQDLLVAVERTGRYHHAPKRAFAAAGFEVRVVHPFATRQFRQPADPGIKTDDTDLSALHRATVSGFALLEPEPDESWQTLQLLERHRRDLVFKSTLLSCQIREHLDAAFPGFAACFANLWDRDCAWHLVRHFASPAELLAAGPTALARSLDDDDAGYQMRTIHKVIQWAGRAAAPDVAAAHHRRIALALYDDRAQKTREIQALERDLAGLLARTPYLLLLAIPGINVVSAADFAGEMGPIANYANHRAITGRAGLCPSRYQSDRVDKADGPLPKRCNRRLRAAILQIADNLVTCNHHFGALAHDWSNQGKEPKDIRVRVASRFCRIAFQLVAGRQAFCHPAARERHYILHKLMEFHREHETATQAFLRDLQAAVEQLPRDQYQAEAKPLHEELERIQAGGRRGPQVLGDILPIVLARLGIGGVESTGSGEKDLT

SEQ ID NO: 201624 - protein, 485 aa, unidentified
MSYRNVGIDLSVTAKHEAQVRDEQGNKIVSNFSFYLSKDRLDALSQEALKGACQGTKLRFICEPTEMSWFPLAIYAKNNNHEIVRVKSHKTHDLRKYFTRHKKNDKLDANVLTVMPMIDSKAIEEIYLPDAQIFALEKRNRQKERISDQIAAIKNRLSSLYHWVMPGLLDCFKSHFDSRAREFYRHFSNPFTAKDAGVCGIRKVLQPAGRQKMKNDLPEKLYSVACSACELYTRASDHVDFTEIQDEVHVELQLLEAQEKALAHVKDRVKSLYERVHPSKNIESLKGISKNLGPSLIGIIGDPNRFSSQSKLRCFSGMIPKQDDSGETNKKGLSMTQEGPSRLRRDLFLAGDVARRWDPQLAKIYYEEMVNKGHCHTQAVCAVGTHLLNRVLCVLKENRPYELRDPKGNPISPREAKQMIKQQFTVPEEIRQRTRSKRSRKNRKNKREERIRNLFKRQHNAPQNSYNIPPRDMLQNFEKFFKSTS

SEQ ID NO: 201625 - protein, 360 aa, unidentified
MAKTKSVRPPFVVGGVDTHKDLHVAAIVDENNRVLGSDFFATIRQGYRQMLTWMASFGTVARIGVECTGSYGAGLLRHLQNAGITVLEVTAPDKMERRRRGKSDTIDAESAAHAAFSLIRTVTPKTRSGMIEALRVLKVCRKTAVAARRIALQMIQMNIVSSPDELRDQLRNLTRMQLIRTLAAWRPDVTAYRNVQDAYRIALKSLARRYLELHDEIADLDIMIASIVDELAPELIKRNAIGYESASQLLITAGDNPQRLQSEPGFAALCGVSPVPVSSGKTNRHRLNRGGDRAANSALHIITIGRLRTDTKTQEYVAKRVAEGHSKMEALRCLKRYIAREVFTLLRNQNRQINSTQITT

SEQ ID NO: 201626 - protein, 311 aa, unidentified
MNYIFVGCDSHDKTLVTKIAVNREAAEKKTFSATKTGRRKFVQYLKERAKGGAKVVVAYEASGNGFILCDELRAAGFACHVLAPTKIERSTKQKRNKNDDRDADRLLEILRGHYLAGNRLPSVWVPDVQTRDDRETVRTRQDMSQKATAVKTQIQMLLKRNGEEKPEGIGKGWSKGYRLWLKGMAESGAERVGMKTALGSLLRQLEFLENEIDRLDQAMQQLSDSPRWKPITEALMKEKGVGLNTALKFATDIADFSRFRRGRQIGAYYGLVPSSQESGENNDRKGHITREGSPSTRQILCPVDVGESATR

SEQ ID NO: 201627 - protein, 421 aa, unidentified
MLFIGVDLSDRFFDYCISNASGEVLSGNRFDFNDDGFYSFVTCIQKHEPDIQNCVVGMENPHSRLVDFLVQRGYTVMPTHPESIARYRESRIPSRAKSDPVDAGLIADYIREHHKNLRPINMPDEIIRELSILLEDRDKLVEQKVRFSNQLTSTLKDYFPQALEALEALEALEAFGSITNKSALEFLARFDTHKDVKALPAQSLEKVLTECGFFRKDSKERFHNAMDTKLSVISNAVIKAKTRLKNVLVGHLLLLISQIEDYEKQIQKIVDDTPNGCIFRSLFRSLPGADYILGARLLVLYSSREFSSASEAQAFWGTCPCTSRSGSSMVVRFRKGCNQFGRNTFHQLAFCSLSSSQWAKKQHAKKRKEGKGSNHALRCIANTWVKVTFAMWSSKTPYDESKHLASIANHILNQPSFILGG

SEQ ID NO: 201628 - protein, 323 aa, unidentified
MIKDIKYFGIDISYLVFDVTDSNGNYYQFKNNASGFKKFTKLLDNNSHCVMEATGYYHYQLAYHLLEFGIKVSVENALSVKRFIRMKLSKIKTDKSDSKLICEYAQKVDLKLWKGNTKDEMECLQITRALSVYTKQSTMLQNKLHGEAVLGAPSKAVVRSLKRSLTQLTKEMKALEDKLLVLVKRAHQDLLNRLKTIPGIGPKTSIMLVVLTGGFDRFTSAAELCSYAGLTPVIRQSGSSVKGRPRISKIGNQKLRNLLFMCSFNACKYNKACRDLYERIVAKGKSKKLALIAVCNKLLKQAFAIAKSGLIYDKEYKSTLVRN

SEQ ID NO: 201629 - protein, 392 aa, unidentified
MQPVVGVDVAKGFSVVQAFTRRNEPYGKLESISHKDSGFERLGELLVELQAKAAIAPVVILEATGHYHRALVAYLERSGWTHFIVNPLQSKRAKATQLRKVKTDAADAWHLADMYYRGDVVPHRTWDETFTELQHVTRQHEFVTGMFVQAKLNTRALLEQVFPAYEDIFYALFSVTSLKVLKRCLEGDVEDLVETIQSGAGKSHSRHWVDEKAKRLREILLHWRAQPRSQSQSAVLSGMVSLLLSFMEQLSDLEKQMNELAFDLPEVELLKSIPGIGDKLAAAIVAEVGNVQQFEGAKQLVAYAGLDPGIFSSGKFTATSSRITKRGSKRLRRSLYLAVQCGIRGSTNKRIRDYYDKKRKEGKPYKVVVIACANKLLHHVYAILSKSQPYKI

SEQ ID NO: 201630 - protein, 405 aa, unidentified
MRYYLGVDWAETEHAIWVEDEQGTEVLSRRIPHTAEGFGEWGRWLHEQRVAGIELWAGIERPEGRVVDFLLDHGVVVYPVNPKALDRARDRFRMSRAKSDPFDARVLAAFVRTDHPHLHALQPSSEAAQELKLLTRDYGRLVRQQTRLVNQLTATLKEYYPRALELFDDLTTQRTRAFLAAYPTPEALAALTAKQWERFARSQRLSAAQAAELWPLLQRPQLPVPPHVGRAKARLVQALLAQLTATVQAVAEYRETVTAFFGALPAAEWATTLPAGHGTTVPTLWAEFGDAPGRWASWQHLQGQAGAVPVTVESGKHRDIRFRYACNTYLRAAIHQFAFCSLQSSEWARAYYTRHRERGHPHHQALRALGAKWLKIMFVMWSRHVRYDEQHHLASLARHQLRQAA

SEQ ID NO: 201631 - protein, 418 aa, unidentified
MKKHSKSSQRSEPSLKRTKARGPVQRDAKEVLAEVLGKLTGKLDAPAVSTSAKENRRGNTVGPNRDRLTVGVDLGDRWSQYCILGLEGETLAEGQLRTTQEDVREFFQALTVARVVIEVGTHSAWVKDVITEWGHEVLVANPRLMEGSKRRKRKSDRIDAYKLARLGRVDPQSLYPIRHRSREVRQDLVVLRARDALVSVRTELINTTRGLVKSMGTRLPRCSSPSFAQKVKDAIPVEVREALLPFVQLVETVNDCIEKYDQKIEELGREKYGHTTLLRQVKGVGPITSLAYVLTLEDPQRFGSSREVGPYLGLVPKQEDSGDSQPQLGISKTGDRMLRRLLVGSSQYMLGAFGPDTDLRRYGLRLCERGGKNAKKRAVVAVARKLAVLLHHLWVSGDVYEPLHHTGAGTRTAQAAAA

SEQ ID NO: 201632 - protein, 419 aa, unidentified
MFKIFRKNCCGLDVHKTWIFACIGITDTNNRTEYKQARFSSFSKGLGELAEWLAKYSCTDVCMESTGKYWIPVFNILEKTCFVTLAHPKYTKPQKGNKTDKKDAKWICDLFMCDMIKPSFIPPPAIRELRDLMRYRRKLTNMKTGEKNRALNCLTVSNLKLDGVFSDVFGKTSRSILYYILEHPGETFDVTPFVDKRCKKPIEEIQAAVDGAISPSQTIKIRQCLAHIDELEGHKADIEQEIQQLSIPYAPVLKLLRTIPGLNTNPMTAIAILSEIGADMSVFAHSKNLISWAGCCPRNDRSAQRVKSTRISQAGNYLKPLLVQVANAVIRSKEHPEFGNRYRRIKSHRGHKKAIIAICKMLLTAIWNVLSKVEPYDPTGYFVESQMSIRTSKVLTQTQALALLRSRGYVITDKTDVAN

SEQ ID NO: 201633 - protein, 314 aa, unidentified
MINNFLGIDVSKDRFDVFLSFISKKGKRETRKRSFKNDDHGFQGLLSFLQKHNVEQVKACMEATGCYSEALAEFLHNTGHFVSVVNPYCIKSYARSKLTRQKNDQTDAEIIADCCQRQEPSRWTPPSPEKKKLKHLYRCSVALKDELILVNNHLEKKERLPKEVANAWEDLAMNIAQKIETIKNSVRELLKQHKELLENFQLLLTIPGIGEESAVAILAEVPDIEVFRNARQLAAYAGVIPRNITSGSSVYAKPRLSKSGSQPLRKALFFPAIVAKNHNPIIMSFCQRLKEKGKHNMAIVGSAMRKLLHIVLVF

SEQ ID NO: 201634 - protein, 428 aa, unidentified
MASNIDPSAPRTWVAIDIAKGWNVALVEHPDGRQQRFRFRHCCEDYDGLIALLHAAAGPCRVAIEPTADYHRTLAYRLISEGFDLVLVSSVAGARLREAVFNSWDKNDPKDAAVILRLLKQGMTQRYCDPLVMQTHDLQELSKTYHHIARARTRLQHVLITHYLTLYWPEIERFWSTQRNEWFIRLLMRFPTPRSVSILPLPAFVATVWELVGRRVHKREKIEEIYRLAARSIALPIDEDSPAVGTFRLQLERYLQLCQTRQALELQADTLLASRPEYQRLRSLPGVGPIIALVILAEAGDLRRFTHHRQFLKFCGLDLAKSQSGGSRSREQLSKRGNARLRCALWMAAISAVRMRENSFRDKYQRYIARAPEDADLRRKARTAVTAKMARVVYALIKHDCVYRQRFELGFPSGSTPLTRAVEAFGTS

SEQ ID NO: 201635 - protein, 422 aa, unidentified
MSKKRNKVCGIDVHKRFLVASILDNEGNCETKRFEQDLDELILLKNWILDSGCESVAMESTAEYWRPAYGILNPEINITIGNAYHMKGIPGKKTDVLDSQWIAELELNSLITPSRVFTGDLYELRTLTRARNKMVNNCTVFKNKILHQLDVCSIRLCTVLKDVFGKSGYALLKGIVERKTQDEIIKALPAKTRKIAPVFFEQIPEYIPDSAIFLIDSMLKIYDNLQVEIKRIEERIKFYLKDKENELRILMSVPGIGIVIGSNLLAEIGDIRDFPTADKLAKWAGLTPSVYQSANTNYTGPITKQGSKYLRWALIEAAHSAIRRPGKLNDYFNGLLPRKGYKKAIVAVARKILRIVWHLLINNEIFEDGIPRVKTVKIPKFPEKIERVGIAKIIQLLSRGAEIIVQEEGKEIMRINGSSQPT

SEQ ID NO: 201636 - protein, 355 aa, unidentified
MNQEKYIGMDVHAATISAAVKNAEGKLLMECVLETKAATILEFIQGLRGTLALTFEEGTLAAWLHDLLKPHVSRLVVCDPRKNALLRDGNQNDRVDARNLAELLRTNQVKPVYHEEHGIRTLKELGRSYSTLTQDSTRVMNRIKSVYRSWAIPCAGTSVYSRRHRAEWLAKLVEPGVRIRAEHLYQQLDSLEPVRQAARRELLRESGKHAAVKLLRQIPAIGPIRSALLVAILQTPHRFRSKRQLWAYSGFAVQTYDSGEYRVVRGKLQRNRERITVRGLNRNHNHDLKNLLKGAAISAIQRPGPLQDFYAARVEKGMRPSLARLTLARKIAAITLTMWKKGVSFDPKQLQRQAA

SEQ ID NO: 201637 - protein, 409 aa, unidentified
MNPLYVGIDVSSRNNVVFLMKPDGSKIKNFSVSNSKDGSQKLVKEILAALTSFALTDVIIGLEATSVYGDNLVCFLREDGSLVPYNRKIHVLNPKQVNKFKESYNDLPKNDFVDSFVIADCLRFGRINKEVYLDDYRYKALQNLTRARFVAVQNLTREKQRFMNVLFKKYSSLAQEKVFSDTFSATALAIYEKFDSADTLAYMDLHELTSFLQEKGKNHFSNPEEVAKAIQKAARSSYRLPKTVNDSVNQVLSISITSMKALEAQIKEFDKAIAAQMELIPNTLTSIKGIGPVYSAGIIAEIGDINRFPSQAKLAKYAGLAWRQHQSGEFEAQNTRLIRTGNRFLKYYLGEAAMSLVRCDAEYSRFYHLKYKEVNKYQHKRALALTARKLVRLVYRLVKDNRLYIAPKA

SEQ ID NO: 201638 - protein, 438 aa, unidentified
MSNKVIFNLDELFISVGIDVGADFSWMSIALPNQQFVGKPYKILHNSIDSLTTAVSKIKEAEELYSLESRIFLESTGIYHYPLFCYLRDKGFNCSVINPIITKNSTNINIRKVHNDRFDSKKAALVGLKPDLKVSLMPSDLALNCRNLCREYYDLIDNRSAYVNKLQGELRIAFPQYLGIFSKVTINTSLTLLETYTSPSAFLKADKQEIIDIIKSTARFGLTYAQNKYNAIIQAATDANQFGYIIDSNIKRIRLYISFIRKYDEEINSILESLHELVDANEDSDFVKQIHLIETFKGAGFLSAVSIMGEIGDFSAFSKPKQLFAYFGLDPSVKQSGKFEGTKVQMSKRGSAIARRVIHTLTLQSISISRNREAKNPVLREYYLKKCDSKPKLVAMGAVSHKVCNMIFAILRDNKPFKIIAPQEHIKQYNSAKCDIAA

SEQ ID NO: 201639 - protein, 466 aa, unidentified
MMPGRKERENSDKSRRQLEGLPVIRRSVAGIDLGSERHWVCAPTLDRSGREVASFGATTAELIRMAEWLKARQVESVAMESTGVYWIAPHEVLEGQGLEVLLVDTRQLARVPGRDKKSDPTDCEWIQRLHSCGLLRGSFRPEEAVCMLRTLVRDKANLVAERSDWLRRMQKSLDQMNVRVHRAVSDLDGATGMAILRAIAKGERDAQKLAELRDPRCSKTQQEIAEQLRGHWREDHLFSLQQALKMYDAVEERIAAYEQEILRKLGEMEREEQRGQTAPPLNNTNKARAIKQRGHEPRRHALYRMSGVDITQIDALAVETVEVVLSEYGPDLSRFPTEKQFVAHLTLAPHVATSGGKPVRKKKRNSASTRVAAALRMAALSLRHSQTALGAYYRRIAQRRGGDIAVFAAARKLATLVYRLLRWGQPYVDEGAAAYENRYRQHRIGRLAATAKELGYQLTPVTAPVT

SEQ ID NO: 201640 - protein, 352 aa, unidentified
MHMIAFDSHKRYTVASVQSIEGQIIKEARIEHGRGNIVLFLAQWDKGSPVAVETIGNWYWIVEEIEHAQMRPRLVHARKAKLMLGMINKTDKLDARGLNRLQQTGTLPTVWIPPLEIRDKRELPRTRMVFAHQRTRLKNRIHSVIDKYGLQQKFTDISDMFGKEGRKLIQESLALLPEQTRYALETLLHHLDEVERQVSKIEKRMKEVFHLNEETKLLMTMPGVGFILAVVISLEVGDVGRFSGPERLASYSGTVPRVHASGGKVRYGRLRPDTNRYLKWAFSEAGNAVSLNRNKWPHRHVSKIYGRVRHRQGHAKAVGAVARHLAEATYWMLIKKEAYRERGVSRVSLTEA

SEQ ID NO: 201641 - protein, 416 aa, unidentified
MEVLHPRCAGLDVHKDSVVAAIRLAANGEPKTEVRTFSTTTPGVLALSDWLSHHACTHIAMEATGVYWKPVWHILADDTFTLILTNPAHVKNVPGRKTDVADALWLADLLAHGLIRASFVPEPATQAMRGLLRTRKQLVREQASHIQRIQKTLEDANLKLASILTDIMGLSGRALLKALIEGETDPDHLVKLIDRRVKASPEQRHAALCGRVSDHHRFLLRLHLRQIDMLNEAVAEIDQRVESDLDPFRAAVRLLCSIPGIGELSAQVIVSEIGIDMSRFPTAGHLISWAGMCPRNDESAGKRRSKRLRKGAPWLKATLIQCAVSAAKKKTSYLHAQFKRLCQRHGPKKAFCAVAASILTAIYHRLRDGTFYQDLGADYFHKGTAYAQARKLAQRIAKLGFDCSITPKAEEEAVSV

SEQ ID NO: 201642 - protein, 408 aa, unidentified
MNTLYVGIDVSSKSNVVYLMLPNGDKHSNFSVANSHEGSTQLVKRILSALTSHSLDTVLIGLEATSVYGDNLVYFLREDATLAPFNRKIHVLNPKQVKKFHDAYNDLPKNDYVDSFVIADCLRFGRINKEVYLGDYRYKALQNLTRARFFAVQNLIKEKQRFMNVLFKKYSTMTQEKVFSDTFSTTALAVYDEFDSAEALANMDLHELTDFIIEKGKNRFPDPDAVAKAIQKAARSSYRLPKTVNDSVNQVLSISITSMKALESQIKEFDKAIKAQMELLPNVLISIPGIGPVYSAGIMAEIGDINRFNSQAALAKYAGLAWKQHQSGSFEAEVTRLIPSGNRFLKYYLYEAAFSLVRCDKEYSDFYHLKYKEVNRCQHKRALALTARKFVRLVFRLLKDNRLYVPAK

SEQ ID NO: 201643 - protein, 408 aa, unidentified
MEVLYPHCAGLDVHKETVVACVRHMSDGVVRREVRTFKTLTTDLLALSEWLASEGCTHVVMEATGVYWKPVWHILSDGDVALTLANAAHVKNVPGRKTDVNDATWLADLLAHGLIRASSDAATQEQRGLLRTRKQLVRERAGHVQRLQRTLEDANIKLDSAISDVTGVSGRAMIQALIDGQTDPARLAELAHRRIRTAPEILREALRGRVTRHHRFLLALHLKQIDALDEAIAGIDQEVDAHVEPFRAAIAQLKTIPGISDLSACVILAEIGHDMSRFPTQGHLISWAGLCPKNDESAGKRRSSRMRKGAPWLKTTLIQCAWAAARKKGSYLQAQFQRLRARRGAKKAIGAIAASMLTAAYHMLNDGTLYHDLGADHFDRRAKRVATKRLIARLESLGYDVQITPSTA

SEQ ID NO: 201644 - protein, 307 aa, unidentified
MTAVGIDVGKAALDVAIDGVAGVVRFANTAAGIGKLIGRLRGVAEARVVVEATGGYEEPLLDACCDAGIWVARINPRQARDFARATGELAKTDEIDARLLCLLSGLFAGRLRRYDAPSRWQRDLRGWLRRRGQVVTTLQAQKQQAAMAPAAISKLMARTVAALRHELAAIDREMKALLDEHLTPALRSSKGMGPIFQATSLALLPELGTLTRQKIAKLVGVAPMNRDSGQTRGKRRIRGGRAPVRVALYMATLSAVRWDPVMKAHYQQLRERGKLAKVALVACMRKLLAIVNARRRDELMAGAPVAT

SEQ ID NO: 201645 - protein, 320 aa, unidentified
MMAQNDLVVAGIDVAKDKVDVCVRSLSLKRTFVSTAEGRRELTSWLRRRKVGKAVMEASGGYERDWAKALRNAKIEVRIVDPKRVRSFAQSAGRLAKNDTIDAEMIAWFAETFDEARGQAYDATREQLHQMVNARQAMKDMQTKLESQGEHALPATVQRMHARIMKTIAVELVKIEAAISAMVQATPHFTELAEIIESVPGIGRTTSAALIAAMPELGQANNKIVAALLGVAPYDDDSGRRRGERHIKGGRRRTRNVFYMACLGAATQHNPVLKAFYDRLVAKGKQKKVALVACMRKLISILNIMIERRQKWDASRYAVS

SEQ ID NO: 201646 - protein, 369 aa, unidentified
MNTTTFVGLDVHARSIKAVALDVMTGETKSATFAYDAAAVAEWVGSLDPAAKCVYESGVTGFDLQKKLTALGVDCVVGAVSKMIKPSADRKRKNDRNDAGFLARMLSVGNVVEVWVPDDECEAARDLVRALDDARDDLKRCKQRLSKFLLRHGLVFSETTPSGQRRGNWTAAHWAWINAISFKEGADNEVLAYYIDAVRQKLEDKKRLEVLVKDEASKARWRKRVDSIRCLKGIDTMSAADLVFEADEFSRFKNARSFGAWLGLTPSEHSSGESVRQGGITKAGNKHLRRVLVESAWHYLNATARSKDLVKGQIPDPAARRHAAKGVRRLVKRREGMLERGVHKNKANVATARELAAWVWAVGCIVEGA

SEQ ID NO: 201647 - protein, 325 aa, unidentified
MEKLYGGIDIHKENLAGCIIDENGKTTRERIFPFSKKAVERFLCDIPNSKIMIAMEACGIWRGAYKVLTELGYEVKLANPKKTHDIACRKKTDRIDARILADLLRTNYLPEVYIPDERVLKFRDLTRHKSNLTHLRTMVQQKIKGYLLRKGTKYGKLWNEKALSKLAEEDLDIRNLVNVYQCLKNEEKEVLKRIRKIARNMKETTLLMSMIGIGDFSSLTILAEIGVIKRFKTPKELVSYAGLCPGIYQSGSTERNVKNNAVNKCLKWIIYECSGRAIMLDPRFQEYFYRVKQRRGFKTARRAVARKMLTIIWYMLTNEEPYKAS

SEQ ID NO: 201648 - protein, 350 aa, unidentified
MQDVSAASGYLGVDAHSETCTLCAVDLKGTIIMRCTVSTDTRKLRAAVSNLPPGYWAMIESSSVSIFVRDAMASVLDRIIICETRENRLIAKSGDKSDEKDAHRLARLLRLGEFKEVYVPPRSWQEVRELIHVYLKVVGDVTREKNRIRDTYVRYGVHIKDSAYGDGRHEALKNLNRPALKPVFDALYGILDAAEEAKDDLDHALRARLSQKKEYRLLKTIPGVGPICAALIVAIIVDPGRFPNKKHAWNYAGIGASEDSTGKTVKLKRNKHYNRLLKYAVMTAALVAIRGDNRFARLYQTLLEKYEDPQKPKKAASMARKMVARAILAAALSMWKTGTAYSENTQAKSA

SEQ ID NO: 201649 - protein, 368 aa, unidentified
MPSMPHPALPSQDDIPASEVVLGVDTHKDLHVAAVITTLGALLGSRAFAATRAGYEQLLTWARTFGPLQRAGVECTGSYGAALARHLRTEGVQVIEVNQPDKATRRRRGKTDAIDAEAAARAVLSGRASGNMKTGDGPVEMLRMFKLAKASAIKARTQTINQLKAVLIAADPALREALTGLSNPILFRRCAELPPTTPNDVTSAAAYTLRLLAHRIRELTGEIRALERLITEAVAVHTPALLERPGIGPDSAAALLVTAGDNPDRLRSEASFAALCGVSPVQASSGKTHRRRLNRGGDRQANAALYRITLSRLRWDQRSRDYLDRRTAEGKTRREAIRCLKRYIAREIYYLITTPTPPSSMQSQTPAA

SEQ ID NO: 201650 - protein, 468 aa, unidentified
MGLRDAIGIDPDSKGFICAFVKLSGAQVTTKGYMCTDSDLEAFLRWVKGQGNVIVAIEGANGFSRPLEKALRKAGIIFYSFKPADTNTFRKAVLGQNKDNRKDAESVARYAMALEAQAKLERYRRVWFVDAELQLLTRHYERKSQTMTAETNRLWKLLRLASPDLYLALRGSHPEVCLSENILKSQGILTLLSEKPQFGEWKHLTEKQMLRVMGGGKYKGREKLIEQLHTLAGSFAPVSPAMELLMRSNAQQIKRLKAEQAEIIKMLEVLTRKNAAVQILKQIRGIATRTAATMIAEIIDIRRFPREDSLACYSGLGMKEHSTGDSFRMVHMQLFNHRLKDAFMTAARSFVFYNPESHLAGYHRNLIKRGMSPMEATKRVARALVRVIYRKLYTIVIQQTNTSEADRIKEEEGEMASGLIRSDQSHKSNITPSPSLTSKGRGRKKVNRLSAHTPRNRSRRKAVLKIIS

SEQ ID NO: 201651 - protein, 320 aa, unidentified
MRNAVGLDISKLTFDAFAMVGNAEYSAKFDNNSKGLNQFSDWLKSLGCENLHICMEATGNYYEDVADYFAQYYSVYVVNPLKISKYAESRFKRTKTDKQDAKLIAEYCRSAQESELVKRQKPTDEQYRLSRMTAAYTQIKSECAAMKNRYQVAKDEEAAKAYAEIIKAMNEQLEVLKAKIKEQTEKPKCKEGVKCLETIPGIGRMTAAVLFHHLTSSKFETSNKFAAFAGLSPQQKESGTSVRGKGKLTKFGNRKLRAVLFMPAMVAYRIRAFPDFIARLEAKKKPKKVIIAALMRKLAVIAYHVHKKGEHYDPSRYKSA

SEQ ID NO: 201652 - protein, 375 aa, unidentified
MNSVSLSSGLIYLGMDTSKDKIAVGILRSDEKSPDVEMIFNDEASIRRLVGRFPDVSRLRACYEAGPTGFELYRLLTSMGVACEVIAPSLIPKASGDRVKTDRRDAARLARLFRAGELVAIRVPTPAEEAVRDLCRARADLVDDRTRTRHRLSKFLLRHDRIWRGGEAWTLKHGQWLASQHFDEQAMRTTYNHYRAMLAARDGELAAIEADLTYWYEHGPFAQAVPRLAAYRGVAYLGALTIATEVGDWRRFPNAGAFMGYTGLVASEYSSGASVHRGHITKAGNEHLRTQLVESAWSYQHRANLGVTISRRHKGLHPATVARSWAAQQRLCARFRRLDTHKNSRNVVAVAIARELAGFLWAEMTATDQPHPTQS

SEQ ID NO: 201653 - protein, 423 aa, unidentified
MNDSTLCVGADVHLDEIVLRAVDKTSGHEVIEPFRVTNNLPGAQSAALTIAEAAQRLGYPRIEIGYEATGMLWIPFHRFLSTSPLLQPFEVELVCFNPKLVANFKNGLVLRRPKNDDRDSFDIAARVRFGEWPNSYVPGDFWQGLRRLTRYRFRLSRNLSREKMRFQSYAFLKCSDWKRVKPFSDVFGATSAALLTEFTAAELREMTHDQLADLISHRGHGRFHDPHATARAVRKALRTSYPIAAQMDEMVTATLATGWEHIRFIKRSMNHLDKHIAHYIDPVPNPIITIKGLGAVITAGILAEVVDISRFPEHKHLAQYFGLTWERRSTGNFVSQNTRMTKVGSPYGRYYFIQGADKLHRFNLEYKGFYWRKYNEVSKYQHKRALVLTARKLVRLVHTLLTKNVPYVRPRTLVNLQEDKLLQ

SEQ ID NO: 201654 - protein, 602 aa, unidentified
MSPPNPPVDRIAVGVDTARYGHRVSFLRPDRQPAAKPMTVLESRAGYQALQERLEQLHQQHPQAHFHVRIDAAGQYAANLEHFLRGLALPMTLSVGEPKRNKDYQKAHFPKRTTDDTESQAMARFAVVELPGATAPVSPAMTMLREVAGRLQAKVKQSTQAINRLHNLLARVFPELATLTDDLAASWVLHLLDKYPTAQRIGQARLATLQKISYLAPELAEQMHLIAQQSVACLSGAVAEALVRDLVAQVRHAQRAEEQMRRLLGEAYAALPPSAHLQVVTVPGIGVATAAAIIAQTVDIHRFPTPEQFVGYFGVFPEENSSGVDKLGNPLPPGTLRMSRKGNDLVRHYLWNAARSAIVHNPAIRALYRRLRARGKRGDVALGQCMRKLLLLVYAVWKTNRPFDPRHFPWETPNETVTSAASPVDADKDNAAPGIVDPGHSSSCNDEAVGRALAGASNETAVGHKRDVPAQEVVTTASATVAPTAPPVKPPPRRPRPKVDFTFLREQLTMEQVLRQLGVLDSLRGRGLQRRGPCPIHGQPGDTQPTFSAHLGKHVFQCFHADCRAQGNVLDLWAAVHQVPLYEAALQLADTFQLPRNREEKL

SEQ ID NO: 201655 - protein, 399 aa, unidentified
MTNLEARIAGIDSHKDTIHVAVITATGVEVTDREFPTTQIGYRQVIAWLITNGPVGQVGIEGTSSYGVGVCATLRRNGITVIEVNRTRPAERRKQGKTDRMDAYRAARSVLSGEATTAPKSDSIEPLRAINVARRSASKAQQAAWRQIGCILINASPKLRDKYRNLPRIEMVTVLAASRPDQIRDKHDALTLHGLRSIARRHLHLTEELHDLEEQMAMIATATNPGLMAIKGVGPVIATQLLITAGNNPDRLCSSSSFAALCGTAPIPVSSGRTDRHRLSRGGDRQANAALHHIAKVRLKCDPRTRAYRDNHLAKGWSTAAVFRALKRAIVREIYQALLGNCPIPNYTDLRPARQAKNITLTTVATHFNLWPAQISTLELGKRRDDTLAKTYRQWLQAA

SEQ ID NO: 201656 - protein, 377 aa, unidentified
MPQSRTLSVGLDVHKESIAVAYVAQEHGAEVISLGTVGTRQCAIDKLLRHLQSKSPPLVFVYEAGPCGYWLYRYLMKKGYVCWVVAPSLIPKKPGDRVKTDRRDARQLARLMRSGDLTPVYVPAVDDEAIRDLSRAREDTLRDLQAAKLRLKAFLLRHDIRSTGRANWSPAHLRWLSEVVCPTPAQHMVFQEYVQTVTEQTERLQRLEHGLHEQVKTWRFQPVVEALQALRGVQFTVAVTTVAELGDLTRFDNPRQLMNYLGLTPSEYSSGARRQQGSMTKTGKTHARRALVEGAWAYRYPANVSRHLQLRLENLPKAIQAISWKAQVRLCTRYRQLLAKGKNANQVVVAIARELSAFMWAIAKQVTVAPKDQISLK

SEQ ID NO: 201657 - protein, 395 aa, unidentified
MKQSSVNQPSFGERRSGAGNVHAAYIGLDVHKATIAVSIAEAGRLEPEFRGEIPNESKAIDKMIRQLSQRFNGQPLLFSYEAGPCGYGLYHQIQASGHDGEVVAPSLIPRRAGDRVKTDRRDAVMLARLSRAGELTPVWVPTPEQEAIRDLTRAREDMKAIELKARQRLSAFLLRHGKVYTGKSKWIPVHFRWLETVRFDNRIQQIVLQEYIEAVREAQRRVAGLEKQMEAALMEWSLASVVRSLMAMRGISLITAMTVLAELGDISRFDSPRQLMAYLGLVPSEHSSGGSRRQGGITKTGNGHVRRVLVEAAWSYRFPARKTRIIEKRAEQTTPTVQAIAWEAQKRLCGRYRRLATTGKMKQQVITAVARELTGFMWAIACEAMGKPHGSRATA

SEQ ID NO: 201658 - protein, 369 aa, unidentified
MHKIVKYLGLDVHKSSIVIASANSGRNNEVKYTGTIDNDMKQLDKIIRKYISQGFDVDCVYEAGPCGYHIYRHLTGNGIKCSVIAPSRIPRQSGDRVKTDRRDAEALARLHRAGELTPVYVPTPEDEALRDLVRAREDSKQSLRRAKQQLGAFLLRRSLVYPGKTSWSKAHFNWLADITMKHPAQQIVLQEYIDTICNCQERVNRITKQIHELSEQSRLKSLIDALASMRGISSLIATILAVELGDLSRFDHPEQLMAYVGLIPSEHSSGPRVSKGAITKTGNGHVRKALVEAAQAYRLPARKSRAILKRQEGVPEKIQAISWKAQCRLCDRYRRLTGKGKKANVAKIAVARELVGFAWAVSREIPEAA

SEQ ID NO: 201659 - protein, 341 aa, unidentified
MEKYNGGADIHQDVNYFVILDGKGNVYREQGVPFNKEATQNFLTGIPSSSLRIAIEACGLWRGAYKLLTELGYEVVLVNPVRVHNLSFNQKTDKVDARTLATLLHIGSVPRVFIPDEDTLKQRDLARHRARLARDRASLMRKIKSFLLLNGTPYRGRWTLKDLEMLKGVDPKVACLVRLIESYNTEINLLRREIGRVSRNGRLTSLLQTVPGIGEFSSLMIVAEIADIKRFKNPKSLVSYAGLCPGVHQSASKSHPVPKKACNKWLKWIMTECSGRAATMDCRYMRHFYRVKKRKGFKTARRSVARKMLTDVWHILAKEEPYRDHGPSSEGQEHPQRITRR

SEQ ID NO: 201660 - protein, 343 aa, unidentified
MQTITTIGLDIAKSVFQVHGVDAAGQVVIRRQLRRRYVLAFFQKLPPCLIGIEACASSHHWSRALHGLGHTVRLMPPAYVKPYVKRQKNDTTDAEAICEAVARANMRFVPTKTSEQQSGLVLHRTRHLFVRQQTSVINAIRAHLAEFGIVAPIGRRGIEELLHVVADPADNRVPAIARACLAAFGTQLRRLKEQILEFDRMITAWHRSNEMSRRLDDCPGVGPALATALVATVADPKVFRSGRNFSAWIGLVPKQHSSGGKDRLGSICKQGDRYLRGLFVAGALAVIRYAKIHGTKYRPWLTALLARRPTKVAAIALANKLARMVWAMMAKGERYKEPVALAA

SEQ ID NO: 201661 - protein, 374 aa, unidentified
MSDTMLHLGMDVHQDSLTLAVLPADASAPTHVDRLPNDLSKLRRYLTRHAPVPAATRVCYEASGAGYVLQRALTEWGYHCDVIAPSLIPKRPGVQRKHDRRDAVELARLYRAGELVVIRIPSVAEERVRDLVRCRETFQREILKSRHYVLKFLARRGVVYRAGRHWTSAHERWLRQVMATSSELEGEDRMVLGEYLALLDYKVQRRTELERQLEQLVLAPAMATAVAWLQCFRGIQRQSALVLATEIVDWRRFENPRQLMAYLGLVPREHSSGDRERRGAITKAGNTHCRHGLVQAAWAYRYRPLVSQHVKRRQEGQPALVVAQAWKAQHRLHKVYTRLAVKRRPQIAVVAVARELAGFLWAVLREIEPTTAVA

SEQ ID NO: 201662 - protein, 347 aa, unidentified
MANGSKTEVEVFAGIDVSARELSVAVRCGTEDREAVTTFGNNAGGHKALLAYLLRGNGRARVCLEASGNYSLDLALTLHAQRQVEVSVVNPRRARRFAESLGERSKTDPVDAGVLCEYAMRMRWVPWVPPNLVALRLRALTRAIEDLVVMQTQETNRRHALTISRALPALVIRELQKHQRYLQLRITRLRQEALRLIARDPELDRRFRLMLTTPGIGETSALQILGELAVLPDTLNARQWVAFSGLDPCHFTSGTSVEKKPRISRGGSRHLRRALYMPALVAMRREPYLRAFYQRLLARGKAPLQAVVAVMRKLLHAFFAMFHSDQPYDGSKLCPVKFAPDTVALCA

SEQ ID NO: 201663 - protein, 341 aa, unidentified
MSIITVGIDLAKNVFAVHGVDDKGKPVLVKPKVARDKLAERIAQLPPCIIGMEACSGAHHWARQFRPYGHTVKLMAPKFVTPYRLSGKRGKNDAADAAAICEAVTRPNMRFVPVKEEHQQIILCLHRTRNGFVEERTATYNRLRGLISEFGIVLPQKVACLRREIGAHLEELLGYANQCIGDLLAHADGLDLRIDEYDRIIAKAARDDARSKRLMERPGIGPIGASALLARIGGGHDFKNGRQVAAWMGLTPGQYSSGGKARLGRITKTGDPYLRSLLVMGARAVLAGLGDKQDGFGRWARTLQERRGYWRTVIAIAAKNARLAWAVLRYGEEFRLKPSAS

SEQ ID NO: 201664 - protein, 331 aa, unidentified
MFPVGIDVSKDTLDLCMLYDGIKGRVKTRNIKNDRSAVENISRWLRLQHCGSEDVHVVMEATGVYHERLATALHDAGFYVSLANPHRSREFARGMGIMTKTDKVDAYMLACYALLKKPHRWEPPAADISHLSALLRRRDVILADAVREENRLEKYQSTDTPADVVSSCIRMAQLLREEVKSIERQLKAHIKASPDLKRDYALLTSIKSVGPQLGMHMLVVLRSHHFESADQAAAFLGVVPVEKRSGTSVRGRPRMSKIGPPQLRAKLYMSALCGKIHNKRMRTVYEEMCLRGKPKMVAIGALMRKLVHWCYGVLKTGTAYNDGGPRAALNT

SEQ ID NO: 201665 - protein, 349 aa, unidentified
MSEVSTIGLDIAKSVFQVHGVDAGGEVVVRRRIGRAKVLEFFADLPPCLVGMEACATAHHWTRELKKLGHDTRLMPPTYVKAYVKRGKNDAADAAAICEAVTRPSMRFVPVKSVEQQSALMLHRTRDLLIRQRTQLINALRAHLAELGLVAAKGREGLQQLVTTVTDSSDERLPSDAGFACQTIVAQLHAVQTQVNGLDKRITQAHRANADSKRLDAIPGFGVILSTAVVATMTDPKAFKTGREFAAWIGMVPRQNSTGGKERLGSISKQGDRYLRRLLVVGAISIVRTARMRPDKYPWVIELLARRPAKVVAVALANKMARIAWAVLAKGETYRAPARSGNAAIAAAA

SEQ ID NO: 201666 - protein, 349 aa, unidentified
MIVVGIDPHKQTHTAVAVDAVTGRSLAEITVRARTGGFEQLVAWARGLDEARTFAVEDGRHVSGHLERHLIARGERSVRVPPRMMGEARRTDRVWGKSDPVDATAVARAALRHPELPEATLAGTEREIGLLVAHREMLINERTDRICKLRWLLHDIDPDLAPPLRTLGRFATLDRLAVTLTALETSVKTEICLELLARCRQITVRANELERRIRELVRTQAPALLQIPGCAALTAAKIVAETAQVARFPTEGHFARYAGTAPIPASSGARHRQRFNRRGNRQLNAAVHRIAVTQIRMHEPARDYVTKKRAEGKTKTEALRALKRHITRVVFKTLASMDQPTDRLTAAAA

SEQ ID NO: 201667 - protein, 331 aa, unidentified
MTSLLNRTNEPALTVGIDVAKATLEVAFSDASAALAPTNDEAGHAALLAHLAALREQGHAIGLIVLEATGGLELDAATALQLAGWPVVIVNPRQSRDFARAMGYLAKTDRIDARVLAHMGQTLLQRADLHKLVKPLPTEQQRLLQALVTRRRQLLAMHIAEQQRASAPDKRMRRSLNIVLKALQREMARLDKDMQTLIGEHHAELAARLGEIKGVGKATISTLLAEVPELGELNGREISALVGLAPINRDSGEMRGKRTIFGGRPQVRKVLFMAALVATRWNPVIKAFYERLLAAGKPKKLAITACARKLLTILNAMARSGKPFNAALHLG

SEQ ID NO: 201668 - protein, 345 aa, unidentified
MEQISRIGMDTSKHIFQLHGVNAAEQPVLRKKLRRKEMLAFLEQLAPTVIAIEACGASHHCARLLQSFGHSVKLIAPQLVKPYLKRGKNDAADAEALCEAMSRPTMRFVPVKTAEQQAALMLVGVRDRLIRNRTQLTNAIRGYAGEFGLTAAKGRAHLASLLDRIQADESLPALARELFAAQAKEYAQLQAQIDEVDARLMAWHRADECSRRLAKIPGVGPIGAVLLTMKTPEPELFRSGRQFAAWIGLTPKDHSTAGKLRLGGITRAGDAGLRSVLVVGATTVIQHAQRGGRPSPWLTQLLKRKSPKLAAVALANKTARVAWKLMVTGENYAATAAPAALPGAA

SEQ ID NO: 201669 - protein, 483 aa, unidentified
MAKRKKSTFERLNTGQMNRAQRKKLGLRVAASDPGLSIVHPNAGGIDVGNESHFVAVPGDRDANPVREFGCWTAALKDMAAWLKSCRIDTVAMQATGVYWIALYDVLEQHGIRVVLVNARHTKNVPGRKTDVQECQWLMKLHTYGLMRDSFRLRQDMEYVRTIWRVRDRHVKEAAEEVQHMQKALTKMNVQLANAISDITGVSGQAIIASILQGERDPYKLAELADYRIKASREEVARSLEGNWRADVLFELKQAVDAHLFAQLQMRECDEQLTPYLASLPTRMPDIPEQSKGAPETPAQKRKKAKKPQGNEPRRMDMKEELKRISGVDLTSIDGVNVMTAFTVISEVGVDMSRFQDEDHFTSWMGLAPSKDVSGGKIVGRGKKKVKNRVAVALRMAATSLLHSDTYLGARYRHLRRRLPTFKAAVKAMARHLAVLIYRLLTHGQAWVDRGAAQFERRRTERELASLHSKAKAQGFTLVPIEA

SEQ ID NO: 201670 - protein, 349 aa, unidentified
MRFYTQQHQFYCGIDLHARLLAICMVDQAGAVVLQTQIAADKQLLLKTLAPFRPDVVVAVECLFAWYWVADLCRDEKIPFVLGHALYMKAIHGGKAKNDDIDAEKIARLLKGGNIPVAYVYPKGLRETRDLLRRRMYFVHQRAALITHVQIVNAQYNLPEFSKKLIYAKNRAELKIAERFDNPQLRKSVEVDLALIDALDERIAEVELHLERTAKVEDPQTFHLLKTIGGVGKILGLTLLYEIHDIDRFPDVGEFLSYARLVRCRHESAGKKLGSGGHKIGNAHLKWAFSEAVCLLVRHFPVAKIWQARHEKKHGKKKTLGILAARLGRTVYHMLRKREAFDVKRFLGQ

SEQ ID NO: 201671 - protein, 412 aa, unidentified
MAITCGIDWAEDHHDIALVDETGKLVAKRRISDDAEGYRRLLDLLAEAGDTTEDPIPVAVETARGLLISCLRTTSRKVYSINPLAVARYRERHRVARAKSDHADAMALANILRTDADVHRPLPADSELVQVIAVLARAQQDAVWNRGQLSNQVRSHLKQYFPAALAAFQVRGIGLDSREARAVLAAAPDPTTAAKLTLTRLQSVLRKSGRQRNIDSWAKRLRSIFTGDYLHQLPLIEQAMGRQTQALVLQLDAACRAADDLADAVAEAFAQHPDAEILTSFPGIGPLTGARVLGEIGDDRTRFRDARGLKSYAGSAPITMASGKSLVVRQRKVKNQRLAAVGYVWIFGALPSPQVKEHYDRRRAAGDKHAAAMRNLFNRFLGCLYHCLQTGQTFDPSKAFPATSPLPEPVAA

SEQ ID NO: 201672 - protein, 326 aa, unidentified
MPSNGERFNRVIAFEVSKADLVVYCAPQDVSSTIPNTKSAVRRYLKKQTRTKPGPEVSDLLVVCEATGGYERFVLEAAAELGLACHRAHGSRVRAYARYRGTHAKSDAIDARLLADYGLHGENLKLYQPPSPAQDRLRALLGRRTELRRAMEAEQCRLDHALDKDIAHSIKALIAVLHRLLAGIEAKIVLLMKEDADLAEKARLLQGVKGIGPITAATLLGYVPELGSLSRGAAAALLGVAPFDRDSGKIKGKRHIFAGRGEARSCLYMAAISAMRYNPKFKEFATRLKQRGKPFKLVAAATMRKLATVVNAMLRTGTPKTAQTLT

SEQ ID NO: 201673 - protein, 397 aa, unidentified
MIAVGIDVSKAKSTVAILNGDGSIRAKPFDVHHVADELQALVDYIKRTSEPPTILMEPTSHYHYPLLKAFREAELPVCLINPYQMKKYGDTELRKAKTDKRDSLRIAQYALEKSYSLIPYTPQDQKYEDLRFLSRQYGQRISTLTAAKVQLLSLLDETMPGITTILPLKSRDPDNCVLLRFIKRFKSFDVIRKMGKTRFLDSYQVLVKKTKDRFAGAKGLAIYELVLNSVTTRGENPLSAMTQDQCVDLVSTSQKAADEINLQMRIIAETIPEYKVLRSMAGVGDRLGPIILGEIGDIRRFHSGKALNAYAGNDAPPYQSGQFESRNRHISKRGNPALRKACFEVMQALKLTKPQDDPVYLFLLKKEQEGKPYNVAKMAAVNKFLRIYYARAMELYK

SEQ ID NO: 201674 - protein, 342 aa, unidentified
MEISTIGLDLAKSVFQVHAINDAGEVIVRKTLRRSQVLSFFAKLPPCLVGMEACGTSHHWAREILKLGHEVRLMPPAYVKPYVKRGKTDANDAEAICEAVTRPTMRFVPVKSPEQQAALALHRTRDLLVKQRTQLVNMIRGVLAEFGIEMARGLHHALALAKRLMDGDAAEVPTLAQRVVASLAHQIGAVQEQLASLEKELVAWHRSSDLSQRLATIPGVGVIAATALAASVSEPERFRSGRQFAASLGLTPLQQSSGGKEKMGRISKMGDRYLRRLLVVGMTSLVRRARTAPASVDPRIPAMLERRPARVVTVAAANRTARIAWAIMTRGGSYRKPVPAIA

SEQ ID NO: 201675 - protein, 352 aa, unidentified
MDNGNKLDFTGQHIYVGMDVHKKSWSVSIYAEHFEHRTFTQPPEVKKLVNYLQRTFPGATYHSVYEAGFSGFWIHDRLREEGVHCMVVNPADVPTMHKEKAGKSDKVDCRKLARSLRSGDIKGIYIPSSVQAEDRHLIRTRQSMVRKQTRCKNQIKSILFFFGIQITEEGHWSRNFINWLETIRMERASGDCALKAHLEELKHLRQIIAGLNKAILALSRTDAYRDKVLLLRSVPGISTLTAMTLLTELYDISRFSSLDRLASYTGLVPDIRSSGEVEYTAGITCRRNPILRTVLIEASWVAARKDPALMMAFNKYSLRMRKTAAIVHVARKLLNRIRFVLMNQERYVPAVV

SEQ ID NO: 201676 - protein, 373 aa, unidentified
MENNITYIAMDTHKKDHKIALHYPGQQEIETMAVRNTAPEISRMVKKILKKAHGEVHFCYEAGVCGFSLKRRIESLGCKCSVIAPSLIPVKPGERIKTDRRDALKLLAMFKAGMLTEVYAPDLKQESARELTRLRDSARKNLMTSRHRLLKFLTRHGYIYHEGDHWTRKHFQWLRSLEFENALMCDVFDSYFTQMEHCIQRLESLDKEVTQLAESEPYKKIVGIIKCFYGIDTLTAISIITEIFDFGRFASPRCLMSYLGLTPSESSSGEKQKKGPITKAGNKHVRRLLTEVCWHYRHPYHVSRELKRRRKDQPQWAIDIADRAAQRLRKRYRHLINSGKMPCKAITAVARELAGFLWSVFREYQTKTIKEAA

SEQ ID NO: 201677 - protein, 369 aa, unidentified
MKHCIIFVGLDVHKDSIDIALADDGRNGEIRFYGTIGGDLDSLDKAIRKFRRSGVELRFVYEAGPCGYEIYRHLTAQGFHCDVIAPSMTPKKSGDRIKTDRRDALSLARLYRAGELTPVYVPREDDEAMRDLVRGRGDAINAARKARQRLSAFILRHGFRYSGRKAWSVAHLRWLAGIKMPHPAQQITLQEYIHSIEENSERVDRVTEQILQLIPAWRMAPVVAAFQALRGVAAIVAATMVVEIGDLRRFENPRQLMAYLGLVPSENSSGQTTKRGGITKTGNSHARRALIEAAQTYSFPAKVSRELRKRQEGLSREIKAISWKAQVRLCGRFRKLMAKGKNRNRTVTAIARELSGFMWAIAKEVPMPA

SEQ ID NO: 201678 - protein, 270 aa, unidentified
MKPATHILGIDIAKLKFDVNLRPLQSSDGRQAAAFNNDRKGFKALIKWLAKHLPEGLGQLHACMESTSRYGDNLAEFLHTQGCLVSMVNPRRTRAYASSQLSRNRNDQIDAMLIADFCGSERHTLTVWEPLSPDHRQLRDLTRARQALVEEHDRFANMLETATGVARPVFQKQLRQLKRQIEQLDKAIAQFVASVPVFKTQVALADSVPAVGIVTAATVIAELPPIDKVPQARQAVALFGLDPIKKTSGTSVDGPARISRMGSRRGRRAL

SEQ ID NO: 201679 - protein, 370 aa, unidentified
MLDTTTFVGLDVHARSIKAVSLDVMTGEVRAATFGYDAGAVAGWVRSVDPKARCVYESGVTGFDLQKRLSGLGVDCVVGAVSKMIKPSADRRRKNDRNDAEFLARMLSVGNVVEVWVPDDECEAARDLTRALEDARDDLSRSKQRLSKFLLRHGLAFDERTPTGRRKGNWTRAHWSWIESIRFAEGADNDVLAYYVDAVRRAAEEKARLEGLVEAEARKPRWRRRVDSLRCLKGVDTASAADLVFEAGEFSRFRNARSFAAWVGLTPSEHSSGESDRRGAITKAGNKHLRKALVEAAWHYLTCSGRPKDLAKGQAPDRVARRHAAKGVRRLVERREALLARGVHNNKANVATARELACWVWAVGLMAEEA

SEQ ID NO: 201680 - protein, 409 aa, unidentified
MEVLYPHCAGLDVHKDTVVACVRHIVNGTVRREVRTFKTTTTELLALSDWLAAEKCTHIAMEATGVYWKPVWHILSDGNFSLVLANAAHVKNVPGRKTDVNDATWLADLLAHGLIRGSFVPDPQTQEMRNLLRTRKQLTRERSRHVQRLQKTLEDANIKLDSEISDIMGLSGRKMMEALIAGESDPEQLARLAHRRIKAPPEALREALRGRITPHHRFLLRLHLQQIDAIDKVIADIDREVDAVVEPFRTTVLLLTTIPGVDELSACVILAEIGRDMSRFPTAGHLISWAGLCPRNESAGKRRSTRMRKGAAWLKTTLVQCAAAATRKKASYLQAQFHRLRSRRGAKKAIGALAASILTIVYHMLLGGELYRDLGPDHFDRRAKATQTKRLVTRLQNLGYAVHITPLPA

SEQ ID NO: 201681 - protein, 344 aa, unidentified
MLYVGLDLSRKRLDFDARDAGGELVERGAVPPDQDGLAGLTRRLGDREVLAVIESMNGARFVHDRLELAGWEVRIADAVKVKGLAPLACKTDRIDAWVLAELARLDLVPEIWLPDPAVRAERERARFRLHLVRHRTALKNRIHSILIAHGVPSPSSDLFGLAGRRLLERLALPEPWRSTTAASLTLIDTLDEQIEACERELRLLGANHPYVPLLLTCPGIGWILASTIASEIGDISRFATPTKLIGYSGLTPQVHQSGEQDRRGPLRKNGPDHLRWALVEAAHTASRHPRYQPILERNRARHGRKRGSKIAALTIARKLTEAIWHMLNNNQPFAPAGATRPLAA

SEQ ID NO: 201682 - protein, 343 aa, unidentified
MKYIGLDLHKKSIFATVLGEDGKILSRVKIGPTTRDICYYLKSQGKREELSVAMEASYNWPYYYRAVEEAADTIVLAHPLKTRIIGEAKIKTDKIDSKVLAYMLKADMLPRAYVPSRDTMENKMILRARISLVRIRTQIKNKIHAIVDRNRDSYCGLENLTDIFGKTGKHILRDTKICPTDHKIITGYLDLMDEIDKKIKDIESQIDKRSLKDRDIELLKTIPGIGTFTAFLVKSEIDDISRFSSKGKLSSYAGLIPSTHGSGQRLHHGRIVKQGNKFLRWALTEAAQTSIRCSEYFRYHYSRIRSRKNGNSATIAVARRMLEIIYVMLKEGREYIEKPVDIK

SEQ ID NO: 201683 - protein, 331 aa, unidentified
MFPVGIDVSKNTLDLCMLYDGIKGRIKTRNIQNNRHSVENILRWLRLQHCGPEDVHVVMEATGVYHERLATELHDAGFYVSLANPHRSREFARGMGIMTKTDKVDAYMLACYAFLKNPHRWEPPAPEIRYLGALLRRRDVLLGDALREENRLEKYLSTDTPADIISSCMHMAQLLREEVSNIERQIKAHIKASPALRRDYTLLTSIKSVGPQLGMHMLAVLRSHDFSSAEQAAAFLGVVPIEKRSGTSVRSRPRMSKIGPPQLRAKLYMSALCGKIYNKRMRNIYDEMCLRGKPKMVAIGALMRKLVHWCYGVLKTGIVFNDEGLKQVLST

SEQ ID NO: 201684 - protein, 344 aa, unidentified
MTPIELNATAHDASLSLFAGIDVGAEELVLVIRKNGKPFDPQKYANTRADHARLAKKLSKLPGIIVCLEATGIYHFDLSIALHDAGVLLMVVNPKSSHNFAKVLMKNSKTDAVDAHTLAEYAARMDFVAWTRPTTEKLALRSFARRIYALTRQKAAAKNHLHALNATLETPKAVLRDARLAIAQLEKRIDRLTAEALLLIAAYPDLKRILTLLVGIKGIAETSAIALMGELLLLPPGLSHREWVKFAGLDPKAFDSGKSVHKKTRLSKAGNRQLRSALYMPALSAKQHDPHVRAYFQHLVDNGKKPLQAVCAVMRKLLHAIHGMLKHDQPFDNSRFYVIPSAVE

SEQ ID NO: 201685 - protein, 347 aa, unidentified
MKEQNNRSEFTIGLDLGERRHRFCALNGKGEVVEEGSVLNDRASLARLTARYGGALAVMEAGAHSPWVSRYLEGLGWEVIVSNPRKVRAIYQHERKSDRRDALMLARIGRMDRALLYPVRHGSEEAQQDLLRIKLRDSLVRARVALINSVRFSLKSLGYGVSNPSSERFHKVAMESLPEAVREMIAPSVQALAELSARIAVLEREISLLARTKYPQTLWLQQVPGVGAITALYFVLKIEDPKRFKNVRAVGAYTGLCPRRDQSGESDLQLRISKRGDAYLRRLLVSAAQYILGPFRPHSALREYGLRLAADGTTRAKKRAVVAVARKLCVLLLSLWKNQTPYQPYPA

SEQ ID NO: 201686 - protein, 563 aa, unidentified
MVETSDSVRDGAGKSVGIGEGAVGELMLLEVAPASFDVVQFGGVFGQPFEGEPGALGERLCGQLAGVDRPVVEHRDQGPGAFGGAVGGAKLVEQGNEVGGALGSAGMDEQAPVHRIKGAEHRPFFRLTGRLDAQLGAAPGPAAGQIGMRERLGFVEEHQINRPHRSFGLQIGKVLTARRDRGCVLAPFEGVARAAEGKMGWTPSAPVSPGGVGCSAFLSKEDPMPVIRIGLDVAKNVFQAHGVDEQGTVVLRKQLRRREVLSFFASLPPCLIGIEACSASHYWARELTALGHQVRMMPARYVKPYVQRGKSDALDAAAICEAVSRPTMRFAAIKSVEQQSALTLHRAREILVKQETMLANLIRGCLGEFGIVAPLGIRRMAELVGIIRDEADSRIPPHARIAMTAVADQLGDLQRRIKEIEQAIRAWHRNNDASRRLATIPGVGVITASAIAATVATPTEFKSARHFAAFLGLTPKQHSTGGRQRLGRISKQGDGYIRRLLILGGTALVRYARGAGGTVWAKQLLARRPARVVTVALANKAARIIWALLVRGGVYRSAAPQAA

SEQ ID NO: 201687 - protein, 495 aa, unidentified
MNNGAAGQNKDGGRPALARSRSPRSNRKTVSERLPAEPVALATTSNRKPPQEGHYISSMDGRAKGRKDQQQKKQTMNGSEQWQQHRAFGALDWASEKHFVVVVNQSGKIVEEFEIEHSALGWKKFREKLQPYGAIPFAIETSQGVAVEQLLEAGMMVYPINPKSAQAYRERKAPSGVKDDRLDAWSFADALRVDGHGWKALRPEEPLIKELRLLSRDEVTLIEQRTAFINQLCHALAEYYPAALEAFEDWTSVSAWMFVERFPTSEALAKAGKRKWQNFLHSRRLWGSTEGPRRMEVFAKAGQFAGTPPTTKAKSLLALSLVQMLFVIEKQLKLYRQRIEELFARHPDHDLFGSLPGAGPKLAPRLLSEIGDDRERFGGEPQNLQCLAGSAPVTKRSGKRRKYWHVHTRWACDKHLRHAMHLFAEQSLSRCVWAQLYYQLHRQRNQSHANALRRLANRWLKIIYKMWIERTPYNSELHHRNQLQHGSWIFQLKTS

SEQ ID NO: 201688 - protein, 337 aa, unidentified
MKYCGVDLHSNNSVVIVSDEEDRIVFSKRLPNDLGQIGAALEPHREDLAGVVIESTYNWYWLVDGLMDKGYRVHLAHPSAIKKYEGLKHSGDFADAGYLAHLLRLGLLAEGYIYPREERGARDLARKRMQLVRYRTAQILSIEGILMRQTGARMKGEAVKRLTAEQVDEFAFAPDVSLAVQANRAVSQTLSQQIEALEKRLKQRVILRAEYRLLKTVPGIGEILATTIMLETGTISRFTRVGNFSSYCRCVESLLESNGKRKGEGNTKNGNKYLAWAFVEAANFALRCCPQAKSFYDRKKSRSNRVLALKALAHKLARACYHMLRDQKPFDVHLCFG

SEQ ID NO: 201689 - protein, 340 aa, unidentified
MTNNTQFFMGIDVSKPYFDAALLPVVEHKKKEMICERFDNSHEGIKSFEKWLKSHKVSFDNNSLLVIENTGIYHRLLWSFCSKKNLPIHIGNAAHIKWSFGIARGKNDKIDSQRLCQYAYKEADELKASPALDPVLLQLKDLMTARTKLLSQINAIKVYIKELKNVSDKSIQKTLEQGYKQALEGMAASIKNFEAEIKKIIANNTALEANYNLLITVPGIGHLTAVYLICCTCNFAGKITGKQLACYAGVVPFGHRSGISIKGKDRVHPMANKDLKKALHLCALTAIQFYPEFKQYYERKKAEGKHSMSVLNAIRNKIVLRAAAVVSKQQAYVDNTKIAA

SEQ ID NO: 201690 - protein, 375 aa, unidentified
MSDHSEVFVAFDTSKLRNAVAIADGGRAGEVRFLGEFESSTTATSKLVRKLAAKYQRVTFCYEAGPTGYELHRQIKVLGHECIVVAPSLIPKKPGDRVKTNRRDAVSLAKLLRAGELTAVWVPDCRHEAVRDLTRGRETAVIDLRSKRQQLSAFLLRQGRWYPAGKKTWTKAHMNWLASQKFEQPERSIVCEEMIFAIRQAQERVERLEQAIRAAVPDWSLAKVVTALMALRGIDLISATGLLAELGDLSRFRTAPELMGYLGMGCSESSTGDTIKRGPITKAGNRRARRTLVECAWSYQHPPRIGIAKQEKVAAAPPKVREIAWKAQSRLNRRYRALIRRGKLKTVAITAVARELAGFVWAVAREAGSAEPATK

SEQ ID NO: 201691 - protein, 434 aa, unidentified
MLVADEAGEELLAATFAHDEKGLRSLCRQLVRLGVELVAIERPDGLLVERLLDAGLRVLALHPNQVAATRARFRVSGGKSDRFDAFVLCELARTDHHRFRVLEPDADETKALRGLTRAREDLVKTRVAVGNQLRAELERFWPGPIGLFTDLDSHISLAFLERYPSPADARGLGEKRLAAFLTRQHYGGRQKPAQLLAKLRRAPEGRVGEVEMNARRQIVLCLVQTLTTLSTQIKTLDRQIEDAVRAHPDGEIFLSLFKDPNSFLTAAEMLAEIGDCRGRYPARDALAGDAGQAAVAIESGKRKTACFRWGCNKRLRSSFSRLADTTRHWHPWAADLYAAALARGHDHPRALRTVGRAWCRIVWRCWQDGTPYDPARHRALQRHITVTIPTPSGPMPDTAATQRMLGQAVTGTAARRAEREALDGKSTSAITLRT

SEQ ID NO: 201692 - protein, 339 aa, unidentified
MKDQDVSDVVRTKKRTAMRYIGIDVSKATFVVAYSSDKGGEIRTFNNTTAGIRQFIGTLPKDGSIHCVMESTGNYSALLLYMLNVAGITVSMENPLKVKNFAKAMLSTIKTDKSDARLITLYGEKMNPRPFKVQGEAILRLRQKRTVIRQLTKQITAMSNLRGSLACLPVPDKGATHTVDETIKFLEKKRDRLQAELTDLVEVEFSRQLALLTTIKGIGITLATALIITTGGFTYFQNAKQVSRYLGICPTYEQSGTSVNIKGHINRNGDAYTRGLLYIAAWPASRFNAQCKETYTRLRQNGKSGKLAMIAVANKLIRQAFAVVAHDKEYVDGFVSNRP

SEQ ID NO: 201693 - protein, 350 aa, unidentified
MGKNVTTAPSSAGWIGMDISKDFFDVALWGDQEGPAMANGRFPRSKFGAAEVVAWIQMQGREVAGIVMEWTGSYSRELAEWLMAIRPDWAVALINPSLVKAFGASYGLRNKTDQVDARLLVRYGAERTPAAWRPPDPDRDRIQSIYRTRLKLTLMVTALRNRDEDCLHADSVARSAHRKVLATMESQIQALEKAATAIIKANPAWQKDRNLLMSVPGIGPITSLATLAEAGDLRRFRRGRQLTAFAGASPKRKQSGTSVNGKTRMCRIGGKFLRPALYMAAVAVTRTESPLSKFYRHLIDQGKPPRAAIGALMRKLLLIMRSVLIHDRMYEPHPVQRNLKDKSASVARPA

SEQ ID NO: 201694 - protein, 318 aa, unidentified
MTHTTQTTALYVGIDVSQNTLTIALYPTDEVWTIDNTSQHHTALVQHLAQLPVQRVLLESSGGYEKAVVSALQQAGLPVVVVPAQRARYFAKSMRGDLKTDRADARMLAYFACCYPVQPVAPCSPVQAELKELWARREQLVQQVEREKKRLHTVQSEAVRASLERMLAVLKDEIAQIEARVAELIASDADLSQKAALLQTAVGVGRVVAYGLVAELPELGQVSHRAIAALAGLAPVRCESGAWVGRARVRGGRPRVRRLLYQAAVVAATHDGRWRAVYEALVGRGKAKKVALCAVARQLLVVLNAMVRDGRAYERVQE

SEQ ID NO: 201695 - protein, 353 aa, unidentified
MYTKRIAVDLAKNVFQLAECHRSDKIVSRKRLNRSAFYKTLTLLTEPTEIIFEACGTAHYWGRVVQRLGHKATLLHARHVSPFRRGNKTDRNDCDAILNASRSIDIKPIPVKTELQQHIQHLHCIRELWKQNRLQRINLLRGIFREQGFDCPLGRAAFLKIAPIIADEPVMQPIAILVSQLLAEIKNCTESLDACENTIANLLINDNVISRIDDVSGIGLLSASAFVAAVGTPERFKNGRVLSAWLGMTPKEYSSGNSRKLGSISRAGNTYVRTLLIHCARSALQSAKRCAAKTPEKLTHLQQWAIQLSDRIGYNKATVALANKLVRICWSVWKHERRFDGNFIPTSTIQTAG

SEQ ID NO: 201696 - protein, 339 aa, unidentified
MIAVGVDTHKERHWAVALDALGQALGELAFAATAAGYAELQDWAENHGDPDELVFGIEGAGSWGAGLCEHLQHAGHAVLEVERPRRAERRAGKSDRIDALAAAKRVLVGEKVSTPRRRGTLAALRALVNVRRSTIAERTRLLNQLQALNVTAPVALRERIGDGTGKQLERRLLSMRSRISSDIEERAVFGVMRDLAARSRALTTDAKRYERDLAALVRSLDDTLLDEPGIGPISAAKLLASDPTRFKHEAAFARCNGTAPLPASSGKTVRHRLNRGGDRQVNNAIHTIALIRAKHQPETRAYLDRRISEGKTKREAMRALKRHISRDLFKRLAEMPLTS

SEQ ID NO: 201697 - protein, 348 aa, unidentified
MVHFVGLDVSVKETSVCVVDDAGKVILEQKVQTEPADIIAVLTSLGVSFGRIGIEAGPLSQWLVNGLMAADLPVICVETRHMKALLTAQQINKSDRNDARGIAQMMRVGLFKPVHVKTLVAQEQRMLLTSRKLLQRKLLDVESDLRGTLRNFGLKVGVVSGGRYEARVRELVAGFPRLAAIVEPMLSVRRVMRQQFAVLQKMLLDTVRGDPVCRRLMTAPGVGAVVALTYRATVDQPQRFLHSRAVGAHVGLTPKRYQSGETDYEGGVSKCGDALLRTMLYEAAHVLLTRGAKWSWLKAWVVRVAQRRGMRRAIVAVARRLAVVLHRMWVDGSEFRWSKDSTAVSAVA

SEQ ID NO: 201698 - protein, 334 aa, unidentified
MENITLIGIDLGKNSFHIHCQDRRGKAVYRKKFTRPKLIEFLATCPATTIAMEACGGSHFMARKLEELGHSPKLISPQFVRPFVKSNKNDFVDAEAICEAASRPSMRFVQPRTESQQAMRALHRVRESLVQDKVKTTNQMHAFLLEFGISVPRGAAVISRLSTILEDNSLPLYLSQLLLKLQQHYHYLVEQIKDLESQLKRKLDEDEVGQRLLSIPCVGTLTASTISTEIGDGKQYASSRDFAAATGLVPRQYSTGGRTTLLGISKRGNKKIRTLLVQCARVFIQKLEHQSGKLADWVRDLLCRKSNFVVTCALANKLARIAWALTARQQTYVA

SEQ ID NO: 201699 - protein, 352 aa, unidentified
MHARKVAAAAVVLGSGEVFRAQLGGSPDEAIEWLRSLPGDVRAVYEAGPTGFGLARAARAVGLEVMVCSPGSIPRRPGDRVKTDTRDALKLARLHAAGQLRTVLVPEPSLEALRDLVRARDDLRRDQMGARHRISKMLLRRGLVFDGPGETWSQRHLAWLARARFDEPLADVVLGEYLACHELLLARRERLDRLICTQAGQERWAPLVGRLRCLRGIDTLSAVGLVAEIGDIHAFSYPKRLASYLGLVPSEQSSGTTRRQGPITKAGSTHARRLLVEAAWHYRRPPRVSLVVKRRQAGQPAPAIEAAWRAQLRLHQRWAQLDGVRAKRRTTVAVAVARELACFVWEIAQQPD

SEQ ID NO: 201700 - protein, 391 aa, unidentified
MIFVGIDVAKDKHDCFILNSEGTVLADVFTIANNHIGFETLLSRIQSCSQGESKIKVGLEATGHYSYNLLGFLLDSGLATYVINPLHTNLYRKSLSLRRTKTDRIDARTIAMMLMSDVDLKSYSNTAYHNEELKSLTRYRFDKVKERAKLKSSVARLVNILFPELEKLVSSLHIAVVYALLSNYPGASYIANANTEELAETLCTASKGRYTKSKTAEIQVAAGVSIGSKMPAKSMELKHTIALIRELDKEISEVESAIDKITSQMDSPIFTIPGIGRHMGAMILAEVGDFSNFASADKLLAYAGLSPSTYQSGKLQNCYAHMEKRGSRYLRYALFNAAKYVCLWCPTFSAYLEKKRSEGKHYNVAISHAAKKLVRLIFAMQRSGKAFLADY

SEQ ID NO: 201701 - protein, 322 aa, unidentified
MSTPTVTVGVDIAKAKFDAARLGADGKYKHKKFDNAPEGFAAFLVWLVAFGGDRPLVCMEATGAYSIPLAEYLAAQGWPVSVVNPAKISHYGKSETSRAKTDKADAKLIARYAREKKPRLWTPPPPEIRELQLLLRRIEDLAEMRQMEQNRLDTAADAVAGSIKAVLASLDQELEATQKRIRQHFDGHPGLKCRRDLLDTIPGVGQATAAQLLVALSEHYGFDNAKQAAAHAGLAPHIRESGKWKGQTRLSKTGDPMLRKALYMPAVVAWQHNPAIRAFCDRLKAAGKNGKAVVCAAMRKLIHIAFAILKSGKPFDPNFALA

SEQ ID NO: 201702 - protein, 385 aa, unidentified
MQANTTKAPAAIRVDLAAIFVSLELSRSKWLVTSLSPGGGERMSRHLVSGGDIPGLLDHVAELQRKAEVRTGQSFRVISIQEAGLDGFWIHRVLEREGIESYVVAPASIATSRRRRRAKTDRIDGEALVRALLAYNRGEPRVCAMLRVPTPEEEDRRRLVRERKALTNERIRHVNRIKGLLFSQGVSGYEPLKGDRRKCLDTLITGDGRPLPPALMAQISRELDRIELLIQQIKDVEEARDAMLVAADVPTPALLLSLKGIGPEFAAVLWSEGLSRKFDNRRQVAAYAGLVPTPWQSGQINCEQGVSKSGNPRLRSTLVQVAWLWVRHQPNSALSQWFRARVIQNGGRYKKTAIIALARKLLVALWKYVNAGVVIEGALLTKPSA

SEQ ID NO: 201703 - protein, 376 aa, unidentified
MREKLRFLGLDVHAETITAAIVEPDGEVRSLGTIANREDSIRKFIRKLGPVEQLRACYEAGPTGFVLYWQLAQLGVQCVVVAPSLVPKKPGDRVKTDRRDAIKLARSHRSGDLTTVWVPDENSETLRDLVRQGEAAKQDQLRARHRLTKFLLRTGWRPPLGLKAWTERYLAWLQQVRYTQPAQQATLVDCLNEVQHMSARVKRLEEAILEVVKLAPQPMQEVIQGLQALRGVAHISAVTIATELGNISSRFPSARKLMGYGGVFPSEDSSGKRKRQGGITKTGNAHLRRIVVESAWCYRHRPCVGAKLRKRQQGVPAQITEIAWKAQNRLHKRYRKLTMAGKDHRKIMTAIARELLGFIWAIGVKAEQACQQPIAA

SEQ ID NO: 201704 - protein, 316 aa, unidentified
MMIIGCDFHPSWQQVSWLETETGETGEQKLVHASGDARTFYQQLAAPVLIGMEATGNSQWFIELVQDLGHEIWIGDAAQIRASYVRKQKTDKRDAAHILKLVVEGRFPRLWTPDREQRDLRQLVLHRHKLVEIRSRVKNELQHLSLNKGMQRKRTLWSQAGQQLLRELPLKKWAACRREDLLGLLTMLDEQIGKLDRAVQQAAEENPHSKLLMTQPGVGPNTALAFVLTLGDVGRFPRGKQVASYLGLIPREESSGGRQKLGAITKQGNRMLRSLLVEAAQNAVRYDPQFRREYLHRCRQKPKAVAKVAAARKLAV

SEQ ID NO: 201705 - protein, 345 aa, unidentified
MTIVEARLITGGVDTHADTHMAAALDSIGGLLGVREFPVTPAGYARLLGWLGGFGTVGLVGIEGTGSYGAGLTRHVTAAGVRVVEVDRSDRQDRRRAGKSDPLDAVSAARAAQSGRASGAPKGRDGAVEAIRVLMVAKRSARSERTQTINQARALIVTGPGDLRVRFTGHTVAALVSDLAALRPRPGEVAGYATRIALRELGRRAEFLDGQLGRLDELIVPLVAARAPGLLALHGVGPDTAALLLIAAGDHPERIRSEAAWAHLCGVAPIPASSGKTTRHRLNPGGNRDANHALWRIVLTRMNSHPATRAYVERRTAEGLSKKEIIRCLKRYLARQVYPRLRAAD

SEQ ID NO: 201706 - protein, 341 aa, unidentified
MTQYVGLDVSLKETKLHVLDEAGNRIWRGRCATDAAAIAAAVRRYAPRAVRIGLETGPLTTWLWTALRAEGLPMVCLDARHAKKALDMKVNKTDANDAEGLAHLVRAGWYREVRVKGRSAMLAKALLGARSQLLSMSLALENQIRGILKTFGRIVPKGAGGLFEKNVRALIMDDAEITAVIMPLLQARQVARGKCAALDRRIIRSVQGDATCRRLMTMPGIGPITAVAYVAALEKPDTFKRSRAVGAWLGLTPRRFQSGEVDYDGHISRRGDRQLRALLYEAAAVLLTRVRRESALRRWGLMLWKRLGFKRAATALARKMAVVLHAMWKSGTAFNPTLSTP

SEQ ID NO: 201707 - protein, 365 aa, unidentified
MTTILGIDLGKFKSVFCTFSPETGEIQYDSFPTCKKAFRKFLMKTAPTMTLFEVSTAAGWVYDLCCELGLPCNVANPLGEAWQWRKVKRKTDRDDAYKLIRLHLLGELPTVHMVPLESRQRRALITFRQRLIERRTAIRNHIRALFQAHGLNLPPGHKAWTDEARTWWGTAYGQPLSACGVDDLWRGEVQVELVLLESLESQIKAVEKKLDSLAKAHAGVELLKTIPGVGVRTAEVIAAYLDDPHRFRNARQVSAYAGMVPRQFQSGTIDRKGRITKRGPSYLRKILVECAWLMPRYNPWAAQLVERISRGQKRRRKSAVVALARKLLVRCWAMLRKREPWKLPESAAAPPGTPEHQPDPILSNA

SEQ ID NO: 201708 - protein, 349 aa, unidentified
MRFYTQQHRYTCGIDLHARSLYVCILDDTGQKLVHKNVKACPEALLKLIADYRDDLIIGVECMFSWYWVADFCADHDIEFVLGHALYMKAIHGGKAKNDRIDSEKIARILRGGMFPYAYVYPRGMRAHRDLMRRQIKLTRERGELMSHIKNTLSQYNLPANTENLRYAKHREPLRTAFPDPSVQRSIDLDLARIEFYDEQLAKLQWYLKKTAKAVDPNTIIRLKSVHGIGDILSLVILYEIHDIERFPRVQDFVSYCRLVKCQRESAGKKHGTGGARIGNPYLRWAFGEAAAALFLRGNPEAQRWLEKKTKKHNKAKAMTILAHKLGRAVYYMLKRGTLFDQERFLAQR

SEQ ID NO: 201709 - protein, 336 aa, unidentified
MNDVKMAVGIDISMDNFHACIKVQNETGKVVIKGTKTFNNTGTGFKEFYGWASSRKKGDCSLSFVMEATGIYYEDLAYFLHNEKERVSVVLANKMKGYAKSLNIKTKTDKVDAKIIAEFGIERQVEEWKPMSPVYKELRDFCRELLSIKKEMNRAKNQLHAMLRSHNKSKEIINLKKKQIAFYEKTVETITKNLIKIVDMDPALKQKLTKLQSIPGLGFETSIILASETNGFELFTSIRQLVSYAGLDIAFKESGQFKGKTRISKKGNSRIRQALFMPAMAACRHNESIKILYQRVCERNPDIKRKGIVAGMRKLLIYAFVIWKKDIAYDREFVWS

SEQ ID NO: 201710 - protein, 420 aa, unidentified
MYGEATDKSKNSSKLSIKTDGAKGLKPSCMLTDIMVKGSIVDTSFGEASVASRAERRRRREIGTSLVHETVIEHDPRCRYGTSPNSRRNRRKPKGPVSSHLQDWEQTMTEPLFIGIDVAKDTFHVASRPASINISLPNNSTGTKQLIKTLQPFTVSLVVLEATGGYERPIVAELLEANFKVVVASPRQVRDFARGIGEFAKTDPIDAAVLARFAQVVQPKPKLPAGPETGELADLVRRRRQLIDLRVQESNRSQLALHPRIRKSVRKMIKTLDYQIAELDRIIEEHIGSDDDFRKKDEILRSTPGIGPGTSAILLSHLPELGQLNRQQIAALVGLAPYDFSSGRFAGKSRIWGGRKDIRCALYMAALSAKRFNPAIHRFANRLAEKGKVFKIVITACMRKLLVILNTMIRNQTLWRPENI

SEQ ID NO: 201711 - protein, 341 aa, unidentified
MEQITTIGLDLAKSVFQVHGVDRAGRTVLRKTLRRGQLAHFFARLPPCLIGMESCPGAHHWGRKWVAMGHTVRLIAPQFVKPYVKTHKSDAADAEAICEAVCRPTMRFVPIKTVEQQAILSVHRVREGYVKARTALANQIRGLLAEYGIVLPVGIASLKKVPAAIGQDETLPGAFKTLIQMQLDHLRALQERIAQADAAIRHWYDENPACQRLQAIPGVGVIVATAMVASVGDARCFRNGRQVAAWLGLIPNQHSTGGRARLGPITRRGDVYLRTLLIHGARAVLRHAQDRPAAADTWAMQLVRRRNKNIATVALAHKNARTIWALLAKQQRFDPMLRAAA

SEQ ID NO: 201712 - protein, 378 aa, unidentified
MRKVRFIGLDVHADTVAVAVAEPSGDVRSLGMIPNRSESIRKLVKKLGPAEQLRVCYEAGPTGYVIYWQLTALGVRCEVVAPTLVPTKAGDRVKTDRRDAEKLARCYRAGDLTAVWVPDAAHEALRDLVRAREAAKKDQLRARHRLGKFLLRHGRRPPMGMTSWTQRHLTWIKTAVHFEQPAQEATRLDYLHEVEHVAGRIERLDRAIDEAVTTAPGRMRAVIEALQALRGIALVSAVTIVAEVGELSRFARAPQVMGYSGMGAREDSSGGRTRRGGITKTGNAHLRRIVTEAAWAYRHRPAVGNALRKRQAAVSDEVKTIAWKAQHRLHGRYRKLLGRGKCQQQVVTAVGRELLGFIWAIGVTVERQQRTPSSSIAA

SEQ ID NO: 201713 - protein, 353 aa, unidentified
MTQPTATTSSVTLGLDIGDRSTHFCALQDRKVVGRGSCKTTQEGLAAALERWPGAQVALEAGSQSPWMSRYLKKRGYSVHVVDPRRVQLISKDPRKTDRRDAELLARLEAGMPELLGNVRHRSEQAQADLALIRARDQLVQTRTSLVLCCRSLSKAFGVTLPKATTVGFTRAARDEVPELLVPAIGVLLDQIDSVSAGIRGIDRQIAAAARERYPEVARLQEVNGVGILTATAFVLTIEDPARFRNSRLVGSWLGLCPRSHASGDSNPELGISKAGDRPLRRLLVQCCNYILGPFSQDSDLKRFGLRLAARGGKAAKRRAVVATARKLAVLLHHLWKDQLTYEPLHHAQRQAA

SEQ ID NO: 201714 - protein, 330 aa, unidentified
MKNYDEVVGIDVSKKTLDAYCHQSQVHKVFVNEISGYKSLIKWVLKVTKDSNVFYCFENTGYYSLKLALYLHSQAIVYVEESPLKIKRSSGVVKEKTDRIDSSLIARYAWLYREELNPSIVKSSSHLELGRLLALRDQLVRNNAGLKGTLKEMKMLLSSSSTDVGCLSLKRSIDYLEKQVKSIETRIKDILSEDASMSKNYELLTSLKGVGLVVACQLIYHTGNFTRFASWRAFSSYCGTAPFKHESGTSIHRRKQCHYLGDRKMKSLLSMASVSAIQHDSELRLYYNRKLAEGKDKMLVINNVRNKLIARAFAVVKRGTPYVVLQQHAA

SEQ ID NO: 201715 - protein, 349 aa, unidentified
MSHKLNSGIAVIGIDIGKNSFHVVGLDQRGAIVLRQKWSRGQVATRLASMPRCLIGMEACVGAHHLSRKLTLLGHDARLMPAKYVRPYSRGQKNDFRDAEAIAEAVQRPTMKFVATKTAEQLDLQALHRVRERLVSQRTGIINQIRAFLLERGVAVRQGLRFLRAELPRILAAPCDALSPRMLRVIEDLAGDWRRLDERIEHLSSEMEVLARQDAGCERLMSVPGIGPIVSSAMVAAIGTGDAFTKGRDFAAWLGLVPKQISTGDRTILGKISKRGNRYLRVLFVQAAWAVLIKPKSWDRHGLKPWLEAAKRRLHHNVLAIALANKLARIAWSVLAHGRTFEASKIQTA

SEQ ID NO: 201716 - protein, 343 aa, unidentified
MKISVIGLDLAKDVFQVHGVDERGQVTLRRQLKRNQVLAFFANLDPCLVGLEACGGFHYWARAIGKHGHTARAMAPQFVKPYVKSQKNDANDAEAICEAVQRPGMRFVPVKTVNQQSILQLHHARRLLTKMRVGLSNHMRAMLLEYGIALPQGVKTLPSRLPAILEDADNGLTETTRALLASLHEQWQSLRAQADRLEAQIHAWHRQNEASRRLSEIPGVGVLTATALVGTIGDAKVFQNGRQLAAYLGLVPQQRSSGGREKLLGITKRGDGYVRTLLIHGARAVIRWARLRARAGAAADPWLTALLARMHANKAAVAQANKTARIAWALLARNRTYAPGASA

SEQ ID NO: 201717 - protein, 484 aa, unidentified
MHPRTTNKPTQTSEVRRFNFESAGALALDNEYSGFAVLPAHYIAFAERKRARPWTSIYHSGRYDVKPPTTQQFTAYVGIDWADTKHDICLQALGNESREFDCIGHQMADIDQWAQSLHQRFGGQIAVALELAKGPIVYALQKYDFFVLFPINPLTLAKYREAFAPSRAKDDPTDAELALDLLMRHPERFTPLQPQSVKMRTLLSLTEHRRELVGDKTRFTNRLTNTLKQYYPHALDWFDQRDTLLFCDFLTRWPTLAQVKRARRASLEAFFYAHNGRRAHVISAPLDAIKAAIALTEDWGVIAPCRLQILVLVEQLRITLQAIDRFDREIAELAPQLPDYCLFQHLPGAGPHLTPRLLVAFGEDRQRYQHVDELQKYAGIAPVTERSGKKSWVHWRWQCPTFMRQTFVEWAGQTINKSFWAGAYYRQQRAKGSSYQAAVRSLAFKWVRILYRCWQTRTPYDESKYLNALRKRGSPLLKHLELNV

SEQ ID NO: 201718 - protein, 350 aa, unidentified
MLIIGCDFHSRFQQIAMLDPQTGEVIERRLEHENGEARKFYAALTTPAGVGMEATGYAQWFERMLAEQGHQLWVGDAAEIRAAMVRKQKSDSRDACHILDLLLRDKFPRIWIPSTEERDVRQLLRHRYKLVCLRTSLKNQLHAMAMGQGICRKKKLWTAVGRKELQGLSLGPWASRRRQHLLNLLDQLEPVLDELDRAVIQEVEKRPAAVRLMTQPGVGPVTALAFVLTIGPVSRFQRSKQVVSYLGFNPREESSGGRQRLGSISKQGNSMVRFLLVEAAQTASIYDPELRRDYQRLKFRRGRGVAKVAIARKLAVRLYWKLREQLSQVPPAPMQGSPASPVVGESLSAF

SEQ ID NO: 201719 - protein, 309 aa, unidentified
MGEFIGIDVSKSVLDVAAHGSGARLQAENDEQGLKQLAEKLLELAPELVVMEASGGYERLCAAMLAQAGLPVAVVNARQARAFALATGVLAKTDAVDARILAHFAAAVRPAVRPLPDEQRAALDEIMGRRRQLVGMLVMEKNRLGQARNPGVRRDIQSLIVVLEKRVGGCDGELQRLIQASPVWRAQEDLLRSFNGIGPVNARVLLVELPELGTLDRKQIAALVGVAPIARDSGQHRGRRSIAGGRGQVRATLYMAAVTAIRANAVIRAFYQRLREAGKPAKVALVACMRKILTILNAMVRTKTRWQSA

SEQ ID NO: 201720 - protein, 372 aa, unidentified
MNYNTVYVGMDVHKESFTLCSCKYEDEKASHYQRTPASYKNVLRYLAFLRTIYGEDTRFVCGYEAGCLGYSLYHQLENFNVECVILAPTTMLEQRSKRRIKTDKRDAEIITKSLAQHNYSPVHIPTKMDNQTKEFIRMRDDHKAELKKIKQQILAFCLRQGYQYDGSGNWTAKHVKWLRSLKTEGLYKEILDEYLLTYTILTDKLNRLEQRIEELASEEEYKEPVSKLTCFLGIKTHTALSVIVEVGDFQRFASARKFAGYLGLVPGQHSSGDDRNGLGITKAGNTHVRRLLVESAQSYTRGKIGYKSRVLRSRQAGNSPQIINYADRANERLRRRYYQMVLKDGKKYNIAKIAVARELACFIWGMMTDNIY

SEQ ID NO: 201721 - protein, 394 aa, unidentified
MKLVGIDVGKNSHHFCVMDKETGEFNVAPSSFSNNKEGFDFLINSLKPYSKKSILIGMEDTGHYHVALLKFLLSNGYTVALINPKTTDLTRKMEGGITKNDKLDTITICDVLDTPERKKQYRITKVDRFDLYEQRQLTRHHHNLKEELNIYCNRLQKSIDLVFPEFNTLFSSKYGIVYMNLLKTFGSAEAIASTDIRTIRKCFEVKGRGGRISLTPEKLKECAKNSIGISSEVETIQIKHLVNQITLIKEQIAEIDKKIEEFSIKNNSPILSIPGISHFSGTSILAELGDIGNYSKPSQIIKFAGVAPYHYESSQYNAQHTGITKKGSKYLRKTLYQIILPVINNNPVFKKYYLLKISQGKGHRCAQGHCIRKLLRIIYHLLETGQSFDPALLR

SEQ ID NO: 201722 - protein, 374 aa, unidentified
MLSARPAGACRPPPDQQKEPAITTIAHPERPRVTVGVDTHLDVHVAHAKDQLGRRMETVSIPTTPAGYQDLLAWARGLGEVQMWGVEGTGCYGAALTRFLGDQGQVVLEVNRPDRQARRRRGKSDPVDAEAAARSVQAGEVTTLPKAGTATVEMIRSLRVARQTAIKARTQAINALKALLVTAPAQLREQLRGRSAAMLVRQAAALEPGPLDTPTAAAKLALRCLACRYQALHAEVATLDTELARLVAKAAPGLVARFGVGPDSAGALLVAAGDNPDRLRSDACFSMLCGSSPIEASSGKTRRHRLNRGGDRQANAALYRIVVVRLRWHQPTKDYMARRLTEGKTTKEIIRCLKRYVAREMFTVLNQTVPTPAT

SEQ ID NO: 201723 - protein, 350 aa, unidentified
MIIIGVDFHPGLQQIASVDTDTGEFEEKRLAHREEAEKFYRDLASRGAQIRVGMEASGYARWFERLLAELQIELWIGDASEIERKRARKQKTDRQDAQHILQLMLKDDFPKIWVASWENRDLRQLLWHRHRLVQARVRIMNQLQAVALNEGLQCKKRLWRGSGRQQLESFRLGPWASRRRRDLLELLDRLSPTIEELSQAIEQEAEKCPEAQRLMTHPGVGPLTALAFVLIIGQAERFQCGKQVASYLGLVPLEKSTGKRRRLGHITKQGSSIVRFLLVEAAQAAVRGDPQWRSKYLRLLMRRGRKTAKVAMARRLAIRLYWMWRERQDYRQSRSFGSHAGQPGNRDGVH

SEQ ID NO: 201724 - protein, 340 aa, unidentified
MNHYAGIDVSLEASSICVIDGSGKIVREGKVASEPEALIAWFGSLGLSLTRIGLEAGPLSQWLYAGLRDAGFTVELLETRHVRNAFKIMPVKTDRKDARGIAELMRLGWFRPVHCKSMEAQETRAMLTARKLVQKMLHEVEMSLRGVLRGFGLKVGKTTPVQFEGRIGELVAGHPNLEVIAASMLAVRATLRCEFNGFERRLRTLARSDMRARLLMSTPGVGTIVALTYASAIDDPSRFKSSKTVGAHFGLTPSRYQSGETDRSGRISKTGDGAVRAALYESAHIILTKPIKGCTNLKSWAMRIARRAGLNKAKVALARKLAVIMHRMLADGTTFTTQPA

SEQ ID NO: 201725 - protein, 370 aa, unidentified
MSKVKQYIGLDVHKDTISLAVAPGGPGLEVHDLGRIPHDVPRLLRRLLKLGSADLLHVAYEAGPTGYGLLRLLEAAGIHCIVVAPSKTPRRPGDKVKTDQRDARNLARYLRSGELVAVIPPEREVEALRDVLRAREDAVRALRSARQQLSSFLLRHDRRWEGRSSWTLVHLEWVRTQRFESEAQRQVLEDYSQEVHRLSARVKEWDHSVAQFAEECRSGAPMYRALQTMKGISTIVAATLVAEIGDFKRFPSASKLMSFLGLTPSEQSSGPKVSRGAITKAGNPHVRWKLIQAAWQYRHRPAMTIVLKRRSEGVPQPIQDIAWKAQKRLHRRYRQMTARHKRAQVTVVAVAREMCGFIWAIGQQVQQPSA

SEQ ID NO: 201726 - protein, 394 aa, unidentified
MIKLFVGIDVAKDTSSAQGIDSTGRGCFSLTVPMDSGGFMELWTAIMLHCKDLSKVIVAVESTACYHINLFSFFTAKGVNTVVINPLLISNFAKLSLRKTKTDKKDAMTIAQFLLVHRDAISHLSLSQDLQDFRDIARERESVSHMISAHKVEIKRILQTTFPELENLCNITTRVMLDFIQEFPSARLVKATKPKAIQKALKRKGVDTRLTYTAEDLIQAARSSVATISPAKELIVKGKVATLRHLQQRHDELSAVLTDYCKSAMLEDLEIITSIDGISTGTATTFLAEIGCIGNYASHRNLIAFAGIDPTVYQSGKFQGASRISKRGNRHLRRVIWLMTVNVIQHNSIFKNYFLKKRKEGQPFKKAVFATAHKLMRVIFAMLSQRTMFKEACA

SEQ ID NO: 201727 - protein, 356 aa, unidentified
MSREIKYIGMDVHKEAIVIAVLNSSGKLVMESIVETKASSLLQFIHGLRGELHVTWEEGTWAAWLYDLLQPKVQQVLVCNPRRNALLKEGNKSDKIDAQRLANLLRTGMLRPVYHGEHGLRTLRELARSYQTISQDLIRVMNRIKAVYRGWGIACGGTQVYAARYREEWLGKIEHAGVRRRAELLYQQLDGLQELRRTLRPELLAESRKHKAAKLLRQIPCIGPIRAARLLALMQTPHRFRSKRQLWTYSGLGIETRDSAQYCFVHGQLQRAKKPQQIRGLNRNHNHEMKDIFKGAATRASCGVGPLRDFYVALLDKGMKPEMARLTLARKIAAIALTLWKKEERFDVEQLKAQAA

SEQ ID NO: 201728 - protein, 445 aa, unidentified
MELTYTHCAGLDVHKKTVVACCITPLIKGEVNIVTRSFSTITVGLLELSDWLHSQNVQQVAMESTGEYWKPVYNLLESGFEVLVVNAQHMKNVPGRKTDVQDAQWIAELLGHGLLRGSFIPPLPQRDLRDLTRQRTNLVQERAAVVNRLQKTLEWANIKLACIVTDITGVSARQILAAIANGQDNEQVLAELAKASLRNKRQQLEQALTGRVREHHRFLIAQHLIHLDFLKEQIAIFDTQITEHIQAQAITQKDSKPPTSSNSLTSAVKILPNNCPLSWEAAVRLLDTIPGVARNTAEVLLAEIGIDMTRFPSAAHLARWARVCPGNNESAGKQFSGRTGQGNNWLRSALIQAANAASRCKNSYLAVVYQRLKARRGRKRAIVAVAHRILTAVFHMLSTGQPYTDLGVNYLNQPQKQHLLKRLRSRLEQLGYKVTLDAQPSPTPN

SEQ ID NO: 201729 - protein, 408 aa, unidentified
MEVLHRRCAGLDVHKASLTACIRIVEGKAVRQEVRQFRTTVSGLHELRDWLQDHEVHAVVMEATGVYWKPVWHILEEDFELTLANAAHVKNVPGRKTDVSDATWLADLHAHGLVRASFVPPQPVEELRQLTRTRKQLVREVSQHTNRIQKVLEDTNIKVGDVVSDILGTTGRAILRKLIAGVTDPESLADEARGALKRKRQQLTEALHGRVTEHHRFLLRLHLDTLESLEQRIAQIDERLAGTLHPFSEAVERLQTIPGVSTITAHVIAAEIGLDMTRFPSHGHLLSWAGFCPRNDKSAGKTRSAALRKGAPWLKAVLVQAAWGATHKKDSYLRAQYLRLRARRGSKKAAVAVAASILTSVYYMLKRGETYQDLGHDYLQRHNLQKTINRHVRRLKDLGFAVHLERAA

SEQ ID NO: 201730 - protein, 401 aa, unidentified
MSKKNTRNALDTSLSYAVIGLDLAKADCAVAAVPCSDDELGLIDRMDYESLFEQAEKLEPTLFAMEPCCGYSQISLRLQNMGHEVKVISGHAVKNWIATHKSNQKTDLNDATALAKLALYDHDLQPIRVKNVEECRIASVQAIRIQLRTQATKSLVCFKSLCQCWGIVIRRGSSNTKKMAEAVAAVEKLLGAEVASSLMILRDAYKFTMKQINALDKLLDALVEANEQARTMKTVLGIGTQTAARLAVTTGDIKRFPMPRSYVAYFGLAPRNIITGHSGTPSPSKRGALKPVSSRGQGKVSRRGDRVARSFIIQGAATIYMLYCKDMLSECQLRRWLHEQIKRGKPYGKIIVSLAAKLLRIVWALLTYGEKFDSHKAGVPRSVLAAMEKPLKHDVAAESAA

SEQ ID NO: 201731 - protein, 341 aa, unidentified
MEKNFYFIGLDMAKETFVASIYHKPNEPIWTKEGLANNQQGYQQLLLWLQEHKIGKDNCQICMEATGVYSQGIAYYLLVQGYKVSVESPLKVKRAFHPAGHKSDPVDARQIAEYAYRFSDQLIPWQPKEELLEKIRQLLSVREQFSKQKVAIKNAMGAYSKQRVQVKLINKAHQETLAQLEKQIARIDKELAKLIREDPDLLSKFNKLDSIPGYGMLLSAHLLVMTGNFHQIQDYKRLAAFVGIVPYQYQSGTSIQKKDRIRPYGPLALRKLLRLAAQSVATHDSTFRSYYLRKLAQGKAKALVLNNIANKLLKVACAMIRNNTRYIKDHCSVHPMYLKST

SEQ ID NO: 201732 - protein, 293 aa, unidentified
MRRRREAWQTPNTPEGIARLLEQWRERPPQTVVLEATGGYEASVAAALSSVGIAVAVVNPRHVRDFAKALGRLAKTDRVDAQVLAQFAVAVRPAVRPLAGAQAVELDALVTRWRQVVEMLTMEKNRRQRATPAVRPGITAHIAWLEGQLQQVDEDLQRAVQDSPLWQVQGDLLRSVPGVGPTLTVTLLAELPELGTLDRKEIAALVGVAPFNRDSGTRRGQRTCWGGRAGVRSVLYMATLSATLCNPVIRAFYCRLLADGKARKVALVACMRKFLTILNAMIRNGRPWSPQTA

SEQ ID NO: 201733 - protein, 348 aa, unidentified
MKIIGCDFHPSYQQIALVDTETGELWEGRLEHQEGEARRFYQALHGQRVRVGMEAVGNSQWFEKMLAEMGHELWIGDAAQIRRLVVRQQKTDRRDAQHILNLLLDGRFPRLWVPSAEVRDLRQLLRHRQKLVELRTQVKNQLQHLALNQGVQRKRRLWSREGRAVLEQLPLEGWTARRRAELLAMLDQLEGQVAELDQAVCTEALRRPEVRLLMTHPGVGPVVGLAYVLTIGPPQRFPRGKQVASYLGLIPREHSSGGRQRLGSISKQGNTMMRTLLVEAAQTAARFDEELRRDYGRLAARQHRALAKVMVARKLAVRMYWMLRENRPYPLRPVAQMQGRPSHSVVAG

SEQ ID NO: 201734 - protein, 338 aa, unidentified
METYAGIDLHSSNNYIGIMDQDHKRLFGRRLPNSLEKILMVLEPFKSDLKGVVVESTYNWYWLVDGLQEHGHRVHLANPSAIKRYEGIKHTDDKWDSFWLAHMKHLNILPEGYIYPKEQRAVRDLLRRRLFFVRHRTANILSLQSTITRNLGIKISSNEIKKLDMDDACDLLDSSNLVFMAQNNISTIKHLAKIIKGIEKEVKSQVELRKEFVMLTTIAGIGLILGLTIMLEVGDIERFSKVGNYASYCRCVGSKRLSNGKKKGENNKKNGNKYLAWAYVEAAHFAKRHIPKAQRFYQQKMAKANGAVATKALANKLARASYFVMRDQVPFDEDMLFR

SEQ ID NO: 201735 - protein, 409 aa, unidentified
MSGNNTSTTGGYDVYCGVDVGKSDHHACALDPDGRKIHDKVLPNEQDDVAQVLTGLQARGRVLVIVDQPASIGALVIAVARMLGIDVAYLPGLAMRRIADLHPGESKTDARDAYVIADAARTMPHTLRRVGTDDETLAGLSVLAGYDDDLAAQSTRLSNRLRDALLHVHPALERLLGKHIDRPGVLALLAAAPTPAALRQLDLNAMSDLIATGGSPRLAKTLPAKIVTALDAQSLTIPATTEFGRVIAGVAAQLRDVRTERLTLATDLEARLEAHPLASVLISMPGVGVRTATKILTIIGDGSAFPTAGHLAAYAGLAPVTRRSGSSIRGESPSRRGNHALKNALFLSAFASLKDPTSRAYYDRKRAAGKRHNAAMICLARRRVDVLHAMLRDRKPYQPQPAKDAHQAA

SEQ ID NO: 201736 - protein, 360 aa, unidentified
MVESTPVVAFDQHAASVVAAVLLPGQQTPALHTLGPDLAAIRRFIERLRLIDVRCCYEAGPCGFELQRHLRAHDIACDVIAPALIPRRAGNRVKTDRRDAAQLAILYRAGALTAIHVPTEGEEAVRDLLRCREDINADLLRAKHRLSKFLVRHGRRCPQAKPWSKQFFEWLAVQRWALPALEQTFISYRRAIDEVVARRRAVDEDLRAALTLEPLASRVARLRCFRGIDDLSALTIAAELGDPTRFAAARQVMAFTGLVPSEYSSGASRHRGGITKTGNAHLRRILVEAAWHYRHRPAIGTHLRIRQRRGSPAAIRCAWMAQHRLHARYRRLVARGKSPQLAATAVARELSAFVWSALTR

SEQ ID NO: 201737 - protein, 370 aa, unidentified
MRKLATLFIGLDVHKESISVAQVPDDRRAEVSFVGRIGTRPADIDRLVRRLQEKADRLVVAYEAGPCGYVLYRHLTRRGITCLVVAPSLIPKKPGDRVKTDRRDAMQLARLLRSGDLESVYVPSVEDEALRDLCRAREAAVVTLKAAKFRLKSFLLRLDLHYTGRADWNDAHLRYLAKVVCPTPAQQIVFQESLRAVDEQVQRLKRLEAELADLVPAWRLAPVVRALQALRGVQDTVAVTMLAEIGDLTRFDSPRQLAAFLGLTPSEDSTGESRRQGPITKAGNGHARRVLVEGAWAYQYPAKVSPAIRKRLEGLPQPVQDIAWKAQVRLCKRFRRLVARGKHPNVVVTAIARELAAFMWAIAKEVPITA

SEQ ID NO: 201738 - protein, 344 aa, unidentified
MQYAQKLPSDYKMVLKYIEHIRRNYPTATEFICGYEAGCIGYSLYHQLSEHGQKCIILAPSTMAITNTNGIKTDKRDAGNIAKCLTFRTYSEVYVPTEEDNAVKEYIRMRDDQKKMLKSTKQQILALVLRHGYRFDGSKTNWTIAHIKWLKSLNLAGTLQEALTEYLVTYDYLTDKIARMDKRIEELASDERYKEKVNKLSCLIGVKAHTALSMIVEVGDFERFGRASKFASYLGLVPGESSSGEFHHRYGITKAGNSHLRKLLVESAQSYTRGAIGHKSIALKQRQQGNSPQVIAYADKANERLRRRFYKMTLNKGINRNKATTAIARELACFMWGMMTDNIA

SEQ ID NO: 201739 - protein, 347 aa, unidentified
MGYFAGLDVSLEETTICIVDDAGMIVREARAASEPEVLVAFFEACGMKMERVGLEACSLTAWLHGGLTEAGIPAVCIEARQAKAAMGAMPNKTDRNDARGIAQIMRTGWYRAVHVKSPSCRAWRALLTARRMVLNKRRDIENGIRALLREVGLKVGTPSRKDFPARVRELAADDPVLMSLAESLLSVIEVMTREVERLTKRAIDEVRVEPTCRQLMTVPGIGPLTALAFRATIDQPGRFRKSRDVGAHLGLTPRRYQSGETDVQGRISRCGDELARTALYEAAHSLLIRSTRWSALRAWGMNIAKRRGMARARVAVARKLAVILHRMWVDGSEFRWGKQAAAPAIAA

SEQ ID NO: 201740 - protein, 374 aa, unidentified
MKEDITYVGLDVHKNSIQVAMLMTETGELVEWKETVNGRGYARLIKRLKKKAGGELMVCYEAGPCGYTLQRQLNKEQVACRVIAPSLIPIKPGQRIKTNRRDARKLVLYLSKGDLLQEVVPPTPEQEALRELSRCRAAKKEDVSRARHQLSKFLLRNGLAYRSGRSWTKGHWRWLKGVDLEDRLLQQVFEHYLVGVEREEEELKAVEQELRYWAEQEPYREAVGWLRCFRGFDTISAVVVVSELYSFGRFQTAKGLMNFLGLTPSENSSGDELKRGRITKAGNGRVRSILVEAAWHYRHRPAVGARLRQRRKGQPAPVIGIADKAMRRLYRRYHRLVMRGKDTRKIVVAIARELVGFLWDVLSRPYRQQPGMAV

SEQ ID NO: 201741 - protein, 349 aa, unidentified
MQFYTGQHRYYCGIDLHGRSIHACVLDQAGKTLAHRKIPTEPADLLQLLKPYRKDVGVAVECMFCWYWVADLCDDQGIPFVLGHAYYMKAIHGGKSKNDRSDSYKIAALLRGGNLPLAYVYPSEMRATRDLLRRRMRFVRRRAGLYSHIHNTITQYNLPPYEDRLHRVSNRDGLLEHFEDEDLQMSVAANMALLDTYDETIGELELFLESRAKIHDASTFYLLRTIPGIGKILALTILYEIHEISRFPSVGNFISYARLVVGIHVSDGKKKRSGGRKMGNAYLKWAFSEAALLFLRGNTEGQKYFRRLERKHPKRKAMAILAVKLARATYFTLRRREPFDADRFLGAKT

SEQ ID NO: 201742 - protein, 381 aa, unidentified
METLHSHCAGLDVHQKEIVVCVYIGTSDTELTKEIRTFPTFTKHLFEMLQWLEELHITHLAMESTGIYWKPVFNILEDYFDITLANAQRIKNVPGRKTDVADAEWIAKLLRYGLIEKSFVPPADIRELRDLTRLRKKMIGNMTAEKNRIQKTLECSNIKLGSIISDVFGVSGRKLLTRLVEQGYVNSHEVEENIHGSMMPKASQITESLFGTLNPHQIFLIRQSWNHILFLEESIEQLEEKIDELLSPYPEQVELLLTIPGVKKHAAASIIAEIGVEMRQFPSAQHLASWAGLSPGNHESAGKKKSTRTTKGNPHIQSMLCEVAWAISRTRHTWLSGKYWSLAARRGKKKALIAIAHKVIKIIYHILDQRSGFIEYSKVLS

SEQ ID NO: 201743 - protein, 323 aa, unidentified
MMAESAEIQSVLGLDVSCNTVTLFDSCTGRCLTIANEVDALRAALQPYQGTATLAVCEATGGHEDRLLGVLLELAIPAHRADPAKVKAYIKSFGKRAKNDSIDSRWLFRYGRDRAAMLLRWQPANPTQQKLELLVARRLDLVAMRVQEQNRLKAPRSSLIADNIRAHLCELERHIEALNAEINTLIGESRDLALRAKSLRSVPGIGPVLVPLLLAVMPELGTLNRRQVASLAGVAPHPKDSGKASWHRSTTGGRRQIRPALFIAALAACRGHNLLATAYKELLKAAKPKRVALTAIMRKIITIANARVRDALREQNEIMPVPA

SEQ ID NO: 201744 - protein, 346 aa, unidentified
MQYYTERHRHTCGVDLHGRNLYLCVLDPDREIVLHQRIDCNERKLLRALAPFREDLVIGVECMFKWYWLADICDEHGIPFVLGHALEMKAVHGRKSGNDKLDAERIARLLGSGMFPVAYVYPTKMRSTRDLMRRRSFMVNQRSALINHIQVTNLQYNLPELGKISKPENREGIIERFEDPSVRASVEADMAVIDIFDVVITRLERMIIKTARVHDHHAYALLKSVYGIGDVIGLTLLYEIHDIHRFKSLGGFLSYCRLIKCVKTSDDKPKGTGKRKQGNHHLKWAFSEAAALFLRANPEGQKLHSRLVKKHGKAKALGILAARLARSVYYMLHRNTPFDMDRFVRA

SEQ ID NO: 201745 - protein, 365 aa, unidentified
MPTRKLQNPDDFRGQKFYVGIDVHKKSWAVTVRSLNFVVAHFTQPPSPGALLSHLQRKFPGGEYFSVYEAGFSGTGAHEEFCKLGIKNIVVHPGDIPRTDKEKKNKTDVHDSRSLAFNLEKGNLHSIFVMSRQQQEFRALFRLRESKAKDVARAINRLKGCLLFFGIDYSSIFEGYISARVITWLRKLHMTNEAGAFTLKKYIDDLVHQRNELGKITKALRSQAKKDYSLPYKCLLSVPGIGFTTAIGLLAEIGDFNRFKDPAEYCSFLGLIPWQHSSGECIQTKGIQPRCNKHLRPLLVEASWLAIRNEPSLLKYYRKHAVKNSRHAIIKVARKLALIAKGVAQKLQMYQADYSPFPNQGLVAH

SEQ ID NO: 201746 - protein, 358 aa, unidentified
MQIIGIDVSKDTLHVALAESKDARNDKVIASHKFANNETGFKLFMDWMKKRKADAGTVCLMEATGVYHERLADWLHSHGVTVVIELPNKIKHYAKCLNVKTKNDKVDAEIIARYGLHNAWTPWHPMTENLYQMRALLRQVQSMTKERTRCKNQLHALMHSAHTPGTVVENLMDIIANYDRLIGSYHDEVVRLAKEDEAFYARVEMVCTIKGVREITVLTVLCETDGFQLCQSARQAVSYAGLDVSEYQSGTILKDKRISKKGNARIRHALYLPAVVAGTTGGPMSLMNLYKRVKQKHPTAKKVAIIAVERKLLMLIYTLWKKQEPFDPEKDGKPPLHNAYKSTQAVGSQDSEGSIPCK

SEQ ID NO: 201747 - protein, 343 aa, unidentified
MHNNNVISIDLAKNVFQVCLFTENRKMASNRKVTRPKLLDYVLTLDSKHIVMEACYSSNYWGRLFQKHGFKVGLIPPHQVKPFVVGNKNDHNDALAIAEASMRPKATFVEVKSLEKQDIQSLDRIRDRLIKNRTALGNQIRGLLAEYGIALPVTLIQLRKSIPSVLEDAENDLTTISREFISDMYLELLSVDEKILVIEKKAEAILNTDENYHRLQTIPGFGPTISRTLLCVLNDPKQFKNGRQLSAWAGITPKQHASGDQSRMGGITKRGNQTLRRQLIHGARAVVRHCEGKDDPLNIWIQKLLKTKQSNKVAVAVANKMLRMAWSVMIKEENYNSKCLMPA

SEQ ID NO: 201748 - protein, 345 aa, unidentified
MKITTSGIDVAKSVFQVHGVGEHGEVVLRRQLRRAQLLLFFSKLEPCLIGMEACASSHYWARKLTALGHTVRLMAPQFVKPYRKNDKNDGNDAEAICEAVQRPSMRFVPVKRPEQQAELAVHRVRRRLMGQRTALINQLRGLLGEYGLVLAQGANNVRRKLPALLESGSESMPPLALELFQELYEELVALEQRIDAHDRRIERLYRGNPLCQRLGEQEGIGALTATAFVATVAHAAQFRNGRQCAAWLGLVPKQDSSGGKNRLLGITKRGDVYLRTLLVHGARSAMRYSAKRTDPKSRWVEQLRKRRGDNVAAVALAAKHARILWALMVQGQSPAQPPSLEQRAA

SEQ ID NO: 201749 - protein, 426 aa, unidentified
MRSVGLDIHKRVVQAVVLDDQGHLVSRDRFPCDRDALLSYARNRPDQDTRVAMEAMTNTWAIVDLLEPFVAEVVVSNPMRTKAIASAKVKTDKVDATILAQLLRCDFLPRVWQPSPPLRQLRSLTSRRASLTHHQTAIKNRIHSVLHQRLMAGPERLFDAKGLDWLRKVELDPPGRAAIDSDLRLLEAHETAIEALDKDLAQRGCQDQRVKLLMTLPGVGTAVAQTLLAALGDPSRFPDGDHAASYIGLVPSTRQSANKCYHGPITKHGCAHARWVMVEAAQHLDDNPGPLGAFFRRIAAKKGRNKAVVATARKLVVIAWHMLSANEPYRYAKPISTRIKLAHLRISGGGGRRRGGVPPGSMKSQPTGQGSTRLIPSLAEVYASEDLPVPTLSPGEHKTIHQAGAEGYLETIQTNRRVPKKRSRTS

SEQ ID NO: 201750 - protein, 419 aa, unidentified
MNKLYVGLDLSLKDFKVSIIDQDGAVVTKPFAATNDLYGAQVLIDTIEGCCRRFNASTVFIGYESTSVYGWHLQHLLADSPLLKPYHPNIICFNPKIIERFKESLGNLPKNDHVDANTIAERLRFGRLPKSCPVDFRYLALQRLTRHRFHIVDNLVREKSYFLSNLFLKFSGLCQEKVFSNNFGAVATELFHEYLTVEDIATRSLDDLIDFIMEHGKKHFDNPEATASALKEAARKSYRLNPSVDNSLNFVFRSCLENMKALDKQKKAVEKAIENELSFFNNEYLCLTSVKGIGPVIAAGLISEIGGISRFDNDNALAKFSGLYWSEYQSADFVADDTYIKKTGNVYLRYYFVQAADQLRKYLPEYTSYYSRKFKESKTHHHKRALVLTARKAVRLIFALLHDEKLYNPSARKGEVDIT

SEQ ID NO: 201751 - protein, 370 aa, unidentified
MSVRRILAKTIDTDLEYEAIGIDLAKNCVSAALLTTDGEVVCIDRLDYSELEKSAQALSSTTFAMEPCTEMNYLVQKLEAWGHRCLVIGGKNVQNYVENHFSGQKTDLNDAQALAFLAQDTQLRTIKAKDMEQQKYASLTTLREQYIKQYRQTIVSLKGICQAWGLNISKGISGKARLKDLIENHAAFPEELKESLVDMVTHAQTAQKALNKITKTLEELAKSDKVCQLIQTIPGLGSICSCRLRATVGDIKRFKSPKDFPAYYGLVPRSIATGHNERKGKITHRGDRTMRSLMVQAAGSLVNMATKGKLKSKQLTKWILKKQKEKMPWGKLVCAVAAKLLRIVRAVLISRKPYNPKIAGVAKCSLPKGT

SEQ ID NO: 201752 - protein, 316 aa, unidentified
MSKPKRFVGIDVSKGSLDVAVRPDKTSWTVSNDEQGISALADRLRKLKPTLVVLEATGGLQIPLVAALGQAKLPVVVVNPRQVRDFAKATGRLAKTDAIDADVIAHFGEAIRPKVRPLKDAEAQELTDLLARRRQLVEMLTAEKNRFGTASNRVRKDIQAHIAWLEKRLKDVNEDLSKSIKKTPAWQQKDEILQSTPGVGPVLSVTLLAGLPELGSLNRREVAHLVGVAPLNRDSGQYKGKRSVWGGRADVRSVLYMSTLAAVRCNPVIRAFYQRLTAVGKEHKVALTACMRKLLVILNTMVKTNAAWRCDYASGT

SEQ ID NO: 201753 - protein, 382 aa, unidentified
MQTIDTIKPTILLAIELSASTWLVAARVPGWEKPHLHRIDGGDTAALLALISSLQARAARGLDATIGVVCCFEAGRDGFWLHRLLTAHGVVCHVLEPTSILVNRRARRAKTDRLDAEGMLRVLAAYLRGDHQACSMVRVPTPEEEDAKRTHREREKLVQERQRIENRIEALLFTQGIRKRPSLRSWERDLAVLRTGDGREIPRHLRAELDRLRRRLVMTLELIREVEAERDQAAKTKPQDRACHKIAALSRIRGIGENFAAVLTREVFYRSFDNRRQIASYVGITPMPYQSGGMDRDRRISRAGNPRARTTMIQLAWLWLRYQPGSELAEWFRERVGTLAGRTRRIAIVAMARKLLIALWRYAETGVIPAGAEIRAETTVAA

SEQ ID NO: 201754 - protein, 338 aa, unidentified
METYAGIDLHSSNNFVGVINDKDKILYGKRHQNRLDDVLRALDPFKDSLQGVVVESTFNWYWLVDGLQDHGYEVHLANPSAIQQYEGLKHTDDPWDSVWLAHMYRLGILPEGYIYPKEHRAVRDLLRRRLLFVRHSTAHILSLQSMINRNLGFKMSNNEIKKLKPTDIESLFDCSNLVFMANNSLCAIEFLKKIVKGIEKKVKSQVKMRKEFEMLLTIPGIGNILGLTIMLEVGDIGRFARVGDYSSYCRCVESKRLSNGKKKGENNKKNGNRYLAWAYVEAAQFARRYCVKAQSFYQSKEAKTKPVVAIKALSNKLSKASYYIMRDQVAFDEDKLFS

SEQ ID NO: 201755 - protein, 357 aa, unidentified
MSYDIILAVDYHDENTVIRQFSERTKVEATCTVPTSATALMRVVQQASKQRQRGGQVVWIQESTSGWARVQELLGEKVKFQLANVVQMPRLPKGHRKKTDRTDTARILREYRNGSLPQAHQPSAWWRQRRRLVGLRENLVKRRTGLRNWINRYLAHETWESRAGLWSDKGLRRLQHLVRRLPELDQLVLGAKLAELERLEVPLSQVEARMHELYRGWPEAQKLDAVKGIGIIAAVSIAARIGPIERFRDAEALIAFAGLAPGVRQSDQTRREGRIGGGGTDGHLRHYLIEATVWARELPRYRPTYERVAKRRGKKIGRLVVARLLLRSIFKVLRDGLSFSAEQPASGVVTASAAAAT

SEQ ID NO: 201756 - protein, 350 aa, unidentified
MITITATRFVGIDLGARRCQVCVIDCDGTVLVNTSVPSRLDQITAVLLRHAALPAPVAIEATFAWYWLADGLQDLHCDVHLVHAARCAAITTAKVKTDRRDADTLAQLLRTGLLPEAYLYPREHRGLRDLTRQRQALVERSSSVLRKMRCLLYREGHCDHDLDDAKGLAVADLPRWFPAPLVQHQARALIAELESVTAIRTAVEEQVLAVAADRPEHALLRSLPGIGKILALVIATEIGDIRRFRSSEGFCSYCRVAPGIAQSGASTRRGRANKAGNPHLKRSLHQAAVAACANDEAWKRWRERLLARSSGLGARLKATNAVAHRLARIIYRVLLSGTPYEETLARITTT

SEQ ID NO: 201757 - protein, 314 aa, unidentified
MSIFVGIDVSKETLDWAVDGGAEAFRSPYDDAGLEALAGRLRELNPSLIVMEATGGLEMTLLATLSVAGLPVAVVNPRQVRDFARGQGILAKTDKVDARCLALFAFKNRPAVTPMPEAATIELELVLARRRQLVTMRVSETNRLGSLTGPRRVPRVLASIKRVIKTLDDEIGELDDDLDAKIKASPLWQAKDTILRSVPGVGPGTSRTLLLDLPELGTLDRKQIAALAGLAPINRDSGKSRGRRSIRGGRTTVRAMLYMACVTAVRCNPLFKALYGRFADAGKPHKVAMTACMHKLLTILNSMLRNNTPWAISA

SEQ ID NO: 201758 - protein, 359 aa, unidentified
MKVLRGNKVLASGKDVYLGIDVHKENWHVTVRMEGEEIFNGHIPGNYQVLKKLLAHLEDCKIHVAYEAGPFGFWLYDELINDGIETIVVPPSLIPTESGNRVKTDKRDSRKLARLLESNMLKRVHVLTEEERVHRELLRTRRQLVKHRGSVARQIKSKLLFHGISSPFPNHHSWSRKYIAWLRALAFQSEYFKDSLDVLIDLYEHLTRQIIRMNRKIVVLSRTDKYAHRIKLIRSIPGIGLLTGMEILVELQDVKRFKTPEELASYMGLTPSEYSTGEYVHQGRITRCGNRRVRSALVESSWILITKDPYMRCKYMKLKSSKGSKKAIIAIARMLIIRIRSVLLNNTPYVIGTPVLHAA

SEQ ID NO: 201759 - protein, 345 aa, unidentified
MAIVETRPIRGGIDTHLEVHVAAALDASGGVLGVESFATTPAGMVGLHAWLAAFGPVDRVGVEGTGAYGAGLARHLRAVGLEVIEVDRPNRQVRRQQGKSDTVDAVEAGRAVLSGRASGVAKTADGNAEAMRALLVAKRCGREARITCLNQLRHLGFCAPDELRERFRDVPGARLAEAAAALRPRADSDPVLYATKLAMRTLGRRVLTLGEDSEALDAVLAELVTVTAPSLLELYGVGVHTAAILLVAAGDNAERVHSEAAWAHLCGVAPLQASSGKTTRHRLNRGGNRQANHALWRIVFTRMGSEPRTRAYVARRIEEGRSKPEIIRVLKRYVAREIYRHLPRA

SEQ ID NO: 201760 - protein, 391 aa, unidentified
MIYVGIDVAKDKHDCFITNSDGEVLFKAFTITNNLDGFNELHQKIASVMDDVTKVKVGLEATGHYSYNLLGYLIDKGLPTYVINPLHTNLYRKSLSLRQTKTDKVDARTIASMLMSDVNLKSYSDTSYHNEELKSLTRYRFDKVKERAKLKTSVSRLVCILFPELEKLVPTLHMTSVYALLSEFPGAKQIAGAHLTRLTNLLSESSKGRYGKDTAITFRDSARASIGSNMPAKSLELKHTIKLIQELDSEIDEIENEIKIIMDEINSPILSIPGINYRMGAMIIAEIGDFNRFDSPDKILAYAGFSPSTYQSGQLDGAYAHMEKRGSRYLRYALYNATKYVCHWDPTFAAYLAKKRAEGKHYNVAISHAVKKLVRVIYHLEKTKQQYIKAA

SEQ ID NO: 201761 - protein, 400 aa, unidentified
MMTPDDIDVWVGLDVGKSAHHAHALDHDGNTLYDKPLKQDEKAIRTMLGKLSKHGRVLLVVDQPNTIGSLPLTVARNMGIAVAYLPGTAMRRTAQLLPGDTKTDRRDAHVIAWAALKLPETLRDAGPDDETLAALKLLAGHDEDLAHESTRHVNRLRSLLLQTHPAFERALKGERITRDATLALLERYGGPMGVKRAGIEDVKDWAKSNGLRAGRIIDDMFKAIGEQTVTVPGTLMAETIIPSIAHDIKTIRDRRREVGRQVEKLLEDHPLLTVLTSMPGIGVRTASNILLGIGGDIANFKSSAHLAAYAGISPVTGQSGTSIKGERPSRRGNKRLKNALWQTAFVASTKHPPSVAYYKRKREQGKHHNAAIICLARRRCDVIYSMLKNGTLYQEPALVA

SEQ ID NO: 201762 - protein, 351 aa, unidentified
MPSKMDAVVARAIGIDTGKNTLHLIGLDEKGAIVLREKVSRGRIVARLANTPRCLIGIEAGMATHYVARELIALGHEVRQVPPAYAKPFRQGHKNDFRDAHAVAEAVQRPSTRCVPVKTDDQLDLQALHRVRSRLIGERTAVTNQIRSFLLERGIPVRQGLRFLRQQLPDILAKRIDVLSPRMIRIIEDLIGEWRRFDERIDHVTTEIEVLARSNEGCRQLMTVPGIGPIIASAMVAAIGNGTAFATGRDFAAWLGLVPKQMSTGDRTILGRITKRGNRYLRTLFMQGARVILLRPANWAQHSFGPWLTAAAQRLHHNVLATALANKLARIALTVLVQGRAYETRVISEVA

SEQ ID NO: 201763 - protein, 402 aa, unidentified
MKEDIAKAISQQTAAALNDAKGWSRYGGFIGLDVHKDTIAVAIAMPGRDEPVYRGEIAHEPKALKKWLDRLNDEFGGAVLLFCYEAGPCGYGLYRQLTEAGHECHVVAPSLIPKKPGERIKTDRRDALKLARLLRAGDLTAVWVPDTEQEAMRDLTRARDDMKSQERKARQQLNAFVLRHGHHWPRGKTRWTQAHHNWLESIRFEQPWLQIVLQEYIDAAKAASRRVADLTDQLMQALPGWSLAPVVDSLAALRGIDKLAATVLLAELGDISRFDSPKQLMAYLGLVPSEHSSGPRRRQGAITLTGNGHARRMLVESAWSYRFPARQTMHLKRKAQHASEQAKAIAWRAQKRLCGRYRQLSQAGKNIKLVCVAIARELVGFIWDIVRHEMPRLEVQVAPTGR

SEQ ID NO: 201764 - protein, 354 aa, unidentified
MDKITAIAIDLAKTVFQVAGENARCEVVLEQRLKSRQAMHQFIKGLMPPLTVAIETGPGAQAWARELQAQGVEVKILPAQHTVVHRNGNKNDANDARAILRALHDVSVHPVPVKTPEQLAMQALHRARQGWRRRMTAISNQVRGVLLEQGVVMARGDAALVRTVSRTLEDATLPIPDRLRALVAELMGEWQGHRQRIAVLDGELATLSRTDPVAAHLQQARGIGPIVSTAMACKGIQPERFANCRQFAAYFGITPSQHSSGNKLRLGAMSRRGDSYLRSALIQGAHAVIQQIKTDATDPYSRRIQRWVRRCGTKGAAVRLANHNLRVVWMLLKHPEMPFRSNPANPEAREDAMH

SEQ ID NO: 201765 - protein, 315 aa, unidentified
MVDVPCFVGIDVAKAQLDIALRPAGERWAVPNDASGIAPLVDRLQALQPTLIVLEATGGLERAATVALAAAGLPVVVINPRQARDFARATGQLAKTDALDARALAHFADVIRPTPRPLPDAQTQELRALLGRRQQLIGMRTAEQNRLAGASERLTKDITAHITWLNADIATLDNDLETLLRASPLWRENDDLLQSAKGIGPVSAHTLLLELPELGTLTRQQIAALVGVAPLNCDSGTMRGKRTIWGGRAHVRTVLYMSTLVATRFNPQIKTFYERLLAAGKVKKVALTACMHKFLTILNAMLKHRTRWQPQEVQS

SEQ ID NO: 201766 - protein, 409 aa, unidentified
MTERFVGIDVALRDRIAVLDRDGEAVGPSFTIVASPDGVATLLRTLATRDATAAQTLIGLEASGHLWENLEAALVGAGYRVIVLNPLQTRRYRDVVRRKAKTDDIDAHVIAGLLRSGVAQASYVPDEQIQSLRELARLRARLLADRQDYQRQLVAQLDVVLPEHRAVLGDLLTARARGILAQFPTAQHLAKANPRAIRRAAEDAGARGFSLDDATGVRDHARRSLYSGKAAAARAHVVRTLVSQLERLTSAMDEVDYAATTLLPPSEPGTGPSDAELLQTIPGIGPQTAATLLGELGAFTRFTDARALVAYVGFYPVIQESGDRAATPRLSRVGSRIARRSLYLAAVNAVRGSGEWRTIYLRKKAQGKTAKQALVVVAVKLLHALYAMLKHRQPYNPSRLLVAPATTGS

SEQ ID NO: 201767 - protein, 451 aa, unidentified
MKTLSVINPNAAGIDVGSEKLFVSIAGDEPVVFGTVTDEVYRMRDFLKQNGVTGVAMEATGVYWLYAYAVLEAAGMKVVVVNGRYVKNLPGRKTDMSDCQWLATLHAHGLLRGGFVPPADIRRLQDYQRLRADHIIGAASQVQKMQQALERMNIKFHDVISDLTGVSGMKVMKAILAGERQPARLLELCAQQIQKKKSERVLASLHGVWAPEHLFALGQALSVWEFYQKLLTECDRQIEGVLKDLAGPPPSQSPRSPESGQAKSKAPKPPGKNAPQIEDLHALLVRLCGGRDATSLPGVADYLWLQLVAETGIDLSAWNTEKHFMSWCGLAPGTRQSGKRKGTVKRQRNRAGRLFCAGARSLVQSVDKGLGGFVRRISRRKGGLVATKALARKLAGLYYRVLRYGLEYAERGLREYEEKYEESQRRLLGKLAAKHGFKLVSESALAIPSSA

SEQ ID NO: 201768 - protein, 418 aa, unidentified
MQTHSDAPEIIERVAALDVGKAEVVCCVRVPGPGGRRMQEVRTVTTMTAALLALGDWLAGLGVTRVVMEATSDYWRAPFYLLEDRCETWLVNAKDVKHLPGRPKTDRLDAVWLCKVAERQMLRPSFVPPPAIRQLRDLTRYRVDLVETRTAEKQRVEKLLEDALIKLSVVVSDLFGVSGRAIMAALIAGERDPVVLAELARGRLRAKTDSLVEALTGRFTDHHAFLLAQMLKRIDAITADIATVQVRIDAQIAPFAPAVARLDEIPGVGAAAAQMIVAEIGLDMSRFPTPAHLASWARFAPGVSESAGRKKGAAGTGHGNRYLARALGEAAIGASRTDTFLGERYRRIARRRGKKRAIVAVGRSILVIVWALLCDDDAHFIDLGADYHASRTNPQRRVRNHVRELQALGYTVTLNPAA

SEQ ID NO: 201769 - protein, 410 aa, unidentified
MKVAGIDVHKKVLMVVVVDASTPEEKPARRRFVTMPSELHRLLTWLRAQGVEEAVMESTAQYWRSVWLELEPHMRLHLAQAFSNRAPRGRKHDFKDAERLVRRLIADELILSFVPSGEQRIWRSLTRMKLQLTRDRVRLQNQIECLLEEMRIKLSIVVSNLLGASGLRILHALANGETDPKRLAQLGGERLQCTEEQLVDALTGRAQPVHGAMLALQLERLQLIDQQMERLNSMIAAAMKPQQDAVMRLAEVPGLGVDSAQQIIAEVGAQAGTFASAAELTSWVGTCPGKEESAEQNHSSRSAKGNKYMRRVLNQAAHAAAAKKGSHFQIVFRRLLPRLGYQSAIWAVAHRLCRVVWKILHEGVRFIEKGAEVHPREKKKRAQMLARALRKLGYEVTITPLNQLVPKPAV

SEQ ID NO: 201770 - protein, 430 aa, unidentified
MKSNTQNAKIEAITEKTLVLGIDVGSETHYARAFDYRGIEYSKKTFKFSNTEAGFVTFKEWILDLKEKHEKDKVVPGMEPTGHYWFNLGKYLQDNEMKPVLVNPHHVKKSKELDDNNPTKNDRKDPKVIAGLVREGRYMIPYLPDGVYADLRTASNIRFQLQAELTRIQNRISRWFNIYFPEYKTVYGKPDAKSGMLILKEAPLPEDILTLGIDGVDQIWRDAKMRAVGKARAKTLIEAAEHSVGSKEGAVSGKMEIRMLLEDYESRNTRLQEVMVLIEELVRKIPMTEKLLEIKGVGIRTVSGFLAEVGDISRFNNPKELQKLAGLALVENSSGKHKGETTISRRGRKRLRYLLFEVAMSLVAKNPEFRELHNYYTTRRLNPLKKMQSLMAIAAKLIRVFFAMLTKGVDYDPKKMVSDIKRPAVYLQAA

SEQ ID NO: 201771 - protein, 337 aa, unidentified
MSKIRFVGMDVHAETIAVAVAEEGGEVRSLGVIPNRGESIRKLIGKLGSVKSLKCCYEAGPTGYVLYWQLAEMGVACEVIAPSLIPVKQGDRVKTDRRDAEKLARCHRAGELTAVWVPDAAHEALRDLVRAREAAKKDQLRHRHRLGKFLLRHGKRPNGAGEPWTRKYLNWIRIHVRFDQAALEATLSHYLGEVEHAAERIAKLEQAIDEAVAKAPAKIRAVIEALQALRGVAQTTAATVVCELGSLSRFESPRQLMGYSGLAPREYSSGGRTQRGAITKAATRICAVSWWSRFGRTGIGPMFRAGCCADRRLWRSARKPDRLRGKRSNGCINGLPD

SEQ ID NO: 201772 - protein, 340 aa, unidentified
MSDYSLFVGVDIAAKTATVSWGSTAEALSKPMTVQQTQTQWSKLASKLLEICPNPEDCLVIMEVTGTYWMQMALYLYETGFHLSVINPMRSRYFARLMLQKTKTDAVDARLLAQMGILMDIPRWSPPPDIYYELQQRLAYRDDLVAMRLQERNRLHALQHQSTIIQSVLQRLETHIQYLNEQITALDQEIESLLSSEHDWASSATSLQSIPGIGCNTAAWILTTTLNFTACNTPEEAVAFAGLAPHTRQSGTSLHSKLSIGNGGHERLRRALYLAAIPAARFNPILSTFYTRLVERGKPKKVALCAVARKLLHLAWAIVTKKALFDPHYGQYSTIAHNSA

SEQ ID NO: 201773 - protein, 326 aa, unidentified
MTLNQQDERRMHVGIDVSKNHLDAHIHETGEAFRVSNNDAGIEELLARLAGVEPERIVMEATGGYESAAFAAMSVRGLAVALVNPRTTRHFAKATNRLAKTDQVDAACLAEFAAALRPRITPMPDEEATELDFLITRRRQLVDQLVSEKNRRTSPQLKRLSTDSRVKQSLERHIAWLEKEIAKFDDQIKSRIRSSPAWKQKDELMQSVPGVGPTTSASLLAHLPELGELDRKQIAALAGLAPYNADSGQSSFPRHIRGGRASARTALYMATVAAVTHNPLLRAFHRRLVAAGKAGQVALTACMRKLLTILNAILRDQRPWRLALNP

SEQ ID NO: 201774 - protein, 386 aa, unidentified
MKKNTTVKKNPRAQTNTKKRQARQMASQERLTIGLDLGDMTSRYCILSEAGEVVSEGPLATSKVGISSLFGKMASSRVALEVGTHSPWVSRQIASQGHEVIVANPHKVKLITQSVRKNDRIDARQLARLARVDPQLLSPIRHRGESGQADLAVIRARAELMESRTGLINCARGLAKPMGERLKKCDADQVNESLAEGLSPALQNVLGPLLKSVEGISEQLAVYDQKIEEIAKRYPEVELLTPVYGVGTLIALTYILTLEDAQRFAHSRDVGPFLGLQPKQRESGQSQPQLGISKTGDGLMRSLLVQGAHCILRRGAPESDLRDWGRSKLGSGGKTAKRRTVVAVTRKLAVLLHTLWANGQVYDPLYNRKAVQAAQAKAKGKGKTAA

SEQ ID NO: 201775 - protein, 355 aa, unidentified
MSQEKYIGMDVHQATISVAVRDSSGKLIMECILETKAATILEFIAGLRGTLSVTFEEGTSAAWLHDLLKPHVSHLVVCDPRRNALLKDGSKSDRIDARKLAELLHGNKLHAVYHGEHGLRTLKELGRSYLTITKDLTRVMSRIKALYRSWAIPCSGTTIYAPGHRAEWLAKISEPGVRLRAERLYEQLDLLQPVRQGARRDLLGESHKHPAVKLLRQIPAIGPIRAALLVALLQTPHRFRSKRQLWAYSGFAVETHDSGEYRFVRGKPVRNRERITVRGLNQNHNHDLKNLFKGAAISASTRPGPLCDFYVALVEKGMRPTMARLTLARKMAAITLTIWKKGVEFDAKQLNRQAA

SEQ ID NO: 201776 - protein, 333 aa, unidentified
MSEQYAGRQIVGMDLHRRRSVLVRMTDMGERLETVRISNDPEYLAQVMARAGEAPEVVLEAAYGWYWAADTLAELGATVHLAHPLGVKMFAYRRVKNDQRDAADLADLLRMGRLPEAWIAPPATRELRGWVRHRAKLVGLRSSLKCQVHGVLAHAGVWVPMSDLFGVAGQQLLAELSAGDRLSIESRSRLDSALRVIGALEFEIELFAKLVNGRLRTDPGYRALQAIPGVGPVLAAVFVAEIGDITRFHRPAQLASWAGLTPKHHESDTTVHRGRITKMGCGGRRRGLRLRSARARGGCRGDRGWYRHSPGAVDIRLRGSRLRRSVPRADRPG

SEQ ID NO: 201777 - protein, 317 aa, unidentified
MSLPGPLCAGIDVSKATLDIAASSAIEPFSVANDTGGFDSIMAELRKHSVALVLMEATGWLEAAVVCALFELAVVNPRQARDFARAMEYLAKTDHIDARVLTQMTEVINHHPERSRFIRALPDAERQGLNAKVVRRRQLIAMPVAEVNRLYPVHPQSRKNNTIIKALEDELARIDDDMNNYVRSHFKELSERLSSIKGVGIMTVAALLVEVPELGRLSRREISFLVEIVPVNRDSGTIRGRRTIFGGRAGVRTALYMAVLVATRFNPVIKAFYTRLLSMGKPKKVALVACMRKLLTILKAMLRKSEEWDESYHHVTP

SEQ ID NO: 201778 - protein, 391 aa, unidentified
MKGVFMYYVGIDVAKVKNDCIIINSEGKTVHDVFTFENNKMGFASFYRSVASLLPLEVRVGLEATGHYSLNLIDFIDSKQLPLIVLNPLSVNLYRKSTTLRKTKTDKIDYLVIAQMIRTGEHKPYSPVSYPLRELKTLTRHRYRLIQEQSRIKISITRLIQILFPELPNHLWSIHQKSSYELLKRYPSASLIAELHLTTLTNILTKSSRNKYSKEKAIEIRDVARNSIGSERTSFQLELMQNITIITAFKKELKIVESEIKKSMNEFNSVILTIPGISYTLGAIILAEIGDINAFDNPSKLLAFAGLEPGISQSGNFISTNQKMVKRGSKYLRWALLQAARLTAMRDPVFHEYMQKKLNEGKHYNVALSHVARKLVRVIYKLLSTDTEFKR

SEQ ID NO: 201779 - protein, 340 aa, unidentified
MNIKRIGLDLAKNVFQIHAVDHHEHVVVRKSLRRAHMHAYFSQLAPCTVGIEACASSHYWARELTRMGHTVHIIPPKFVKPYLRGNKNDANDAEAICEAISRPAMRFVAVKTERQQTLQAEHRVRARVIKSRTALCNEIRGFLGEFGVVLPVGISQLRKALPEILSQQEQWDDRFMRLLCELAEELRMLDDRVAGHDRRLAEAAREDICIQRLMKIEGIGVITASAMVALLGDATQFKNGREMAAYVGLVPRQHSSGGKQQLGHISKRGDSYLRTLVIHGARSVLKTCAGKEDRRSQWLQSVAERRNRNIATVALANKNVRIAWAVMSRGEDYHGSRVAG

SEQ ID NO: 201780 - protein, 355 aa, unidentified
MKHQATHYLGLDVHQATIVATSRNESGAIVLKATVPTEAKAIVGLVRGQGPRVHVAFEEGTQAQWLHDLLQPIAERVIVCNVRGKKELVNKNDDIDSDLLSERLRLGSLKGVYHGAASVLPLKEMVRNYSNLVEDATRVMQRIKAMFRARAIRTPGEGVYGIRQRKEWMSKLQGAGVRLRAESLFTQLDALLPLRSKAKAAMIAEARRHPAWKILRSIPFLGPVRVSQIIAIVGTPFRFRGKRRFWPYIGLGVVTHSSADKEIVAGTIRRRRRPPLTRGLNRNHNRVLKNVFKGAATAAAHKDGPLKDLYQQTLAHGVHEDMALLTLARKISSVALRLWKKGELWDPAKLTTQAT

SEQ ID NO: 201781 - protein, 358 aa, unidentified
MIVIGADPHKREHSAAAVCRATGELRSSETVAASPAGHLALVEWARAIDEDRIWAIEDCRHVSGALERFLVERGERVVRVPPKLMGESRRAERSPGKSDAIDAVAVARAGLRQGLDTLPAATVDEDALEIKLLLDHRDDLVGERTRIQSRLRWHLHELWPEFAIPAAALDRAKWLERVSRRLARTGQTARVRVCRDELRRVRELTRTANELERELGMLVEAKAPKLLELAGCGTLSAARIIAECGDAQRFASDAKLARLAGVAPIPASSGNRRRHRLHRGGNRKLNCAIHRIAITQGRLDGPGRDYLARKQAEGKTRLEALRCLKRQLARRIWHLLQTPMSPTPTTTPIPANSGLGLT

SEQ ID NO: 201782 - protein, 397 aa, unidentified
MPGCNVGIDVSKDSSTAHGIDGKGKKLFSIEFTMNADGFSKLLSAIRAHCEDLSMVRAAMESTGCYHTNLLCFLSEEAIQCFVINPLLIANFAKLSLRKTKTDKKDAIVIAQFLLLHKDALAKANPSQSLQDLKDLAREKESLTVLITALKNDIKRMLQITFPELESLCNVFSETMRDFLKQFPSARMIRTAKPHAVARALTHADGRKTPSFYPEELIAVARKSVASDSVAKELILAEKLTTLEHLMKQKDRIANALVEACDSMMIEDVAIITSIGGIGNTTASAFLAEVGDYRVFPSHKHLIAFAGLDPSIHQSGKFEGKSRISKRGNRYLRHIVYLMTSCVVRQDNAFRAYYRRRRMEGLPYKKAILATAHKLVRVIFTMLSNKTAYQERVIQNS

SEQ ID NO: 201783 - protein, 402 aa, unidentified
MSPDLQKRGFSFKMETTINQNEALPKCKRRHNMESIIYVGMDVHKESYSLCCYDPRTDRYLYEHKMKSTTTNVLKYLGSVKKQLGDVIFICGYEAGPTGFGLCRDLLRKDIACVVMAPTSLKRNANYKVKNDKVDARLLAKDLFTHDYSPVHLSSQKEEAIKEFCRMRRSIMTELKTAKQVLLAFLLRQGKHFDGKTHWSGEHRKWLKQITFVQPYLQEAFDEYLISVNELEARLKRVEHRLEEISKDEEVESKVKKLICFCGIDTLTAVSIVSEVGDFMRFARAWDFANFVGLSVGEHSSGGKERHLGITKSGNCYLRRLFTESAKSLKKTSMKSKKSKRLIDRQQGNDPRVIAYADKCRYRLKYKMMSLENRGKAANVASTAAARELACFVWGMMTDHIA

SEQ ID NO: 201784 - protein, 356 aa, unidentified
MQPQVTKKIDFKDKDLFIGLDVHKKSWSVTIVIDGIEHRTFTQPPDPGALCNYLHRMFPGGSYNSAYEAGFCGYGIHRELNSLGIRNIVINAADTPTSQKDKLHKRDPTDSRKIARELEKGSLRGINIFDRELEELRSLNRTRFYLMRDLRRSKNRIKSFLMYYGVPMPEEFDNNQWTLKFISWLKKVRMETPGGQDAFSHLIESYEHHRQQLLILSRIVRLRISHYDKELYSLLNKISGIGPLTASALITEIGDINRFTHINHLGSYVGLIPRVRESGETTHTGGITFRCNTFLRTLLIESSWQAIRMDPAMMQYYHKHVINSKGHKVIIKVARKLLNRVRYVMKTRQPYVTGVA

SEQ ID NO: 201785 - protein, 313 aa, unidentified
MSQNNATILYVGLDVAKSSLQLDLAGTPHTLTNDAKGHARLLKLLTAHPGAHVICEATGGYEKPVVRALHRAQSPITVVEAGRVRHFAKAKGLRAKTDPIDAAVLSEYGRTFKPDATPAPTAQQSRLAELSTRRLQLLDTLTSETNRAEHYTDPLGVRQSRQLVKLLEKQIAACDAEIQTLIAADDALKTKAERLDAIPGVGQITAATVLAELPELGKISDAAAAALVGVAPFNRDSGNQSGVRSIAGGRKTVRCALYMATLSAVRHDAILKAFYTRLRAAGKKPKVALVAAMRKLVILMNRLLKNPHFQLAN

SEQ ID NO: 201786 - protein, 345 aa, unidentified
MDLGDKTSRYCVLAEDGEVIGERSVATTKKGMLQAFGAIQRCRIAMEVGSHSPWVSRLLTALGHEVIVANARQVKLISASSRKNDRLDARMLARLARVDPKLLAPIRHRSAEAQADLNLIRVRAALVEGRTALVNAARGLCKAAGERLPKCDTDQMNVERMADVPEGLREVLRPLIESVESMTEKIHGCDRKLEQIARDKYPESKLLKQVKGVGTLIALTFVLTVEDKERFRKSRDVGCYVGLRPKRSQSGESEPQLRITKEGDVYLRKMLVQGAQYILGHHGPDTDLKRWGLKLAERGGKNAKKRAIVAVARKLGVLLHRLWVTGEVYEPLRNAMPAMVGQKAA

SEQ ID NO: 201787 - protein, 322 aa, unidentified
MAMLSFGGIDVSKDRLDVVVLPEEECSSVPNDAAGWAELVERLRCFSITAIGIEPSGGYERGAMRALLAAGMPVRQVNPFKLRQFARASGVLAKNDPLDARMIASFVTIMPTRPAQRQTPAAERLAEMLAIRRQLSTEKVAAENASRLLEDAMLQRLSRRRIVRLAADIDLLDKRMVEIVATDDALVHRYRLLTSMPGVGAVLACTLIALLPELGRMSRKQVAALVGVAPYAFESGTLKGRRCIWGGRAHIRQVLYMAAMSASNWNPVLKAFHDRLTAAGKLPKVVIVAVMRKMITMLNAMVRDDVVWADRLSGRHVLPTAR

SEQ ID NO: 201788 - protein, 456 aa, unidentified
MGRARARKVSAQLVEDEDYRLRYERVAGIDVAKAKADVCTRLPPAREGGRRGSRVEEVPATAREVLALAGRLLADRVELVVMEATSDYWRIWFYLLEGAGLRVQLVNSRHARQLAGRPKTDQKDAQWIARLAEMGLLRPSFVPPPEIRALRDLTRARLALVRDRTREWQRLEKLLEGALVKLSSVVHSMSRTKTARDILEAIASGERDPGKLAALAHGRVTGGRAAVRQALEGMQLGSHHSMLIRVHLDHITVLDRAVAAVEDEIEAALDAIPAAWGADADGVASPAPGPDAAALAAVGRLAEIPGVSPDLARAIIAETGLDMTRFPTPAHLAAWAGLAPVARQSGPRARKPAKGQGDAYLKGYCTQAALGASRTATFLGERFRRLSRRIGGVRAQCAVGRSILVIIWHLLSDPGARFRDLGPGWHERKTDRDRKIRSHLRQLQALGLDVTITPAA

SEQ ID NO: 201789 - protein, 334 aa, unidentified
MNNKQSRVGIDVSQDRLDVAAQLYNGQQHTAQFDNDASGHRQLISWLTKGGRSARVVLESTGAYSFDLAMALHSAKRLEVMVVNPYVARKFAEACLQRSSTDATMSVALREYAARMEFRAWTPPAPEVRQLRAVARRIAALTLEKTRELNRRHAAMATDDTPALVLNDIEVNVRHLQRRIDELERQALMLISAHDTLKQPFQHLVSVRGIADTSAIQLLGELLVLPADMSVRQWVAHSGLDVRHVNSGTSVQKPPRISKRGSAALRRILYMPALVAIQHEKHVRAFYEQLLAAGKKPLQAVVAVMRKLLHAIYGMLKTNTDFDGAKFRRLPQAA

SEQ ID NO: 201790 - protein, 438 aa, unidentified
MWWNSQWLLSIFQKGALPMKVVYQTCCGVDVHKSFLVATIIKTTSEVQPSYQKKRFSTFNNSILEFKQWLLDNSCRDVCMESTGKYWVPVFNLLEDELNVTIANPKWVKAVKGNKDDTKDSKWIGDLFRLGLVPGSYIPCKPIRILREFTRYRYKLTSCRSSEKNRFQNALTVCNVALDSVVSDIFGKSATSVIDYLLEQSDNSINHEEISSRLLRSLKKKSESVIESIEGYQMTESQKYRMRLVHAHMDYITSTISDIDSMIDSLVEPYENAVQLLCTIPGVDRNSAITIISEIGTDMTQFSNSKRLCCWAGLTPGNNESAGKKKSVRITRAGVYLKPTLVQVAHAAVKSNKSPYYKAKYERIMKRRGKKRAIIAVARMILTAIYHMLSTGEAWNPTDLYKIDMPEPLKNRQKEKAVTQAMKLLIAEGLIKESQLAS

SEQ ID NO: 201791 - protein, 414 aa, unidentified
MLKIVYPICCGMDVHKSFVVACIASTNEQGVTSYKSKRFSTFTGDLRRCAVWLSENHCKDVCMESTGKYWIPIYNILERTCNIVLAHPKYVKAIRGKKTDKRDAKWIADIFKHDLVSGSFIPPADIRQLRDLVRYRWKLTNFTTGEKNRAQNCLTVSNIKLDDVFSDVFGKAASAITARILENPAEKITDVSSFRTKGMKATDEQVLAAVDGEMCAQQAEKLRIIRSHMDSLELCKANLESLILTTAEKYLPQLGLVMTVPGIQSFAAIGIISEIGVDMSVFPTSKHLCSWAGLTPQNNESAGKKKTTRISRAGAYIKPLLVQCALCAIRAKQFPEVRNRYLALKKRRGHKKAIIAIARMLLTAIYNILKKNEPYNPELYRKGDRPPAHREVSVEEAVYILQRQGYLVTAPPTA

SEQ ID NO: 201792 - protein, 346 aa, unidentified
MHYIGMDSHISTLDFAVVNESGRLVKASRVSTSVNGFIEFVKTVPPPRTIYMEEGTLAAWALETCVRFREKLVITDAKENHWIGSSGQKNDSIDALKLAQLARGGYIKEIHHPVGQRRRFRELMIAYHDAVRSTTRIKNKIKARFRQNGIQCTGTTVYSETHREEWKGKLPQEATLLLILEGLWRQLEQSEQTEKELLAAARVQAKHYPEIKHFEAIPGIGFISAATISAILETPYRFADKRKVWMYAGLGLMKRSSGGKTYSEKLSTDYNRLLKYSIKQAAEAAIQAKDNPFRRKYLDMTLLHGIAPHRAKLTIARDMLATMWAMWRKGEKYSPEIREKAACKQG

SEQ ID NO: 201793 - protein, 367 aa, unidentified
MKKGSTAAATLSKKISQQKLTVGLDLGDRSSWYCLLDEAGAILREQRISTTAKAFGEVFGSMPRSRVALETGMHSPWVSRLLSELGQEVIVAHARQVRLIGESRKKDDRLDAQTLARLARIDPELLCPVKHRSRKAQSDLTVIRARAGLVRARTALVNTARGLAKSYGERLRGCNVRNMNPEKAEGLSPELQSALAPLLTALESLSEQIREYNERIEGLAEQSYPQVQPLKQVKGVGTLIALTFLLTLEDPHRFRKSRDVGCYLGLQPGRRNSGQSEPHMHISKEGDPYLRTLLVQGAQHILGPFGPDCDLRRWGLKLAERGGRSGKKRAIIAVARKLAVLLHHLWVSGEVYEPLHNSGRTTVAAAA

SEQ ID NO: 201794 - protein, 316 aa, unidentified
MSQIKTITCAGLDVHKESLQLHLAGRNCQLPNTPAGLKKLLLLLSRASSPERPLHLIAEASGGYEQPVADCLHQHAILVSIVNPRQVRQFAHAMGRRTKTDPIDAEMLARFGQCRCPLPTPAPSEQERQLRELCRYRQQLLASLAAHKQQLEHITFKVLGAQGKSLVRRMAEDLKKVNALLAELVASSSALQAKVERLCQCKGVAFLTAVQLLAECPELGTLAHGQAAALAGLVPHARSSGKWVGKSCIGGGRAALRKALYMAALCASRFHPSLSVFFKRLRSAGKPPKLALTALMRKLICLLNLALKNPNFPLAS

SEQ ID NO: 201795 - protein, 378 aa, unidentified
MPTTLRHVGLDVHAETIAVAVAEADGQVRELGTIRNRPEAVRKLIAKLGGPTGPRVCYEAGPTGYTLYWQLAALGVACDVIAPSLIPTKAGDRVKTDRKDAVRLARCHRAGDLTAVWVPDAATEALRDLVRAREVTKQDQLRARHRVSKFLLRHGCQRPDGMRAWTARHAQWLAQQRFDLVTLQVVYDEYRATLGLLADRVTRLERAITTALDTLAPAQQALVGALATLRGVKEVTAATLVSELGTLRRFASPRQLMGYAGLVPREHSSGSGIHRGGITKTGNAHLRRVLVEAAWAYRHRANTASVALSVRQVNQPAPVVAIATKAQLRLCPRYRRLAERGKPPLAVVTVIARELLGFVWAIGQAVEPAPIPLIPHPS

SEQ ID NO: 201796 - protein, 420 aa, unidentified
MTPDQKAAFARTFSVHVGVDTGKRFHALVARGPDGVRRKPLKVLVSREGFERADAELQALFPDTERSRMLIGLEFAGHHGFTFAHFLASRGYPIVNVLPAHTKRTKELEDNSPLKTDAKDAGVICKLVSDGTFVRFPFLESPYAELRVLVSFRHRLAVEATRFKNRLQGLLDLAWPEFVAQFSTLAKHTPIGLLERWPLPQDLLSAHKATVRAYARKISKGKFVTERFERLYTSAQQTIALPQATAERRMEIQATLARWRLVRKQMVEAEARISELMARLPAAQALLTVPEVSAVCAATVLAELGTPGDYAHPRQVLKLAGMNLVEKSSGSTQGRRRQSKRGRPMLRRQLFLLAGRWCQRRGLFRSYYEAMLARNGGLKTKAVCAIARKLVPLLLAVLQRGEPFDRARWDAARHQPALTH

SEQ ID NO: 201797 - protein, 400 aa, unidentified
MLSIGIDVSKGKSTVCGMKPGGEIVYTPFEVQHTREGMSELVSLLRGSGEEVRVVLESTGSYHCPVVAAWLENGIFISVVNSLRMKRFCSQSIRKVKTDRIDAMQIALYGLAYWQELQPTRLPENTYRELQLLARQYYQMTSLLIKAKVDFNALCDQVLPGMQELMSDHAGRHKLSDFVLRYHHTAHILKMGETRFRKDYCKWAEKKGYRNHERMAALIFATAQNGIPVLPDAPSTQIVITEAIRVLHTVEASRDAILTQMQALAKTLPEYSLVREMPCIGDTLAPRLIAEIGDVRRFHSKRALIAYAGIDAPPYQSGKFCANNRHISKRGNRYLRKTGYEVMQSYVMHKPANDPIFTFIEKKRSEGKSGKLAMVAGLNKFLRVYYGKVTELYRSLPAIE

SEQ ID NO: 201798 - protein, 460 aa, unidentified
MAKRRKSTTNVPGLDILRQINVDAAGLDVGAEEIWVCVPAGRDSKSVRVFPTFTADLHAMAEWLRACQVKTVAMESTGIYWIPIYEILESRGFEVYLVNARHIKNVPGRKTDVLDCQWIQQLHSYGLLHASFRPSEEICALRALARHRDNLIRRRSAHIQHMQKALELMNVKLTEVVSYITGVTGLSIIRAIVGGERDPQYLASLRQSGCKRSEAQIAKALQGNYKPEHIFVLKQSLAQYDFYLRQIQECDTEMQAMYAALPLSDPDSRAPSPPKPKGGSPRKNQAHYDLATALYELVGVDLTAIDGIDALTAQTIITEIGLDVSAWPTVKHFTSWLGLAPHNDISGGKVLRRGTKKTQNKANLAFRLAAHSLHRSQSAVGAFYRRMKSRHGPAKATTATAHKLARMVYFMLKNRTDYVDPGVTYYEQQHRDRTIRNLKRRAAALGLELVPIPAQPAAVS

SEQ ID NO: 201799 - protein, 352 aa, unidentified
MAVYIGVDLHVRTQTVCWLDTTDGEEHEIALVHERDDVRAFYSRFPVPVLVGVEASGYSLWFHRLLEELGHHLLVGDALAIRQFARRRQKNDRRDARLLLELLCHGEFPAIHIPAPASREVLALLRYRHRLVRIRTMLRNGLQAVALSHRLRLGPKLFTVHGQQQFAALPLTSAFAIQRQHSLTLLASLAEQVHAVEQALEARAHNDLRVERLRTHPGVGPLTSLAVVHALEPVTRFDRARRVAAYCGLDPQEHSSGDTQRFGHISKQGNRLLRFLLIEAAHNAIRGDHDLRRFYFHLQARKNSSVAIVAVARKLVLRLYRMLRDEIDYDQFRRRGRDARRAREDASPVTPG

SEQ ID NO: 201800 - protein, 350 aa, unidentified
MVTLGGDSHKRTHTLVAVDENGRQLAQRTLLATKAGHLEALQWAGRWSERKWALEDCRHVSRRFEADLLAAGELVVRVPSKLTAGARKAARTSGKSDPIDALAVARAALREPDLPVAKLEGAGREVRLLLDHREDLVGERTRIQNRLRWHLHEFEPEAVIPARMLSRYHTLTELEGRLRTQHGVVVEIAVELVVRIRELTRRINQLEEDIAGRVSGLAPTLMQLTGCGALCAAKVVGEAAGVSRFRSKAAFAMNNGTAPVPASSGNQKRHRLNRGGNRQLNAALHRIAVTQLSRPGPAKDYVARRLANGNTKTEAVRALKRRISDEVYRRLLHDERALLTSPSSKFEAAA

SEQ ID NO: 201801 - protein, 318 aa, unidentified
MKYTPVGVDIAKHLIQVHFIDEHTGEVIDKQLRCQDFLVYFSNREPCLIGMEACGGSQHWARELTKLGHKVRLLQARFVKAFVMGNKNDVMDARAIWMVVQQPGKEIVVKTEEQQSVLILHRTRRQQVKFRIAQINALHGTLLEFGETIHKGRAAMEREFPEALERMKEKLPPYLITVLENRLNELDSLIEYITSVARQNATCKRLLDIPALGHLLRRQRWLLWGKHQRLNPGREFAAYVGLEPRQTGSGGKIRLLGISKRGDTYLRTLFIHGARAAALLTKEPGPWITELKKRPSGQCGNRRHGKQAGTNNMGDSRP

SEQ ID NO: 201802 - protein, 332 aa, unidentified
MSVYVGIDVHRKRSQVAVIDQDGKVLANRNVNNGVTPILSVIGGLPSGTPAAFEAAYGWGWLVELLEDYGFEPHLVHPLQCKAIASARLKNDKVDAAILAQLLRADLLPEAWIAPAAVRQLRALLRHRAQLVRLRTLLQNRIHAVLADHGCDRPAGCWSGPGREWLASLELPAVSAEVTGDALALIDALESVIDRLDVEVRQHARSDPRVKVLTQLPGVGPFTALILLAEIGDITRFASARKLASWAGLTPTVRGSDRTVRHGHISKQGSVWVRWILCEAAQKAKHSPEFAASYQSIANRRGTKIATTAIARKLLTRAYHLLTDASSGGAPH

SEQ ID NO: 201803 - protein, 408 aa, unidentified
METLHPICCGLDVHQASVTACLRRATAENTVSVEKREFSTTVQGLTQMGEWLTEAGCPIAAMESTGVYWKPVYHILSATMEVWVVNARDVKHRRGKKTDPADAKWIAELLAYGLIEPSFIPPPPIAALRDVIRMRTALVQTRTQAKNRVLAVLEDTNVKLASVVSDPFGVSGRKMMEALIRGEQDPKALSQMAKGVLRRKIPQLEAALEGSFTVHHALLVRLNLDTIDHINVQMDKLDEQIEKMIAPLQKEVEHLESIPGVDRTAARIVLSEIGTDMSRFGSASRLASWAGVCPGNHESAGKRKSGKTRRGNRYLRRVLAECAWATKKTDSFLGRTFRRLEARIGGKKAAVAVGHKILVIVYHLVNEGTMYEDGRYNRPKPKEEARQLKRAMWTLQRLGYQVQLSPAA

SEQ ID NO: 201804 - protein, 394 aa, unidentified
MKLIGIDIGKNKHFFCIMDQQTGEIISQPVSFSNDKEGFDFLVQKIKSYPKDSILIGMEDTGHYHFALLKYLLDLQYTVALINPKTTDFNRKMQGGITKNDKLDTINICDVLDTPERKKQYRITKVNSFDLYEQKQLTRHHHNLKEEENVYKNRLQKCIDIVFPEFNKLFNSKYGIVYMNILKMFGSAENIANTDIRTIRKCFEIEGRGNRISLTPERLKECARSSIGISSSAEVIQIKHLTAQIELIEEQLTEIDKKIEEFSIQNNSPILSIPGISHFSGTSILAELGDISNYSKPSQIIKFAGVAPLHYESSQFNAQHTSITKKGSKYLRKTLYQIILPVIRHNPVFNKYYQLKISQGKGHRCAQGHCVRKLLRIIYHLLKTNQQFDPQLLR

SEQ ID NO: 201805 - protein, 341 aa, unidentified
MQITTIGLDIAKNVFQVHGIDAAEKVVVRKQLRRAQVMKFFAALPPCLVGMEACATAHYWARELTRLGHQVRSMPAKDVKAYVKRNKNDAADAEAICEAVRRPTMRFVGVKSAEQQGRLMQHRTRDLLMRQRTQTINALRAHMAELGIVAAQGREGLKQLLEIIADKTDERLPIDARASLIVLAAQLQALQTMIGAIERRIIAQHRANEASKRVATIPGIGFLGASAITATVTDPNAFRSGRDFAAWIGLVPRQDSTGGKQKLGPISKQGDRYLRRILIVGAHAVLRLAKKNPQNYPWLAQLLARRPFKVVAVALANKMARIAWVLLARGGTYRTPQLAAA

SEQ ID NO: 201806 - protein, 402 aa, unidentified
MAAGRLWAGVDVGREYHWVCVVDDTGAVVLSRKLVNDEQPIRELVAEIDQLAEEVSWTVDLTTVYAALLLTALAAADTPVRYLSGRAVWQASAVYRGGEAKTDAKDARVIADQSRMRGADLPVLAPDDDLITELRMLTAHRTDLVADRTRTINRLRQQLVAVCPALERVAALTSDRGWVMLLSRYQRPKAIRNSGVSRLTKILGDAGVRNAASIADAAVTAAKTQTVRLPGEEVAAHLVAELAQGVIALDARITATDADIEGRFRRHPLAEVITSLPGIGFRLGAEFLAAVGDPARIGSADQLAAWAGLAPVPSDSGKRTGRLHTPQRYSRRLRPVMYMSALTAIRCDPQSRAYYQSKRDEGKQSIQATICPARRRTNVLYALIRDNRTWQPDSPPIAESAA

SEQ ID NO: 201807 - protein, 352 aa, unidentified
MKPKTKTTASLAVVGVDIGKEVFHLVGLGTDGTIAFRRKIRRSSLRDVFEQLPPCVVGMEACLSAHFVSRTLRALGHEPRIIPAIYTKPFVKGQKNDYNDAEAVAEAALRPNLRVVQEKSQTQLDLQACHRVRSRLVSRRTATINQIRAFLIEQGITVRAGARALRNSLFTILENRKDEISPRMAKLIHGLYEDWCCLDQRIETVTGEIEELSRIEPKCQRLMSVPGIGPLISTALVAAIGTGEAFERGRDLGAWLGLVPRQYSTGGRSILGRISKRGSRYLRMLLVQAARVLLMRPHTWSRFSFGAWLKAASERLHRHKLAVALANTLARIAWSVLRHDKAFDTHLEIAAI

SEQ ID NO: 201808 - protein, 381 aa, unidentified
METSPAPTAPATDMEPATLFVALELSKAKWLVGLHSPTADKISRHTITGGDAPALLRLIEAARRRAEASLGGEVQIVACYEAGYDGFWLHRLLLAHGIANQVVDPASLLVNRRARRRKTDRIDLAGLLRTLMAWHRGEPQVCSMVRVPSLEEEDQRRRGRERERLVKERVQHLGRIKGLLMTQGIRDFQPARRGWQERLEALRTGDGQPLPGCLKAEIARECRRLALVDEMLEELEREREATSNGKAPQQAALLSKLRGIGPISAHVLAEEVFHRDFANRRQVAAYLGLDPSPWQSGQRDHEQGISKAGNRRGRRVAIELAWFWLQHQPDSGLSRWFKERVGTARGRVRRIMVVALARKLIVALWRYLASGIVPEGASMRA

SEQ ID NO: 201809 - protein, 323 aa, unidentified
MNKDIKYFGLDISYLVFDVTDSNGNYYQFKNNEFGFKKFTKLLNIESHCVMEATGYYHYQLAYHLLESGIKLSVENPLAVKRFIQMKLSKIKTDKSDSKLICEYAEQVDLKLWQGSSKNEIECLQIARALSVYTKQSTMLKNKLHGEAVLGNPSNVVVRSLKRSLKQLQKEIKSLEDTLLILVKQTHQDLLTRLKSIPGIGPKTAIMLVVLTGGFDRFSSASELCSYAGLTPVIRQSGTSVKGRPRISKIGNQKLRNLLFMCSFNACKYNKACRDLYERIVAKGKSKKLALIAVCNKLLKQAFAIAKSGLIYDDTYKSTLVKN

SEQ ID NO: 201810 - protein, 410 aa, unidentified
MAEVMIGIDPHKASHTAVAIGLSEQQLGQLQVCACPSQTDQLLAWAAAWPERAWAVEGAAGLGHLLAQQLAAAGERVLDVPPKLAARVRLLQAGDTNKNDPNDAFSVAVAALRSTAKRPVIAEDHAVVLKVWAKRHRDLARARNQACCRLHAVLCDLVPGGIRKEISAGQAARILEQVRPADAVTTARCELAAEFLTDIRRLDAQLRTTNKKLAAAVKASGTSLTGLFGVGPVIAGTVIGDVRQVFRFPSRDHFAAYDGTAPVEVSSGGRKVYRLSLRGNRRLNHAIHMAAITQLRYKYSQGRAYYEKKLAEGKTHKEALRSLKRRISDAIYAALVADARQAAAACSKGPGGQPGNLSVSRAAGSHPARRLFGQATPGPATTLRPGTTAGPAPSQPNGALRYRATNPPAD

SEQ ID NO: 201811 - protein, 374 aa, unidentified
MKFIGIDLHTNRFTCCYRDEQSSVENPAKGKVIKTFELNAGGLEAFFQTLTGDTHVLVEATITTFSFVRLFKDRVKEAVIANTYELKQISLARCNTDKLDADKLCRIIKAQALSGEPLVSPVTMPSKEIQQLRGLFTTYRLYQKQNVQLKNRIHSLLKEQLYGFTQEEIFGKRDREGIRTISPGSVLNFQINQLLDRLERDEADVETLKDQVLLHASPFMAQIEILTSMKGISVFTAIAIIADIIDVSRFKNSKAFTSYLRSAPRVANSNTSVSVRGTNKKGRKLSATLLTQSLNHVLDSSRKLSRWYNRLCEYKKPGLVRTALRRRVLAEIFQMLKKGEYHYGREAGKHEAKMAQYRRFLEKQKNNAVLKKTA

SEQ ID NO: 201812 - protein, 541 aa, unidentified
MASEWRQVVKKKDALRQAKTGNPMVCKYPSFSMVPDAGACVIGEDLIGSVSIPFRRVTNERLRAATRPTSTCEDAMTKTVKKQHGGQQRSGKVNSGMPLINVNAAGIDVGAKQHYVAVPPTRAEPAVRCFGAFTEDLHALAKWLQQCGVTTVAMESTGVYWIPLYQILESYGFTVKLVNARHVKHVPGRKSDVQDCQWLQQLESFGLLTASFRPAAQICVLRSYMRQRQMLIDYGSRHVQQMQKALTEMNIKLPHVISDLTGVTGLAIIRAILAGERDRLKLAALKQRQIKSDLGTIAKALEGDYRPEHLFVLQQALELYDYFQQKIAECDDEIMKAMQTLERDATASLPAPAKPQRKARSKHHPFPFASQQKLQRILGVDLTRIDGINETTAQLVLSELGLDICHKWPTEGQFTSWLGLCPNNEISGGKVLRRGKRKVVNRLANALRLGAQSLLKSKSALGAYARRMRAKRGTPTAINATAHKLARLIYRTLKYGQEYIDIGQQQYEQRYKENALKTLQRKARQLGYQLVVTVQPPTVVP

SEQ ID NO: 201813 - protein, 399 aa, unidentified
MTKVRTWVGLDVHATKVVACTVDAESGEMTVHRLPGETAAVVAFCAGLPAPVRVAYEAGPTGYGLTRVLQQAGVGCVVAAPGKIERPAQDRIKTDQRDAERLVRLLMINGLHAVRVPSPEEEALRDLVRAREDLRGDLMRARHRLSKLLLRHDVRCDDTSSRWSDRHRSWLAKVDLGARGAQLTLTEYVGAIDALEIRRQTLEAAIGELIPNSPWAQDVARLRCLRGIDTLSAVGVAVEVGDFHRFEQPSLLSSYLGLVPSEHSTGESRRQGGITKSGSRHARRLLVEAAWHYRRPPRLSTTLERRQDGQEQAVIAIAWKAQQRLHRIWRRLDLERGKRRTVVAVAVARQLAGFCWAIVTHDTSDSSIPVPTDTASVRAGGRPPHAHSPQPRSTQHKAA

SEQ ID NO: 201814 - protein, 424 aa, unidentified
MRAIGVDVHRDFCEVAIAEAGGVRSAGRVLTTPAALALFARSLAPSDVVAMEATANALAIARIVEPHVARVVLANPKAVKGATGLRAKTDKIDARLLARLLAAGFLAEVWTPDEQTRVRRRLISRRCHLVRQRVREKNQVHAALQRQLNDRPPMTDVFGVKGRVWLERQRESLPLDEQHTVDACLRQIDFLEREIELVDRQIAEQVLASDDIRRLMTLPGVSGVTATALMAAIGDVRRFPTADHLVGYLGLSPRVQQSGSEPARHGRISKQGPGPVRGLLVEAAWHAARTTGPLRAFHQRIAAKRGVNIATVAVARKLVVIAWNMLRRREDYAFARPSLQREKLRRFELMLGAERQQGKRLTTSGQTFATVDQRRLEKELAAQSETAYRRLVADWQPVKKAGAGATPGRASQGPSRGQVARQTP

SEQ ID NO: 201815 - protein, 341 aa, unidentified
MQITTIGLDIAKNVFQIHGIDAAEKVIVRKQLRRGQVTAFFEALAPCLVGMEACATSHHWARELTKLGHEVRLMPAKDVKAYVKRNKNDAADAEAICEAVRRPTMRFVRIKSAEQQGQLMLHRARDLLMRQRTQVINALRAHLAEFGITAAQGREGIKELLAIVAQEEGSRLPSDAHASLTVLAAQLQAVQTMIGSIEKRIVAQHRSNEASKRLETIPGIGVIGATTITAVVTDPKAFRSGRDFAAWIGIVPRQDSTGGKQKLGPISKQGDQYLRRILIVGAHSVLRRARQQPEKYPWLTQLLARRPFKVVAVALANKMARIAWALLARGGTYRAPQLVAV

SEQ ID NO: 201816 - protein, 368 aa, unidentified
MNHVTSVGLDVHARSIKACALNPLTGEVSRRSFGYSPAELAAWILSFDAPKAVYESGVTGFHLQRELEALGVDCVIGAVSKMDKPAAEKRKKTDRRDAAFLARQLALGTLSEVHVPDPGCEAAHDISRALADARDDVTASKQRLSKFLLRNGHVWDETNDRGQRKKTWTRDHWRWIESIRMDEPAAQETLDYYIDRCRRAIEDKRELESKVKAHADEGRWKPTVDALSCLKGIDVVTAFALAVETDGFSRFRNASAYASWLGLVPSEHSSGEGRHRGGITKSGNKHLRKLLVEASWHYLGASRHEKRPRAGQEVAPGVRRHAAKGVRRLVDRRSSLLDSGKRSVVANCATARELACWAWAIGCMVEAA

SEQ ID NO: 201817 - protein, 339 aa, unidentified
MQVSTIGLDIAKNVFQVHGVDGQGRTVLRRQVRRNQLLQLFGSLHPCLIGIEACATAHHWARELGALGHEVRLMPPAYVKAYVKRNKNDAADAEAICEAVTRPNMRFVPIKSAEAQSVLMLHRARHLLVRQRTAQVSALRAHLAEYGIVAAKGRSRLRDLLPVLGTEGILPELARQTLLLVAQLIEALTIQIRNIDTELLRWHRTNPASQRLETIPGVGFITATALAATVRDARVFRSGRQFAAWLGLVPRQNSTGGKERLGGISKMGDRYLRYLLVVGATAVVRYTRRKATAISIWANRLLERKAARLVTVAVANKMARIAWAVMARDESYRATSVAV

SEQ ID NO: 201818 - protein, 429 aa, unidentified
MTRRDPTPADAVLVAIDIAKARNEVLIAPPGARRRRLTVLNTRSEHDRLVEILSGYAAPVVVGFEATGDYHRTLAWRLADAGFQMRLISSVALARTREALHNGWDKNDPKDAQVILHMLGIGLVQRYYDPLIAGINDVQELSKTHDAIARMKTETLHRILTHYLPLYFPEIERFRHNSRSDWFFAFLEQFPTPASITALSKAAFIEAAWQVVGRKVSKARLLADIYETATASIGLPVAPDSPAISMFRLVLAEMRSLIRQRGAIEAFANQLLQERADYRRLQQIPGVGPINALTILAEAGDLRRFGHHRQFLKFCGLDLATYQSGQFRGQTRLSKFGNARLRRTLWMAAQVAIRQKENSFRDKFERYIARDRANADLRRKALTAVSAKMARVVHALIKAEAEYRPFFEGGGARRKNPSQQCREGAVATL

SEQ ID NO: 201819 - protein, 357 aa, unidentified
MKYIGCDFHPSFQQIAMLDKETGELVERRLLHTEEARAFYEGLHGPVVIGIEASGNMDWFESLLAGCQHEMWVGDAAAIARQEGRKQKHDRRSAALILRLMVENRFPRIWVPTLAERDLRQLLIHRHHLVRMRARIKNQLQHMALNQGWQKKSKLWSRAGLELLRNLKLAPWAGQRRDTLLAMLEDLEEKIKPLDQAVAREAERNPMAQLLATHPGVGPVTSLATVLTMGDVNRFADSRSWVSYVGLNPSEESSGQRRRLGSISKQGNPFLRQLLVEAALTAARGDKDLGRMNARLKARKHHGVAKVAVARKLAVRLYWMARTKRSYPDVVRMQGSQSHPVAEVKAEALNRPPASHQ

SEQ ID NO: 201820 - protein, 350 aa, unidentified
MDRYIGLDVHAASTTMAVVGPTGRRIRSQVLDTSAGPLVEALRGIGGERHVCLEEGTQSSWLYEVLEPHAAEVVVVCGFAQRGSKSDEKDAYWLAEQLRIGAVERRVFKGVGAFRQLRELSRVHTMLVRDVVRVQNRIRSVYRSCGVRTTERVYTHKHREAWLAKLPQVQRLSVERLYEQYDAVEPIRREAGKNMVQESHRHAISQVLESCPGLGPIRVAQLLPVVVSPWRFRTKRQFWSYCGLGIVMRSSSDWVPKPGGGWQWAQQPQTRGLSRRHNRQLKSIFKGAATGVLMQHRSDPLYEVYRRATESGTKPNLAKLTLARKLAAIALSMWKSGKEYAPEQVIQAES

SEQ ID NO: 201821 - protein, 319 aa, unidentified
MAQNDLAVVGIDVAKDKVDLCIRALALRQTCPNTAQGRRKLVALLRRHQVGKAVMEASGGYEREWRKVLHDAGIEVRIVDPKRVRSFAQSAGRLAKNDTIDAEMIAWFAETFGETPSQTHDAAQEELAALVKARLGLVELKVRLQSQSAHAAPGPVQKAQARVLKSLATEIEKLELAIAAKVKATPHLAERAEIIESVPGFAETTSAILVAGMPELGQVSDKIAAALVGIAPYDDDSGKRRGERHIKGGRRWVRNAIYMPCLGAATQNNPVTKTFYRRLIAKGKQPKVALVACMRKLICILNVMIARHQKWDTARYAPA

SEQ ID NO: 201822 - protein, 342 aa, unidentified
MVSAIGIDTHKATLVACAIDELGTAVGEAQFRNDPAGHHELAAWVGRVAPGATIGIEGSSTFGAALARMLVAAGLAVRDVPPHLTRHGRSATRRAGKSDPGDALAIARVTARETGLPPVRLDDRSRHIGLLLEAREALVHDATRSRNRLHAHLLVLAPGYGERIDRLVSGVALDRASRLLRGRPGLEAELARDLIAELRRLDGRVARLTRRLTMLVGPDPLLGLPGIGILTAARLIAETGDVRRFRSPDAFAALAGLAPIPASSGQIQRVRLSRGGNRQLNRAFYSIALTQVWHHPPAKAYVARKRAEGKTWREAMRCLKRQLVRTVFRLLQEGQLGLAEAA

SEQ ID NO: 201823 - protein, 337 aa, unidentified
MKLYCGIDLHSSNNVVAVSDEQDRPLYEKRLNNDLDTILDVLKPFKGELVGCVVESTYNWYWLVDGLMEAGFPVRLAHTGAVSQYAGLKYTNDFSDARYLAHLLRLGILPTGYIYPKEERGLRDLLRRRLLLVRQKTLHHLSLQSLIARHSGRRLTSNEIKKLETRQLAAYLESPILLGGQITHQARCWLDEAICRIEQELQRQIQPREDYRLLQSIPGVGPVLGTTIALETGTIERFPSPGDYASYARCVKSEKISNGKRKGQGNRKNGNKYLAWTFMEAAHYAAIWSPPIKRYYQRKQSKSHILVAKKAVANKLARACYHMLKRGEVFDVTRAFG

SEQ ID NO: 201824 - protein, 355 aa, unidentified
MKERCKKPRKGPVKQDLYGAVDLHGDNGLYCLINERDERVFQQRLPNDLKTVLKALEPYRDRLVKGLAVESTFNWYWLVDGLQEHGYAVQLVNTTKVQTYSGLKQTNDKTDAFWLAHLQRLGVLPTGYIYPREQRGVRDLLRRRMLLVQQRTAHVLSFKSLVERETGGHITANRVKALEVGEVNQWVGGDAAVLMGQTNVRMIECLDEQIGRLEQAAQDRIRLRPDHERLQQIPGVGRILNLVIMLETGPIERFAGAGHYVSYCRGVRAEKLSNERKKGENNRKCGNKYLAWAWVEAANFSLRYSRPIKAWYQRKLKRCGGKAVVALKAVAAKLAKAAYYMLKKKEAFKLEQVFG

SEQ ID NO: 201825 - protein, 351 aa, unidentified
MSQKLETSPAPAVIGIDIGKNSFHIVGQNLRGAIVLRQKWSRGQVETRLANLPPCLIGMEAGVGAHHLSRKLQMLGHDARLMPAKYVRPYSKGQKNDFRDAEAIAEAVQRPTMKFVATKTVDQLDLQALHRVRDRLVGQRTGVINQIRAFLLERGIAVRQGPHSLRSELPGILATRADVLSPRMLRIIEDLAGDWRRLDARIEGLSSEIETLARQDKACERLMTVPGIGPLISSAMVAAIGTGDVFSKGRDFGAWLGMVPKQISTGDRTILGKISRRGNRYLRALFVQAAWVVLVKVKCWERYGLKSWIEAAKNVLAIALANNLARIAWAVLNKGRAFECVKTEETASRPA

SEQ ID NO: 201826 - protein, 338 aa, unidentified
MNKRDISLPDDNMRMFVGLDVHKKYTEVAIVDEDGVVEKQERIKNEPRQIEEFSNKLSNAIMVLESSSSWYWLYEILSRKHRVVLSNPAKTKAIASAKLKTDKVDALMLANLLRGGYIAESYVPSRRVMSLRELVRYRANLVRMRGTVKNRVHAYLLMNNIKIGGSPFTKNFLEELKKVKDDRVEGYLRIIERLNLEIHEASKKICNEALNDEGARLLMTIPGISFYSALLLVSEIGDVDRFPDSAHLVSYAGLASSTHSSGGVAYHGRITKAGSPYLRWVLNQCTWVHVRNEPDGNVATFFRRLSGKKGYSKAMVAASVKLLKIVYWVLKEKRPYQG

SEQ ID NO: 201827 - protein, 388 aa, unidentified
MTERDQGKTIGLDAHPDMFTMAVVSGSDARTAKVEKVVDRAPMGELVRLIGKHATEQDVVVLEASTNSFLVVKLLAEAGIRAVVVGSDTVSKMGSQYAVTDRIDAIKLARAWIAGLAKIVWTPDGKAAERRTLYFAYRNAKKDATRQRNRLWNWCCMNGLRAPKKRRLKAVPEFERLVGLPRWTPLQRGILEDMVRTYRLACDRRERYAGLMTEEVVSDPQTLRLMRLLGVRSIVAFALVAFIGNIDRFADPKKLVAYVGLNPNVCRSGKGGGNGPLPHAGRSDLRSLLVQAAHSMLRWSKGSIREWGLRLCARKGRNIAVCGVARKLTVAIWYVLKGLYVPEIADTSLRTKLAKMAVEIGRDRLQAMGFTKPEHFIEEKFQIIRSFA

SEQ ID NO: 201828 - protein, 453 aa, unidentified
MKTTAFLGIDVSKGYADFLLLGADKTVLEQNFRLDDNAGGRLQLKNLLSQWFKSGLTEIFCGVESTGGYENNWYDFLRQLSDQYSLSVARLNPRGVKAVSEAVLTRTITDAVSAYNIALYLMSFPEKVEYKGKDYPEGVAFKEGRQHYVYVRMQQKQKVQFNNQLEKLLYNYYPEVLVYCRHGIPSWLLRLLVQYPCGSAVVKAGAVRLLKIKGIGESRVQALIKKSSVSQQSISKQIQHVIAVTSREILHKEDLIDQEKQYLAETFSEHEEVKLLSTIKGVGVDTAIIAMLQIEDINRFDSAKKLAAYFGVHPTFKQSGDGKWGAHMSKKGRPELRAALYMSALSGMRCNNILKQLYARFRAKGMKHYQAMGVVMHKLLRMIYGVLKNKQPYNEQTDQDNVNRSKEKQAQTKEKKNENIKQLKQQRERYRKFGEDAPISRIAAQEIKKQTAS

SEQ ID NO: 201829 - protein, 343 aa, unidentified
MSVGIDIGKNTFHIVGFDLSGQRVLLKQIKRLAQVATLEKLPRCIVGMEACLSAHFVSRTQRAMGFEPRIIPAIYVKPFNKGQKNDYNNAEAVAEAALRPNLQTVWEKSQDQLDLQVLHRVRSRLVSRRKATINQIRAFSIEQGITVRKGLRALKNSIETIVEERKDEISPRMRSILIGLYGDWMWMDDRIDKVSAEIEEISRTEENCVNVMTVPGIGPMISTAMVAAVGEGEAFDRGRDFAAWVGLVPRQYSTGGRTVLGRITKRGSRYLRMLFVQAAKIIMMRPHRWPDFSFGDWLARASERMHRNKAAVALANKLARMAWSILRHKTAFDAQQDEVAIGV

SEQ ID NO: 201830 - protein, 413 aa, unidentified
MVRSGGGWLEIFCGIDWSEAAHDVAVVDETGRLLARRRIADDAAGFTALTELLAGYAGRPERVDVAIETGRGLLVAALRAAGHRVFAINPKAVDRYRDRHGVAGAKSDPGDARVLADILRTDRDRHRPLPADSDLAAAVGVLARAHQDAVWARVQDANRLRSLLREFFPAALTAFADLTTNTALAVLAAAPTPTAAARLSRANLTDLLRVAGRGTRPTEAARLAEIFTVDQLRQPPVVEAAMGQAVRAIVRTLTAANQSISDLEAALAAAFDQHPDGEILRSLPGLGPILAARVLSEFGDDPTRFPDPASRRAYAGTAPITRASGRSRVVLARHVRNKRLADACYLWAFAALNRSPGARAYYDTRRAAGDRHNAALRRLASKLLGQLHHCLTTSRPYDEALAWPQPDTTPAAA

SEQ ID NO: 201831 - protein, 325 aa, unidentified
METKKLCCGIDVSHSKLDVCYQNNLGELFHLQVGNNNNGFAKMLEHTGVDYHFVMEATGVYYIRLAFYLHSHGCKLSVVNAIAIKRYIQMHLERNKTDKKDAGWICRYAIAQSPAYWEMPDSAYFESRQLYNTIRDYTEQIKRINNQLHSLRLLPVPSKDTIKSLEKIIVCMEKEIKQLEQKLQLLLLQWQPEQLKSVSSIKGIGKRAAAMLIVFTQGFKHTQSHRQLISFAGLAPTQYSSGSSIQGKPRIYKRGGKNLRDVLYMCSMNAMKTNAACKTLYDRLRANGKTGKQALIAVCNKLLKQVFAVVKHNSLYQPNYCSAKP

SEQ ID NO: 201832 - protein, 451 aa, unidentified
MDECRYRDDRSIAKLTEGERILDDQFRYFVGIDWATQTHRVALLDSEGQAVEQYNAAHSGEGLAALVEKLKQRTGCGPAEVAVAIEVAWGALVETLVENGFSVFSINPKQVDRFRDRFTMAGAKDDSRDALVLASSLRTDRKSYKRVEVESPDILRLRELSRFEEELKSELRRMTNRLWQQLHRYYPQMLSLSPAADDPFVWDLLRAAPTPREGAKIRRIQVQRILTDNRIRRISADEVLLALKESPLVLAPGAGEAACEHVLLLLPHVSLLDRQLRDVSLRIKQLLERLTEPDTESGGLPCDAALMLSIPGIGPAIAAALLSEATRPIRERDYQALRCYAGTAPVTKQSGKRKTVNMRYACSPRLRQAVYHWATTSINCDKRSRQQYDALRASGHHHARALRGLADRLLRILIAMLTQGKTFCPLRRKGSLPQSISPATAVGALQLQPAG

SEQ ID NO: 201833 - protein, 457 aa, unidentified
MTRRKHSRPARDIAPVHPHAAAVDIGATLHVAAVRPGCDPEPVRTFGTFTTDLHRLADWFEQCGVETVAMESTGVYWIPLYEILDQRGFEVVVVNARDAKHVPGRKTDVSDAAWLQRLHEYGLLRASFRPKGEIATLRSYLRQRERLLEGAAAHIQHMQKALTEMNLQLHHVVADVTGVTGLRILRALVAGERDPDTLAAYSDPRCKAPAETLRAALVGNYREEHVFALAQALELYDIYQAKVAACDQRIEAVLERLKAANPPPAAALPPARPRRRQANEPGFAVREALHAILGADPTQIDGIGPSLALTLVGECGTDLLAWPSAKHFTSWLSLAPHNKISGGKVLSARTRRSGSRAAALLRLAAVAVGRTATALGAFYRRLAARVGKAKAITATARKIGVLFYNMLRHGMDYADPGASAYEARYRQRVLSNLRRRAKSLGYVLQRADPASAAIAVS

SEQ ID NO: 201834 - protein, 338 aa, unidentified
MEVYAGLDLHSTNTYVAMIDKDNKVLYKQRHGNDVPTILSVLDPFKKDIQGVVVESTYNWYWLVDALMDTGYRVHLANVSAIKQYEGLKQIDDRRSSLWLANLLRLNILPTGYIYPKEERPTRDLLRKRLHLVRHRTSHVLSVKNILARNLGIRMKSEEVKKLNTSDIKILFSDSEMRVAVAASVGLISHLENEIKGIEAMITRKLKVRKEFIKLLTMPGIGQILGLTIMLEVGHIDRFPTVGNYSSYCRCVRSIRTSNGKITGYGNRKSGNKYLSWAYVEAANYARRFHEAVRSYYEKKLARTNRIVAIKAVSHKLARASYYVMRDNVDYDQARLFG

SEQ ID NO: 201835 - protein, 356 aa, unidentified
MKYVGIDVHKKFCQAAVLDDEGELFDQIRFLNNKEEIKDFAMKLTTFRDDVKAVVESTGNLWIQIYDILEKFGFEVFLSNPGKTRLIAEAKNKTDKIDAKILARLLRADMLFTCYVPGEELRNRREFLRARQDFVKNRTQVRNRIHSILDKHGLRFPGEPFSKKSIVWLSELDLGDMDNAVVKGQLALLETLDEQIQVLEDKIAAMGMEDPQVKLLMTMPGIGYFAASLLLAEIGDINRFSNDKKISSWAGLAPRIHQSGGTTRIGRVGRGNKRVSGLLTQCAHNARQHDPRFKRFYDRYSKRSGKGKALVAVAHEMIRIVYFMLRDNEPYRGQNVEMTTRKLKRMKYRASISLQT

SEQ ID NO: 201836 - protein, 320 aa, unidentified
MTSTGTISSFETIIGIDISKDHLDAFELPGRARHRFAQSGTGIRSLMKRVGLATSPLVVFEATGPYHRDLEQALGRAGIVFSRVNPARAKAFSKVLGQPAKTDSLDAAMLAALGQSGLAAPTPPLPESLHELKALETALSALIADRARLRTRAHTLVLALLKRQNTAQVALLDKQIKALEAEIRRRLDEDPDLRRKTEILTSIPGIGLRTAHRLICRMPELGTLSQGQAASLSGTAPRTRQSGKWHGHAFVQGGRALVRQALYMPALIAARFNPDMKQLYQRMTQSGKPRKVALAAIMRKLVCLANTLIKNNRIWTTNPA

SEQ ID NO: 201837 - protein, 369 aa, unidentified
MPHVTSIGLDVHARSVAAAAFNPFTGEVVRRSFGTDASEIAEWALGFEDPRACYESGPTGFHMARELRALGLDCAVAAVSKMQRPAADARRKNDRRDAEFIARMLATHNIVEVPLPDMAVEAARDLDRALDDATRELRRSRQRLNMFLIRLGHVWDERNADGARKKAWTRAHWRWVSEIRLEGPQRDALEYYVTAARCAESDRRQLERRVVALAGTDRWRATVEALSCIKGVDTLTAFRLAAEAGSFSRFRSAPAFASWCGLTPSEHSSGESERRGGITKAGNALARTALIESAWHHSTCSPRPKAPAPGTDVPPAIRSRADDCTARLHRRREALAAAGKSACKANAAVARELACWVWEIGCRSEGTVL

SEQ ID NO: 201838 - protein, 437 aa, unidentified
MKRSRIQVGFDISKKKLDMCILEPDGQVVVRHRSFANTMTGYQEVKQTLIPFLGSDSWDGVDLGGESTGYYWLPFFMQLGEDTDLANYDLNTYLLNSRQVHWFKKGYAEDDKTDQKDSFYVTEKLRTQRRKHVWQPDLDWLRLRFYTRYRFHLGQNLTRMKNYFWAHMFLMCNTYSKGKPFSDGLGACGRALVRTYPDWQELQELPIETLIEQLASWSGGQLPDPAQDVRQLRKIIQQSFPLHPDLCIALHDLLSMTIEHIAFIEKQIVQVEKRMENEIRRHHPEVLHLIDIKGIGIVFAAGIAAEIGDLERFFHGQKWDCRKKRFRNKNLRDVEDAVAKFAGIWWPRKESGDFIGQERRMNKKGNRYLRYYLVEAADKLRQYLPEYQAFYHRKYAETKKHQHKRALVLTARKSVGLFVGLLHRNEPYRSPEVNLTI

SEQ ID NO: 201839 - protein, 329 aa, unidentified
MNIVFLGIDLAKNVFQICGLNQAGKPVYTKRTGRKELLQTLANIPACLIGIEASTGAFYWQREFEKLGHNVKVISPQYVKPFVRGQKNDGNDAQAIAVALMQPTMQFVPPKSPEQQDIQALHRARQRIVNHRTATVCQIRGLLLDRGITIGAAVSRVRRAVPLILDDAENGLSVRMRRMIAELYDLFNDLERRLHFFDKEIETVFRQSEACQRIAKVKGIGPKTATAVAAAIGKGTEFKNSRHFAAWLGLVPRQHSSGDRQVLMNMTKKGDKHLRTLFIHGARAVVRVATNNNDSHMNQWVNQLKERHGFNKTTAVFRAFILNVLLLQK

SEQ ID NO: 201840 - protein, 403 aa, unidentified
MNENGKRYIGLDVHKHYLIALGVDEDLQVVLPARRVELSNLESWMKKNLTQQDEVVLEMTTNTWQLYDELVEYAGSVMLVHPPHVALITRSQVMTDKIAASILARLLAKGLLVGIWVPPQEIRELRGLVAQRQKMTRLATQAKNRLHAVIQRHHLMPSEGNPFAKTNNGWWASLSLGRLEKMNLQSDLETLQFAAKQEARLQAEMTDIAAENEEIGRLLHIAGFGVITAVTVYAAIGDIRRFEEAKKLVGYAGLGTRVHDSGLTTRTGKITKAGRRDLRVALVEAAHVAANSHPHWKTELARLEPRLGRNKAIVAIARELLVTVWHVLARKVADRFAEEEKVSKKMLHFAYEVGKENRAGKSAAQFVRERMDTVGLGSELTCIPWGSKKPIPLPPSKLKKAMP

SEQ ID NO: 201841 - protein, 402 aa, unidentified
MKYVLAIDVAKNKSMALLIDNCGEVYIEPYEFNHTLSDFQNLLERIKKIIIFECDITVFMESTSTYHYSIKRFFMENSLYDVRVINPLHSAMHKRNLRKTKTDKQDCYNLADLFFTGKIKNYNNHEQYYLNLNALSRQYDFLLHGMVRLKNRFRMLVNLCFPEYEVIFKGPMIFSDTALSFIGKYPHPDIIKETRIDALSNFMAKINKRHENYYLRKANFIKENAKFSFPSVSKEDDIVTNLISTTRILKYQIKEVEDLKTRLINQAKESYLFPKINSIFGLGEFTTALIIAELKDITRFKNIKELTAYCGLDPSIRQSGSSVNGKGHISKTGNSYIRRILFNTIQNIIMQASRTNPDNEILAYYRKKRNEGKHHYVAVISCTTKLLRLILAKCKNTQSDNI

SEQ ID NO: 201842 - protein, 341 aa, unidentified
MNNVAIVAIDLGKHTFHLHAQDERGHELYHKKFNRTGLVRYLANLEPCTVAMEACGGAHYMAREAAKWGHVPKLIAPHLVRPYVKSNKNDFADAMAICEAASRPTMRFVSPKSEAQQALAMLNSQRDAYIKERTASVNRIHAGLLEVGISLSPGFHAIKELPALLEECSFSAQIKQILLGLRDHFNYLDGQVKALDKQVEHQAAEDDLASRLMTIPCVGPITSSVLAAELGNGQQFKCGRDYSASIGLVPKQHSTGDRTVLLGISKRGDRNQRRLLIQCARVYLMGLERQTGALADWVRQLLARHHCNRVVCALANKLARIAWSIAAHHDEFKAGPSAINA

SEQ ID NO: 201843 - protein, 350 aa, unidentified
MMIIGCDLHTRYQQIAMLDRDTGELVERRLEHESGEARAFYAALSGAVRVGIEATGHTHWFEAMLAELGHELWMGDAAKIRSSVVRKQKTDARDASHLLDLLRQDRFPKIWRPSPAERDLRQLVWHRQKLVWMRGAVKNQLHALAMGEGVCRKKKLFTAKGRQELEGLTLGPWASYRRQELLRMFDELAAATEQLDLAVERAAKSQPLAVRLMTHPGVGPVTSLAFVLIIGPVKRFERSKQVVSYLGLNPQEHSSGGKQRLGAISKQGNPMMRSLLVEAGHTAARFDPALKRMYQRLKFRRGASVAKVAVARKLAVRMYWMLRSTADYAQLVRMQGSPWATLVENSPSLG

SEQ ID NO: 201844 - protein, 346 aa, unidentified
MLYAGLDLSRQRLDVHVLDEDGRTVEVTAVRPDADALRTLAAHVLRQGQEVSAAIESMTGARFVHDTLEFAGWDVAIADAAKVKGIAPLAAKTDKIDAWVLAELARRDLVPEIWLPTPEVRAERERARFRLHLVHHRTALKNRIHATLMTFGHPVAVADLFGVAGRELLARLALPEPWTTTLSTSLRMVDRLGAEIDACEGDLRRLGADHPSIPLLLTVPGVGWVLAYTIASEIGDIGRFSSPKKLTGYTGLCPLVRQSGNRDVRGPLAKNGPKYLRWALIEAATHAARDAHYRERYERTKQRLGRQRGAKVARVDIARKLAEAIWHVLTKNEPFAPAGPTMLLVA

SEQ ID NO: 201845 - protein, 423 aa, unidentified
MEMLHKRVAGLDVHKATVVACVRTMSAGKVERECRSFETTTAGLLALLDWLRESRCTHVAMEATGVYWKPVWNILSDGAFELILVNAAHIKNVPGRKTDMNDAMWIADLVACGLLKPSFVPNEGLQELRSLMRTRKQLSREQTRHVQRIEKTLEAANIKLGTVICEVMGVSGRRMIEAMISGVRDPHKLAALAHRQIKASPKELYDALHGRLTDHHRFLLQLHIGQYDALSGAIDQIDRQVDTAIAKLDEEAADGQATFRDLISLLCTMPGVSTLAATVILAEIGRDMSRFPSAGHLVAWAGLCPGQNESAGKRKRTRLRKGAPWLKTMLVQCAWAAKRKKDSYYKAQFFRLSSRRGPQKAICAVAASLLTAIYHMLKDGTEHHDLGAAHFDHRSTAAKTKRLVTQLAKLGYAVQLQPLSEAA

SEQ ID NO: 201846 - protein, 387 aa, unidentified
MPQPNDMSRSLITLEQDSTLIAVIEMGQSSWLVAGIVPGIDRQPLKKLAADQDGLLQLLHRWRKEATQAGHTIKRIAVAYEAGRDGFWLARWLRAREIEAYVIHPSSVPVSREHRRAKTDRLDTELLKRAFLGWLRGEPKHCSMAAIPTVEDEDARRPSRERESLVGECTRIVNRVKANLARLGIRGFRPRLAHAPKRLETLRTPEGTAVPANTLAELQRDMAHLRFVKQQIKEIETARAKRLEQASGGGRDAMVRLLARVVGIGIETADMLVQEVFSRKLRDRKAVARYAGLTGAPDESGQKRRERGLAKAGNARVRHAMIELAWGHLLHQKDSALAEWYQKRTVDARGGTRKTMIVALARKLLIALWRLVTTGEAPAGLLLRPAA

SEQ ID NO: 201847 - protein, 543 aa, unidentified
MGSSIVENKLVALSLKDNLTFVVCGLIHWESQFALQFPFRKISSSYRPRSSPFYLFIKQCEVMKKTEKERRDSVIEMLKRQEIRDVSDIEAYKLSVCHGASAGIDLGSKSNYVAINPEIAAEMGIPIVREFSTLTSGHRACRDYLLSCGIKYVSMESTSVYWMNLYYTLTDAGIEVCLVNPKKFRMVPGRKTDILDCQWLQTLHMYGLLKGSLIPNEDIRKLRAYMRQRESLLQDRARYVQRMQKAMVQMNLMLVNVVDDITSNTGMAIIEDILKGERNPEVLATHRDRRCKSSVAEIAESLNGCYKADQLDLLKLNYDAYNFFTGQIAEVDIRIGEILPMFPARQSANGDNGTRPSADKTKRRKKHDGKNVIKAGIDIGSALVGIVGVDLTSITGLGANTILQIISEVGTDMSKFPSAKHFAAYLGFVPRNKITGGVIISSKTDRTKSRAAQAFKKIIPSISRGDSAFAGFYHRVAARAGTGKAIVATCRKVSMAFYNTIVYGQEYVEEGNKKYKQRLEDREKALLERLARKHNVTLLPASA

SEQ ID NO: 201848 - protein, 355 aa, unidentified
MESITLLGVDLAKNVFQLHGLDELGRTRLKRTLRRRALVNFVAKLPSCTIAMEACSSSHHFSRKFQQYGHEVKIISPQFVKPFVQSNKNDAADAEAICEAASRRNMRFVSIKSVAQQDIQTLHRVRKRRIHNRTALSNEIRSILAEFGIVFPQTRRALEDGIKGLLNSSIPHEELSCDGLDNLQELYSEFLELDKRIKIVDLKLEKVAQEPHCQRLFKVGGLGILSVTALAVALADPRQFKNGRNFAAWLGLVPKHIGTGGKNIILGISKRGNTYLRTLLIHGARAKLRGINQKVANGTKLDPLEDWAYRLCQRQGYNKASVALANKNARVAWSITANETDFDPKEAVTLLKKTA

SEQ ID NO: 201849 - protein, 371 aa, unidentified
MNESSKMIYVGLDVHKDAIAVAYAPEDRGAEVVSLGSVGTRQCDIDALIRKLQSKGATLVFVYEAGPCGYWLYRYLTRKGLSCHVVAPSLIPRKPGDRVKTDRRDAITLARLMRSGDLSSIYVPGIEDEALRDLSRGREAAMEDLKRSKRRLKSFLLRQDIRYEGRASWNAAHLRWLSEVVCPTPPQQIVFQEYVRAVTEQSERLQRLERELHAAVKGWRLYPVVEAIQALRGVELTGAVILMTELGDLTRFDTPRQLMSYLGLTPSEYSSGARRRQGGITKAGNTHARRALVEGAWAYRYPAKVSRHLQLRLEKLPPEIQAIGWKAQVRLCKRYRQLTARGKHVNQVVVAIAREMAAFAWAIARLVPRAA

SEQ ID NO: 201850 - protein, 504 aa, unidentified
MRRVGIDIALRAAHKAAVYEDGERLGRPFSVAQTKEGFDELVRRATDGTSEPVEFVMEPTGLAWLPLAAELSRRGHRVYLPKPAKTHALRKFLAQHTKTDAIDACTAALVRHVDQRATELRVPSAAQTTLRLMVKQRSRLVVDAAKEKSRIFTWVLLANPHVGRSLGQDPTGKLANAFLRERLDPLDVLARGKPALRRFVEKHVRGALKDDQLEALWQACERSCALFDALRLSGKLPFDYIELQLLVDQALDHIAFLEGQIAKLDTRIAATYGQLDPTRLLQREVPGFGATIASTVEAFAGDVERFGSVKRYAAFFGLVPRTKQTGMAGEKPRQALTKGGQNLLKKYMFLAAETARRHDPELAATYERALARGKHHYSAVIIVAHKLVRRVYALLKARAARVTDAGYQMRRPDGTAISPEQAHALIAELFPTKAAKATHKRAPQTARQMGTLSQDTGSSEDAAKAVVAVVPTPSLPDLDHARKTLAISPPANPSQQAKNLLDRT

SEQ ID NO: 201851 - protein, 347 aa, unidentified
MKFYTKQHKYYCGIDLHTKKMYVCILDAEGQIRLHQNVNTDPEHFMRILTPFREDIVVAVECMFTWYWIADLCVDQNIPFVLGHALYMKAIHGGKAKNDKIDSHKIATLLRGGMLPQAYVYPARMRATRDLLRRRNHFMRKRAELFAHIQNTRSQYNLPDFLGCIAKPQNREGIVERFDNPSVQKSIAANLEIIQAYDRLLTQLEHDIIAFAKEHDLRSYALLQTIPGVGRILALVILYEIESIERFPSVQDFVSYCRLIKSIKESNGKNYGPSGKKIGNAHLKWAFSEAAVLFLKGNEPAKRYLQRLARKHGKAKALSILAHKLGRAVYFMLKNKEAFNQNMFLGL

SEQ ID NO: 201852 - protein, 283 aa, unidentified
METAYDGRQVVGMDLHRRRSVLVRMTEDGRRLGVARITNSPAGLRREIARAGKSPRVVLEGTYGWYWAADTLAAAGAEVHLAHPLGVKAFTCRRVKNDERDAADLADLLRMGRLPEAWIAPAEVRELRELTRYRCRLVGLRASCRNQVHGVLGKLGVPVTCSDIFGAAGSAWLDGLGLPQPYAGKVTSLRQLAGELSAEITMLPEVITDLLAGHRGYQVIQQLPGIGPVLAAVIVAEIGDVSRFHSAAQLCSWAGLTPRHRESGTKITRGHITKQGSGCCAGR

SEQ ID NO: 201853 - protein, 302 aa, unidentified
MNQIIRIGMDTSKHIFQLHGVDAAEQAVLRKRLRRKEVLAFFAKLPPTVIGMEACGAAHYWGRELRKLGHEVKLMAPQHVKAYVKRNKNDGRDAEGLCEAMSRPTMQFVPVKTEEQQAALMLAGVRQQLIARRTQLSNAIRGYAAEFGVTAAKGLDKIEPLLARIAQDESLPALARELFAIEGREYAQVQAELKAIEAKLMAWHRANAASRRLAQIPGVGPIGATALVMKTPDPRAFPSGRHFAAWLGLTPKDHSTAGKTRLGKITRAGDEVLRSLLVAGATAVIQQVRRGRGRPSPWLVRC

SEQ ID NO: 201854 - protein, 402 aa, unidentified
MKASKQYLRFCGIDMAKQKHVACIIDQDGQYLLRPKSIRNDADGFGQILNCLKQTGRTKSILTGMEATGHYWYSLHDFLTRQGYTVAVLNPIQTAQQAKQAIRKCKTDKYDAFHIANLLRTGQYKAAVIPNELAMTCRQITRLRYRIVKQGAMIKQLVNSRLYPAWPEYEGLFSNKFGTTSMKLLQTASTPKELMQLDPDDLNELIHKASRGRFGPAHTQKILHSAKNSVGMQRGHYGISTGIKFLLEQIEALEPVRKKMDAEIVKLTAKVPEYLFTLPGATELTIVSLYGEISPIEAFKKPSQLVAFAGLDPKVFQSGQYDAPRRRISKRGSPYLRRSLWQMAYRALCTEGDLRDFWRRKHRQNKHHLVAVTAVANKLCHIVWRIMTDRRDYIPKGYNPKS

SEQ ID NO: 201855 - protein, 349 aa, unidentified
MTKVTIIGIDLAKNVFQLHGAAADGTVVFRKKLTRVQFHKFMSDQTACTVAMEACGSAHYWAREIAGFGHTVKLIAPVYVKPFVKRQKNDMADAEAIVEAAQRPTMRFVEQKTTMQQSRAVAFRTREQFVGQRTEAINALRSHLYEFGYIVPKGSGGLSRLVEIIAAENTQVPDLVRDVCHSLLEQIDQLTARLERLKKQVEALAREGKTSRRLQTMPGIGPVTALAVETFAPPMGVFKRGRDFAAWLGLVPRQYSSGGKQRLGKTSNMGQRDIRRLLIIGAMSVVIAASRKGAPEGSWLARMLATKPRLLVAVALANKMARGIWAMLSKQENYQTPATLSAEGNLASN

SEQ ID NO: 201856 - protein, 400 aa, unidentified
MLSIGIDVSKGKSTVCGMKPGGEIVYAPFEIQHTREGMSELVSLLHNSCEEVRAVLESTGSYHCPVVAALLENGIFVSVVNSLRMKRFCSQSIRRVKTDQIDAMQIALYGLAYWQELQPTRLPEDTYRELQLLARQYYQMTSMLIKAKVDFNAICDQVLPGMQELMSDHAGRHKLSDFVLRYHHTTHILEMGETRFRKDYCKWAEKKGYRNCERMAALIFATAQNGIPVLPDAPSTQIVITEAIRVLHTVEASRDAILTQMQALAKTLPEYSLVREMPCIGDTLAPRLIAEIGDVRRFHSKRALIAYAGIDAPPYQSGKFCANNRHISKRGNRYLRKTGYEVMQSYVMHKPANDPIFTFIEKKRGEGKSGKLAMVAGLNKFLRVYYGKVTELYRSLSAIE

SEQ ID NO: 201857 - protein, 439 aa, unidentified
MDSGSNAKRALNQRTKSGAAMKHWNEITHYAGLDWASDHHDVAVVDQQGKVARQFRITHTAEGWKELADQLRELGTVAVAVETNQGFTIERLLASGVTVYPVNPKSAERYRDRKAPSGVKNDQLDAWSLADALRLDGHGWKPLAPEDPLIAQLRLLTRDEVALIEQRTALVNQLIAALRDYYPAALEAFDDWAMPATWAFVEKFPTPEALVKAGKRAWEKFLHTHRLYRPETYERRLEIFARADQFTGSAALTAARSLLAMTLAAVLRTLEDQLKLYRKHIEEQFARHPDRDLFGSLPGVAAKLGPRLLAELGSDRSRFESAQSLQCYAGTAPLTIQSGQMTKCMIRHACQHGLRATVHLWANTSRFACAWAQGYYQAHREKGKSHACALRCLGQRWLKILWKMWQTKMPYDAELHAKNQQKHGSWVLKLEPVNAAKLA

SEQ ID NO: 201858 - protein, 369 aa, unidentified
MKKNSIRSKSPTACKKARRVTIGMDLGDKTSRFCVLDDDGQVVREGSVGTTQKAMTQVFARLGRCRVALEVGTHSPWLSRLLKSFGHEVIVANARQVKLISQSSRKDDRLDAQTLARLARVDPQLLRPIRHRSERAQRHLMAIRVRASLVEARTGLINSARGLAKAIGERLPSSDTDQMGVERLEELPAEVQETLRPLLAIVESLTEQIQASNKKIEQIARNEYPETELLRQVSGVGPLIALTFVLTVEDPERFQKSRDVGCYVGLRPKRSSSGESEPQLRITKEGDVYLRKLLVQGAHCILGRRGPDTDLKRWGLRLCARGGKNAKKRALVAVARKLAILLHRLWVTGEVYEPLRNSQAAPAAHKAAA

SEQ ID NO: 201859 - protein, 433 aa, unidentified
MDIIYDKCCGIDVHKKLIVACFRCGKKQDVRNFGATTRELLELADWLKEGGCEMVAMESTASYWKPLYNILESSDLNAMVVNARHMKAVPGRKTDVKDAEWIADLLQHGLLQPSYIPDKDQRELRELVSYRKSLVGERTRELNRLQKMLEGANIKLSGTVTDINGKSARSILEYLLTGEFIDAAKYDEMYEKKIIAHNLKANKEQIIDDLNGVRSPLQRRMMKELLAHLDELNKHIKNLNDEIDNFMKPEEKQASQAIQDITGIGNTSAQAIISVIGTDMTRFPTDRHISSWAGLCPGNNESAGKRKSGKTRKGNSLLRTTLITCAHSAVRNKKSYFYAQFMRISAHRNPKRAYVAVAHSMLIAIYHILNEGVVFKDLGADYYNQFNKEHKINAYLNRGSLRFLATRKLLFHSKVCNILNITASHSSHRHPQY

SEQ ID NO: 201860 - protein, 420 aa, unidentified
MGFIGGIQQESFVGRIRDREREQMLAVAIDVGKRTAAALVCDFWGELVGEPFEFGLNEHGFKAMSAEIARASAARNATWVRVGVEQAGHYHQTLIARLQADSYDIVLFNPLQVKENRSQDLVAALKSDARDLGAMADLLTRGKGRAPFHADAAMATQAALAVHRARKVKARTALKNQILASLDVVFPGLGDCFEDIFKSRLGLLILREGLEPRRVRRLGPERLRSFARHRGLRTRGATVERVVQAARQALLLPEERASVHARVLAADVSLLGRLDAEVSETEAGLAEVLPRTPSGILVTMPRVGVVRASGYGAAIGDPHRFQSASQVYRFSGLVPRLYESAGRRRPGTHISKDGKVDLRQALLQLGLALRTGHEPSAHYARQLQARGKATGVVACALANRANRIAFAMVRDQSPFDSRKW

SEQ ID NO: 201861 - protein, 354 aa, unidentified
MIIIGVDFHPAYQEIAAVNTDTGEYQEKRLAQPQEAEEFYGSLAWVGQAVGVGMEASGQAQWFERLLEGLRWELWRGDAAVIRAKRGRKQKTDREDARHILKLLLKDAFPRIWVASWENRDLRQLLWHRHRMVQARTRVMNQLQAVALKEGLHCKKRLWRASGRQQLECLQLVPWSSRRRGELLELLDRLNPTIAELSQAVEREAEKCPEAQRLMTHPGVGALTALAFVLIIGNAERFGCGKQVASYLSLVPLEKSSGNRRRLGHITKPGSSLVRFLLVEAAQVTVRSVPEWRSKYHHLVLRRGRKTAKVAMARKLAVRLYWMWRKGWDYEQWKKFGSYVGQPGNRDGVQSITE

SEQ ID NO: 201862 - protein, 357 aa, unidentified
MTTQQKQSCLFIGIDVHKDTHTAVGISPYGEKLFEIMVGNYKNDFENLTNKVEEMKGTLSPFFGLEDVRGYGERLAGFLYEKYPVYHVPSILVDRQRQNATHPEKSDSLDALGVAKVMIQSIDTLLPYTISKESEKAKQIKEISIDREDLVLERTRLKNQVHTLLYRIYNTEYEQKFKDPFSIKALRFWSKAKPKCDPYLLKTMKRKIRRLLDIHTEVVDLEKDMDKLLTEGEYTIQTASGCGVVIASTIIGEIGDITRFTSPGALSKYAGCSPRERSSGKKTRHVKSRSGNRRLNCAFHRMALSQISRMGNDMAKTYFKRKISEGKSKSQALVCLRRQMVNVVWMMLKHKTIYRNA

SEQ ID NO: 201863 - protein, 397 aa, unidentified
MIAVGIDVSKSKSTVAILNGDGSIRAKPFDVHHVADELQALVDYIKRTSEPPTILMEPTSHYHYPLLKAFTEAELPVCLINPYQMKKYGDTELRKAKTDKRDSLRIAQYALEKSYSLIPYTPQDQKYEDLRFLSRQYSQRISTLTVAKVQLLSLLDETMPGITTILPLKSRDPDNCVLLRFIKRFKSFDVIRKMGKTRFLDSYQVLVKKTKDRFAGSKGLAIYELVLNSVTTRGENPLSAMTQYQCVDLVSTSQKAADEINLQMRIIAETMPEYKVLRSMAGVGDRLGPIILGEIGDIRRFHSGKALNAYAGNDAPPYQSGQFESRNRHISKRGNPALRKACFEVMQALKLTKPQDDPVYLFLLKKEQEGKPYNVAKMAAVNKFLRIYYARAMELYK

SEQ ID NO: 201864 - protein, 342 aa, unidentified
MYYIGLDVHKKTISYCVKDAAGKIHQEGKIGSTRRELDAWIKTLPQPRMMAMEATIFTGWIYDHLVPHAEKVKVAHPLMLRAIAAAKRKNDKIDANKIADCLRCDFLPECYMTSTEIRDRRRTLRYRGLLVKQMVQMKNRISGLLMEAGVSYNKQRLHKVGYFAELMSGNEEIDCVRPLLKLSRETINRSQKLDYALVSSLERDPLLSERLKRLRTVPGVGPITALTWVLEIGDVARFQSIKQAISYCGLCGAEKSSADKVMRTPISKQRNKHIQQVLVEAAKLAPRYSHELALIYEKEKQQGNRNRATLAVARKMVAWMVAVERRKQDFVPAEERGGTVAA

SEQ ID NO: 201865 - protein, 365 aa, unidentified
MLHRTSIGLDVHARSIAAAAFIPETGEVLQKSFGYDADAVVSWAKALPQPAWCVYESGPTGFDLKRKLDESGLECLVGAVSKMIRPSGDRVKTDKRDAVFLARMLAVGNVVECRMPDAATEAARDLARIRADCREDLMRARNRLSKFLLRKGIVYEGGKSAWTRAHSAWLSSISFGDPCEQLVFQECCEDVRALTLKRDRLDGAIAKRAGQNDISATVKALECLRGISTVTAFSLVAEIGDFSRFPDAKSFMSFLGLVPSESSTGGHVSRGKITRTGNKHARTLLVEAAWHHARTLKPLSRASLEGAPGVPAAIAEEAARANMRLHGRWIHLRSRGKSGAVANAAIARELAGFVWSIGRMAQAGS

SEQ ID NO: 201866 - protein, 382 aa, unidentified
MARTREGARRVTRSGARGAEDVADDVVLGVDTHLDFHVAVALDRLGRRLGEIKVPTTAEGYERVLRWAEGFGPVRCAGIEGTGSYGAGLARHLKAAGIAVVEVERPKRRHLRRRGKSDPIDAEAAARTVLAGQAAGEPKNGDGRAEMIRTLRSARQSAVKARSQAANQLQSFMVTAPEELRHRLRGLSTKELLAAAARFRPGNEPEDVKAATRFAMRSVARRYHSLSEEIAELDAHLHRLVAEAAPGLTSLPAIGTHHAATLLVLAGDNPERLNSEASFASLCGVSPVEASSGKVVRHRLNRGGNRDANRALHMICVVRMGSDERTRRYVARRSAEGKSKWEIMRCLKRYIAREVYRVLLSSAAAEPPPSGITKPVLGADIA

SEQ ID NO: 201867 - protein, 307 aa, unidentified
MNSKNYIAIDIAKDSLAVISDSFSGSFDYDNKGLKTLLEQLRRIESALVVCEATGGYERKLMELLFSHEIPVALVNPARVRAFARSEGAKAKTDPIDALMILRFAQSKDLSPTPVPSEQQRTLQALMDRRSQLTESLAREKNRLQKSPKCVIKSVEKMIRIIERELKALEQKMEKLIDEDESMCRQDSIMQQVCGVGATTSWSILAYLGEITALKRNQLVALAGVAPYNRDSGKFKGKRRIEGGRAKVRKCLYMAAQSAAVHNPHIKEYVDGLRSRGKPYKCAIVAAMRKLLIHLQSLLKKQELELA

SEQ ID NO: 201868 - protein, 312 aa, unidentified
MEMTYVGVDVSKDRLDVHVLPEGAAFAVVRDGKGLAELVERMGTLGPERIAVEATGGFETVVAAALAGASLPVVVVNPAQVRHFAQALGQRAKTDPIDAQIIARFVEATKPDLRPLADEATQLLADLVARRRQIIEMIVAERNRERRVAVKRIKKSIARLIAALEKELAEIDAEIDASVRGSPAWRDKEDLLASVPGVGQITARTLIAELPELGALNGKQIASLAGLAPFTPQSGQWKGKAMIAGGRKSVRSALFLASLAACRHNPVLKASRQRLIDAGKPKMLVAIAAARKLLTILNAILRDKQPSRPENA

SEQ ID NO: 201869 - protein, 343 aa, unidentified
MKPAKHSLGIDIAKDKFDVNLRTLESAEGRSATTFKNNPKGFKALHQWLVKKGAASSELVHACLESTSRYGDALAQFLHQNAYQVSLVNPRRTRRYADSQLTRNVNDKIDAGLIADFCAAQRETLSLWEPLSPEHRQLRDLTRARQTLVEERERFANLLETASGLARNTFLKQVRQLDQQIKQMDKAIKQFLRLAPDLHKQVELADSIKGVGWVTAATVVAELPPIDKIPQAAQAVALFGLDPIKKTSGSSVDTPARLSRMGSRRGRRALYLPALVALKWNPIIRQLGQRLQNKGRSGKYVIVAAMRKLLRLIYGVLKQGCPFDPNWNGKAQRAPKTQTPVLT

SEQ ID NO: 201870 - protein, 408 aa, unidentified
MEVLHARCCGLDVHKKTVVACLLTPGLGGQPVREVRTYGTTTGELLALMDWLVGNGCTHVAMESTGSYWKPVYNLLESTFELLVVNAHHLKAVPGRKTDVRDSEWIADLLQHGLIRPSFIPSRPERELRELTRYRTTLIRERASEVNRIQKVLEGANIKLASVASSVVGVSGRAMLSAMVAGVVDAEAMAEMARGKLRNKMGALKAALEGRLGPHQRFLLAAQLRHVDELDKLIGEVSIEIEERLRPFEEDLVRLTTIPGVGRRTAETLLSELGTDIGRFPSAGHLASWAGICPGNHQSAGKSGTGRTRKGSPWLRSALVEAARAAARSRTYLGAQYHRIAARRGGNRATVSVAHSILVILYHMLSTRRDYHDLGGNYFDERHREQVSRRLTRRLEALGYSVSLSTAA

SEQ ID NO: 201871 - protein, 371 aa, unidentified
MMNATTFAGLDVHARSIKAVALDVVTGEVRSATFGYDACAVAEWIRSIDPGARCVYESGVTGFDLQKKLSSLGVDCVIGAVSKMIKPAADRRRKNDRNDAEFLARMLSVGNIVEVWVPDDECEAARDLARALDDAREDLRRQKQRLSKFLLRHGLVFDERTPSGQRKGNWTGAYWSWISSISFAEKADNDAFAFYVDAVRQAEEDKRRLEKLVADEASRPRWKKRVDSLRCLKGIDVMTAADIVFEAGEFARFRNARSFAAWLGLTPSEHSSGEKVAQGGITKAGNKHLRRVMVEAAWHYLNASPHSKGPAPGQAPDPAARRHASKGVRRLVGRRAALLERGVHKNKANVATARELACWCWAVGSMAEGAR

SEQ ID NO: 201872 - protein, 395 aa, unidentified
MISVGSDVSKGKSTVCILKPGGEVVKPPFEMEHAVEILDSLVSLINSFDEETRVVLEDTGHYHLPVASYLSSHGIFVCCVNALRMKKFCAQSIRRAKTDKIDAVRIASFGITYWSELTRAYDAPDTYGELRFLARQYYQITSILVKAKVNLSNLLDQVMPSISNFLHNQKDNHKLTEFVDRYIHFQTILNMGDKKFTADYCKWAKKKGYRCNERKAAEIFALAQNGIPSLPNSKSVKIAVREAIKLIHSTEESRNTILAQMQALCKTLPEYSVVRDMNCIGDALAPRIIAEIGDVRRFRNKHSLIAYAGIDAPPYQSGAFNASERKISKRGNSYLRKTGYEIMQSLIQHKPIDDPVYDFIQKKRSEGKCGKEAMIAGLNKFLRVYYGKVMQLYSK

SEQ ID NO: 201873 - protein, 396 aa, unidentified
MPEIWAGVDIGKEHHHCVVINADGQRLLSRRVLNDETELLQLIADILEISIDVLWAVDLNHGGAALLIGLLLSHDQPMAYLTGLAVHRASATYKGEGKTDAKDAFVIADQARVRRDLGLLRPGDEIAVDLRTLTTRRLDVVFDRTRQINRLRAQLLEIFPALERSLDLVNKGPVMLLTGYQTPAAIRRAGAKRIETWLKNRRVRGAAALARTAVEAAQAQQTALPGEKLAAAMVVRLAKGVMALDEEIAELDALIEAKFREHPHAEVIRSLPGMGTKLGAEFIAATGGDMDAFGSADRLAGFAGLAPRPRDSGRVSGNLRRPRRYHRGLLRAMYLSAMASLKGCPASKAYYQRKRSEGKGHKQALLALARRRLNVLWAMIRDGQCYQGSPPVTVAA

SEQ ID NO: 201874 - protein, 320 aa, unidentified
MMAQNDLVVAGIDVAKDKVDVCIRSLSLRRAFASTAEGRRELASWLRRKKVGKAVMEASGGYEREWAKALRDARIEVRIVDPKRVRSFARSAGRLAKNDAIDAEMIAWFAETFDEAKGQAYDAAREKLVQIVHARQGLLDLQTSLQNRGEHTAPEVVQKMQGRLLKKIALELAGLEAAIAAMIKATAHFAELAEIIESVPGLGGITAAGLIAAMPELGQVSNKIAAALLGTAPYDDDSGRRRGERHIKGGRRRVRNLFYMACLGAATRHNPMLKAFYQRLLAKGKEKKVALVACMRKLIVILNTMIARGEKWDASRYALS

SEQ ID NO: 201875 - protein, 412 aa, unidentified
MELLHRRCCGLDVHKETVVACLRLVSDGKVTTEVRTFQTTTADLLRLSEWLAANECTHVAMEATGVYWKPVWRILDDGEFALVLANAAHVKNVPGRKTDVNDAMWLAELLAHGLIRASFVPDAQTQEMRNLLRTRKQLVREQSSHVLRVQKTLEEANIKLDSVLTDLMGKSGRAIIEALIAGETNPVKLAGLADRRVKASSEEFREALRGHVTKHHRFLLRLHLNQIDALDAAMATLDAQVEANLGPFRTAVELIGSIPGIKNLGAHVIVSEIGIDMSRFPSAAHLISWACICPRNDESAGKRRSNRARKGGTWLKTTLVQCAWAAVKKKDSYLQAQFYRIKARRGPKKAIMAVVASILTAIYHMLKDGTMYKDLGRNHFDRRSSDQQKNRLVKRLVDLGYVVEIKALAATA

SEQ ID NO: 201876 - protein, 424 aa, unidentified
MLIHDAIGIDPDSQQYVCMYVKAEGGVTERKAFPVTTSGLEKLIEWTRSKDGAIIAIEGCNGQSKPLEKVLRKESLTFYSFKARDVEQKRKSQLSAGKNNEKDAHAAALLAIERELNGSLERWRRVYPTDTELQTVTRKYESVSGKITEEISALWKLLYEASPDIYLFLSGKNMETENRRNILNSAGILNLLGNCPDLSRWKKLSEGELKEMMGGGSYKGRDSIISGLKVAAKGIYNVPKSIPMMIRQSAENILLLNGHKEEMKHILEDLAKSRDSILELMYDESGKGLKGIGVITAATMVAEIIHINRFVKEDSLALYAGFGMVEDETGKKKPSDRKKMKHSHEFNRRLKNAFMNAAKNFVQWNPDHHLAGMHRNLIKKGMSRLEANKRVARALVRKIFRILKVYVELESTKKMEENGAAKVG

SEQ ID NO: 201877 - protein, 345 aa, unidentified
MNYIGIDLHKRFSQFTILGEEGQLLHRARIDNRKEEILSHLNNFDEPSKAVIEATFAYGWLADLLTDNKIEVMLAHPQKVKAIASAQIKTDKVDSEILAKLLRADLIPQAYYSKKEEREVKELLRCRGSLVGLKTQIKNKIHSLLHKANIREDEKFTDLFGKEGKSFLNNLKLGEKSTFALKEYLSILDSLDERIRETSSEVKEVFENDKQAKFLERLPGLGYYTSLILSKEIGDIQRFRTAKNLVSYAGLAPSTFQSGEHTRHGRIKQGNKYIRWVLIEAVPKTIKKDNVLKDFYLKILNKKGHNKAKIATARKMLAQIWYLLTYKKEFTDPETGSPVFFSGHS

SEQ ID NO: 201878 - protein, 332 aa, unidentified
MKSLKQSIGIDVAKDTLVCCIGGSDQNEQFSFSKTKTFSNDIKGFAQLMQWVTPSKGNDVVFVMEATGVYYENLAYWLDSKGEKLSVLLPNKVKHYAKSLNLKTKTDGVDAQLLSRIGLERKLTLWTIPSRIMREVKFLSRAYREDKAKLVIVKNQLHAKEHAHGCPASVIKRLKKQIAFLQAQLLETEAELRVTVMSDSLLSDKVTKISTIPGISFMTIISILAETNAFALVENAKQLVSYAGLDIQQNQSGAKEGKTRISKKGNSYIRNALYMPALCASKHNPDMKVFYNRIIEKKPAKKIGITAVARKLLILTYILWKNDTEFELEHAK

SEQ ID NO: 201879 - protein, 348 aa, unidentified
MIVIGIDPHKSTHTATAVDSRTNSDLGSVRIRSSFDDYVSLMTWSKAWPDRIWAVENAAGLGHHLTQWLISRGEAVVDVPSTATARVRELSRGGRRKNDRIDAAAAACVAFTQGDFRPVGPEDHTDVLRILDERRIDLVQQNGRLINQLHALLRELWPGGIDRNFDPEDAARQLKAFQPATAADAIRKKVALDIVGDLRRIRFQIDDLTTRIKTELTASGTQLMKIPGVGTVTAARLLARTGDPHRFHSEAAFANYTGTAPVEIASAEKTRHRLSREGDRALNATIHIVAVTQARMPTSAGHAYHQRKMAEGKTSREAMRCLKRQVAKRLWRTMRDDAQRRAQAEAAA

SEQ ID NO: 201880 - protein, 357 aa, unidentified
MERYIGLDPHGTSCTFGVIGPSGRKLRHDVVETNGAALVQYLRNVPGRKHLCLEEGTQSAWLYEILSPHVVEIVVAGISKSRGQKSDELDAFRRAEELRTGTIETPVFKAPRMYGRLRELARVHTMLVRDVVRVQARVKVMYRARGIATPGKSIYGPGKRDQWLNRLPVSSRWATEKLHDEYDQLLELKREAERELVAEARKHRISRVLATAPGLGPIRVAQLLPIVVTPHRFRTRSQFWAYSGLGIVMRSSSDWVQTQAGGWARAQVQQTRGLNRRHNSTLKGIFKGAATTIVTRLHADPLYEHYLRLTSGGTKPNLAKVTIARRVAAIVLRMWKDEKEYDPGKLKQQAFLASAVS

SEQ ID NO: 201881 - protein, 350 aa, unidentified
MQYIAFDSHKRYALASVAQPDGGILHEGRIPHTRGALRNFLARCEPGSPVAVETIGSWYWIVDEIEQAACVPRLVHARKAKLMMGMINKTDKLDARGLNRLQRNGTLPMVWIPPGPLRDLRDLPRTRMLFVRQRTQLKNRIHAALAKYALSVTEVTDAFGKRGHELVRARLAQLPPHTAYATELQLAQVDHLEGQIRLLEARMREAVETTPAIAWLQTLPGVGFILAVVIAAEVGDVRRFATAEKLAAYAGTVPRIHASGGKVRYGPARSDANRTLKWAYVEAANCISAHRARQPARFVTRLYLRIARKRGHPKAILAVGRHLAEATYWILTKGEAYREPRSAPGPSTEA

SEQ ID NO: 201882 - protein, 353 aa, unidentified
MRNMDAVGIDLGEQTSFVTVWEHERGETFSFPMTTEGYVLLKDRIPPSARIVFESSGTAYPFHRQLRELGFRDITVAHPKELAWIVKSKKKNDKVDSVKLAKLHSVGMIPEAHLLDREDQIFRDLLLQRVRLGNETGEWKSRITSYLKREGLWQNLPPSTDSFSVARRKAMRALSFGDERDLVLSSMLERLESVEKLSVTFEEKIRARARESEEVKLLMSIPGTGYYLASLLCSYIGDVRRFPDADHLASFFGIVPAQRESSSKRKMGRMSKEGPSEARWALGVMVDTVAKYDTHIAEYYTHAKARTGNGKLAHVLTAKKLVRMVFAMLSRREPWKWERTALTERKLEDLETD

SEQ ID NO: 201883 - protein, 388 aa, unidentified
MEPASIHPTAVRTDLGAIFVSLELSRSTWLITSLSPGSGEKMSKHVVAGGNVAELLDRFEQLQQKARLRTGKLFPIVTIQEAGLDGFWIHRVLEARGIESYVVDAASIATSRRRRRAKTDKIDGEALTRTLLAFKRGEPRVCAMVRAPDPKDEDRRRICRERKVLIAERVRHVNRVKGLLFAQGVSGYQPLRKDRRKRLEELQTGDGRELPKHLKAQINRELDRLELLLEQIATVESERNSLLSTYEQPAVEATSPAAMLLSLKGVGAEFAAVLWTEALSRHFDNRRQIAAYAGLTPTPWMSGTIDHEQGVSKAGNPRLRTTMIQLSWLWLRNQPASALSRWFVDRVQLNGGRLKKAAIVALARKLLIALWKFVTAGVVIEGAVMKTA

SEQ ID NO: 201884 - protein, 351 aa, unidentified
MKYYTTTTEYNCGIDLHARQIYACLMDRQGKVLLHTNIQGNDFDYFLKRVEPYRHDLTVVSECTFNWYWLADACEAAGIKFVLAHALYAAHIHGGKNKNDRIDSEKLAHLLRSNLIPPAYIYPSERRPIRALLRQRMSYVWHRAELMTHLSMNQTAQNCVPAQKGGHNRDVWQERILAQTPNPYHQLAVRCDMDAVRTYDELIAKLDGTITLHARHHQSRDYTLLQSVPGIGDVLAMTILYEIDTIQRFPTVKDFTSYCRLVKGSVASAGKLKGLTGGKMGNAYLRWAFGEAAVICKRAHRLISPYADRLVAKHGTFKGNAILANQLARAVYFMLQSGQAFDPERVVKASV

SEQ ID NO: 201885 - protein, 344 aa, unidentified
MSIKVVGIDIAKNLFQVCVLGTNGQILSNRKVKRDKLLDTVRQLPEQTALAMESCATSHHWGRIFQELGYTVALIPAQHVKPFVGRQKNDANDARAICEAYSRPNLHFVPVKSVEQQDLKAIRSVRKRLVENRTALANQIRGLAAEYGVVFPLSIKALRSHLPLALEDAENALSPVMRNLLQTLYCDFVSLSEEIDEMTQSVTILSQQNPKYEAIRNIPGFGPILTAALISEVGVGNQFKNGRQFSAWCGLVPKQNSTGGKSSLGSLSKNGNRELRALLIHGARAVVRCGANKTDAMGAWLRGLIARRGKAKAIVALANKLGRVAWHILAKNSEYDINQAFKPV

SEQ ID NO: 201886 - protein, 349 aa, unidentified
MAMTIVEAAPGITGGVDTHLDTHVAAALDPLGRLVGTEAFSADAAGYKALFAWLEDFGEVTKIGIEGTSSYGTGLVRFLRRKGVEVVEVNRQNRQSRRNQGKSDPLDAIEAARAAISGRASGSAKSKDGPVEAIRVLVVAKRSARQARVKAITQMRHLGFTAPEQLHCRLKGMTVTALVAECAGLRPGRSGDPVTAATKASLSSLAHRVQSLNVELVGLDEKIESLLVATVPDLLARFGVGPDTAAALLVAAGDNPERLHSEAAWAHLCGVSPIPADSGKSAGHLRHHQGGDRQANSALWRIVMVRIAHDPETTAYFERRVKEGRTKRDVIRILKRYVAREVYRYLPRG

SEQ ID NO: 201887 - protein, 345 aa, unidentified
MEIIRVGVDLSKQVFQVHGVNRREQVIWQRSLKRKDWMRELCAHVRPGGEIGMEACAGAHHWARELQSRGYVVKLIAPQFVKPYVKSNKTDRNDAEAICEAMSRPHMRFVPVKNTDQQDIQAVHRVRSELVRQRTSKANQIRGLVAEYGLVAPPRIAFLRRAIPEWLEDPDNGLSCSFRRLLSGLWEDLRTLDRRVAELDDELQSIAKAHPVAQRLQQLRGVGPVIATALIAALGDGCAYRKGRDFAVSVGLTPKQHSTGGKERMLGISKRGDAYLRQLLVHGARAAVRTAGQKDDNLSRWIQSLLARKHTNVVVVALANKTARMAWALVRGDVDYDPHRAAYGV

SEQ ID NO: 201888 - protein, 341 aa, unidentified
MDIDILGIDLAKRVFQLHGADRRGHALHSSKVMRAELIGAVRKLQPRVIAMEACSSAHHWGRQFQGMGIEVRLISPQYVAPFVKTNKNDANDAAAIVEAACRPTMRFVTVKTVEQQDIRAVHRARELLVHQRTALINQVRGLLAERDVIMAQTPTAFKRSLPSILANCEGELTSICQTLVTELLEQLRVLEERIARTNQWIMSFMKSSELCKKIETIEGVGPITATAMVAAVGDAKEFKNGRHLSAWLGLVPRQYSSGGKSRLQGISKRGDTYLRTLLIHGARVVLRYAIGKADARSRWLQELIARRGYNRAAVALANKNARVIQALLSGEESYRSPAVQA

SEQ ID NO: 201889 - protein, 411 aa, unidentified
MDLMYRRCAGLDVHKDTVVACARVVGEQGVSKDVATFGTTTAELLKLSDWLTERSCTHVAMEATGIYWKPVWHVLGDGGFALILANAAHVKNVPGRKTDVNDATWLAELLAHGLIRASFVPDAATQEMRTLLRTRKQLVREKASHTQRLQKTLEDANIKLDSVIADILGVSGRAMIEALIAGESDPAALAALARRLKAPDDKLRAALRGRVTRHHRFLLRLHLSQIDALDAAMADIDTEVEAHLAPFRTAIQRLTSIPGVSDLGAQVIISEIGIDMSRFPTAGHLLSWAGLCPRNDESAGKRRSTRLRKGAPWLKTLLVQCAWAASRKKQSYFQAQFLRLRSRRGAKKAICAVAASILTAAYHMIKDGTFFHDLGTEHFDKRNKDGQTKRLIRRLAELGYNVTITYANPNP

SEQ ID NO: 201890 - protein, 443 aa, unidentified
MMAHRGSTARGMDIVLEGAVMTKKREVRIAGFDCAEEKHRVVLLDAKGKVEKELGITNRKDLVQEGLAELLLVLPEGTKLVVVVESRRSHGRIVSEVADQLGCEVWVVNSVALNHYRPVEGQPHKTDPWDAYLAARMAYDEKLGCRVAAERTQEERVLSRLTRLQGQVTKTRTQHVARLRANLLELAPEILHSSWKGPKSNSKAIVYLLERWPAFEGMERARLGTIEKVLHKCRYGNKAPGIARSLRDMAQRIGIAGDERAVVAMEINYLIEQITACDRMLHDLVAEIGEGVEAHEIGLKLLEMSGVGVITAGVIIGELLPVARLASEGQCATYAGLTPLSRQTGKGKNRRRIARGVNKRVLHALYTSAVAAISRSTLDRAYFEKKVRDYSGHPRPSVAAFIALARKRHQVLYKLMTTNERYDKEKLISSHLARLDQARLATA

SEQ ID NO: 201891 - protein, 342 aa, unidentified
MQITTIGLDIAKNVFQVHGIDAAEKVVVRKQLRRRQVLEFFKAMPPCVIGMEACATAHYWARELTKLGHRVRLMPAKDVKAYVKRNKNDAADAEAICEAVRRPTMRFVQIKSTEQQGRLMLHRTRDLLMRQRTQVINAMRAHLAELGIVAAQGREGIKELLKIIASEEDARLPVDAHTSLVVLAAELQAMQTLIGSIEKRIMAQHRANEVSQRLEGIPGIGVIGATAIVATVPDPKVFRSGRDFAAWIGLVPREDSTGGKQRLGPISKQGDRYLRRILVVGACAVLRYARQQPEKYPWLTQLLARKPFKVVAVALANKMARIAWALLAKGDTYRAPALAAAA

SEQ ID NO: 201892 - protein, 401 aa, unidentified
MEPHLCVGIDVGCRTHRVGIARPDGSILEEFDISHDQVGFAMLFGRIEKRRQDLSLPVAVAMEGFNGHARPLDRLVQEKGYKLYNVNNLKLARFKEVFPGAAKTDAIDARKILELFVLKDHLPVAKNALQEVFGAPEVNNKLKRLTRRRKGLVLEKARLLNRMQSDLQAVSSELLAATVSADNLWFLRFLTCRKDLRQLARLQRKTVLEIRGVGQKYARVIEAWQKKAHFSSEVEYVGPMIIADAKRILELHRQIHALDQTLEGLAQESKITRRLSSIGGFGKTSVAELAGEIGTRKRFASEGSLALYLGMCPLTRQSGETSKTKQARQVNRRAKAAMMTAVAHHARCVPESKAYYDRRRAQGKRHNQAVRALGRHLVRVIWAMLRDERDYEAREDIHPVT

SEQ ID NO: 201893 - protein, 409 aa, unidentified
MRPILRSCCGIDVHKSMIKACIAKGPLNKPPKIEIRTYSTMTSDLIKLSGWLKENKVEAVAMESTGVYWKPIFNILEADFPVSIANPKYLKKVPGKKTDVSDSEWIATLLRCGLIPKSFIPPIAIRELRDLNRTRRKMVEHMSSEKNRLQKVLEDANIKLASVVSKVDGVSSMKMIHALMNQDEITREDVASMVHGNLKNKIDLLVQALDGRLTDHHRYLLRVHLKQIAFLADQVKELDDVIKRKMKAFKKEDDLVQTFPGISKNTASAIIAEIGTDMSQFPDEAHLSSWAGICPGNNESAGVKKSGKIRKGNKYLKATLCEAAWAASKKKGSAYSAFYNNIAKRRGKKRALVALAHQMLMDIYRTLKTGEPYVDEGAEAVFERNSSGRQKSAIRLLENSGYIVTKASA

SEQ ID NO: 201894 - protein, 352 aa, unidentified
MIIIGVDYHPEFQQIALLDQDTGELQEKRLSHPGEAEKFYRALAVSQKVRVGMEASGHARWFERLLGELQFELWIGDAAAIQSKRGRKQKTDRQDAEHILKLMLKDDFPRIWVPSGENRDLRQLLWHRHRMVQARTRIMNQLQAVAINEGLRCKKRLWRTGRQQLALLRLAPWASRRRHDLLELLDRLNPTIAELSQAIEQEAAKCAEARRLMTHPGVGALTALAFVLIIGDTERFQCGKQVASYLGLVPLEKSSGNRRRLGHITKQGNSLLRFLLVEAAQVTVRSLPEWRSQYFHLLMRRGRKTAKVAMARRLGVDLYWMWRERRDYQSKSSVRTQDSPEQAMVCNRTPRN

SEQ ID NO: 201895 - protein, 381 aa, unidentified
MRQVCGLDVHKDSVFACILNENGVIFQEKFGVLTPELEQLAAALQEHDVSEVCMESTSIYWMPVWRVLEPYVAELKLVNPYFIKQLPGKKSDVKDAEWIATCLLKDLISGSYVPADIIQQLRQYDRRISDLNAECVRKLGKLDAALQRCNIRISNYVATTDGKSYKDVVRLISEGIRDPAELLKVIHGRITNRVGKDVILASLTGIISETDIDVIRQLREEVDLAQRHKDECQSKMDVICQQFFPEQLKNLQTIPGVKGRSATAILAEVGSDVSSFQDAAHLVSWCGLKPRNEESAGKIKARSITHGNRYLRKTLIECSWAASKTQGCYLKRFSYYQTVIRRKNKMKVQVAIARKILTAVWHVLHDNVAYRDHNPDIAPAT

SEQ ID NO: 201896 - protein, 369 aa, unidentified
MLHHGIPYNTTSQDHREALPIFFQPFNGLFMNILKQIFGIDVSMDNIEVRFGTTDINQNQVIFNSITFKNSTSGFKKLLLWVKKAIVSKDIPLFFVMEATGVYYENLAYFLFLNNFNVAVILPNKIHNYSKSLESKSKTDPIDAATITRFGLERKLNLWSPPNNLVKSIKSLCREYYSIKTMVTEVKNQLHAKNHSYLPDKQTIKRKTLLLKMLDKQTKQIEKDIYDIVQKDKELFDKIERLDKIKGLGFISIVTVIAETNCFELVTNQKQLASYAGLDVVFNDSGIKKGKTSISKKGNKFLRKAVFMPALSACKHNHKMKELYLRLLSKGKNKKLAIIAVARKLLLLIYTIWKNNTEYIPNYNPCLLK

SEQ ID NO: 201897 - protein, 414 aa, unidentified
MQQIYERVAGLDVHRDSVVACFRQLGPRGGVVREKERFSTTTAGLQVLEGWLAARDVQLVAMEATGVYWKPVLYALERRFTVWLCNARNVKKVPGRKSDLSDAEWLADVAAHGMVRPSFVPPLPIRELRELTRYRKTQIDARVAEIQRLEKVLQDAGVKLTSVASKVLTQSGRLMIEALIAGEQDPARLAALAKGKMRPKIPALTEALAGHFGAHHAVACRRILGHVDFLDESIGALTEQIDARTAAFDAVYKSLLPVPGFDRLTIDVIIAETGADMTRFPTAGDLASWTGVCPGGHESAGKRRRVSTTPGNRWLRRALIEAARAAVRTKGSYFGAQYRQIARRRGPNKAAVAVAHSLIELVWHLLSTGEVFKDLGDDYFTNRQDPERRARRLVAQLQELGYAVTLEADPAIAA

SEQ ID NO: 201898 - protein, 483 aa, unidentified
MKPKPKEKNKGATNHPTQHHWHEMNRKQRREMMRKMQSEDLSLEVIHPDAAGIDIGNESHYVAVPPGRDSQSVWRFGCTTAELKAMAAWLKQCRIRTIAMQSTGVYWVAVYDILEQAGLEVYLVNARDTKNLPGRKSDVQKSQWLMKLHTYGLLRNSFRPSQEIRVMRTYWRQRNDLVQSAGRHILRMQKALTQMNLQLANVLTDISGATGQAIIKAILAGERDPHRLAEFRDPRVKASKEQIAQSLEGNWQEDLLFVLKQEHEGYEFCQKQMAECDRQLAQYLQQREDRSHGAPLPEENRQGRRKKKRANKPQFDLREGLFRMTGTDLTRIDGIDVMTATTVISEAGYDMSKWKTENHFVSWLRLCPDNRISGDKVIGKGRLPTNNPISIALKMAASTLRETKTYLGAQFRRLRTRLGAPIAIKAMAAKLARLVYRMLRYGMKYVDQGAAFYELQHRELQIKRLKAKAEKLGYRVTPIPAAA

SEQ ID NO: 201899 - protein, 341 aa, unidentified
MKQYVGLDVSMEETNVCVLDDAGMVVFVGSTPSRPEALTKLLRAQAQHAERIALETGSLSSWLWCELKAVGFPVVCLDARHANTALSMRISKTDRNDARGLAELVRIGWYREAKVKSMGSRQVRAVLAARSKLVDLRRDLENQMRGLLKSLGFVIGKAGVRVLPSRIAALLREAPHLRPLIDPLMAAHSILAKQVAKYDAQIRELAKANQTVRRLMTVPGVGPVTALAFVSTVDDPHRFARATDVGAYLGLTPRRYQSGELDRNGRISKRGDRLARYYLFEAANVLLTVVRRPSSLKSWATKLAKRVGPKKAKVAVARKLAVILHCIWTDGTKFDWGRTTA

SEQ ID NO: 201900 - protein, 376 aa, unidentified
MKQFNDIYVGLDVHKDTIAVAVVRGLRTKPSYFGEIPNTPTAITKLLKQLSPDGEVLNFCYEAGPCGYEVYHQLTRQGHACDVVAPSLILKMPGVRIKTDRRDAMSLAKLHADGSLTAVWVPDKEQEGIRDLSRAREDFKQTETKARQRLGAFLLRNGKVFTGKSKWTVAHWRWMETLTFETPTQHIVMQEYVEALKEASRRVLGMEKQILLAVRGWSLEPVLNSLLAMRGVNTITAVTLLAELGDITRFDNPKQLMSYLGLVPSEYSSGSKRQQGAITKTGNGHVRRVLIEAAWNYRFPARKSRTIEMRAEKTSERVQAIAWEGQKRLCGRYQKLLTSGKLKQKVCTAVAREMVGFVWAIACEASGRVHGSRATA

SEQ ID NO: 201901 - protein, 326 aa, unidentified
MSPTHVAFNHIVAFEVAKETLVIHVLPGHGQHTIANKPKAIRKLLMRELRRNALADLGSLLVVCEATGGYESYVLEICVELGLAAHKAHGARVRHFAKYLGLLAKTDPIDARVLALYGLKTQGLRLYVPLTPEVVALKDLKTRRDQVQQMLIAETNRLEHARHASVTRSLKAHIASLRKAMATLEADIAAHLKANDELARKARLMRSLKGVGPMTATTLLAYMPELGTFRKGEVTCLAGLAPIANDSGKSHAPRHIAAGRSNIRTALYMAALVALRHNAVMRRFAASLRQNGKPFKVVITAVMRKLIVTLNAILRSGEPWSHAKQA

SEQ ID NO: 201902 - protein, 409 aa, unidentified
MTVFCGVDWAERHHDVALVDEVGTLLAKARITDDVAGYHQLLDLLAEHGDSPDDPIPVAVETSHGLLVASLRTGSRRVFAINPLAAARYRDRHGVSRKKSDPGDALVLANILRTDMHAHRPLPVDSELVQAITVLARAQQDAVWTRQQVANQVRSLLREYYPAALLAFQGKQGGLTRADARVILTLAPTPAKAAKLTLAQLRAALKRSGRLRGCDAEAERLRGVFRAEYAHQLPGVEDAFDHQLLALLKQLDATCEAADDLAEAATTAFHQHADSEILLSFPGLGPMLGARVLAELGDDWARFADARALKSYAGSAPITRASGKKRFVGRRFVKNNRLINAGFLWAFASLTVSPGANAHYRRRREHGDWHAAAQRHLLNRFLGQLHHCLQTRQHFDEERAFASPLQAPA

SEQ ID NO: 201903 - protein, 331 aa, unidentified
MARIRHVIGVDISKKTLDLALFFDGEYAESFKIENTPESILAFEKQIKSLDCKVSNTIFCAEDTGVYGTFLKRFATKSKWKFCFDSALRIRWSIGIVKGKNDKADAKRIGDYAVKNLKNLKFYLPKRPVIEELKYYNNAVKRLAKVKKELLASKKCYREFEVADFSNAYIATMSSIEKDINKIEDLITSMIDNDQRLSELQAIVCSVPGVGKKLFLEIIIATNEFKDFDCPRKFASYAAVAPFRDTSGTSVSRRSRTSKIGNPQMKALLHMGSIACLRNKQSHIYKYYVRRKAEKYTGFRLMNALRNKMIHTIFACVKNMQQYQSTGNPLK

SEQ ID NO: 201904 - protein, 416 aa, unidentified
MFHLGIDWASMSHAVCITDQDGAVVKQCKIDDDYDGYLTLLAVLRNLPAETREILFSIEDKNLKLVDFLLSHSFSGFFVPPASMESYRKRYSQNHAKSDASDAFILSDLLRTDRNNLKPIVKDSAFIRELSALLKDRDAFVKDCSRLTLRLISTLKEYYPEFLKLFKDPARDTALDFLIKFPTFQDASKLSFPRLYKFCTKRHFCQTESIKKIFSILKAKPTPVDEVVIKTKSIKAVATAKQIKELLVVISSYEEKISVLFNSHPDAKIFSSLPRSGTITAAGLLTIFGDNKDKFASSDEVQMAVGTAPVTIQSGKFRIVKFRHGCNHFHRSVLHYFSMNSTRESIWAKNYLQTKLNQGKSFSCALRCLGYRWNRIIFSMWKNNTVYDENVLLANFAKQSIAADLSKNLKFFPAAA

SEQ ID NO: 201905 - protein, 370 aa, unidentified
MVVKPTNRLGRKEPNNDHYRVDYHPEFQQIAWLDKDTGEFQEKRLSHPEEAEQFYRALAARSQKVRIGMEASGHARWFERLLAELQFELWVGDAADIQSKRARKQKTDRQDAEHILKLLLKDDFPRIWVASGENRDLRQLLWHRHRLVQARTRIMNQLQAVAINEGLRCKKRLWRAGGRQQLESFRLAPWASRRRQDLLELLDRLSPTIAELNQAIEQEAEKNSGARRLRAHPGVGALTALAFVLIVGNAERFQCGKQVASYLGLVPLEKSSGNRRRLGHITKQGSSLLRFLLVEAAQVTVRSLSEWRSQYFRLVMRRGRKTAKVAMARRWAIRLYWMWREERDYEHQRSSVRTQDSPKQVMVCSQTPRN

SEQ ID NO: 201906 - protein, 338 aa, unidentified
MTCIGFDHHKKWTQVAAVDDQGKIIREMRVLNDNSSLKGFLKGLPQPLKGVVEAGPTWGWIYDTLTELGVKMIVANPSAVRAIAEAKIKTDKIDARMLATLLRVGLIPEVYVPTEEVRSQKMLWRERIWLVRMHVRLKNRIHRLLNHYHLEVPEFSDLFGAAGRRFLEELKLPEPGNRILNAQLKLLQSYRLQIEEVQRWAVKATQGHPNRAYLESLPGFGKVFAPIVALEIDDPKRFASPGKLASYCGLVPSLYSSGGKSWQGGIGKEGNHWLKWAFIEAAWAAIRSSAYFRVVYQRLRQRKTAQVSIIACARRLCEIAYHLLKERRCYEERPFRCA

SEQ ID NO: 201907 - protein, 367 aa, unidentified
MKKVSTAAMTQGRNISQQQLTIGLDLGDRNSWYCVLDETGRIQLEQRVRTTAKALQEVFGAMPRSRIALEIGTHSPWISRLLSELGHEVIVANARKVRLIGESRKKDDRLDAQTLARLARIDPELLYPVKHRSVQAQADLMTIRARAGLVRARTALVNTARGLAKSYGERLRGCNVRDMDPEKAEGLSPELQRALEPLLATIEELSERIVEYNDRIEALAQTSYPQVELLKQIKGVGTLIALTFLLTLEDPHRFRKSRDVGGYLGLQPGRRNSGHSEPQLHISKEGDPYLRTLLVQGAQHILGPFGIDCDLRRWGLKLAERGGRNGKKRAIVATARKLAVLLHHLWVSGEAYEPLHNSRRVTVAAAA

SEQ ID NO: 201908 - protein, 425 aa, unidentified
MNYKQNEKINQVKESTLVVGIDIGSTTQYARAFDWRGIELGKVFTFSNSREGFEAFKAWMQHLQDKYRKSDVIVGIEPTGHYWFDLGAYLEDEGILLVMVNPYAVKQTKELDDNSQSKNDRKDPKVIAKLVTEGRYSAPYTPDGVYADLRIMVTNRKRLIREMTQIKNRFARWFAIYFPEYTDVFGDYEAQSSMLLLKKVCTPEAIVELGAEKINKIWRDAKLRAVGMKRATTLCETAKRSIGLKKGSSAARYEMKLLLEDYEYKKAQLDAVMEEIEKLCRKIPESEQMLAIKGIGVITVAGFLAEVGDVRRFESPRQIQKLAGLSLRENSSGKHKGQTTISKRGRSNLRAVLFNAAIPLIATNPEFKSLHEYYTTRANNPLKKKQSVIAISCKLIRVFYAILANGVTYDPQKMLSDIHRQPQAA

SEQ ID NO: 201909 - protein, 324 aa, unidentified
MHYLGIDVSKATLDVSDAAGVSRLSSPNSRTGTSKIIKWAQRIQEGELQFIIEPTGTYHHTLIDELSHANIPFTVINPARTKAYSLSLGKRAKTDRVDAQLLASLGQTQQIAPSHQPEKAQEKIKSLRRHRESVEGMIRSLRNQIEATTSSPWADHEVLRSLRSTIRHLEKQVESADRKLDSLIKEDERYSTLIDLLQTIPAIGPKTAQLLLSEMPPVWQCSSSRAWVAFAGVCPQPFQSGNINYSRLSRMGSRRVRAGMYMASVVAMKHNPLVAALVARLKERGKTGKLAVMAAMNILIRICYGVIENWKPFDPNFHKIPKTT

SEQ ID NO: 201910 - protein, 371 aa, unidentified
MEESSKTVYVGLDVHKDSIAVAYAPEDRGAEVVALGTIGTRQCDIGKLIRKLQSKGAALVCVYEAGPCGYWLYRYLTRKGFACHVAAPSLIPRKPGDRVKTDRRDAITLARLMRSGDLTSIYVPQVEDEAMRDVSRGREDAMRDLKATKHRLKAFLLRQDIRYEGRANWNAAHLRWLATVVCPTPAQQIVFQEYVRAVTEQAERLQRLERELHEAVKGWRLAPVVEALQALRGIELTGAVILGAELGDLTRFDTPRQLMSYLGLTPSEYSSGARRRQGGITKAGNGHARRALVEGAWAYRYPAKVSRHLQLRLEKLPAEIQAISWKAQVRLCKRYRQLTARGKHVNQVVVAIAREMAAFAWAIARLVPLAA

SEQ ID NO: 201911 - protein, 341 aa, unidentified
MKKNLFFIGLDIAKADFAASIYQTPDKPIVTKEAIPNDRKGFEMLLLWLYDHHIDKKNSRICMEATGVYSQAIAYYLLFQGFPVSVEPPLKVKRAFDPVGHKTDPVDSKQIAEYAYRFQDELTSWQPRDEILEKIRQLLSVREQFTKQKVALDNSIQAYSKQRVQVTLIKKAHQETLAQLKKQIARIDKELEKLIKQDPQIFQRANNLDSIPGCGMLLAAHLLVITENFTKIQNSKRLAAFVGIVPYQHQSGTSVFKRAKIRYFGPGPSRKLLRLAAQSVATHNVTFRRYYLRKLDQGKAKPLVLNNISNKLLKIACTIIRNNTRYIKDYRSIHPMYLKSA

SEQ ID NO: 201912 - protein, 346 aa, unidentified
MSLTKAGVDIAKSVFHVHAVDPHDQPQWQAKLKRAEWLDTLCKRLAPGAEVGMEACASAHHWARELRKRGFRVKLIAAQFVKPYVKSNKNDRVDAEAICEAMGRPGMRFVTVKSVAQQDTQAAHRIREELMGQRTAKVNQIRGLVGEYGIIAPLGIPRLRLALPQWLEDAGNDLTDDFRALLADLADDLRHLDERIVSLDKRIAQGVKDDPVARRLLELRGVGPLIASALAGALGDGKSFTKGRDFAVSLGLTPRQHSTGGKDRLLGISKRGDPYLRKLLIHGARSVIHHSKDKDDGLSRWLKGLVARRHINVACVALANKTARIAWAMLRNDVDYQPQLAAQPVG

SEQ ID NO: 201913 - protein, 319 aa, unidentified
MEQNNYKVYIGIDVSKAKLDIQYNDSGLLLTIENKTGDFKKLNSCYPKDKKSVLVILEATGGYETKVVKWLLSRNIPVVVVNAKRVRDYAKATGQFAKNDRLDAGIIREYGLMFGHKLHLQQKKNKIEEQIDDLTRRRKQIISNRNKEKQHLSTIQNMEGQRSIKRAIKFYNGEIDNIEKKLAATLKKDKQLEAKAELLQTIKGVGEVTMYTMIGELPELGHVNNKKISALAGVAPFCRDSGTMKGKRTIWGGRAQVRTALYMAALSASKYNPAIKIFYDRLIAKGKCKKLALVACMRKLVIIMNTMVKNNEPWHAEIA

SEQ ID NO: 201914 - protein, 376 aa, unidentified
MRKVALDLGTRKTAYCEVREGKVVLRDTVTTVRSLDSLLGPDQPPAVVAIEACREAWHVHDLLSSWGNEVVLVDTTRSRRLGIGQHGRKTDRIDAEVLALALERGGIPPAHLLSPHRRELRRWLGVRRALAETRAQYVTTARGIAREFGSPLPRCAVDNFVSNVRKMQVSPDLQPALEPLLKMLETNDVELEGVEKNLAELCLTEPAIALLATAPGVGLIVAACFVSVIDDAKRFRCAHHVESYLGLVPSEDSSGGKRRIGAISKKGNKYMRALLVQSAWTILRTADKNDPLRLWAEAVAARRGKPVAVVALARRLVGVLWAMWSKGTAYEASRLAAASGRGLSQAAQSREFLAAALKKASKKQSMKKLTAAAVTH

SEQ ID NO: 201915 - protein, 402 aa, unidentified
MNAVGIDVSKSKSVVAIMRPFGEIVSTPFEIKHTASDIHSLIELINSVEGESRIVMEHTGRYYEVLAHQLLEANLFVSAINPKLIKDFDNDSLRKVKSDKADAVKIARYALDKWQNLKQYNVMDELRNQLKTMNRQFGFYIKHKTAMKNNLIGILDQTYPGVNTYFDSPARSDGSQKWVDFASTYWHVDCVRKMSLNAFIDHYQNWCKRKKYNFSQSKAEEIYGKAKELVPVLSKDAITKLIIKQAVDQLNSASTTVESLRTLMNETASKLPEYPVVMAMKGVGTSLGPQLMAEIGNVSRFTHKSAITAFAGVDPGVNESGSYEQKSVPTSKRGSSVLRKTLFQVMDVLIKTHPQDDPVYQFLDKKRAQGKPYYVYMTAGANKFLRIYYGRVKEYLASLPES

SEQ ID NO: 201916 - protein, 364 aa, unidentified
MKKRIRKGYWETEWKQKPSLTVGLDLGDRRSHYCMLNEDGEVVEEGSVATTEAGLRKQFEGEPQQRVAIECGTHSPWISRLLKQLGHQVIVANARKVRAISQNESKSDKVDAEMLAQLAYSNPKLLSPLRHRSAERQRDLNLIRSRDALVRARTMLINAVRGLVKSAGGRLPACDAGHFDQHARPALPAELKTAAAPLLNQIASLTSQIHLLDASIDELAERYPEIGLLRTAPGVGPIVAAAYVLTLDRADAVHSTRAAGAFLGLRPEQSQSGDSDPQLGITKTGNIYLRRLLVQAAHYILGRFGPDSALRRWGLRLAGDGSKRLKKRALVAVARKLAVILNRMWRDQKPYQHFPQQNSATAAA

SEQ ID NO: 201917 - protein, 414 aa, unidentified
MELILGIDLACRAAHQASLAGPDGTFVWTGRKFFTRPAELEKLWKQIGLGEHDTLRVVMEPTRNAWAAVASWFRRRGARISMVPTTQSADLRAYYSKHTKNDHLDSKLLARLPLLHPEGLREHTGDGPAEPLRRVVKIRSSIVKRRTAVFQRLDALLELLGPAWYDALGSNYGKAALALLARYADPHSLIRLGHARLTRFLIRHSRGAWREQHATMLLAAAQESLQLWGSGAEAAIDFAELAADIGVEAQQAQMLTEQIEDLDERCANLYAEADPTGIIASAPGVGPVTCAVIAGRIGDPHRFHSLAAIRAYSGLVPKVNQSGQAQHQHGLTKAGDPVLREALFAAADQARKTDPQLAAKYKRLMATERHHDSAICHIATTLLTRIATCWRTGLPRVFRTAVFASIYAARCEFR

SEQ ID NO: 201918 - protein, 342 aa, unidentified
MLYVGIDVAKNKHDVTALNVPGKTVLKPLTFSNNKAGFELLDLSFRQLNQDCLIALEDTGHYAFNLLNFLHEQGYKVYTYTPLLIKEFAKSLSLRKTKTDKKDAHGIALKLLSDPNREQFQHDNRQVELKILARHIHRLKKKQSDWKVQYTRCLDIIFPELDKIVGKHSEYTYQLLTCYPNPQKRLEAGFDKLIEIKRLTASKIQDILSVAPRSIGTTSPAREFEIIEIIKHYKRLIDKTETCVNDLMAEFNSVITTVTGIGGRLGAVILAEIRNIHAFDNPAQLQAFAGLDSSIYQSGQIDLAGRMIKRGSPHLRWALIQAAKACARFSPAFKAYLKTKLE

SEQ ID NO: 201919 - protein, 360 aa, unidentified
MHATTVAVDLAKSVFQIAVADEHWHIVETQRLTRTQFERWFANRAVGLVVMEACGSAHHWARWLNSLGIEVRLLPAQYVRAYVRRNKTDATDAAALLEAARASDLRPVRVKSVEQQALQGLHRIRSLWMGTRTSRINALRGFCREFGIAIPQGARTGIEALGRVLADPQSAVPELIRHTAGQLLEEIRLLEARIAQVERQLSLAARQSPACTLLLSVPGVGLLTATAMVAATSGDVTHFTDARHFASWFGLTPREYSSGSSRYLGRISKKGDRYLRMLLTHGARSVLSAAQVAQGAGKQVQGVRCWALQVQGRSNHNKATCALANKLARICYATLRDHKPFDEAAHLSRKENRQSFVMPA

SEQ ID NO: 201920 - protein, 409 aa, unidentified
MEVLHPHCAGLDVHQKTVVACVRKAQGGHVETETRTFPTSTRGLLLLATWLHEHGVTHAVMESTGVYWKPVWHVLDDGDLVLTLANARDVKNLPGRKTDVNDAHWLADLLAHGLVRPSFVAPQPIQELRDLTRTRKQLVRERAQHVQRVQKTLENANLKLTGTLSDVMGKSGRAILDAIIAGESDPAKLAALAVGKARKKYPDLVEVLQGRVREHHRGMLRLHLKMIDALSATIREVDAELGKALAPSRALMKILMTIPGVSEVTAQVILAEIGSDMSRFPTAGHLLSWAGLCPRNDESAGKKRNTRIRKGSPWLRATLVQAAWAGSHAKGTYLRALFLRLQRKGAKKATIAVAASMLTAVWHMLREGVEYKDLGADHFARRDEKKTLGRLTRRIEALGYEVEVKRKAA

SEQ ID NO: 201921 - protein, 332 aa, unidentified
MHIRKLTGQEPIVKTPAQEVYDHYVSLDWSEKTMAIATMTAIQASPQVWEARSDVTRLQQYLLNLGGRIILTFEESTSAHWLYGKLMPYVERLIVCNPGYNRLLCRGPKNDTIDATKLCLLLRQGSLKEVYHSTSRLYELRMLVSAYDDTVRAGVVAQNQLKAHERGRQTAGNSGSLIVEQLQTRIELYRTEKRQYEQAFARWVKRTPALRQLKKLPGIGFRGAVKILGYIIDPRRFPNRGHYWSYCGLVWHQKMSGGRRYGRRRPQYNHVLKAVYKTAALAAIHGSNDVADYYQELLKAGRAPHNARHAVARYLARLSYGILKEATEHNNS

SEQ ID NO: 201922 - protein, 354 aa, unidentified
MKHNTKYVGLDVHQETTVASVRGESGRVLARAVFPTEESAITEFFTGMRGAVHVAFEEGTQAQWLYELLTPRANRVVVCDRRGQSRHGNKADQGDADQLSDQLRRNGLRAVYHSDSHRTTLKELTRTYQSVVADSTRVMQRIKALYRARAIKTPGKSVYNPRQRAQWLEQLPEMGARFRAEILYTQLDVLRELHPKAKAAMLAEACKDPAWSILQTIPSLGPVRVALILATMQTPWRFRTKRNLWAYCGLAVVTRSSADYVMVGHQAVRRQRAPMTRGLNRNHNHVLKDVFKGAATDATGKPGPLQDFYFGMVARGMREELARVTLARKIAAITLRLWKRGESFDPTKLTTQAS

SEQ ID NO: 201923 - protein, 252 aa, unidentified
MREFTGIDISKKTFDIYFEQNGQGTHVCFNQNKQDYKRFINLIGKERICIMEATGNYHVKLSRFLYENKLKVLVENPLKIKRFSQMRLQRNKTDKADSKMIYEYGKMVFIEKEIVGWKPDSNEIAELKQYDTVRQQFTKQLTALTNTQEAMGQLSDLQEQVDGALKLMIKHLKDALNQLDMQMQQIVETHHKDSYKLLTSIPGVGPKTATMMICLTDGFRKFDAKQVKPFISYIGMSPRTYESGTSVRGLGI

SEQ ID NO: 201924 - protein, 347 aa, unidentified
MRFYTKQHRYYCGIDLHARSMYLCVLDRQGEILMHRNMTCSPESFLKAMAPYREDVAVAAECIFTWYWLADLCARENIAFVLGHALYMKAIHGGKAKNDKIDAHKIAVLLRGGMLPMAYVYPAEMRSTRDLLRRRMHLMRKRSELLAHIQNTNSQYCLPQFGKKIAYKRNRHDLPEHFTDLTVRRSIEMDLSLIDHYDKLLAEVELYITQNAKIHDVNAFNRLRSVHGIGRILALVMLYEIHDIKRFPTVQDFVSYARLVKCSRESAGKRHGSSGKKIGNVHLKWAFSEASVLFLRANPKGQRWVDKLSSKHGKAKALSILAHKLGRAVYYMLQRDKAFDMNKFFNS

SEQ ID NO: 201925 - protein, 412 aa, unidentified
MDVIYRRCCGLDVHKDSVSACVLVAEPPGRRRKELRRFGTMTRDLLELLDWLLELRVTHAAMESTGVYWKPVWNILEGHVEVLLANAQHIKVVPGRKTDTQDCEWIADLLQHGLLRGSFVPPEPVRDLRDLTRYRAILSQETTDVANRIQKVLEDANVKLGSVASDVLGVSGRAMLEAIVEGEQDPTRLAEMARHRLRKKIPELCVALEGRIRDHHRFLLKQLLDHLKFLESKISEVERQVEKCMGPFEKAVTLWITIPGVDVVTAWSLVAETGADMAQFPSAQHLASWAGLCPGNNESAGKRKSGKTRKGSLWLRRALSQAAWAASRTKATYLAARYRRLAARRGAKRAIIAIAHNILLIAYWLLQTGRPYQDLGADYFDRINAEGLKRYLVRRLERMGHQVVLTPAPATP

SEQ ID NO: 201926 - protein, 449 aa, unidentified
MVVPQEIEDDEYERVLERVAAVDVAKATGMVCTRVPHPARPGRRLTRVWEVDADTGSVMELADHLAAERIAKVTLESTSDYWRIWFYLLEAAGLDVQLVNSRDVSNVPGRPKSDKLDCVWQAKLTERGMLRPSFVPPAEIRRLRDYTRLRTDLTRERTRHWSRLEKLLEDALIKVTAVASKTGSKSVRDMLEALIAGERDPEVLAGLARGKMRAKHDRLAGALAGRFDDHHGELARVLLDQIDSLTAHIDKITGRAGELIAAMPGAWGVDAGGVTGPGAGLGAGAPVLPAVARLDEVTGIGAAAAQVIIAEVGLNMGVFPTPGHLVSWAKLSPRTIQSGAKNRPGRTGKGNPYLKGVLGEAAAAAGRTATFLGERYRRIARRRGKLRALVAVARSILVIVWHLLADPAARFRELGAGYYASRIDKNRKTRSHVRQLEALGYTVTLAQAA

SEQ ID NO: 201927 - protein, 371 aa, unidentified
MKNNSIFIGMDVHKNSIDIATAQKGRKGQVLHYGKIDGTLEALNKVVRKLVSKGDRLHFVYEAGPCGYQIYRHLTAQGFDCSVVAPSKVPKQSGDQIKNDRRDALRLARLHRAGELTAVYVPLAEDEAIRDLTRAREDAKSDEKKSKLRLLAFLLRSGQRYTGPSLWSQAHMRWLADIKMAHRSQQIVLQEYIDTLNQCSARVQRLTEQIRQLLPSWQLFAVVQALQSLRGVSLIVAATTIAELGDLKRFQSPVELMSYLGLVPAEHSSGQRIRRGSITKAGNGHVRRMLVEAAWAYRLRARVSRPLLKRQEELPQHIRDLAWKAQLRLCARYRHLWARGKAKQLIVTAIARELCAFMWAIAKQTQVPTAI

SEQ ID NO: 201928 - protein, 429 aa, unidentified
MNDREIIRLEQFRQLKKEIRGSEEHLIVGIDVAKQKHNAFVGTATGKTLLKRLVFENNKEGFEKLLMHVESISASNSHKRVTFGIEPTANYHKPLAEFLINKEHDLVLVSGVAVKRNRELLDGRWDKNDMKDSANVADLISQGKCLFYEYPTHVLRDLRSFLSLKKKFKKIEHGFRVRIRNHLLAQYFPELDRYYGHNEPENLAIVRWCLSPSKIAEMKYEDFFRLVTTRDRGLTQHRRLKAIWDSAHYSIGCSTGMAAEFEAEVLVEALKRIRETIGSINEKVIEICVLFPEYQYLLSIPGFGPVISAIVIAAIGDPFRFESGNQVLKTAGWDLNANRSGKRSDSVIPVISKRGKSDLRYALYQAALVASTRNKHVTSWFIEKLRGREKEQGIKTKMRVKLAAKLLIIAWTLMKKKESFNPELLKIKK

SEQ ID NO: 201929 - protein, 315 aa, unidentified
MDILGIDVGKDYIDCELLGEKRAAKKVNNTVRGFEQLVTWLRHRNARKVHACMEATGGWSEELAFYLQERGHIVSIVNPMQIRAFGQSELSRTKTDKADAALIARFCKAMHPDAWEPPTPAERHLRQKVRRRRALVEMRTQEVNRLEAPGTESVEKSIRDVIAMLEKQIAELEADIKKTIDDDDDLKGKRDLIESIDGIGPTTAATLLAETPHIEKFESSKALAAFAGVCPQVQQSGRSVSKSRTTKIGNREIRKVLYMAALAALRSNAIIKAFADRLRERGKRPMEIIVATMRKLLVLVFGVLKTRRPFDPNWA

SEQ ID NO: 201930 - protein, 372 aa, unidentified
MQSTTKFVGLDVSKEKISVAIADVSGEAPRYYGTIPHTPAALRKLIKELGAAETLSFCYEAGPTGYETYRWITSMGAHCVVIAPSLIPKRPGDQVKTDRRDAEQLARLYRAGELAPVYVPEREDEALRELVRAREAAKEDAHRARQRVLKFLLRHQIEPPATIKRRWTKKYRVWLGQLVFPYEPMQVAFDEMLHALNEIEQRMGRLEKALVEQAATGSKASLIQVLQSLRGIGLLTAITLAAEIGTFARFRSPAQLMAYLGLVPREYSTGLSTRRGSMTKAGNGRLRRTLVESAWSYRHRPAVKGDLAKRLDGMPADVQLLSWKAQERLHSKYRHLVFGKNKHKNVAVGAVARELIGFVWAVARTVEQPAAS

SEQ ID NO: 201931 - protein, 465 aa, unidentified
MKKKTSKSEKEKGKTSIHEAWEKINPDAAGIDIGSREHWVCIPPGRREKTVRKFGTFTCELEALADWLQECGVKSIAMEATGVYWIPVFQILEARGFHVLLVNARQTKNVAGRKTDVQDCQWIQRLHTYGLLQGSFRPGDPYCVLRTYLRYRDELIGARSTQCQHMQKALQQMNLQLAQVLSDVTGLSGLAIIQAILEGQRHPAKLAALVDVRVRATQATIQKALVGDYRKEHLFELKSAFELYHTYEQKIQACDEQIVAETAGLPDKVDLSSKPLPARKQGHPAHKDKMAGQDMREWVYKKLGADLTAIEGIGITTALVILTEVGPDLSRFPSEKHFASWLGLCPDNRISGGKVLSSRTRRVVNRVSDALRIGATSLERSQTAMGAFYRRMKAKLGAAEAVTATAHKLARIVYRLIKHGEAYVRQGTVEAEKKYQERKLYALRKTASALGFELIAKQQVTQGVS

SEQ ID NO: 201932 - protein, 365 aa, unidentified
MQKISTMQTSGKNIFEGQLTIGLDLGDRSSAYCVLNEAGEIVLEHKLATTPEAMKQAFGSMPRCRIAMETGTHSPWVSRLLTALGHEVIVGHAQKVRLITKSRRKDDRLDARTLARLARIDPELLSPVKHRSAQAQLHLAEIRARAVLVSARTALVNAVRGLVKSYGERLRKCGTEQFRRETTNGLSAGLQQALEPLLREVESLNERIQEYDRRIEKMAKQTYPETALLKQVKGVGDLIATAYVLTIEDPHRFRKSRDAGCFVGLQPGRRNSGESEPQMRISKEGDEYLRTLLVQGAHYILGPFGEDSDLRRWGQKLSARGGKNAKKRAVVAVARKLAVLLHRLWVSGEVYEPLRNSQKVMSAAA

SEQ ID NO: 201933 - protein, 318 aa, unidentified
MTAPACFIGIDVAKATLDVATRPGAERWSVPNDEDGIRALVSRLRPLAPTLIVLEATGGFEIATVAAVAAAGLAVVVANPRQVRDFARATGQLAKTDALDAQILALFAERVRPEPRPLPDVATQTLDALLTRRRQLLEMLTAEKNRLGFATAAAVRRDLTQHIHWLERRLRDVDADLEQAVHASPLWRAKENLLRSVPGVGPIVSRTLLGELPELGTLTHKQIAALVGVAPRACDSGTLHGKRLVWGGRASVRAVLYMGALVATRCNPVIRAFYARLLTAGKAPKVALVACMRKLLTILNAILRTGTPWRPVGAGATS

SEQ ID NO: 201934 - protein, 454 aa, unidentified
MEKKVKPAPAAAVVHPNAAGLDIGAREIWACVPAGRDEATVKPFATFTPDLRSLADWLISCGVDTVAMESTGIYWIPIFEILEARGLNVYLVNARHIKNVPGRKSDVQDCQWIQKLHSLGLLTASFRPDGEMVALRTYLRHRAQLMQHRAPHISHMQKALQQMNLQLPHVLSDITGETGIRILRAIVAGERDPIQLAQFRDPRCQSSQETIAKALTGDWKTEHVFALTQSLELYDFYSQQIAACDTQIQQQYAVMKPRWEVVEDAAAPMVEPKRAEMPRHNEPPAETRQVLLHLTGIDLAAVEGIGPSLAQTILSEIGTDMTKWPTVKHFASWLGLAPHNDISGGRVLRSRTLSTNNRAGQAFRQAATSLARSASTLGAYYRRKRAQGGPQFAQVATAHKLARIVYHLLRYRVSYVEMSATVFDQKQRERDIANLRKRAEHLGFTLALPQTSDP

SEQ ID NO: 201935 - protein, 449 aa, unidentified
MSRPQVIDDTEHERVHDKVAAIDVAKDSGVVCTRTPHPSRPGTRQSRIWTVKARMGTIRALGRQLNKDGIEKVTLESTSDYWRIWFFALEAAGLAVQLVNAAQARNLPGRPKTDKLDAQWLARLTEMGLLRASFVPPKAVRDLRDYTRMRARLVQERTRCWQRLEKLLEGALIKLSSVASKLTTISAQDMIKAMIAGQRDPKVLAGLARTGMKAKHDDLVAALDGMFDDHHGELAQLLLDQIAVLDGKITQLDTRIGQAVAALPAAWGINADGTTGPGAGTGPDAAVLPAVTRLAQIPGVSENLARAIIAETGLDMTRFPAAAHLVSWAGLCPSARQSGPRTRAGKKGQGNTWLRGSLGQAALGAARTTTFLGERYHRIARRRGKAKAQVAVARSILVIIWHLLADPAARYTDLGYGYYQDRTDKDRKLRNHIRQIEALGFTVTLIKDT

SEQ ID NO: 201936 - protein, 325 aa, unidentified
MRQPQSPVKPQTQVGLDVSSQTLDTHIRVDGKAFSVPNTDEGFDRLCEMLSAYDVTMVLMEATGGYEDNVACYLQLQGYDVVVINPRHARRFAQSMGRLAKTDRIDAAILAHMAFMIDSGPDRERYIKPVTDEQRKQLSRMSSRRRQVVDLITVEKQRLTHADDYARESINTLLSLLKTELKRIEADIFRYVKKNFSELANRLLSIPGVGEQAVTVLIADLAELGHVNRRRISALLGVAPFNHDSGKLKGQRRIRDGRQSVRNVLYMGVISATRFNPVIRAFYDSLLSRGKPKKVALIACMHKLIRIINAMMRTGKPFDISLHGV

SEQ ID NO: 201937 - protein, 398 aa, unidentified
MTESSDYESVQVFIGVDVGKDTHHAVAINRSGKRLFDKALPNDENKLRSLISDLKQHGQILLVVDQPATIGALPVAVARSEGVLVGYLPGLAMRRIADLHAGEAKTNARDAAIIAEAARTLPHALRTLKLADEQIAELSMLCGFDDDLAAQTTQASNRIRGLLTQIHPALERVLGPRLEHPAVLDLLQRYPSPEKLASLGEKKLAAQLCKLAPRLGKRLAADIAQALAEQTVVVPGTNAAAVVLPRLALQLITLRKQRDEVALEVELRVLAHPLYPVLTSMPGVGVRTAARLLTEVACRAFASAAHLAAYAGLAPVTRRSGSSIRGEHPSRRGNKALKRALFLSAFAALRDPLSRAYYTRKMSQGKRHNQALIALARRRCDVLFAMMRDGTFYTPQGS

SEQ ID NO: 201938 - protein, 309 aa, unidentified
MKEELVYLGVDIAKAYLDAAIGNEKSRFSNDALGHRQLINWIKQMPASVQVICEPSGGYERAFVRALVGAQLKISLVPANRVRQFARAKGILAKTDRIDAKLLCAFGEAMQPGTISASQLEQQHLRELESQRRHLTHLLVMEQNRAARMSDLCVCKMNRRLITQIKKQIEQLDRLIKGHIDQSHELSAKAAKLTAISGVGARTAALLLAQLPELGELNRREIAALVGVAPFNRDSGRMRGKRAIYGGRKPVRHGLYMAALVAAHHNPILRNFYLRLRAAGKPAKLALTATMRKLLIVLNSALKPDLSYA

SEQ ID NO: 201939 - protein, 411 aa, unidentified
MEVIVERCAFLDVHRDSVMACARTPDGGGRREEVAEFGATTSQLLLLADWLTDRGVTLVGMEATGVYWKPVHWVLESSVPEVWVINARHMRNVPGRKTDVNDAIWGASLIEHGLVRPSFIPPEPFRALRDLTRYRKSVIEERARETQRLHKVLEDAGVKLSSVASSVLTKSGRAMIDALIAGERDSAVLAEMAKGRMRSKIPQLQDALAGRFNTHHALLCAAMLARIDQADATIDTLGVGIEELLDPYEAAVLLLVTIPGVAHRSAQVILAEIGADMSRFPTAGHLASWAGMCPGNNESAGKHRSGRTRKGSKWLRKALIESGQAAGRTNDTYLAAQYAQIRSRRGPQRAAVAVGHSILVIAWHLLSTGEVYTDLGGDYFDKRRNNAARQRRLVAQLEALGNKVTLEPAAA

SEQ ID NO: 201940 - protein, 379 aa, unidentified
MRDQSASVIEDEEVGVSGRIDVDRGLQPEGCRAANNVQKEVMVNNQRTLPDTAEPSLFIGLDVHKETIVIATAEAGRTGEVRSHGTISNDLHALEKCFAKLRKTHALTAAQLEVGYEAGPCGFVIARRLAQLGIPCKVVSPSLIPKKSGDQVKTDKRDAKKLARLLRSGDLEAIHIPDAADEAMRDLCRARTDAVNDQRRLRSQLKGFLLRHGYKYSGKSSWTEGHLRYLRELVLEHPVHKVLMEETLKSLSEAEERVIRLTQLIEAHFLVWERRDWCQALMTLRGFAVLTAVTTVAEIGDTGRFKHPRQLMSYLGLTPREYSSGETRRQGGITKCGNSHARWFLIECAQHYALVPKISAQLTSIFHRYELERVTCFEG

SEQ ID NO: 201941 - protein, 324 aa, unidentified
MIDGVLGIDVSKNTIDVSMSGGNKVRARSFANSADGWRNLLAWLISQKIQRVHACLESTGRYSIGIASALYEAGHVVSIVNPAQIRDFARTKLGRNKTDGVDASHIREYCELFKPQPWAPASEAHRRLGELQTIRAGIIAGLTEWKNRKNSGMIDAVAQSLADVTISHFTSQLGAVDEAITRTIDNDPVLRRKRDLLLSISGVGETLAGVVLAELPGPDVLRSGAEVVAYAGLNPRLHQSGTSIDRMTRISKIGNAVLRAALYMPAMSAMQHNPAIVALVARLKSRGRLKPKQIVVAAMRKLLVLCFGVLKTGKPFDPAIAMGC

SEQ ID NO: 201942 - protein, 422 aa, unidentified
MLEEDPQVEEIVARVAALDIGKAEVVCCVRVPHEGKPGRRLQEVETYSTMTCSLLAMSDHLRCMGVSRVVMEATSDYWKPVFYLLEAQGLDPWLVNAKDVKHLPGRPKTDKLDAVWLCKVAERQMIRPSFVPPPQIRRLRDVTRYRIDLVGVRTAEKQRVEKLLEDAQIKLSVVASDIFGVSGREMMGALVGGQTNPKALAQLARGRLRAKLGALEEAFTGHFTDHHGFLLGTMLARIDALDADIAALDTKIEEMVAPFALAVDKLDEIPGVGTTAADVILAEIGVDMSRFPTAAHLASWARFAPGVKESAGKKKGKGTTGHGNRYLARVLGEAAVSAGKTDTFLGQRYRRIAQRRGKKRAIVAVGRSILVIVWHLLSDPETRFTDLGPDFYDNRTSPERKKRNHIRQLEALGYKVTLEPAA

SEQ ID NO: 201943 - protein, 419 aa, unidentified
MKEWKEITHYAGFDWARDHHVVVVVDRQGQIVADFQFDHSVEGWKSFRQKTTALESVAVAIETSQGAAVDQLLQYEYTLYPVNPAAAASYRQRKAPSGTKTDHLDGWSLADALRVDGHGWKALAPMDELSAQLRLLCRDEVALIEQRTALVNQLQQALLEYYPAALEAFEDWTMPSTWDFILQFSTPEALVKAGKRRWKKFLHTHRLWRAQTLEKRLALFAQADQFKASVAITKAKSQLALSLCKLLRTLQEQLDQYRKQIEALFENHPDHHLFGSLPGAREKLAPRLLAAIGSDPKRYGSFQVLQSFAGTAPISFQSGQLRRAKVRWACDTFLRHTVHLWADCFRKASAWGQAYYRKKRQDGKSHACALRCLGQRLLKILFRMLTERKPYDAELHARNQQKHGSWVLALLPQPTPPPQ

SEQ ID NO: 201944 - protein, 410 aa, unidentified
MKEQNSADVNIIPQLDKACGLDMHKDKIVGFISCKDGSGQDLKEFGTFTCELRQVRDWLQSHQIEHCLMESTGIYWMSLYAILTEAGISVTVANPTHIKQVPKRKTDRKDAKWLCTLLLNGLVRPSFMPTAEQRILRDHCRSRLFYMRQQNKTQNRLLKILESNNIKLRSVISSIKTKSAMSMIRLLAAGVTDKQQLIACALGRVKLKQEGLSKALDGTLAPHHLVQLQMLLQDLDHVAKQLGTLETMIVEITQAHYSVAYECLDSITGIAGKSAQIILSEAGSDMSRFNTADHLTAWCGLAPGNHESAGKRRETSVKKGNPYLKTAIITAAWAAVRVKDSYWRALFERLRKRMRVQKVIVAIARRMLKVVYKTLDTLTHYQEKGIAHFMDLQAKAAMYHRMKQQWPSTE

SEQ ID NO: 201945 - protein, 351 aa, unidentified
MKPDPTAQPKLFIGIDIHKRSWKVHCATDLFAGKSFSMPPRPEVLIEYVNKHFPDHQVTTAYEAGCCGYYADRSFETYGWISLVVNPADIHRKGKERFTKTDKIDAQLISRELKDGRLDSIHIPDIEREQLRSLFRRRNDLVKDFRRIKSPIKMQLLYFGVAVPEEFDNDHWSHKFRGWIDGLSFDFPSARGTLDSRMRSFRFIDKELRDVSSEIRAYCRKHYKKDYYLLRSVPGIGGIVASGIICELGDLRRFNSIKHLAGYVGLAPGIHQSGDNQKSTGITMRAHRLMRSYFIEASWQAIRTDPVMQVYYRKHLRKDVKSIIIKVARKLLSRTLAVIKTETPYAIGVIE

SEQ ID NO: 201946 - protein, 332 aa, unidentified
MVFNHYLGIDISKKTLDAALLLREGVVEGQIKVSNDKKGFKDLLSWLKKLKISPTEVLVCAEHTGIYGYDLQVWLDEKAIKYAMVPALEIKKSLGIRRGKNDVVDALRIAEYAYIRRESIVLTHRPSETIFQLKALITERKLYVRSRAGLLSRKDAMEKYESREGRKRREDAIKKFSSYIESLEGQIEDVISNDPDVLRNYQLVRSVKGIGLINAVNTIVYTNNFTSFQTARQYACYIGIAPFEHSSGTSIKGKTMVSSLGNHQLKCELTMAARNAVCTDPWLKGYYKRKMAEKGNMRGAYGIVLNAVKFKLVVRMFAVIKSGTPYKTLTYC

SEQ ID NO: 201947 - protein, 360 aa, unidentified
MDTKHDTSLSFKDQDFFIGIDVHKNQWTLSIISMNMLLKKYLSIDPQPSELLKYMKKHYPDGNYYATYEAGFSGFWAARKLNDLGVNCMVVHPADIPSSQKERLNKNDRVDSRKLARSLNNGDLIPIYIPKKVAEEYRYLNRHRLRMVKDQTRLKNRIKGVLHQFGVTIPLHYQERRWSGAFFKWLLSIKFDTEYAQFAYEDLIDQLIQTRARITKHLRKMRVMTKEQKPFSIIIPLLLSIPGIGFITAMTLATEIIDMSRFKTLEKLSAYVGLIPSIQSSDETEINLGISPRRNKYLRTMLIEAAWKAVKIDPALTMKFNQLSRRMNRNKAIVRIAKILLNRIRYVWKNQKPYVLSVVN

SEQ ID NO: 201948 - protein, 311 aa, unidentified
MYYIGIDVSKKDLSVFDGKDLKFANKEGLKSFKKYLKKKYNLSEIAIIFEPTGIYSLYLKEFCAENSIKAYIINPKKSHNFTRALGKRSKTDKIDARILYQFHKHIDLKDIQVPQIDQQAKTLASYLVSYEFALKQRISLSNHLESLRDKGLIALMKKDLKRAKMLEDKLFHDIKEYVSKNQNLREDYQRLLTISGVGEKTAIALLTLFKTYQGTNRAQITALAGLDPVRRESGTSVKDKAKISKNGKGIYRKIFYLPTVCATVHNQKIRVFYQRLLAHHKTKKLAVIASMRKILLIAHAMYRDKTEYIAV

SEQ ID NO: 201949 - protein, 377 aa, unidentified
MSKIRFVGLDVHADTIAVAVAEPDGTVRSVGVIPNRLESIRKLVGKLGSMRHLRVCYEAGPTGYVLYWQLAALGVACAVVAPTLVPTKAGERVKTDRRDAEKLARCYRAGELTPVWVPDEAHEALRDLVRAREAAKKDQLRARHRLGKFLLRHGQRPVAAGKAWTKKYLAWIKTQVRFDQPALEATLAHYLQEVEHAAEQILKLEQAIDEAVAQARPQIRCVIEALQALRGVAQMTAATIVCELGSLSRFPSPRPLMGYSGLVSREHSTGNRIQRGAITKTGNAHLRRVLVEAAWAYQHRPNVTGFLLRRQKSLALSEEVKQIAWKAQYRLHKRYRAFALRGKNKNQIVTALGRELLGFVWAIAVHTEAQLKPAKAA

SEQ ID NO: 201950 - protein, 361 aa, unidentified
MKDSGKRYIGLDVHKHYLIALGVDEDLNVVLPARRVELSHLESWMKKTFTRQDEIVLEMTTNTWHLYDELSEHAGSVMVVHPPHVALITRSQVMNDKIAASILARLLAKGLLVGIWVPPQEVRELRGLLAQRKKMTGLATQAKNRLHAVLQRHHLVHPGGNPFHETQQSWWLALPLGTLERVNVHSDLETLPAIGNMQRFADPQHLVGYAGLGTRVHDSGMSTRTGRITKAGRRDLRVVLIEAAQIAANTHPHWKAELARLEPRLGRNKAIVAIARKLLITVWYVLSQHTTDRFAQPERIAQKFLKFAYQLGKARRPNGQSAAHFVRQHLEALHLGSELTSISWGSKKPIPLPPLQHPENK

SEQ ID NO: 201951 - protein, 407 aa, unidentified
MVILRRLGQAKRRPNAFGALRCQVLGLRCRSTQPCLSRLRHCVDEAIPPRGDRFAGSEIEPNHRREPACSQIPSRPIISPNGCQAQDRRQGRDTMTTSGAWIGVDICKKHLDIAGVTGTPVRVRNDADGRTALARRLKAENVKGVILEATGGLERPLMKAFDAEAVPASIVNPARVRKFAEGTGQLAKTDKIDAFILARFGDYMKPAPTVLADEHRQKMCDLIAYRSQITQEITARSAQVKQYASSDIIERAAAAIETLRAERKVLEREIETLIKSKDDTQRVYKRLLTVPGVGLIVAATLIAELPELGRLSRRQIAALVGLAPFPNESGDRKGYRSIRGGRDDVRQVLYNSATVAVRHNPVAKAFYERLRARGKAHKVAIVATMRKLLTILNAILKTNKDWTCKAA

SEQ ID NO: 201952 - protein, 351 aa, unidentified
MGEITTIGLDVAKNVFQLHGIDADGHVVLRKSLRRSQMQPFFEKLAPCRIGMEACATAHHWARVLLQAGHDARLIPPSYIKPYLRRQKNDAADAAAICEAVTRPSMRFVPVKSQERQATLMLHSARELLISQRTALINALRGHFAELGIVVPQGARNVRQLIDLLEDEQHSPQAVRVALMPLAIALTETETQIAKLDKALLAAHRNDDVSIRLATVPGIGPIIATCLSASVPDAKLFESGREFAAWLGLVPRQHSTGGKPRLGAISKMGNRHLRTLLVVGAHAALYRMRKASSDTPLANWARGLLSKKPFKLVAVALANKIARIAWVIRARNIDFQPADATGDSAKLAASA

SEQ ID NO: 201953 - protein, 347 aa, unidentified
MLIIGCDFHPGFQQVAIFDNLTGEIQEKRLQHRVEAEQFYGSLAGQEVLVGMEACGHYPWFERLLEELGFELWFGDAARVRASVVRKQKTDRRDAEHLLDLLRRDHFPRIWVPSLEVRDVRQLLVHRHKQVQARTRTKNQLQSMALSCGVQKKYKLWTKAGRAELEQLALLPYAGERRKRLLEALDGLEAEIVELDRRVLEEARQRPEAVLLMTHPGVGSVTALAMVLTLGPAERFGSGKQVGSYFGLIPSEESSGGKQRLGKISKQGSSFLRFLLVEAGQTAARYDPQLKRFYRRLAVRKSRGVAKVAVARKLATRLYLMLREDWTYAQLCQAVMQVSPSHSVAGE

SEQ ID NO: 201954 - protein, 401 aa, unidentified
MNAVGIDVSKGKSTVAVTRPFGEVVSKPCEVRHTTSELRELANYLKSLGGETRVILEHTGRYYEPVAQMLHDAGIFVSAVNPKLIKDYGNNSLRKVKTDKADSLKIARYGLDNWAELRQHTPMDTIRYQLKTMNRQYGLYTKNKTAMKNNLIALLDQTYPGVNALFSSPAREDGSQKWVDFAASFWHVDCVRKMSPSAFTERYSKWCKRHGYNFNDVKAAEIHIETKNLIAMMPKDALTKMLIQQAISQLNAVSKTVALLRIEMKRLTEQLPEYPVVMSMYGVGNSLGPQLMAEIGDVMRFERRNSLTAFAGVDPGANQSGTYEAKSNRASKHGSPELRKTLFLVMDTLIKKSPPDDPVFRFMDKKRAEGKPYFVYMTAGANKFLRIYYGKVKEHIASLNT

SEQ ID NO: 201955 - protein, 438 aa, unidentified
MIDKILPGIAGIDIGSEHFFVAAAGAPEAVRRFGTFTSEIKLLAAYLKEHKVAKVAMEATGVYWIPLHDHLECQGLEVTVFNGAHARNLPGRKSDVQDCQWHAILHSHGLLSSCFIPPQEILELRAFYRLREDHLSMAASHIQHMQRALDLMNVRLHTVISQIHGVSGLRVIRAILAGERDPHKLATLCDLQILSKKRERVIKSLEGNWREHHLFALRQALECYEFYQEKIADCDRQIDQALTKLRGGQPPVQPSAGGKKLRHNAPRIENLHGKLLSLSGGCDPTLIAGISSLSFMKLMGEVGTDLCAWPTEKHFTSWLGLAPGKHQSGKRKRRVPRPKTVAGQIFRDCVMSIAKSKYTALGAFYRRLKARKGPAVAATAVARKLAELYYRAMTKGMEYVERGVAHYEEVYRQQTLRYLNKMAAAFGLAVTKPTAPTP

SEQ ID NO: 201956 - protein, 338 aa, unidentified
MNYVGVDHHRQYSHMTLMDQEGQVLRSGRVPNLWAEIEKFLEGGEAREAVIETGRSSYTMVDVLEEIGIAVKIAHPNEVKAIARAKIKTDKRDSEVLAHLLRMNMIPEVYRRSAENRQSQRVLRQRAFYVSAMTALKNRVYAFLAQQKEAVRETVARETNIFSVKGQKALLELDLARSEKRLLEALLKTYRHLETRIEESTALVGKLYEESREAQLIRTIPGFGKYLSVLVAVEIADLNRFPDAAHLHAYAGVIPSTHSSGDKTYHGKIIRAGNRWLRWAAVEVVWPAIRADFDLRCFYERLARGKGANKAKVATARRLLTIIYKVWKKERNYIPYRR

SEQ ID NO: 201957 - protein, 526 aa, unidentified
MALGTAQQADISVAVIHERAKQPATARRSEVVNNCAADDNCGGGRPALVRSRSQQAHPQRVRRRLPGEPVAHAQTSNRKRPREGHYISSMGGMAKRRKQHQPPQQTMNDSPQWQQYQAFGALDWGSQTHSVIVIDAAGKVMEDFAIEHSALGWKQFRQKLQVYGSIPFAIETRQGAAVEQLLEAGMIVYPLNPNRAQAYRQRKAPSGVKDDRLDAWSFADALRVDGHGWKALQPEQPLTKELRLLCRDEVSLIEQRSALIQQLRQALAEYYPAALEAFEDWTSVSAWMFLQRFPTADSLAQAGRRQWQKFLHSRRLWGSDQGPRRMEIFAHATELAGSEPTVKAKSLLALSLVQMLFAVQKQLELYRQRIEELFARHPDHDLFGSLPGAGSKLAPRLLSEIGDDRQRFEADAQALQCFGGTAPVTIRSGKDRKYWPVHQRQACNKHLRHALHLFAEQSLSRCVWAHIYYQHHRQKNQSHANALRRLAHRWLKIIHKMWLDRSPYNAELHHRNQLQHGSWIFQFQKS

SEQ ID NO: 201958 - protein, 314 aa, unidentified
MTHPETFVGIDLSKDELEIGLYPTEQIWNEMHDEAGIIRLVERLTQLSPQLIVIEATGGLQVPLVASLAAAALPVVVVNPRQVRDFAKALGQLAKTDRIDAAVLARFAEAVRPELRALRSDQAQQLAALLSRRRQLIEMLIAEKNRLSCAVKSVRKHIKTHIIWLQRQLKQVDRDLDGAIRASEHWRAQDDIIRSVPGAGQGLSRTLIAHLPELGQLNRRQISALAGLAPYNRDSGNHRGKRAIWGGRAQVRSALYMAALTATRCNPVIRPFYLRLRADGKPFKVAITACMRKLLVIINTMIRNQTPWQPADSC

SEQ ID NO: 201959 - protein, 422 aa, unidentified
MTVSTLCVGGDIHQDELHLRAADKADGHEVGQRLTVKNNRPGADQTILQLVQWLTQHGYTHLEFGLEATGLFWLPFYTYLQQSPALAPFQPTWVCFNPKLVAQFKDGLTLSEIKDDDHDALAVTERLRFGRLPVSYVPSAEWLALRMLTRYRYRLSRQIGQEKVRAFTRVFLKASEWHRGQPFSDPWGATSATLLTEFTVAEIAAMSLTQLTDLIQEYGRKHFDDPQATARQVQRTLQTSFPVTPELDAAITVVLRVAWTHIRDLEKLMRRLDREIAQRMERIGNPLLSVNGLGPVITAGIVAEIADIHRFPDHPQLAKYIGLVWRKRASGNFVAEETRLAKTGNVYLRYYLIEGADHIRQHNLEYQAYYRRKYAEVPKHQHKRALVLTARKLVRLVFALLTKNQTYVRPQAVQSKENPTPQ

SEQ ID NO: 201960 - protein, 387 aa, unidentified
MRFAGIDIASETHVVAIVNADSAVELKATPFAEDAAGNQKALALLGAPGEVLVAMEATGHYWKNLFAVLAAAGHPIALLNPLRTHRFAGEELERTKTDAIDAVGIARFAAQKRPPVTPLPGALTEELRELVRLRERLLQDFGDRVRQLHRLVDLGFPEFTRYVRTLDSELASAILRDYPTAAAFRGVSVRRLAALRYDGRHHVGLELARSLIDAARRSVGQHHSAAYRVQVRYACDDLDVLRRRLRELDRDIENTLREHEVGRLLTTIDGIGANTAAVIAEVGDPAHFRSAAALAAYVGPIPGLRQSGKRQPTRAPLAPIGNARLRAALWMPTLTAVRFNPWLRAHYQRLLARGKLPKVALVACMHKLLLAIYSGAKHRRAFVANAT

SEQ ID NO: 201961 - protein, 384 aa, unidentified
MPDVSSSAPAQVRMRAALDVHKRTIVCAAQPDDPRAGGVRLEEIPNTDRAVRALVRRLGGPTGLVVCYEAGPCGYELLRLLSAMGVACDVVAPALTPVAPGARVKTDRRDAKRLLVLHRAGALKFVAPPTPAQEGLRDLVRCRDDLVCARRAARHRVAKALLRHGHIFREGKKSWTKTHQAWVRRQRLADPLAHCALEHMLAHLDGVDAQIAAIDHQLDEIAHSEPWSDPVRWLCCFRGITTITALGLLAELGDFRRFGTARELMGFLGLTPSEYSSGQERHRGHITKTGPRHARRLLVEAAWHYQHAPRVSRRIAAIQPLVPPDVYARAHGAQIRLHHRHRTLTSHGKRSTVANVAVARELAGFLWAAMTRQPLPDHQEHAAA

SEQ ID NO: 201962 - protein, 367 aa, unidentified
MKKVSTAAAKQSKNFSQPKLTIGLDLGDRNSWYCVVDEAGQIQLEQRVRTTAKALQEVFGTMPRSRIALEIGTHSPWISRMLSDLGHEVIVANARKVRLIGESRKKDDRLDAQTLARLARIDPELLYPVKHRSAQAQADLTLIRARAGLVRARTGMVNMARGLAKSYGERLRGCNVRNMNPEKAESLSPELQAALEPLLNAIESLSERIVEYNERIENLAQQSYPQVALLKQIKGVGTLIALTFLLTLEDPHRFGKSRDVGCYLGLQPGRRNSGRSEPQLHISKEGDPYLRTLLVQGAQHILGPFGVDCDLRRWGLKLAERGGRSGKKRAIVATARKLAVLLHHLWVSGEVYEPLHNSNQKAMPAAA

SEQ ID NO: 201963 - protein, 352 aa, unidentified
MLTVGVDPHKHVHVAVAVDAAGRQVGKPLTIKNGPHLITGLLTWVRSISDEAPVTWAIEDGHGFARRLADGLLLAGQEVVWVPTRLMLAHRRLHAATGAKSDSVDAAAVAYAAIATPGLDRHRIDERVRELRVLADYRSDLVKRRTMVINQLKAQLHLWLDHTPGDLLRAKTVGSVTALVADATLRPHVRQTLHDMLTEVADLNKRIRDLDTTIRELVTPLAPALLQITGISHTSAAVLIAEIGDITRFSSSAKLARYVGCAPIPVYSSDNERHRLHRGGNRRLNSVFYTAAIVQKRWEPAAQQLLARHQPAKGSRGARRILQRHLVDVVHRAMLEDQATWTHQITRCQQAA

SEQ ID NO: 201964 - protein, 334 aa, unidentified
METIYFLGIDISKKKLDAALTIDGRHFQEVQIENRTKTILAFVRELKKKFSSLDNLVVCVEHTGVYGMPLLDVLVKNKIKICVHAALQIKKSLGITRGKNDRVDAMRIAQYSFKNKEDLVFWKPQRDCLQKLKALLVTRERLVKTRVQLEVPLAECSEFIAPSIRKDMTVYCRQAINAIRKDIMRIEKAINELVRADTQICQQRDIATSVPGIGNIVALNMIISTNEFTKISESKQFACYCGVAPFDHRSGSSIRGKTRVSKMANMTLKRLVHLAAMSAIRWNEELQAYYLRKVKGGKNKMSVLNAVRNKLISRVFACIKNRRKYEKIYQNVLA

SEQ ID NO: 201965 - protein, 383 aa, unidentified
MPRPMKELAEVEHRVATLYASLELSQSAWLVTSLSPGSVTMSKHLIPAGDGPGLLSLLARLRTKAEQVAGAPVGIVVIQEAGLDGFWVHRLLEANRIESHVVDAASIAVPRRRRRAKTDAIDGETLLRTLRAWKRGEPRVCAIVAPPSPEQEDQRRISRERAILLRERVRHVNRIKGLLASQGITDFEPLHKDRRIRLDALRTGDGRPLPPRLKAELLREIDLIELLLRQIAEVETERDSAAEFDTAQKSPIALLARLRGIGSQIASVLYFEGLYRHFGNRREVAAYAGLAPTPWRSGTIDREQGISKAGNPRLRHIMVELAWLWVRHQPDSALTRRFRERVGAETGRVRRIAIVALARKLLIALWRYVNLGEVPEGAVLKPV

SEQ ID NO: 201966 - protein, 387 aa, unidentified
MEVRMENTPPAGTNNDPVRCFVAIELSKSSWVLGFQTLLTKQTSRYQVKACDAKALLELIERVRSRVVRELGRPVEVMSCYEAGYDGFWLHRVLEAHGVHNHVLDPASLQVNRRARRPKTDRIDADRMVRALIRHLRGEPEACSVIRVPSPEQEDARRLHRERDRLIAERVAHVNRVKGLCATQGIYDYEPLRRDRLTRLDNLRTGDSRALAPRLKAEIVREIKRLEVVLEMIATVEAERDAILKEKKSTHLNADKIKMLAKLKAIGAEFSTTLVGEVFYREFANRRQLGSYVGLASSPFCSGSLDRDQGISKAGNPKARTMMIELAWTWLRYQPESALSRWFRERVGNLKGRPRRIAIVAMARKLLVALWRYLQTGVVPIGAELKA

SEQ ID NO: 201967 - protein, 458 aa, unidentified
MAHRKKKIGAQLVEDEEYQLRYERVAGIDVAKGKADVCTRLPPAREGGRRVSRTEEVAATVTVILALAVRLLADGVELVSMESTSDYWRIWFYVLEAAGLNVQLVNSSHARQLAGRPKTDRLDAQWLARLTEMGLLRPSFVPPAEIRALRDLTRTRLQLVHDRTREWQRLEKLLEGALVKLSSALSSLARVKSARVILEALAGGERDPRVLAGLAARQVRAGRAGIEQATEGMLYGDHHGRLTRIHLDHITFLDRSIAAIEDDVAAALDAIPAAQGIDAAGTRSPDPGPGAAVLPAAERLAEIPGVSLDLARAIIAETGLDMTRFPTAAHLVSWAGLTPVARQSGPRSRKPGKGHGDSYLRGYCTQAATGAATTDTFLGERLRRLSRRLGGSRARCAVGRSILVIIWHLLASPEARYTELGPGWHARKTDTDRRTRSLLNQLRALHPDSDITITEPAA

SEQ ID NO: 201968 - protein, 388 aa, unidentified
MIYVGIDIAKLNHFASAISSEGEILIEPFKFTNDADGFHLLASKLESFDKASTIIGLESTAHYGDNLVRYLVAGLYKVCVLNPIKTSQMRKNNIRKTKTDKVDTYVIAKTLMMQDTLKFISFYDLDLMELKALGRFRQKAIKQRTRLKIQLKTYVDQVFPELQYFFKSGLHQKAVYAVLKEAPSPSRIASMHMTHLATLLKTTSHGHFTKEQAKELRVLAQKSVGANDSTLSIQITQSIEQIELLDSQLKKIEEEMTDIMKFNDSVIMTIPGIGYINGGMILGEIGDIHRFSNPNKLLAFAGLDPSVYQSGNFQARRTRMSKRGSRVLRYALVNAAWNVIRNNFTFKSYYETKMAEGRTHYNALGHCSGKLVRIIWKMLTDKVEFNLK

SEQ ID NO: 201969 - protein, 423 aa, unidentified
MSKQNVELAAFIGLDWADEEHAVCLQGAGESRKEISTVDQTPEGLQAWIHQLRARFGGRPVAVAVEQARGSLIYALMHVDFLHLYPVNPQTLAKLRQAFYPSGAKDDPGDAQLLLEVLLNHRDHLRVWVPDDVLTRSIQLLTEGRRKLVGERTALTNQLIAALKMYFPQALDWFGDLHTPRACAFLYRWPSLQQLKTATSSSVRKFYQNQGYRGEDKLKQLIQDIQQALPLTGDEAVLLASTMMVQALVKQIPSLTESIEEYDRKIAALFKSHDDSTLFGSFPGAGPTLAPRLLAVFGSDRSRFEYAAEVQQLSGIAPVTEKSGKACWVHWRFACSKFLRQSLHEFAGQSILKSAWARAYYQQQRARGSSHQAALRALAFKWIRIIFRCWKDRTPYDEAKYCQSLQLRGSRLASTLKTASTEV

SEQ ID NO: 201970 - protein, 522 aa, unidentified
MPESCSYGSDTVSRVIHNQPERAPKAKRRMVVNNTAAAQNLAVGNLAANRTRTYESSPARTTHRTPTSSLASGPIAERTSPHEGHCIRSRPSRSTSPNCRPKAVMKSWNEQTHFAGLDWADDHHDVIVVDAHGQIVLEQTFAHSLEGWQQFEAALKPWPQLPVAIETSSGPVVDQLLQRDFLIYPVMPRAAARYRERKCPTGTKTDHHDAWSLADALRTDGHAWKALTPLDPLTAELRLLCRDEVALIEQRTALVNQLQATLKEYYPAALQAFEDWTQPVSWTFVAAFPTPQALQKAGRRSWEKFLHTHRLWRPQTVEGRLQIFAQATRFAGSAPVTAAKSLLALALVKMLQVLQTQLDHYRQRIQELFNQHPDRDLFGSLPGAGPMLMPRLLSGLSSQDWSRTWLVQAWAGTAPVTYQSGQIKRVKLRRACDHFMRSTLHLWADQSRRFCTWAEAFYQAHRDKGQSHACALRCLAHRWLEIVGAMCRTHKPYDAEHHLREARKHGSWTLQLIQAKSAPAKS

SEQ ID NO: 201971 - protein, 342 aa, unidentified
MEEKEKKKQSFIGTDVSKLTLDVSIINSEGLNAYARFENNVKGFKALEKWLQSTGFFSYEQALFCMEHTGIYTREFVTFLMSKGAQVWMESALHLKRSMGMTRGKNDKVDSWRIARYAMTNQDRAKLLTLSGKTLQRVKDLMSSRDRINKSYQSVRVSINEMERVDKQTAKELSKVNQPALKGMLKTKKAIENRILELILSDEELKNLYSLITSVKGVGAVLATELIIYTQAFTRMDNGKQLACYCGVAPFSHTSGTSVRGRMGTSNFANMNLKSTLHLAALSSTRYVPELKAYYERKVGEGKSKMSVINAIRNKILQRVLAVVKRGTPYVENYPKICLENS

SEQ ID NO: 201972 - protein, 416 aa, unidentified
MIDQETFTWFAAIDWGTERHQACVLDARGGIAGERAFSHDGAGLALLCDWILSIAGSATVVAVAVEVPHGPVVDSLLDRGMAVHAINPKQLDRLRDRFCVSGAKDDRRDAYVAADGLRTDRHLFRRLHVADPRLVELREWSRLAEELQQERVRLSNRLHDQLWRYYPQMLGLSDDIAADWLLDIWTMAPTPAKSKQLRKTSVEQLLKRNRIRRIDAEAVLRTLRQPAIKVAEGVTEAATIHIRSLITRLRVVNRELRDATHKLDELCAGLDEAPPAAAEHGGEQHDIKILKSMPGIGRINLAILLAEASGPLSRRDYQALRTLSGVAPVTKQSGKSRVVVRRYAAHVRLRDAVYHWARVATQHDPKSRSRYVALRQRGHSHGRAIRGVADRLLALACTLLQRQTVFDPDFGTPEVT

SEQ ID NO: 201973 - protein, 414 aa, unidentified
MFAVGVDVSNGRSMVAVLGARRSEVVQPHEVPHTADGFAELAARLHAQDGEVRIVMEHTGRYYESFAMSMYRAGFFVSAVNPLAIKGYQEGISVRKVKTDKADALKIAQFAIDKWEILPHYTPMDTIRYDLKTLHRQFQLSSKTKTALNNNLIALLEQSYPGANRYFDSPVRPDGSQKWVDFVDTFWHVDCVARVSRKAFVERYQKWCKRHGYNFSEAKAVEIHEDARQRFPLVPKSDTCKLMVREAVAQLNAVSRTVETYRAEMDRLASQLPEYETVMAMTGVGKSMGPQLIAEIGDLRRFAHQKSLVGFAGTDPIKDDSGDKVSDSKPSSKRGSPYLRRTLFVIMTILLQLQPPDDPVYQFLDKKRSEGKPYYVYMTAGMTKFLRIYYGKVRDCLKEKGLWEQPNVDEVNPV

SEQ ID NO: 201974 - protein, 405 aa, unidentified
MRYVGLDVHKRSVRVCGIDSFGRKAFEANVACTRDDLLTFARRQLHEDDQVVMEATTNVWAVAELIRPHVGRVVISNPLRTKAIAQAKIKTDKIDAEVLAQLLRCDYLPDVWEPDGATQRLRQLTTVRSSLMADRTRINNRIQSLLASRLIHCPYATLFAKRSIAWLRSLDLNPDDRRMIDCQLRLLEAMDRELKQVDQQLQCLAHDEPKARLLMTLPGVSHASALTLLGALGDIHRFRDGDHAASYLGLAPSTRQSAQRCYHGSITKAGNPHARWMLTQGVQHLARHPGPLGAFFRRIARRKSRQVAVTATARKLVTIAYLMLKHNEPYRYAVPDTLHRKFNRLRKTAGETPGRRCADLADTCRHAGLPSPLRFDELPAGERRVLAETGTEGFARQVSGRDDTA

SEQ ID NO: 201975 - protein, 394 aa, unidentified
MRFVGIDIASETHVVAVVDETDAVLVRPTKFTEDAPGYDRLFSLLGTPADTLVALEATGHYWKNLFAVLVTRGFAVALLNPLRTRRFADEELARTKTDAIDALGIARFAAQKRPAPTRLPDRATEELRELVRLRDRLVQDFGDHLRQLHRLVDLGFPEFTRYVKSLDSERATAILHDYPTAAAFRNVSARRLAGLRYDGRHKVGDDLARALLDAATRSVGQHHGEAYRLQVRYACEDLDLLRRRLRTLERDIERTLDDHEIGALLTTIEGIGPQTAARLIAELGDPAEFRSAAALASYVGVIPAIRQSGKWTSSRAGLSPLGHAALRAALWMPVLTAVRKNPWLRAYYQRLIARGKLPKVALIAAMRKLLIAVYTVAKTRRPFVSQLAPQEARA

SEQ ID NO: 201976 - protein, 333 aa, unidentified
MNYKYFVGIDVSKSTLDYSVLSEGKEVFHIQLKNSIEGLEQFLQKLSVISQNDNFDDVLFCMEHTGIYCSHIFTLIEMYDINLWVESSLRIKKTMGLTRGKTDRIDAKRIALFSYRYQDKIRLWTPERTIVKSLKHLLTFRTRTIETIKLINAPLKELKEFIADDEYTHLSKLHINTINALEDDLKGINKEIDKLIKEDARLSYLFSIVNSVNNIGPITTAVIIATTNEFLGIKDGKKYACYAGVVPFQHQSGSSIRGKTRVSHIANKTVKTMLHMSALSAISRPGEFKDYYQRKIAEGKNKMSTINGIRNKLVLRVFACVRDGKLYDNNYQY

SEQ ID NO: 201977 - protein, 383 aa, unidentified
MPVFIGIDYHKAYSVYNVLDVQGESLGHGRIDHAHPEDFRVLVRRWPGCRVVFEAGMNWHWLFEILERELSPERIVLANPFKTRIIAEAQIKTDKVDARILADLLRGKLVPSVHIVGRESRQIKEVLRQRCFFVRQRTMLRNRIHRLLGAQHEVKLPQCSDLFGRKGLNFLEKLELPAPASLLLTQQLALLKQLAVRIHEDEKALEGLLQETPALNSVRSLPGMGPILAAVVVSEIDGIERFPSAQKLCGYAGLCPSTHSSGGKTFQGKLLRHCNKWLRWAFVEAAWVAIGCSAYFGDFYKRKRALGKKPGLAILATARLMARITWQLLTQRRAYTSVAESQYLRSQPAQRIACAGGLAKEVHKPLKDPSDFSRRRLSPAAPE

SEQ ID NO: 201978 - protein, 354 aa, unidentified
MFFVGLDVHQKRSSVCILNEVGQKVKEFTVVGDWDQLVTEVAKLPRPMAICFEASTGCGVLCERLRPLAQRIEVAHPGQVRLIFRAKKKNDRVDAQKLAKLIYLGEVPQAYIPQAKVRAWRSLVECRRQMVDKRTRCKNSLRSLLRGCGIQKIKRAGLCPAAPPRKGLWARKGLAALRELELPCVQDRLRCDWLLAELEQYHLHVKEVEKELDRLAEDHAGVALLQSIPGVGPRTAEAVLAYVDKPERFNRSKQVGAYFGLVPSQDSSSEVNRLGHITRQGPATVRKLLVEAAWQGIRHSPTLKAYYQQICQGKKERKKIALVATAHHLLKVMQALLRSGELWREQQEKKEVAA

SEQ ID NO: 201979 - protein, 393 aa, unidentified
MLNPFNQKEATMETATTCNIEYTLERVLYMAIELDNNRWKLGFTVGFGQKPRERNVAARDIRSLCQEIQSAKRRFHLPKDCRVLSCYEAGRQGFWLHRFLIHSEISNVVVDAASMEVRKKRRRAKTDRIDLEKLLRMLIRYHAGDEKVWSVVRVPSVEAEDRRQLHRARWTLTSEKNRHINRIKGLLATQGISLPVNGDLPKELNHVRKWDGSLIPTMLRSRLICEYEILQLVEQQIKVIEQEQRQSLRHPEHPSMTMVRDLMRLKSINIHTAWPLIMELFSWRQFRNPKEIGGLVGLEPVPHQSGETDRELGMSKCGNTRLRSLAVEFAWQWLFHQPNSKLSLWYEKRFGNGSRRVRKIGIVALARKLLIALWRYLETGEIPEGAELKAVTL

SEQ ID NO: 201980 - protein, 372 aa, unidentified
MEQNTTYVAFDTSKETIAVALAEGRWRGEVRFFGTVANRPEAVRKLVDKLAGRHSRLAFCYEAGPTGYGLYRQIRALGHDCQVVAPSMVPVRPGGHIKTDRRDATTLAALFRAGELTAIWVPDAAHEAMRDLVRVRQTATEGVRRARQQLLSFLLRHGRIYPTKRHWTRAHRRWLAEQRFEHPAQQIVFEELIQAVEQAIARRDRLQQQMIALVPSWSLQPVVAALQALRGVAMVAAIILVAEIGDFRRFATPRQLMAWLGLVPREHSSGGSTSRGAITKAGNGRARRLLIESAWTYRLPARIAAELLARSAALPEAVKAIAWKAQVRLCARYRRLRCTGKPTNVVTVAIARELAAFAWAIAITVMPAPQTA

SEQ ID NO: 201981 - protein, 400 aa, unidentified
MMTPDDIDVWVGLDVGKSAHHAHALDHDGNTLYDKPLKQDEKAIRTMLGKLSKHGRVLLVVDQPNTIGSLPLTVARNMGIAVAYLPGTAMRRTAQLLPGDAKTDRRDAHVIAWAALKLPETLRDAGPDDETLAALKLLAGHDEDLAHESTRHVNRLRSLLLQTRPAFERALKGERITRDATLALLERYGGPMGVKRAGIEDVKDWAKSNGLRAGRIIDDMFKAIGEQTVTVPGTLMAETIIPSIAHDIKAIRDRRREVGRQVEKLLEDHPLLTVPASMPGIGVRTASNILLGIGGDIANFKSSAHLAAYAGISPVTGQSGTSIKGERPSRRGNKRLRNALWQTAFVASTKHPPSVAYYKRKREQGKHHNAAVICLARRRCDVIYSMLKNGTLYQEPALVA

SEQ ID NO: 201982 - protein, 426 aa, unidentified
MNMTTLVNTTLLSHGTEPAPVAWIGLDWGDRSHAFALQAAGGPIETGTLKHSAETLHQWLGELAQRFGGRTVALAIEATRGAVIHALIEYPWLVIYPVNPVTSARYRKAFTPSGAKDDLPDAGVLLELVRDHVAKLRCLQFQDEQTQKLMALVQARRDMVNRRTQVLNQLTSLLKSYYPQALQLVGNLHSQLAIDFLTRWPDLISLKVARPSTVKRFYYAHNLRRPQLLQHRLELIGQARVLTRQDALVEVCRLQLALYLDQLRVFGKHLPLIEAQIKATFREHGEAYLFRHLPGAGPHLAPRLCVAFGTLRTVYPDPSSLQKFAGVAPVRESSGRQSWTHWRWLAPNFLRQSFVEWAGQTVMYSPWAKTYYQRMIAKGKSHHAILRALAFKWIRVLWKCWQTRTPYDEARYLKQLIHRKSPNAAA

SEQ ID NO: 201983 - protein, 408 aa, unidentified
MESQIIFGIDVSSKSSTVCVVNDRIKQGESFRISNDSFGYQKLYEQLNQYLITPLVVFEATGVYSLSLQAFLEDYHIKYLKLNPLKAKKLMDNNLRHNKTDKVDAYRLALIQFNAPQKLRDPQPREYHELQNASRYYEELTRSIVTTKNQLHRNLQSTFPQIEEILSHPSGRIYWALVSLFPHAGYVLEKNETQVTQMLNSISGIGQQRARYLTTRLYAFAREAYPYDSKDSIIVRAIQRNISNLFSLQQERDYVINYMEKLAKAVNARALSIYLSIPGVARITAVRLVAELGDLRRFSTSAQIDAFVGIDPGRYQSGEKDSSLGITKHGNHIARKILYRVITQMETVKATQPCHITDYYDKKKRSSNSQGYKKIAIASVHKLIRTMFALIKHDQLYDYNVATQNQRL

SEQ ID NO: 201984 - protein, 367 aa, unidentified
MSSVIYVGMDVHQDSFSLCALASSSGEIIRETRCSADVKNVVKFINHLPENESNQVTLGYEAGIWGYSLHNRLVELGYDCVILAPSTMYSNAKHQMVKNDHQDAQMIAHNLASGTYKVVYVPDQEDDEVKEFIRLIKAMKKELKQTKQRIRAFVLRNGFRFEKTPWTGVYLEWLSQLQLPRIKKMVLDEYLVHYHELTDKIERLSRQLGDLSHQERYQEPISKLRCFKGIDTVAAMTIHVETSDFSRFPNARAYTAYLGLTPSEHSSGKNVSLGRITKQGNSTIRTTLVESAQGLVRGNPSKKSKKLKARQINQSGRVINYADRAVNRLHKRYERMIHAGKPRNVAIIAVARELACFIWGMENGKIA

SEQ ID NO: 201985 - protein, 377 aa, unidentified
MSNLLFVGLDVHAETIAVAVAEAGGEVRSLGAIPNRLESVRKLVRKLGPVEHLRACYEAGPTGYVLYWQLTQLGVLCEVIAPSLVPTKPGDRVKTDPRDARKLARCHRAGELTAMWVPDAAHEALRDLVRAREAAKKDQLKARHRLGKFLLRHGRRPDGIKAWTKAYLEWIRSKVHFEQPALEATLADYLEEVDHAAARIVRLEGAIDEAVRQAPPEIRAVIEALQSLRGVARTTAATIVSELGSLSRFASPRQLIGYSGLVPREHSSGNRVQRGGITTTGNGHLRRVLVEAAWAYQHRPNVSGVILQRQKNLALDEEVKQMAWQAQQRLHQRYTALAAHGKNKNQIVTAVGRELLGFIWAIAVHTERKQRQLTKAA

SEQ ID NO: 201986 - protein, 363 aa, unidentified
MEGMFYVGVDLHKTQFTICILISGAVLEEGTKFEMNKNGYQAFISLMRGLSSSDTYDDIILAIESTANSRFFRDMMIGCGFKVVVVNTLRFKVVNLSTKKTDKNDARTLAEFLSKDILPVSHLCSAESEGLRRILKSRNLMVQDMVALKNQAHAVLLAYGHITKTAQFQSKRERNKILEKLPTEIARTVGIIFETINVVENQKKVLEGKLRTLTSKDPTVNLLMTIPGIGIVNACTIRAYIDDIDRFESYKHFSAYCGLVPWVQTSNESIYYGRITKRGPQELRTALVQCVVAMVRMEDKTSNYKMMRQYHELKNDKSSGKAIIATARKLSRIIYIMLKTNTPFDSRKLTDSTEKPSYRMSES

SEQ ID NO: 201987 - protein, 349 aa, unidentified
MGIIGGLDVHRSQITYDWIDTDSGQRQRGRLAPAHREHLRVWLGQFAGQEAAFALEGCTGWRYVVEELQRAGITAHLAEPADTSAARGPKRRAKTDQADARHLRELLAAGRLPQSWIPPPHVLEVPTLVRCYKALTDEHTAWLQRIHATLFHHGVPAQRNLLAPDRRERLERGSGLSPAAHQLVTVALGTLDHLDAERDRLRAELVGVARRQPGCRALDALYGIGPLTAVAIWAELGDVGRFTSSRQAVRHTGLDVTVYSSDGKRTPGHLARQGPPVLRWALFEAAKCAARAASPDHAYYLQVKGRLGGNRATLSVARKLVRRCYHTLGALGEQAYAPPSDSPDLGQVA

SEQ ID NO: 201988 - protein, 338 aa, unidentified
MEISTVGIDIAKSVFHLAAFDKNGHIVVKKRFSRSQLLKYTANLFVKVIGMEACSGAHYLARILVAQGHTVRLMPPEYVKPYLKSNKNDFLDAEAIAEAVTRPTMRFVAIKTDTQLDMQAMHRVRERWIGRRTALINQIRGFLLERGITIRVGAEHLRKNLPTILEDANNGLTPCCRQLLQQLREELQQLDLELGGVTREIGKLAREDESCQRLTSVPGIGPIISTALTAAIGNGTGFQKGRDLAAWLGLVPRQNSSGGKTTLLGISKRGNRYLRKLFIEGARSAFCRLNRKQHALGNWMNQIEARKPSNLAVVALANKLVRIAWAVLTTGQPYRAVA

SEQ ID NO: 201989 - protein, 362 aa, unidentified
MMIIGCDFHPSGQQVFGMVKETGEVFADQWIGHQGTEVDEFYGRLPAGVVVGVEASGNLLWFERRLAEYGHELRLGDAARIRACEVRKQKHDRRDAELMARLLAEDRFPQLGWVPSLGERDLRQLLRHRDQLVGMRRQVKNQLQHLALNQGQQKKRQLWTKAGRELLERLPLEPWTARRRDDLLRWLEQLNGECAGLDQAVTEAAEAHAETRRLMTHPGVGPVISLGFVLTVGPTERFQRSRELVSYLGLNPAEHSSGERQRRGGISKQGNVFLRRLLIQGAQTAVRGDAELARQYRRLAAKKHRAVAKVMVARKLAVRLFWMRKTQQTYPELVRMRGSSSHFGVARTERLSERPASSQGAE

SEQ ID NO: 201990 - protein, 332 aa, unidentified
MKIDFFIGIDVSKNELDYSVVKSGVELFHLKTTNSLDGIRAFVKAFKSKGGKLSNALFCMEHTGIYNNPLLNYCTKQKVAVWLESAIHIKKSSGLQRGKNDRVDAFRIAIFAYKNREEVKFWEPKRYVIQRLKYLLGTRSRTMNALKQLSVPLEEEKEFTDSRITKGCLNSSSTKALKTELKNIEREIKLIIKGDNELKRIYDQVISVEGIGMITATSIIITTNEFKDITEAKKFACYAGVAPFEHRSGSSVRGKTRVSKMANKTVKTLLHMAALSAIKIGGELKDYFLRKVAEGKNKMSVINAVRNKLIQRIFACVKQNRKYEKIYTNSLA

SEQ ID NO: 201991 - protein, 357 aa, unidentified
MRSSNIKYIGLDVHKEAISIAVLNAAGKLVMESVIETKASTLVQFLDGLRGELHVTLEEGTWAAWLYDVLKPHVRELVVCNTRRNALLKEGSKSDKVDARKLAELLRSGMLRAVYHGENGLRTLRELARSYQVISKDLSRVMNRLKALYRSWGIPCTGTQVYGQRHREQWLQKINEAGVRRRAELFYQQLDGLQGLRRTVRGELLAESRKHGGVKLLRQIPFIGPLRAAQLVALMQTPHRFRSKRQLWTYSGLAVVTHDSAQYRYVDGQLQRSKKPQQVRGLNQNHNHAMKEIFKSAALSATGRAGPFQDFYEGLLARGMKPELARVTLARKIAAITLTLWKKGECFDAGYVKRQAV

SEQ ID NO: 201992 - protein, 390 aa, unidentified
MYYCGIDVAKRKHAIALIDQHGQAVQRSFTMENTRAGFDQLLQALTALDGPVLIGLEATGHYGWALYDELTHHAYPVVGLHALQVHAFRKSGVRQVKSDRTDAVWIAEFLRFSQPEPAQPTTAVFLQLKDLSRFHYHLSEPIGDAKRKLLSVLDRVFPEYETLFSSVFLTTSRQLLAPAASAHELAEFDLQELTEQLHTARRGRFDRTKAAALHTLAQQSLGVRFLADAAQLQVRCLLAPIDLLEEQRHLVDDALAQLRDQIPPYITSVPGVGPTTGAALLAEIGDIHRFDAPEKLVAYAGIDATVYQTGQFEARQMHISKRGSPYLRHALWQAASRAIMHDAELRAYYDRKRQEGKAHGTALGAVCRKLLTRVYIVLKENRPYQIRTAR

SEQ ID NO: 201993 - protein, 335 aa, unidentified
MNGSTGRWVGIDISKGKLDVALLDERGKIRNHVFANDSKGHTALITWLRERSPDAPPSVCMESTGHYGEAAATALADAGYRVSVVNPARVKGFAQSELARNKTDRADAALLARFGLALQPEVWVAPSREVRELRSLVERLQSLKEMYQQETNRLEAAAQQPSMRSSIESHLQWLQVEIKALERQIDDHIDRHPGLRADVELITSIPGVGNTTAAKMLAYLGDVRRFRNAKALAAFIGVTPRLKLSGSSVRGHSSISRSGHAQVRHALYMPALVALKHNPLVHAFGVRLKEAGLAPKAVVAAGMHKLVLLVYGILKSGQPFNPTFGVNRLDIQDGI

SEQ ID NO: 201994 - protein, 359 aa, unidentified
MSLQQDVRPVIVGGVDTHKDLHVAAAVDGHDQVLGTNTFPATRHGYKTMLAWMRSFGDVTRIGIECSGTYGAGLLRYLQQASITTLEVTSPDKSVRRKRGKDDSIDAENAAHAAFAGIRTVTPKTRDGMVESLRVLKVCRKTAIAARRVALQMIQTQIVSAPEELRDQLRSMTRMQLIRTLASSRPDLGGYRDVMTAYRIALKSLARRYVELHDEIADLDTMIKAIVDELAPDLVARTAVGYESAAQLLITAGDNPDRLGSEASFAALCGVNPIPASSGKTQRHRLNRGGDRAANSALHIIAIGRLRLDVKTQEYVARRLTEGNSKLEAIRCLKRYIARELFYLLRHRQREIGQSRIAA

SEQ ID NO: 201995 - protein, 343 aa, unidentified
MERYVGLDVSLELTSVCVMDNTGKTLWQGKCASTPEAIAKTVRAKASNATRIGFESGPLSAWHWHELRKLGLPVVCLDARHAKAALSLQMNKSDRNDARGLAQIVRTGWYREVAVKSVDSQIIRTLLTTRAQLVRMRVDLANQIRGALKPFGLLAGKGSGLPFIKRVRALVSGGPLQEAAEALLVAWEVIDTQIGGLSRRLITIARKDEAVKRLMTAPGVGVLVALTYISVVDDPQRFAKSSSVGAYVGLTPRRFQSGEEDYTGHISRCGDKLLRTYLFEAAGIILHRVTKWSALKSWGTRLAKRIGTKKATVAVARKLAGILHRMLCDGSDFRWSAKEGQAA

SEQ ID NO: 201996 - protein, 338 aa, unidentified
MSLYCGIDLHANNSYVVVSDLEDEVVLGQRYPNDLGRILGALEPYRVELSGIAVESTFNWYWLVDGLSEAGHTVHLVNPLAAKQYEGLKYTDDRSDARWLAKMLRLGILPTGWICPPGERAVRDLLRKRVQLVRQRVASRLSLRNILERTTARRLSGNALERLSEEELSGWIEDEHVRLSMTATLAVIEALNEQIKLLEGVVFEQARKASAFSVLTTIPGVGPILASTIQYETGDLSRFAGVGHYASYCRLVRSERLSNERRKGQGLRKNGNAYLSWAYHEAAHFAVRYQPSARQWHQRKLSKTCALVAIRALAHKLARAAYFMMRDQVAYEPARLFR

SEQ ID NO: 201997 - protein, 430 aa, unidentified
MKSNTQNAKIEAITEKTLVLGIDVGSETHYARAFDYRGIEYSKKPFKFSNTEAGFVTFKEWILDLKERHEKDKVVPGMEPTGHYWFNLGKFLQDNEMKPVLVNPHHVKKSKELDDNNPTKNDRKDPKVIAGLVREGRYMIPYLPDGVYADLRTASNIRFQLQAELTRIQNRISRWFNIYFPEYKTVYGKPDAKSGMLILKAAPLPEDILTLGIDGVNQIWRDAKLRAVGKARAKTLIEAAEHSVGSKEGAVAARMEIRMLLEDYESQNMRLQEVMVLIEELVRKIPMAEKLLEIKGVGIRTVSGFLAEVGDISRFNNPKELQKLAGLALVENSSGKHKGKTTISRRGRKRLRYLLFEVAMSLVAKNPEFRELHNYYTTRRLNPLKKMQSLMAIAAKLIRVFYVMLTKGVNYDPKKMVNDIKRPAVYLQTA

SEQ ID NO: 201998 - protein, 378 aa, unidentified
MKASKPGSSPVGEWVYNVVGIDPHKRTLTATVVDARGGILASEHFRVSGDGHRALEAWARSFGPIARWGVEGASGWGRHTAVFLCGRDHDVRDVCPTRTARSDRARQRGKSDMLDSERIARETLAHPLLPRAFKRAGDGQGPDEQRELLALWHNARRSILTSRQHLLNEAESLLADLPLDVREQLPDSKAVRPRLAVLAQRNRRRRHDAPTTLRLRLLDAHHARIAQLDREENNAVKQLEALVRVSASTLGELCGLSTRSVAELLVEVGYPRRFTEGGFARFNGSAPLAASTAEGPGEPVRHRYNPGGNRRVNAVLHRMAVTQLRCEPRAQAIYERARARGHTKREARRILKRHLSDVIHRRMMRDLKAASASALLAA

SEQ ID NO: 201999 - protein, 349 aa, unidentified
MNTIARIGVDLAKNVMQIHAVDQSGHIVTRKAISRANFLNWFANLPPCLVAMEACSAAHYWARRLRSLGHDVRLIPPQFVAPYRKGGSRMKNDALDAEAVCEAASRPQMRFVPVKSPAQQSVLVLHRLRTGYVEERTALVNRLRGLLAEFGVFLPQGIDQLHAHFVEHIEDGTNELSGTAREALMRAWTQWQALNQEIAWFDRQIATHARQDPNAKRCMDMCGVGPLTASATVATIVDARQFKNGRQMAAWLGTVPRQKSSGGKQRLGRITKQGNEYLRMLLFLGARAALQTAPRRNDRLSRWIVQLQARVGYYKTLVAVANKNARILWAILAKGAKFDPAHVRQPAVT

SEQ ID NO: 202000 - protein, 343 aa, unidentified
MGEVSTIGLDIAKSIFQIHGVDVDGAVVIRKRITRAKLLEFFAALPACLVGIEACPTAHYWSRRLQALGHTVRLLPPSYVKAYVKRGKNDANDAAAICEAVTRPSMRFVATKSEQQQSGLMLHRSRQLLVCQRTRLSNAIRGHMAELGVIAAKGRNGTAELLKIIANEQDDRVPAAARFSLDVLARQYAVVRAEIVAIEKRIHAWHRSSEESRRLEEIPGVGPIVATALVAEVGDWKEFTSGRSLAAWIGLVPRQHSTGGKQRLGGISKQGNRHLRWLLVAGAMAVIRYARQHGTKRPWLTRLMDRRPIKVAAVALANKIARMAWAMMVRGERFREPKLLPAA

SEQ ID NO: 202001 - protein, 402 aa, unidentified
MNPAALIAQLRSVPTTLGQPESGPYRVARPRMTRDDRRLPRNAARHLQRDAYPEDEPMTPLTNRPPYQLFVGIDIAATTFTAVWTTDGPPRERARPFAQTPAGFAALQDQLRATGVAPAHILIVVEATGSYWVALAVCLHQAGYVVSVVNPAQAHNYAKSLPRRAKTDVLDAPVLAQFAAERKPAPWTPPPAVYHELRQRLVARDALLEMRQQARNQRHALLQWPIVIESVKTHLDGVIMELDQRVAALDAEVAQVLVDGAWAESATLLLSITGIGLVTTAWLLVGTLNFAGCASVASAAAYVGLVPLAHESGSSVRGRAQIGHGGHKRLRTALYLATLTAARFNPIIKAHYERLRAAGKPMKVARCAAARKLLHLAWAVVTKRQPFDPAYRERLVEERLAA

SEQ ID NO: 202002 - protein, 346 aa, unidentified
MNKHTTIAVDLAKCVFEIAVSHRPGRVAERHRLARARLLPFFAQRPPATVVLEACGSAHHWARELQALGHRPVLLPAQHVRPYVRRNKTDRTDTAGLLEAFRCADIQAVAVKSVAQQTLTSLHRLRSAWLATRTARLNTARGILRELGLIIPVGARHVLPRLATLLDDPDSPLPMALRPTLTDVCSEIRELQAKIRQLERQLEALARQIPAVTRLRTAPGIGLLTATALVASVGDIHRFRSGRHFASFFGLTPREHSSGSVRRLGHISKRGDPYLRMLLIHGARSVLWTAKKLAHPDRLRAWALQTERRCGHNKAATALANKLARIAWALWKHERNFQSSPPPQAT

SEQ ID NO: 202003 - protein, 343 aa, unidentified
MKLTRVGVDLAKQVFQVHGVDRAERAVWCQRLKRGRWITELERNVEPGCEIGMEACGGAHHWARLLQSKGYVVKLIAPQFVKPYVKSNKNDANDAQAICEAMSRPSMRYVAIKTVEQQDIQAVHRVRASLIGERTAKANQLRGLVYEYGLVAPREIASLRRAVPAWLEDATNGLSVRFRALLAALYRDLQGLDERVHELDREIAALARENEAVRRVEQLRGIGPLTASALVAMVGDGRQFKNGRHLAVALGLTPRQHSSGGKEKLLGISKRGDKYIRTLLIHGARSALRTAPGKTDRLSRWALALAERSHPNVAATALAHKMARVAWAMLRNGTHYEPERIAA

SEQ ID NO: 202004 - protein, 318 aa, unidentified
MKEKLRFLGLDVHAETIAVAIAEADGEVRGLGTIPNRAESLRKLIKKLGPTEKLRVCYEAGPTGYVTYWQLAELGVKCEVIAPTLVPVKAGDRVKTDRRDAEKLARCYRSGDLTAVWVPDEGSEALRDLVRAREAAKQDQLRARHRLNKFLLRSGQRPPSGIRPWTRSYLIWVAQLRLTQRAQEATRIDYLHEVEHMRERVARLEQAIAEAVKLASPGLQQVINDLQALRGIADISAVTIAAELGQVSRFDGARQLMGYCGAVPSEDSSGKPTRRGSITKTGNAHLRRIVVEAAWSYHRPPMYLVRIAQTTGEYFGRG

SEQ ID NO: 202005 - protein, 403 aa, unidentified
MTKESLCVFAGVDTHKDVHVAAVVDERGKILDTASFDANAKGYAALQRWLEEFGTLVRVGVEGTGSYGTGLTRHLQGNDVEVVEVNRPNRQMRRQRGKSDPVDAEAAARSALNGEATVVPKDHDDIVESIRVLRVAFCSARDTRTRLALQIRDLIVTAPAALRESMPAKTADRVAHCAKFRPGNVRDPHEATRLALKTLSRRYQDLTDEMRDLTKFLDELTKEANPALRAAKGVGVDVAAILLVAAGSNCHRLRNESAFASMCGVSPILASSGQTNRHRLNRSGNRQANNALWRIAMVRMTTDEETKTYFARRTAQGKTKRDVTRCLKRHIAREVFLLLQNPAYEEVGPQLRTTRTSAHISLQTVSDDLGVWPTKISRIERGLDHDDEFVAIYQAWLNERMAA

SEQ ID NO: 202006 - protein, 461 aa, unidentified
MNNKIFIGVDVSKGYADVEFRNQAGTFLKQGRVFDDTAADHRALSDEMSRLREKNADAEFVVGLEASGGLERNWEKFFRALKDNFALELLVLNPYAVKKHLERNLRRNRTDKISAQNIADYLAVGRRRQDIEHQPRLTGSCTLYRCINSAIGRRVQAQCELQSLLPTVQPELVQYCRDGLPGWILELLLAYPTAARLAKARVKTVAKIKQLSESKASKLIAAAKESVASQLDEHTEQTILFLVREIEAQNEKIAQLQQILVDSLKNDQEVKIIDSVTGIGTWTAIVLHLEYGNLERFHSADAAVAYAGLDPRIDESGDLTRHCGISRAGRSRIRAALFMPTLAAIRFNPIIRRFYQRLIASGKDEKLAVVACMRKLIHIVYACCVTGKYFDPNYQKQSPKLTVEKSTGFQSVAQLLPSTKRALSTAAPVSRKEAKKRKAAAMPQKGVPPLMRGLRLPPNEG

SEQ ID NO: 202007 - protein, 417 aa, unidentified
MKLFIGLDVSSQKLDTCFLTDSKEILFEGSLSNDLIGASEIKQKILEYQETFGFYQIVIGMESTSVYSFHPSMFFYLDEDLKQLPVEVTVENPYRIKQYSRMFDQDKTDKIDAQIIADYLRVDLHTLSPIKEEIYVGLQRLTRSRYQLVTQMVEAKQHFLENLTYKCNTLSKELANEDNKTSVFGTTIMNLLTEDITLDEFSEMPLEEAAELLQKLGKGRFKNPEQLVKSVKKAVRSSYRLGKVTKNSIDLVLGIIANEIKFLKKQIKEIEKAIIALLETIPEAQCLLSVPGLGPVYTAGLIAEIGQIERFDDQSKLAKYAGLTWTKNQSGNSQSENTPLNRSGNRYFRYYLIEATNRVRITLPEFKEYYQKKKNEVPKHKHKRALVLTGRKFVLDRCATTQRSTLSAKEGGDRKIT

SEQ ID NO: 202008 - protein, 343 aa, unidentified
MDHFAGLDVSVKETSICIVDDTGRIVREVKVASEPDALLQVLKNLIYRFKRIGLEAGPLSQWLFSALAEAGLPVICVETRHMRAVLQAQINKTDRNDARGMAQMMRAGLYRPVHVKTLRSQKLRMLLTHRKLLQSKAIAIDNDLRGTLRNFGLKVGMVGTVKFEARIKELVERLPDLAELVEPLLIVRRTLREQIGILHRRLLAIVRNDDVCRRLMTVPGVGPVVALTYRATVDVPARFRNSKAVGAAFGLTPSKYQSGEINRTGAISKCGDEMMRVMLYEAAQIMLVRLAKWSWLKAWAMKIARHRGMKKAIVALARRLAVIMHRIWVDGTEFQWTREVTAA

SEQ ID NO: 202009 - protein, 346 aa, unidentified
MLYAGLDLSRKRVDVCLLDEHGTRMETTAAPPDADGLRGLAERLAGHGQPIRAAIESMNGARFVHDELEQLGWEVALADAQKVKGLAPLAAKTDRIDAYVLAELARRDLVPVIWLPTPGVRAERERARFRLHLVRHRAALKNRIHATLITHGLSRPVADLFGMRGRKLLDRLDLPEPWASTTAASLRLIERLDEQIAACEAELRALGADHAYVPLLMTAPGVAWVLAYTIASEIGEIERFATPKKLVGYTGLCPRVYQSGASDRRGPLAKNGPDHLRWALIEAAVHAARHPAYAAHYEATKKRLGRQRGAKVARVEVARKLAEAIWYMLSRSQPFAPAGPALPLVA

SEQ ID NO: 202010 - protein, 356 aa, unidentified
MNKISKLSFEGQQIYVGMDVHKKSWSISIHTDAFEHKTFTQPPEVGTLVNYLKRNFPGASYKSVYEAGYCGFWIHDRLQENGVQCLVVNPADVPTKDKERRTKTDRVDCRKLARSLRSGEIKGIYVPSRPKVEDRSLIRTRQSMVKKQTRCKNQIKSILHFYGIQIPEELANSNWSKRFINWIEDIRMERASGNFALKVHLEDLNNMRKLIADITRGIRTLANSDEYRQNVRLLKTVPGISTLTAMILLTELYDISRFTNFDKFCSYVGLIPDTDSSGETERKTGITNRRNAQLRGILIEISWVAVRKDPALLMSFNTLCKKMPKNNAIVRIARKLLNRIRYVIKNQQEYVPAVVQ

SEQ ID NO: 202011 - protein, 280 aa, unidentified
MNKKTFEITIGIDIAKLKFDAAWLIKGKYKHKNFPNNESGHAAFIAWIILLCGDTSPLICMEATGAYGVPLADFIFNQGYAISVVNPAKINAFAKSELSRAKTDKADAKLIARYALTIQPPLWTPPPANIRQLQALVRRVEQLLEMILMETNRLDTADKSIVASIKTIIKTLDAELKATRKAIKNHIDQDPTLKQQSDLLNTIPGIGEGTIPHLLLVLSSHHNFTDAKQVVAFAGLAPHPRESGQWRGTTHIAKNGDPLLRKILYMPAMTAWAHNPKKIS

SEQ ID NO: 202012 - protein, 389 aa, unidentified
MKIFVGIDIAKLNHFAAAISSDGEIILEPFKFTNDADGFQLLVSKLESFDKNSIIIDPPSTAHYGDNLVRYLVAEFYQVCVLNPIKTCQMRKNNIRKTKTDKVDTFVIAKTLMMQDDLRFIGFYDLDMMDLKALGRFRQKTIKQRTRLKIQLTTYVDQVFPEIQYFFKSGLHQPAVYALLKEAPSPKEIASMHMTHLANLLKVNSHGHFTKEQAKELRVLAQKSVGANDSAISIQITQTIQQIELLDSQLEKIEAEMTDIMKFNDSVIMTIPGIGYINGGMILGEIGDIHRFSNPNKLLAFAGLDPSVYQSGNFQAKTTRMSKRGSRVLRYALVNAAWNVVRNNATFKAYYDAKRAEGRSHYNALGHCAGKLVRVIWKMLTDKVEFNLE

SEQ ID NO: 202013 - protein, 352 aa, unidentified
MTKYIGLDVHVNDTVACVLDKKTNSFSYETVKTTPFSLKRFLKKHSEAHATMEVSGLTSNLYDDLRPLVKDLVVSNPSQIPWMWKSGKKNDRIDAKKQATLLSMGHLPVVYMPSKAVRKWRALIGHRRSLMDDCKRVKNRVRSLINAHCLRNKGEGTRWTLKNMRWLWSLTDPEGAQYLGEDDAERLSELLKTIEFFREMIKRVTERLDRIAEKHVGVQLLMTIPGIGPRTAEAVIAYADDVKRFARSKEFPAYFGIVPTLDESGSVRRMGHISKRGPSAVRWLIVESAWRVVARSKAIREFFLRVTHGQRSRRKIAIVAVARKVLTIMRAMLLTGAVWDERLAAPPAPSLA

SEQ ID NO: 202014 - protein, 342 aa, unidentified
MKSTTIAVDLAKNVFQIAVSHHPGKVAETHRLSRTQFLRFFAERPPALVLMEACGTAHFWGRKLQELGHRVLLLPPGHVRPYVRRNKTDQTDTKGLLEAHRNEDIHPVPLKSVAQQTLASLHRLRSAWMADRTARINLVRGILRELGFTIPAGARHVVPRAWAVLDAPDSELPAPLRLALGAALREIRDLEARVAEVEKQLRALAAQMPVVKRLLSIPGIGLLTATALVAFIGSVERFASCRHFASFLGITPRERSSGQIRRLGRISKRGDVYLCTLLIHGARSVLLAAKRSQQPDRLRAWALRIQATRGHNKAAVALANKMARIVWAVWRHETSYQSRPTV

SEQ ID NO: 202015 - protein, 331 aa, unidentified
MSVNQQGREAVAVLRPCAGIDVSKAHLDAAWAGRTERVSNDAGGWDALAAKFKAAGVDVVVMEATGGYENAAACALQAAGLAVVVLNPRQARDFAKALGELAKTDRIDARVLEQFAGVIARHPQRERYIRELPEAQRSHLAALVMRRRQLLAMRTEEANRLELAHRATQQSLRAMLKAIDKQLAAVDHDIDQHMQHHFKEVAGLLESAPGIGDVSTSTLVALLGELGQLPRRPIAKLVGVAPLARDSGTHRGARAVWGGRSEVRTVLYMATLTAIRHNPAIRQFHQRLIAKGKPSKVAIVACMRKLLTILNAMVRDGTCWDNSRHLKTALD

SEQ ID NO: 202016 - protein, 310 aa, unidentified
MTILCGVDVSKAWLDAWIEAAGHRRFANSAEGVAELGAHCRRHQVALVVMEASGGIEQPAFLALWQAGQPCAVANARAVRRFAEAMGCLEKTDRIDAMMIARFAEAKRMVATPPPSADQQRLTALATRLRQVTGDLGVQKQRLHSARDPLARASLQQAIAFFTTQADALAAEIAALIGTDPLWEALNRSFRSIKGVADRTVAYLLAELPEIGTLSNRAVTKLVGLAPLPDDSGQRHGKRSIRGGRAGLRSILFLVADIARRFDASLTDFRQRLLAKGLSKMEVRIALARKLLVRLNAKARDTRADLLPRC

SEQ ID NO: 202017 - protein, 400 aa, unidentified
MLSIGIDVSKGKSTVCGMKPGGEIVYTPFEIQHTREGMSELLSLLRGSGEEVRVVLESTGSYHCPVVAALLENGIFVSVVNSLRMKRFCSQSIRRVKTDQIDAMQIALYGLAYWQELQPTRLPENTYRELQLLARQYYQMTSLLIKAKVDFNALCDQVLPGMQELMNDHAGRHKLSDFVLRYHHTAHILKMGETRFRKDYCKWAEKKGYRNRERMAALIFATAQNGIPVLPNAPSTQIVITEAIRVLHTVEASRDAILTQMQALAKTLPEYSLVREMPCIGDTLAPRLIAEIGDVRRFHSKRALIAYAGIDAPPYQSGKFCANNRHISKRGNRYLRKTGYEVMQSYVMHKPANDPIFTFIEKKRGEGKSGKLAMVAGLNKFLRVYYGKVTELYRSLPAIE

SEQ ID NO: 202018 - protein, 326 aa, unidentified
MQNMMIGVDLAKNVFQVHGASQTGEVLYRKKLSRKQFSAFMALQEPSLVIFEACGSAHYWAREMEALDHEVRLIAPQYVRPFVKRQKNDAADAEAIVIAARQPEMRFVEPKTIEQQSRAAVFRGRERLVHQRTADVNALRALLYEHGHVFPAGIRHLNRMTALIEDEISGLPMLIREECKDLLAQIAEKTARIIERTAKLKTLAAQSDKARRLQTMPGVGPLTAVAVEAFGPDMAQFKTGRDFAAWLGLVPKQHSSGGKERLGRMTKAGQADIRRLLIIGAMSRLTWLGRRTIPAGSWLSRMLARKPKMLVAIALANKMADRSGRC

SEQ ID NO: 202019 - protein, 463 aa, unidentified
MAKKAQKIKNGKRNELLIVNPHAAGIDIASTEYQVCVPEDRDNEPNRRFEAYTCDLHAIARWLQQCQIESVGMEATGIYWVQLYTVLKQYGFDVTLCNAKHLKNIGEKKTDYVDASWIQVLHSYGLLKDSFQPDNQIRQLKDLMRFREHLVQRSSQDVLRVQKALEMMNIKVHKVISNIKGKSGLAILDAIVHGERNPDVLADLADHRIKAKREDVVKSLEGNWNDTQILIMKQNLDAYRFALKQIDELDQSIEQVLIAYAQIAHTPDKPIERALKSKQKQGNTFEFDAEQYSYDILGVNLVRIPGISSLTAVKFISELGNDFTSKFPTCKHFCSWLNLVPNNKISGGKVLSSKVPKRKHFAGQAFRVAANTLSHSKGYLGDYFRRMKSRLGYNQAVIAVGHKLARIVFHMVSFGVEYDEEIDHVKNIKQLDNKRSYLLKSLAKVEKELALTNFDTNNYVLVR

SEQ ID NO: 202020 - protein, 426 aa, unidentified
MSMSQRVVGFDCGEDEHSAVLLDAGGDFEEKFSVVNERGQIQELLAELLLVVRAEEQLVVVVESKRSHGRIVSDVAVEFGCDLRQVNTVALNHYRDLEGQPRKDDEWDAYLAARMVFLKMGGCREVVEATEEERTLSRLTRTHRRLVDERRKHIARLRAVLLELAPEMLHSSWEGPRPGRKAMLYLLERWPGFEGLERAQLRSIEKILRRCRYGPRVTRVAKLIRQMARGISITGEERHAFTLELDLLVRQIRFCDESRDRLRAEIVHRIERHPVGQKLLEMQGNGPVITGVLVSELLPVARTSTEPKCATYAGVTPLSRKSGKSLDNDKLAQGVNPRVLYALYTSSVVAIKHSAIDRAYYQKKLRGYAGHPKPHVAAFIALSRQRHKLVYKLMTTDARYDKEVLIAAHLARLEQEQTAAARLSRL

SEQ ID NO: 202021 - protein, 343 aa, unidentified
MQTIATIGLDIAKSVFQVHCVDAVGQVVVRRQLKRRYVVAFFEKLPPCLVGIEACASSHYWSRELQALGHSVRLMPPAYVKPYVKRQKNDATDAEAICEAVTRANMRFVPTKTPEQQSGLVLHRTRQLFIRQLTAVTNAIRAHLAEFGIVAPAGRNGVEELLLVVTDTNDKRVPEVARVCLTALGVQLQRFKEQILEFDRLITAWHRSNEMSMRLDDIPGVGPALATALVASVADPKAFRSGRNFSAWIGVVPKQHSSGGKDRLGSISKQGDRYLRSLFVIGALAVIRYAKIHGTKHRPWLTALLARRPTKVAAIALANKIARMAWAMMAKGERYKEPVALAA

SEQ ID NO: 202022 - protein, 345 aa, unidentified
MTEAYDGRQVVGMDLHRRRSVLVRMTEDGRKLETARITNSPAALRAVIARAGKNPRVVIEATYGWYWAVDVLEAAGAEVHLAHPLGVKAFSYRRVKNDERDAADLADLLRMGRLPEAWIAPPEIRELREISRYRHQLVKARTSLKDQVHGVLAKLGIPVTHSDIFGVHGQAWLDELPMPQPYAGKVASLRQLAGELSAEITLLDTVLSDLLAGHEGYAAIRQLPGIGPVLAAVIVAEIGDIRRFPGPGQLASWAGLTPRHYESDTKVIRGHVTKQGSRMLRWAVTEAIQRQPAGSRPGQVKDAIIARRGKEAKNIAKVAAARELLTLVFYGMRDGRIRRQAQPAA

SEQ ID NO: 202023 - protein, 343 aa, unidentified
MSEVTTIGLDIAKTVFHAHGADERGRGVFSKRLTRAKLLAFFAAQPRCIVALEACGGAHHWARELTALGHEVRLIPPAYVKPFVKRHKNDAVDAEAICEAAQRPTMRFVAVKSEEQQASALVFRTRDLLVRQRTQLINAIRGHLTEYGWVAPKGPAYVSMLSDLLDDELGASLPPAAVSMFRVMLDVLVDLNERIIALDKEIAQRACEQETARRLMTIPGIGPITATALLALAPAAETFAKGRDFAAWVGLTPLQHSTGGKQKLGATSKMGERTLRRLLIIGASAVIIQATRRGTAKGSWLEQMLARKPRMLVTVALANKMARIVWALLAKGGTYRAPMAVAA

SEQ ID NO: 202024 - protein, 347 aa, unidentified
MIYCGIDIASKSSYVYVTDAKGRKLASGEVLTTKVGFEGRLKRYVARGLRIAIEAGNQTAWIYDALMEMGAKVTVVNPTKVKLIAESRRKTDKIDAKILCELLRLKALPHPVHMPGQKARALRGLLVARRQLVSARTKLCNVVRGMVRQAGILLLPRALSTFQGWQRLMGKGFDQPHLLTIVAAYYESFVSLTRSIQELDRVLADRERKEKRAACLQTMPKVGRIASLTFLAAVDDVKRFPSSRKLVGYSGLAPTVRSSGERTEYGSISRAGRRELRAVWVQVAHLVAADTSRATQPLRTWFNRVARRRGKKTATVALARRLLIIAYHLLRDETVYEPARLKRKRAA

SEQ ID NO: 202025 - protein, 340 aa, unidentified
MGKIKYFVGIDIASEDFTSSIFAGPEQPPVVKEKSPNSPEGFQCLINWLKDQGIAKDNCIVCMENTGVYCEHLCYFLYTNRYRVVTESPHKVKRAFHELTKNDRVDSRQIAEYAYRFLDQLSPWKPDNQILEQVKVLYATREQFTKQLIANTNALQAIKRKVVQTALANKSYELIIKNLKERRKAIDEEIAKLINGNPRYKKLTDIADSVPGVGKPLAGSLMVITDAFTCNLAYRNLSSLIGIAPLEHTSGKSVRRKNRSRRHGHPRIRKLLHLAARSVATHVDEFRKYYLRKLEQGKPPKLIYNNIANKLLKIICAVIQSETPYIKNYKSVNPLYLKKA

SEQ ID NO: 202026 - protein, 411 aa, unidentified
MEKVYDKCCGIDVHKKLIVACFKKGSKQEIRDFGATTRELLEMADWLKEGGCEMVAMESTASYWKPLYNILETCELKAMVVNARHMKAVPGRKTDVKDAEWIADLLQHGLLTASYIPDKDQRELRELVRYRKSLVGERNRELNRLQKMLEGANIKISGTITDINGKSARNILEHILTGRQIDSAEYDILYEKKIIAHNLKATKEQIIDDLNGVMSELQRKMMRILLDHLDELNAHIKELDDDIDSFMKPEEKKAASVIQDIPGIGNTSAQAIISVIGTDMERFPTDAHISSWAGLCPGNNESAHKRKSGKTTKGNALLRDTLVVCAHSAVKNKNSYFSAQFARISAHRGKKRAYVAVAHSMLVAIYHILKDGVVFKDLGADYYNQFNKERKINAYLKKLKALGWEAPVVAA

SEQ ID NO: 202027 - protein, 375 aa, unidentified
MSKANTLFIGLDVHKETTDVAWVSDKSAETVHYHGTIPTNLRSFDKLIKNQTAKTSKLCVIYEAGPCGFWLYRHLLRRGIECWVVAPALIPKAPGDRVKTDKRDAMTLARLARSGDLHSIYVPDERDEAIRDLIRCREDAMLDLRQARQRLKSFLLRHGHPCTGRQNWTEAYRRHLADINFPQSATKITFQHYIHIVTERYERLQRLELELQSLAESWRWYPLVQRLTVLRGVRFLSAMTLLAELGDLRRFASPRSLMNFVGLTPSEHSSGQRERRGGITKCGNSHARRILIESAWAYRFPARVSRELESRQQEHSIKLQTRSWEIQQRLCRRFHALKARGKEYNKVVTAVARELTGYIWDLAQGFDADMPQQAY

SEQ ID NO: 202028 - protein, 473 aa, unidentified
MNDGYGVYLGLDVGKGDHHAVGLAPDGRRLHDAALPNTEARLRQLFDKLARHGRVLVVAGQPASIGALPVAVARACGHQVAYLPGLAMRRIADLHPGSAKTDARDAYVIADAARTLPHTLRRVDTGDEALAELEVLVGFDDDLAGEATRVSNRIRGLLTQIHPTLERVLGPKVHHKAVLELLSRCGGPAGLRKAGRRKLLSIAVAHAPRMGQRLVAQIMTALDEQTVTVPGTQAAETILPRLADSLRDVLRQRDQVATQVEGMLDAHPLAPVLTSIPGIGVRTAARILLEVGDGTAFATPGHLAAYAGLAPVTRRSGSSIRGEHPPRGGNKHLKRAFFLAAFASLTDPVSRAYYDRKRHRHVHGHRPPRPRRTSQPRPTRTHSERCDLTGAHGPQAAHQTRTRRLRPTQSHRRTRLRPDHDLPERPRTAAARRARSPRRVATPRGLPQPPQDLPARGNHRAGHHTGLTARRPT

SEQ ID NO: 202029 - protein, 353 aa, unidentified
MSKILAIDLGKNNSAVCIFDRSSLKCRYKTVHTRKQVMHDLFVEFADQVEIVLFETGSQMGWVADILWALKIPFKVANTNHAAWKWKNNPNKSDRKDAQRLAMMYHTGFFPTVHVPRRAVRQKRSLINYRDDVVRRVTKIKNSIRAILGREDIHLPSGKKGWTIKALSPIREMTIPFKEITDHEDLWKGHLNSELNLLCEVNEELKAVESKLNALGEADEKIKQLRTIPGVGPRLSEAVVAIIDDPHRFKNGRHVSSYVGMVPRRWQSGQVDITGRISKCGNKLLRTLLVEVSWLGLREPWMRDIFNKVKHGDKKRAKVAIVALARKLLVICWAMLKNGTTFDADYAKRFVKC

SEQ ID NO: 202030 - protein, 426 aa, unidentified
MDVVHPRVAGIDVHKKIIWVAVRLPGDRPGERTVITKSFRTFWRQLQKMASWLAELGVTDAAMESTGVFWWPVYHALAGAGIEACVCNAAHMRNVPGRKRDIADCQWIAELHEHGLLRASLIPAAEVAALRQRTRYRKRLIEQRTSEGQRLSKALEDGGIKIDSVASELLGKSGRAMIEALIAGERNPGVLADLARGVLRRKTDELQMACDGRFTASHAQMCRLHLDAHDHLTAKIAELDVLVAEAAAPFQRLIARLVTIPGIGPRTAQVIVAETGGDMSRFATSARLAAWAGLAPGDNESAGKRKKAAARKGNQHLKTAMTESAWTVGRTATRPGARFRRLARRFGRGNEKKAAFAVAHTLICIAWAVLRYDADYADAGADYYQQRDARNHDHLVRHHQQALARLGYHVTLTPPDDGSPPPAQAA

SEQ ID NO: 202031 - protein, 335 aa, unidentified
MQIYGIDLAKEKFDVSFFDLTSKKVSNQPSHKVVTNNLKGIGKFFKGLPSDAVLVAEHTGVYGDTLLKCCMDCNVKIAFVGGYVIHRYRATPDRAKTDVLDSALLRDFGERYPDKLKYKTFPEEALYELRQLARHREMLVEQRKQLITADKSEDCRPIRSLAVKRSMDRIKEMLDTEIAETEKEMLKVINGHESIHHNYELVKSVDGVGLITAVELLVKTENFTKITTARQYAAYAGTAPYEKSSGKMDKGAHISKIDNRRSKTLLYICAESARLHNKEIKLYYERRTLIDKKPRHYVLNAIANKLLRIIFTLVEKGEYYDANFIRQDPRVVKYN

SEQ ID NO: 202032 - protein, 354 aa, unidentified
MKYYTSTTQFNCGIDLHARQMYVCVLDRDGKKLVHTNIRNNDFAYFLKLVAPYRHDLTVCAECMFGWYWLADACAEAGIHFVLAHALYLKAIHGGKNKNDRLDSEKIAHLLRTNFIPPGYVYPTEKRPLRALLRQRLLYVWNRSELLSRLQSHQLAYNRPTHRQTLYNRASWSEQLLTAEPDPVRQLALQNDLALIGHYDTQLAALEKELLKLTKQTASRDFTLLQTTPGIGDYLGLTILHEIGDIARFPSVKDFLSYCRLVKGTVASAGKIKGLRGAKLGNPYLRWAFGEAAVVAKRDPLVIGPLAQRLEARLGNKFKANTVLAIKLARAVYFMLKQKTVFDPERLVAALSKN

SEQ ID NO: 202033 - protein, 413 aa, unidentified
MTEQSNINSETVLVALDIAKKSHDAFVLMPNGKRYFTKVANSHLGYQQLLDRAGGDPRQVKVGFEPTADYHRNIAYWLADAGCQCFLVSSLASHRAREMLFQTWDKNDRKDARVILYLMEQNIMEPFHDPLRSNVMDIQELSNTYHQISLARTRAMNSLFNHYIILYFPEIERFFNSTRSEWFCRFMLKYPTPASITRYKLDTFIKRAWDVVGRKVSKTRLLTELYDAAANSVGIPVGVHSVAVETFKLQVQRFYDLSLQRAELETKADQFLGDRDDYNHLRSIPGVGPIVAMIILAESGDLRRFSHYRQYLNYCGFNLSAQQSGNKSGQYHLSKRGNARLRYAYWLAATSAIRQRENSFRAKFARYIHKDPENPDLKRKGRVAVATKMARIAHALVKTGSDYRGFYEFSRGT

SEQ ID NO: 202034 - protein, 346 aa, unidentified
MCSLPVFVGMDYHDSFVRVVVQDTDGSEMGNADRTNHWKAIADFGDRFGRPVRAAIESCCGAADLAEELVSCAGWSVALAHPGYVQRMKQNPDKTDCQDAQLLADLERVGYLPRVWLAPRYIRELRHVVRYRLQLTEQRRATKLRLRALLREQRCHAPEGLNAWTKAWQHWVRHTAELSAQGRWLVKQHLRELARLAIRIHEVEKRLEHLTANDVEVQRLQQQPGIGPVTAWTIRAEIGHFDRFRTGKQLARFCGLSPRNASSGQRQADAGLIRAANPALRTVLIEAAHRLVQYDPSWQKFAQRLRARGKPGSVVAAAVANRWMRRLYHEMKTPSGELAVAVGPAQ

SEQ ID NO: 202035 - protein, 348 aa, unidentified
MLADEVDYVLGVDTHRDEHVVAVVTAPAGIVVAGSAASASTRGYRELLRLAERHAPGRRAWAIEGTGSYGAGFARFLAGRGEVVLELSRTPRAERRLRGKDDILDAARTARAALASETLALPRAGQRREALRLLLAARRSAVDVRRQALGQLRGVIVTAPDRLRDELRGLPTGKLLERCGRLRHTSTAADELATRLVLRSLARRIQAATVEAGELERQIVAQVRALAPVLLEEPGVGPIVAAQLIVAWSHPGRLRSEACFARLAGVAPVPASSGQTTRHRLSRGGDRQLNRALHTVVLHRRQHDPATRDYIARRIAEGKSHRDATRLLKRYLARHLYRLLQQQDPLMA

SEQ ID NO: 202036 - protein, 341 aa, unidentified
MMIIGCDFHPRFQQIAYVDLETGEFFERRLSHPEEAERFYRSLAGTQVRIGLEATGNFGWFRRLINELGYEFLLGDPSAIRAASPRRQKTDKRDARHILRLLQEDRFPVVWQPPAENEQLRQLLLHRCRLVRLRTRMTNQLDSMAKNEGLVGSRSWSAERRRRIEALPLSGWYLRRRTDLLDLLDELEKRIEPLEKAVGEAAEKNQQACLLMTHPGVGPIVSLVYVLTIGDWKRFPRSKDLASYLGLIPAEQSSADKRRLGHISKQGNTLLRWLLVQAAIGAQRSDPSWHRLYLRLSLNKHHGVAKVAIAHKMAVRLYWMLRSGQNYKQVMERGSHAGQPV

SEQ ID NO: 202037 - protein, 412 aa, unidentified
MLKIVYPICCGMDVHKSFLVACIASTNGQGVTSYKSKRFSTFTGDLRRCAVWLAENNCTDVCMESTGKYWIPIYNILETTCKIVLAHPKYVKAIRGKKTDKKDAKWIADIFKHDLISGSFIPPADIRQLRDLVRYRWKLTNFTTGEKNRAQNCLTVSNIKLDDVFSDVFGKAATAITSQLLENPSERITDVSAFRTKGMKASNEQILAAVDGELCAEQAEKLRIIRSHMSSLDLCKVNLESLILSTAEKYLPQLNLVMTVPGIQAFAAVGVISEIGVDMSVFPTSKQLCSWAGLTPQNNESAGKKKTTRIGRAGAYIKPLLVQCALCAIRAKQNPEIRSRYLNLKKRRGHKKAIIAIARMLLTAIYNILKRNEPYNPDLYRNGDRPPLHREVSVEEAVFILQRQGYLVQAPI

SEQ ID NO: 202038 - protein, 355 aa, unidentified
MSQEKYIGMDVHQATISVAVMDDDGKLIMECLLETKAATILEFIQGLRGTLFLTFEEGTSAAWLHDLLKPHVSRLVVCDPRKAALLKQGNKSDRIDARKLAELLRTNQLTPVYHGEHGIRTLKELGRSYLTVTKDLTRTMSRIKSRYRSWAIPCSGTTVYAPHHRLEWLVKIVQPGVRVRAEHLYEQLDTLQPIRQQARRELLLESHKHPAVKLLRQIPSIGPIRAALLVALLQTPHRFRTKRQLWAYSGFAVETHDSGEYRYVRGKVQRNRERITVRGLNDNHNRDLKNLFKGAAISASTRPGPLHDFYVARIAKGMRPTMARLTLARKIAAITLTMWKKGVSFDPQQLSRQAV

SEQ ID NO: 202039 - protein, 483 aa, unidentified
MAVPNEEPKKPTRRKKPAQPSKKPAQPSRSRERSLPVPVPASAAALDVINLDAAGIDVHSNMHMVCVPADRDANPVRQFGANTADLHELAAWLKKCRITTVALESTGVDWIPLFELLESEGFEVNLVEPGQLSRCGARPKTDVLDAQWIQRLHSYGLLRASFRPPDSVLALRAYWRQRQMQVRYAASHVQHMQKALEPMNVQLTQVVSDITGVTGMLIIGAILEGQRDPIPLARLRDERCHHTEGQIARALEGTWRPEHLFELRQAHELYQFHHRQITECDQQVQAELARFPNRAGEKTRDVKPRKRGRQSNDVRFEAAGPWFRALGVDLTLIEGIDVGTALVILAEIGVDVSRFPTEKHFASWLRLSPPQNESNQTKKRSGHRKGTSRVTIALRMAARSVGKTMTPLGRFYRRIRSRIGGLGAVQATAHKMACLVYRMLRYGQEDVTQSMEEYEAKVKANLLKALKRKAAAMGFELSPLPAR

SEQ ID NO: 202040 - protein, 379 aa, unidentified
MDSTKYIGMDVHKEATTIAVMNSAGKLVMESIVETKGATIVQALEGLRGELYVTLEEGTWATWLYDLLQPHATKVVVCNPRKNALLQTGNKSDRIDARKLAELLRAGLLSAVYHGETGLRTLKELGRSYLAISKDLTRTMNRVKALYRSWSIPCGGTSVYAPRHRTEWLSKITEAGVRRRAELFYQQLDGLQKLRQEERRDLLAESRKHGATELLRQIPYIGPIRAALLIALLQTPHRFRTKRQLWAYSGLALETHSSGEYHYAQGQLQRSKRPVQLRGLNQNHNHDLKSIFKGAATKAGSAAGPFHDFYTALLAKGMKTDDGPPHIGAQDRRDHLNRLEERSVLRRPTDKTASVGLNVSADESLPAAGIMPGDVPWDS

SEQ ID NO: 202041 - protein, 372 aa, unidentified
MRDDSEVYVGLDTSKLKISVAVAAAGRDGEVRFFGDIDSTPEAVERLVRKLEKRHRRLCFAYEAGPTGYGLQRQIVALGHDCAVVAPSLIPKRPGERVKTNRRDALSLARLHRAGELTSVWVPDPGHEAMRELVRAREAAKEDLRSKRQHLQSFLLRHGRVFTGRGAWTKAHTRWLCELRFEHPAEHLVLAEYRQAILDAEARLERLTGQVTELVSSWSMAPVVAAYQALRGVACLTAVTFAAEIGDVRRFDSPRQLMAYLGLVPSESSTGEKVRRGGITKAGNGRARRVLIEGAWTYRFPARVSRPLQERQVGLPKAVCDIAWKAQLRLCGRYRKLAARGKRQGVVTAAIAREMAAFLWAIGREVEPRPAA

SEQ ID NO: 202042 - protein, 339 aa, unidentified
MLIIGCDFHPGFQQAAIFDNQTGEILERRLQHPEEAEQFYGSLRGQQVRVGMEACGHYPWFERLLENLGIELWIGDAAKIRATEVRKQKTDRRDAEQLLRLLREDRFPRIWVPSLEERDVRQLLVHRHKQVQARTRTKNQLQALMLSQGVQKKRKLWTAAGRAELEKLELLPYAAVRRQRLLAALGQQEAEIAALHRQVEEEVKRRPAAVRLMTHPGVGPVTALAMVLTLGPAERFENARKVGSYFGLIPSEHSSGGRQQLGRISKQGSSFLRFLLVEAGQTAARYDAELGRFYRRLAVRKHRALAKVAVARKLAMRLYLMLREDWDYAQLCKAMCRQA

SEQ ID NO: 202043 - protein, 353 aa, unidentified
MQVMHERCAGLDVHKKTVVPCVILTLPDGRVEEHTVTFSTMTSQILAMADWLKSCGVTHVAMESTGVYWRPIYQLLEGQFTLLVANAQKIHRMPGRKTDLTDAEWLADLLRHGLIAPSFVPPQAQRQLRELTRHRSNVTGRRTQCINELHKTLEGTNIKLSSVATDITGVSAMDMLQHLLAGQTDPNFLAELARGVLRKKIPELRQALQGVVGEHQKLILNQLLGDIERFDQQIEDLNAEIARRLAQEQSVIQRLDQIPGVDRKVAEVMVAELGTDMSRFGSAQRAAAWSGMCPANRQSGGRRYAARSRFGNKHLKGTLAEAGWAAGRSKQTYLGAQFRRLAARKGSRRAALR

SEQ ID NO: 202044 - protein, 335 aa, unidentified
MNQARVHIGVDVGKEWLDICHPDGSKEHIGNTKRSRAKLIRKARAASAIVSFEATGPYEEDLADECLAAGVPAVRLDAWKTRKYAESQGMLEKTDAIDCEMIRDFAASLRPEQLRFVRPMSDGYRRLKRAASVRRNLIKAKTLVVNQLENILDGDVRASVSRVIDALERQIEKMDALCAEAIRSDERMNALAVRFEQVVGVGPVLIGTMLSSCPDIGSFTSKGIAKMAGVAPIENKSCTIRKKSKPRRGRRELRSALYMAAVSACRSNHLLEPIYKRFVDRGMPRRVALIALARHIAILMNYIAKYPDFNPAVDPKKAALSALPKRKPGRPRKNP

SEQ ID NO: 202045 - protein, 377 aa, unidentified
MTKLRFIGLDVHADTIAVAIAEPDGEIRSLGNFPNTPESVRKIIGKLGPLEKLRCCYEAGPTGYVLYWQLTQLGVACQVIAPSLVPQKAGDRVKTDRRDAEKLARCHRAGELTAVWVPDAAHEALRDLVRAREAAKKDQLRHRHRLGKFLLRHGKRPQKAGTPWTQKYLNWIRIHVHFPEAALEATVEHYLHEVEHVGERIVKLEKAIDEAVAKAPAEIRSVIEALQALRGVAQTTAATVVCELGSLTRFPNPRQLMGYSGLAPREYSSGNRIQRGAITKTGNAHLRRVLVESAWTYQHRPNVQGRVLRRQKSLALSEEARSIAWKAQQRLHKRYTAMMARGKHKGQIVTALARELLGFMWAIAVKTESQFGLMKAA

SEQ ID NO: 202046 - protein, 323 aa, unidentified
MILGIDIAKAKFDVTLVAAHRRPRHRTFANTQNGFAELQAWVGQAAAVVQACMEATNIYWEALAAYLAGQGYQVSVVNPARIAGYAKSQLRRTKTDKLDSAVIADFCATQQPAVWTPPTASQQTLRSLTRHREALLKTRTQQTNRRSTATEPLVQKSLDTLIQTLEHEIAQVDAQIADLVEHQSQFRQELALVTSIPGIGEQTALKLLAELYDIAAYPTANAVDADAGLSPAKHESGHSVHRRPKLCKVGKTAVRAALYLPALNAIRHNPIVKHLADRLKAKGKLPMVIIGAAMRKLLHLVYGVLKHQQPFDPHWAHSIPTPP

SEQ ID NO: 202047 - protein, 428 aa, unidentified
MQAVVVSERTQAVWEAVIERCCGLDVHQKTVTACILAGALNQQPSESLRTFSTTTKGLLELRDWLEEHGCSHVAIESTGIYWRPVFHILEDTVTVLLVNAYHMKQVPGRKTDLKDAQWIARLLRWGLLKPSLIPPKPIRDLRDLCRYRKKLTEQASAEKNRIQKVLEDANIKLASVVSNVFGVSGRAMLEALMQGETSPEKTADLARRKLRSKIPQLVEALEGHVNEHHRFLIQMQMEHLEYLEEAIVRLRERIDEKIRPYQHEVDLICTTPGIDTISAQHIFAEIGGDISVFPSEGHLASWIGVCPGNNESAGKRRSGRTTKGNRWLKALLVQTAHASSRTKGTYLKAFYHRVAARRGKNRAAIAVAHKQTTIIYHELSENKPYQELGENFFDLRNQKALEHRLVRRLRNLGYQVDLHPEPVTSQCS

SEQ ID NO: 202048 - protein, 350 aa, unidentified
MDKELYIGVDVSKQTLDLAYYDGESIDWKKAHIKVSNNNAGFKKIGSWVAKVSKGVDIVLFCMEYTGLYTQNFRLWLEEKHYIYRMVEPRKMHRFEPDLDDGLRSLDRIKTDELDSFRIAIYCEQNHRKILRNPSKLPPPVYFKLKRLLAERKQTVKQSVLYKQQLHDICAYDTDLSVERKNGQLKTLNDALKGIDNEIDMYIKEDADISKNFSLLTSIPGIGRVVALETIVLTENFMAIDNPRKYACYIGVAPFKKESGTSVRKGSSVSKKGFKQAKADLSVACLVCMQHIPNIRDYWERKRKEKCSGIVFNAIKFKMILRMFAVIKRGTPYVETDNYRNGKNKQPGVN

SEQ ID NO: 202049 - protein, 366 aa, unidentified
MTSVAPAAERIYVGMDVSRDTIAVAVLRPGEDVPAVEMISHDGEMVRRLIGKFADRSVLAACYEAGPGGYELHRLLTSMGVACDVVAPALIPKAAADRVKTDRRDCVRLALSHRARLLTAIRIPSEQEEAVRDLIRTRADLVDDRKRMMQRIGALLQRHGRVWRAPRWTCEHRAWLDRQSFTEPALQAALRTYLAALDARDAELAVLESQLRGCWASVDPLASMVRRLACYRGIAELTGLTLAAEVADFRRFPSAPAFMGFTGLTPSEYSSGARTRRGGITKAGPQLIRSTLIEAAWAYRHRPAIGATLKRRQEGCAAETLARSWKAQQRLHATYAKLTRRGKMPSVAVTATARELAGFVWAEMTS

SEQ ID NO: 202050 - protein, 369 aa, unidentified
MTGGAGRWGSVVGVDPHRHTLSATVVDERGGIVATGHYNVSGDGHRALEAWALSFGPVVRWGIEGASGLGRHTSVYLCRQGHDVRDVCPTRTAERAHGRYQGKSDALDSERIARETLAHPDLPLAFKRAGDDTGPDETAELIALWHKERRSLLKTRQHLLNEADALLSDLPDELRGHLPQTKAVRPRLTALRRPRRAWPAATAVRLRLLDRHRAAIFELDRRDREITQELAKLIAGTGSTLDQLCGLDTRSVAELLVEVGDPRRFTEGGFGRFSGTAPLPASSGEGAGEPIRHRLNRGGNRRVNAVLHRMAVTQLRCDERAQRIRDEARRRGHTKREAIRIVRRHLAAVVYRRMIRDLRARPAASALAA

SEQ ID NO: 202051 - protein, 457 aa, unidentified
MGRKGKRTEGLEESHPFSVMSQVNPKAAGADIGAVEIVVCVSGDENTQIVRAFGNYTVDLQAIGRWLKEYQVETVAMESTGVYWIPLFEELERQGFECLLISSRSLRRVAGRKSDITDAQWIQTLHSYGLLESSFRPQAELIALRTLLRHRNQLVEHRSPHILHMQKALLQMNVQLSQAVTDITGVTGQTILRAILAGERDPQELSSMREPGCKKSAEEIGKALTGTWREEHLFILKQSVEMFDFYTGQIRSCDEEIERVYGLTRPDWEAGEVKPLGERKRNAHSKNRPQHPEEIRKHLKRISGVDLSVVDGFGVSLAQTVIMEVGTDMRKFPSEKHFCSWLGLAPKHEISGGKVLKNKTLKTKNRAGQAFRMAAQSVKQADCVFGVTYRRLKARLGPAQATVATAHAIARVVYRMLKYKVEYETISVEEYEKKYQAQQLKYMNKKAAKMGYRLVPA

SEQ ID NO: 202052 - protein, 331 aa, unidentified
MEQIYGIDLSQEKFDVNFRKSDGTLKSVIVKNTVSQIDKFLDTVEPDAILCAEHTGVYGEMLVYLANLRNYKIALIPGYHIKHSLGLKRGKSDKLDAMKIREYGERFTDKLRFLNLESEELKELREIYSIRALLVQQRKMLLTKQQGRLYLSSNSILVGQVTREVLLKLDEQIKILEKQIFQLIRSNKALWESYDIVTSIVGIGKVTACELIIKTGNFKRITTARTAASYAGVCPFPNSSGKMVKKSRVSPLADKSLKSLLFMCACSAVKHNKEYYLYFSKKSLDKKQYYLIMNNVANKLLRTIYALIESGKRFDPFHICLDPRENMKKVA

SEQ ID NO: 202053 - protein, 417 aa, unidentified
MIRKVMEVIHQSVGGLDVHKKTVMACRRRLMGDGQVESEVREFGTSTLQMCALSKWLSEWGCTHVAMESTGVLWIPVWNVLEADFKLLLTNARQLKKVPGRKRDVGDAEWIAQLMQCGLLKPSFVPSREVRHWRALTRQRMKLVDQRTGVVNRLHKVLQQGNIKLSSVATDVMGVSGRAMILAMIEGESDPERLACLAKGRLKSKHEELVESLEGRLSQDDRWVMKELWEQMEYLEEEVARYDEQIKEKMSPYEESLKRLMTIDLIERRSAENILAEIGPDMSFFPSDDNLVSWAGLCPGSEESAKKNRSGKTPKGDQWLRRALVEPAWGAARRKDGYLGAMYRGIAVRRGEKRAVIAVARTILQAAWHVLSKGVEYKERGGDYFDRQNSEQTKNKLIRRLERLGYDVEIKPKQAAV

SEQ ID NO: 202054 - protein, 333 aa, unidentified
MTEVTTIGLDLAKSVFQVHGIDGSGKAVVRRQLRRRQVLPFFKKLSACLIGMEACATSHYWARELAALGHEVRMMPARYVKPYVNRNTNDAADADAMCEPLTRPTMRFVPIKGPEQQAVLMEHRTRALFVRQRTALINALRAHLAEYGIVAGVGRNGLEKLLEVIEEDGDERVPSAARDCLLALRAQLVMVKQQILDADRRILAWHHASEVSRRLAEIPGVGPLIATALVASVPDPHAFRAGRDLSAWIGLVPREDSTGGKPRPGHISKAGDRYLRRLLVVGALSVIRRAKQTDCKRRPWLAALLERRPTKLAAIALANCLTSAPLGQIEVFA

SEQ ID NO: 202055 - protein, 333 aa, unidentified
MNKGITVGLDLGDRYSHICVLDNQGEILEEGRVRTTEAALRRKFGTLEACTVALEVCGHSPWTSRLLEELGHTVVVAQAAKVALIHHNRNKGDRVDAQTLALLAHANPKLLWPIRHRGVHTQEDLQVIRSREALVEARTKLINHIRSTVKVHGERLPSCGSDAFAGKMAAELPEALKPVLSSLLEVIGDLTKRIRAYDRRIEELCGRYEETERLRQVPGVGPVTALTFVLSIEDPHRFAKSRDVGPYLGLTPRRDQSGDVDKQLRITKAGNTYLRKLLVRTWWLARAARGGKNAKKRAVVAVARRLAVLLHRLWVNGAVYTPFPQRSMAEEVV

SEQ ID NO: 202056 - protein, 410 aa, unidentified
MRYYLGVDWADKTHAVWVVDEQGTKVASRAVPHTAVGLSEWGRELDEWRAKGIELWAAIERPEGRVVDFLLDHGVVVYPVNPKALDRARDRFRPSAAKSDPFDARVLAEFLRTDHRHLQALQPSSEAAQELKYLTEDYRRHVRQQTRLVNQLTATLKAYYPRALEVSELTTALARQFLRAYPTPVAVTALTAKRWQRWASAHRLSDVRTHELWGILQRPQLPVPDHVVRAKARLMLTLVEELTAVVAAVGQYREAIDAFFAGLPEAQWIRTLPIGNHGVTAPTLWALLGDAPRRWESWQHLQGHAGTVPVTIRSGQQRVVRFRFACDKALRYVVDQVAFLSLGKSEWARAYYDQQRARGHDHHPALRALGAKWLKIIFVMWDRQIPYDEEHHLATMTRQQLRQRGQKKVA

SEQ ID NO: 202057 - protein, 430 aa, unidentified
MEIVYPRACGVDVHKSFIVAVICISESVKPRYIKKRFSTFNNQLIQFRQWLIDNNCQNVCMESTGKYYVPVYNALEDHISNVVVANPKWVKAIKGEKDDNKDAKWIADLFKFGIVRSSYIPEKNIRILREFTRYQFKLVNIRSSEKNRFQNALTVGNCKIDLVFSDVFGKSASSIVDTILSDEPYTSEDILSKVHGRCKSSDEDILSAVEGTDLNHYQKSRIRIVQKHMEYVDSLLDEIQHHINIMVSAYENYIQLLMTIPGVSRKSAIIIISELGIDVSQWSSHRKLAAWAGLAPGCNESAGKKKSVKISKAGVYIKPCLVQVAHAAVKDKNCDYYADKFSRISKRRGKKRAIIAIARKILVAIYHILKTGEVFNPSDMADVETTKQQRIEYIKNNLRNAFNQLSRTGLSDEEILQFIIKKSSNSPQTE

SEQ ID NO: 202058 - protein, 324 aa, unidentified
MNIIGIDVSKAKLDCAWLREDEKLKTKVVDNTKDGWKELVEWSLKNTGLTIEQLHFVMEATGIYHQRLATYLFDAGAKVSVVNPAQVKFYGQSLGVRTKNDKKDSVILARYGLKESPKLWQPEALEISELKALVTRLEGIEKDLQREKNRKEKALCGETPQVVLDSISHMIELFETEKQSLEKLIEEHIDKHKKLKEDKALLESIPGVGNVIATRMLMVINSRQFTKASQCAAYLGLVPVQHESGSSVKGRVRLSKAGNPAIRAKLYLGAVTAKTYNPDVKALYERLLSRGKSKMSALSAAMRKLVQICFGVLKCQETYQPQTG

SEQ ID NO: 202059 - protein, 413 aa, unidentified
MKQFPSHFIAQIGLDWADQKHDFCLQSSDSDVCEYGTIRHTPESIEDWALALQKRFHNQPVAVCLELKAGPVVYALLKYKFIVLFPISPKALAKYREAFTQSGAKDDPSDAFLQLDYLLKHRSALKPLVPDNKETRILQRLVEDRRALVADKVRLTNRITAALKSYYPQALQWFDDIDTKVFCDFIEQWPTLKQAKRARPLTLTKFLKAHRCVRPAVIEMRIKAIKAALPLTEDDGVIVPLECLVRALTAQLNLLLITIHEYDLDIAQRFRQHADHEIFDSLPGAGPVFGPRLLVAFGTNRKRFDSADEVNRLSGIAPVLKRSGKSAWVHWRYSCPTFLRQTFVEWTNQSIRYSFWAKEFYDEKRAMGKSHQATLRSLAFKWIRIIFSCWKNRTPYDESAYLFALKKRKTLAN

SEQ ID NO: 202060 - protein, 338 aa, unidentified
MVYGAIDLHLRYSQIRIIDAEGRELRAQRVLTRAERLVEVFGGYGSMRILLETGTESEWVAQALEGAGHTVVVADPNYAPMYGEIRRKVKTDRRDVVALSEANRHGWYRATHRVSSAQRDLRQVLRSRRRLVAMRAGTIALLRSLLRQRGYRLATGSAARVPQQLARLVLPADLTDTLAPLRRMVEALTDEIQGVDARLRTHAQADPVVTRLQSVPGVGPIVALTFRAVVDDVGRFGSAAQVSAALGLVPREDSSAERRHRGHITKAGPRELRSLLVQAAWACWRSKASGTLRAWVERLAARRGRRIAVVALARRLSRILYALWRDQSVFDAATVAAA

SEQ ID NO: 202061 - protein, 350 aa, unidentified
MVVVGADVHKRTHTFVAVDEVGKKLGEKVVSATCSGHHQGLRWARERFGAQVVWAIEDCRHLSARLERDLLTAGQKVVRVPSKLMAQTRASARTRGKSDPIDALAVARAFLREPDLPVASHDEVSRELKLLVDRREHLVGQRTSTINRLLWRVHELDPEHAPKPRSLHLLKHRTLLSQWLGTQRGLIAELARDELADITRLSEMIDALAKRIGERVRKVAPALLALPGCAELTAAKLVGEAAGVARFKSVAAFARHAGVAPIPVWSGNTAGRVRMTRSGNRQINAALHRIAITQARLPGLGQAYYDKRIASGASTTEALRCLKRRLARVVFHHLRTDHQNRIQPCQPAAA

SEQ ID NO: 202062 - protein, 440 aa, unidentified
MRIMYERCCGLDIHKASIAACALISEKGTPQEETRRFGTMTADLRELAGWLQQKGIRHVAMESTGVYWKPVWNILEPAGFELLLANAQEVKVVPGRKTDQKDSQWIADLHKHGLLRNSFVPPRAIRDLRDLTRTRAILTQEHTSICNRIQKVLEDANIKLGSVASDVFGVSGRAILRALMKEENDAEALADLSKGLLRKKIPQLRRALEGQVTAHHRSLLTGQWSRMEFLEREIVDLETQIAERMKPTPEETALTLPNTAEDAPAPLSPREEAIQLWMEIPGVGWTAACSMVAELGVNMDQFPSAAHVASWAALCPGNNESAGKRLSGKTRKGNVWLRRTMCEVAWAASHTKDTYFAAQFHRIASRRGNKRALMAVAHSILVTAYHMLKHKRHYQELGADFFDAINRDKVRDRLVQRLAKLGFDVTLKSKDSIASDSQKN

SEQ ID NO: 202063 - protein, 339 aa, unidentified
MKYTPVGVDIAKHLMQVHFIDEHTGEVIDKQIKRAALLEYFSNREPCLIGMEACGGSQHWARELEKLGHKVRLLQGKFVKAFVMGNKNDVMDARAIWMAVQQPAKAVAVKTEEQQAVLSLHKMRRQLVKFRTAQINALHGLLLEFGETVRKGRASLDKAMPEVLERLKEKLPPFLIYQIEDQYRRLSDLDMQIDGIEKQLAAWAKQNEACQRIMDIPGVGPLVATAAVAIMGDAGTFRSGREFAAYIGLVPKQTGTGGKIRLLGISKRGDAYMRTLFIHGARAAALQAKEPNPWVTELLKRRPTSVAVVGMANKIARTVWALVAHNRTYDKKHVSVRPF

SEQ ID NO: 202064 - protein, 343 aa, unidentified
MNIVRIGLDLAKYVFHLHGVDERDKVILRKTLRRPALAAFFANLPPCVVGMEASNGAHYWAKTLSELGHDVRLISPQFVTPYVKSNKNDRNDAEAICEAVGRPNMRFVPVKSSEQLAIQAVHRIRSRLVANRVRLVNQIRGLLGEHGVVIAQAIGNLRRALPRIIDDESNGLTSIVRALIGELREELGDLDKRIAIYDRKIMGLHRTSEACQRLGEVEGIGPITATALVAAAGDGRCFKNGRQFAAWIGLVPRQRSSGGRSRLLGISKRGDRYLRTLLIHGARAVMGRIRGKQDPRSLWLLKLRERHHANVVAVALANKNARIAWSLLSSGLDYDRRLTVSSA

SEQ ID NO: 202065 - protein, 365 aa, unidentified
MQVTFGIDVSKSTSTVCELIGESKNELTITNNRPGFIQLLHELTAFSKHPQIIFEATGVYSRTLQSFLEDYGYDYVILNPLKAKKEMDMGLRHNKTDKTDAYHLALIQRLYHLSLIQSESQTYKQLNALSRFYDQLTSDLVIAKNRLHQALQSTFPEIENLFSSARGKNYWQIVVRYPHCDLVRREDKKQLINWLMSLKGIAFKHALRTADKLIELAYQAYPVVSCSSIEVEQVQYYAHRLLNLSDQRENLIARMVKLAKSLPNHDLENLESIPGFAQTTAVRVLAELGDLRRFSNPNKINAFIGIDPGRYQSGEMDSNLSITKHGNAVARKLLYRAIGQIDNAAKTNPCHIAAVSYTHLRAHET

SEQ ID NO: 202066 - protein, 358 aa, unidentified
MSNVKSSRVDFTGQPIYVGLDVHKKSWSVSIFSEHFEHKTFTQPPEVDKLVNYLRRTFPGALYRSVYEAGYSGFWLHDRLKEKGIDCIVVNPADVPTKDKERATKRDRVDCRKLARSLRSGEIEGIYVPSRTKLEDRSLVRTRQSMVRKQTRCKNQIKSMLLFYGIHLSEEVTMSHWSRRFLGWIENIRMERASGDMALKAHLEELKHLRQLIASLNRAILALARTEEYRVPVALLKTIPGISTLTAMTLLTELYEITRFPSLDELSSYVGLIPETQGSGEKEYTGEITERRHSQLRCLLIEASWVAVRKDPALLMAFHQYCKRMRKTKAIVKIVRKLLNRIRYVLKNRMEYVPAVVQ

SEQ ID NO: 202067 - protein, 390 aa, unidentified
MDVLYQSCAGIDVHQATVVVCILHGPLTSTRPKREMAQFDTTTKGLKACHDFLSQFHVEAVGMESTGVYWRPVWHELCDDFELILAQPAHMKSIPGQKTDKKDAHWIAQLTRIGLLPRSFVPDETIQELRELTRQRKHYVESRNRETNRIHKILQSGGIKLTTYIEDIMGASGRNLLQLLIDETPLTPRMIHQSVYTSLKRKVPQLLEALDGYFSAHHRFMLGQSLEIYDFYQKQIDCLEERINGYLNLYERPVEILDSIPGIDLITASVIIAEIGVDMSQFPTAGHLASWAGLCPGNNESAGKKRSTKIRHGNSYLKRCLCQAVFAAKRQKGSPLAERYYQIQSRRGPQKATIALAHQLLKIAYILLKENLTYQEFVLQKKATRDEPVA

SEQ ID NO: 202068 - protein, 344 aa, unidentified
MKVSVLGIDLGKNICSIVGLDETGAVVLRRQVKRKTLIGLAAKLSPCIVAMEACCGAHYLGRLIADQGHDVRLMSPEYVRPYIKAQKNDDRDAEGIAEAVTRPTMRFVELKTQEQLDMQTLHRSRDRLVAERTALINQLRAILLERGIIVPQGRRELEDELFMLINEQRDAGVSPRLLKLVEDMRTEWRELDRRITVFDKEFAAFAKENQDARRLATIPGVGVTIASALIAAVGKAEAFERGRDLAAWLGLVPRQATTGGKPKLLGISKRGNIYLRKLLIHGARAALPHVATRDTALGRWVKALLARVHKNVAVVALANKLARIAWAILRRGEKFAAKGLPMTA

SEQ ID NO: 202069 - protein, 415 aa, unidentified
MALKIVYKICCGIDVHKNFVVACIAKTDKQGVTTYERHHFSTYTKGLKQLLKWLLDRNCKDVCMESTGKYWIPVYNVLEHDCSIVLAHPKYVKAIRGKKTDKKDAKWIADLFKHDLIAGSFMPPADIRQLRDLMRYRFKLTCFKSSEKNRYQNCLTVSNIQLGNVVSDTFGKSSQKIIAKILENPDDTSFDIGSLIHGSMKDKLPELELAIDGYITPEQAAKLKIIKEHFDNLEARKAELEELILALANPYQQEISIILTAPGFKNTFTAIGIISEIGTNMEAFPSAKHLCSWAGLTPTNNESAGKKKSVRVSKAGCYIKPLLVQCANAAIKSKKHPEIRDRYLRIKKRRGHKKAIIAIARMLLTALYHMLKNGENYNSDLYQKSDILPTTREITVEQAILMAQFQGFRIKSATE

SEQ ID NO: 202070 - protein, 329 aa, unidentified
MFVGLDLHKNYLQTAVMDEQGRLLSQERIPNRDENIEEFASKRLRDSHTEIVIESSSTWYHVYELLSKNQNCHVVLSNPVKTKAIASAKVKTDKVDALTLANLLRTGYIPESYIPPRHIMDLREMVRYRTSLVRMRVEAKNKIHAILLQNGTRIKEKPFTIAFVEELRRLGDYRIDGYLNIIQSLSQQILTVSSTIKREAREDESTRLLMTIPGVGYFSALLILSEIGDINRFPDSHHLCSYAGLTPSTHSSGGVTYHGSITRTGSRYLRWILTECAKAHIRTRRDSQLTRFYTRLAKRRGGSKATVAAASKLLRIVYWVLKEKRPYHG

SEQ ID NO: 202071 - protein, 341 aa, unidentified
MDKELYFGVDVSKKTLDLAYYDGETIDWKNAHIKVSNDDAGFKKIGSWVAKVGKDFDTFLFCMEYTGLYNQNFRLWLESKEYIYGMVEPRKMHRFEPDLDDDQRSLDRIKTDELDAFRIAIYCEQNHKKILRNPSKLPSPVYFKLKRLLAERKQNTKQSTLYKQQLHDICAYDTDLSVERKKLLLKNMKENLKAIDKEIDSYMQEDANISKNYNLLTSIPGIGRIIALETIVLTENFTAISNPRKYACYIGIAPFKKESGTSVRKRTTVSKKGFSEAKADLSIAVLSTIKNNPSIRDYWIRKRKEKCGGIVLNAVKFKLVLRMFAVIKRGTPYVETDAYKN

SEQ ID NO: 202072 - protein, 376 aa, unidentified
MKRHGEVFVGIDSAKARNAVAVAESGRGGEIRYLGEFDNTPDAVIKLVRKLADRYETVHFCYEAGPTGYGLYRQIRSLGHECTVVAPSLIPRRPGDRVKTNRRDAQTLSRLLRADELTAVWVPDETHEAVRDLVRTRAMAVEDYRRKRQHVTSFLLRHGRTFDGKTSWRGRHLRWLDGQNFAHPAQRFAYQELLNAVRITADRIDRLEAALAEIVPDWTMAPVVAAFQAMRGVAFSTATTLVAEAGDLRRFDHPRKLMAFLGLVPSERSTGETRRQGGITRAGNARARSALVEAAWTYRHSAGLGVGHQRRQLELSEKVRDIAWKAQARLCARYRRLAAKGKRVTVVTTAIARELAAFLWDIARYVDPAPLKAATP

SEQ ID NO: 202073 - protein, 314 aa, unidentified
MTDRSKIWVGIDVSKSQLDVYIHPTAKRFHFNQTDEDIKAMGQQIKDLSPELVILEASGGFQNNAVSILSCMEIPVVVVNPRQVRDFARASGILAKTDLIDAKVLALFGKAVKPEVRSLPDADIQQLQLLIKRREQLVAMLTMETNRLPQTSGLASDSIIEHINWIKQSLSNLDKGIKDLLKSSPIYKEEEDLLRSVPGVGPVLASALIAGLPELGKLNGKKIAALVGVAPLNCDSGKYKGKRTIWGGRAHLRAVLYMGAVAAIRCNPVIKAFYEKLIHNGKAKKVALTACMRKMLVILNAMYKHKVLWNPIYA

SEQ ID NO: 202074 - protein, 463 aa, unidentified
MPRRTLRTQPRRPAPPPIPPSHAPAFQVRNPHAAGIDVHSDNHVVCIGPGQVRTFGAYTADLQAIADYLRQAGVTTVAMESTGIYWIPLFEHLESQGFECCLVEPGRLHGCGARPKTDVLDCQWLQRLHTYGLLPASFRPPESVRALRAYHRQRQNLIRHAAAHVQHMQKALEQMNVKLTEVLRDITGLTGLRIIRAILAGDRDPLTLAGLASPKCARTRAEFALALQGLWQPEHLFELRQAHDLFETYQRLVDECDRQLEPELAKQPNRAGDRPVPRKPRRCGRKRNDLRFTATGPLFQALGVDLTEIEGIEVGTALVILAELGVDVSRFPTERHFASWLGLCPNTSRSNRRESTRSPRRGASRLKRAFRMCAQAVGRTKTPLGMFYRRIKSRIGGMGACTATAHKLARLVYRMLKYGRDYVKHGMDEYAAKMKTHAERMLRKKAAALGYELTPRVPAVPTP

SEQ ID NO: 202075 - protein, 316 aa, unidentified
MKTLPSLSPGVHLGVDVAKAELVLDLAGSIRRFPNTAKGIASLLKASTIIPGSHLVCEATGGYERELVNRALLADVPISVIQPKRVRCFATALGQIAKNDPVDAALLSRFGNQTSPKPLMGKDSARQQLDAILRARAEFQDSMQRELNRAEHETNAAIGRMRQTMIACYRKQIDKLDKQAAALIASEQKLSLAEAVLRSVPGVGPQTSRTLLAFLPELGHCGRRSIAALVGVAPYDRDSGTARGRRFIKGGRSQVRKVLYMAAVVSLKHNDYLKKVYLHLRAAGKPGKVALVAVMRKLLIHLNTLMANFHQTAVAS

SEQ ID NO: 202076 - protein, 410 aa, unidentified
MRLRRDEELVVQSSGPTAGVDWASQTHVACVVGDDGGVIDRFTFAHAGVGLKEMVRRFRAAGVQRVAIERGDGPVVEVLLDAALAVFVVPSRQIKSLRGRYGSAGNKDDRFDAYVLADTLRTDGHRWRALREDHDDTRALRALCRARKDLVETRVQLLNQLRCNLELALPGAVGLFSKPDSKITLGFLRRFPTAKKVAWLSVKRFESWLVSVGYCGGISAAVLFQRLTDAAPGLFGAEGQARGNITVALVAMIEALNVEVDAIEQQMAALLAAHPDQHIFTSLPRSGMVRAASLLAEIGDCRERFPTDEALASLAGASPSTRQSGKREQTVFRWACHKKLRAAVMDFANGSRMGDPWAADIYRRAIERGCRHPHAIRILARAWIRIIWRCWQDSQAFDPARHHGRQTLAA

SEQ ID NO: 202077 - protein, 356 aa, unidentified
MIHLAIDHGKKVSHAVALSDSGEVLFDSEIPTTFDGFASIKEALPPGDVHAVVEASWNWGKVFDSLEELGLNPKLANTLKSRYIAESFTKTDRIDATTHAIMLKAGITPLVHVPTKETRDHKNLLRHRFWLVHLQVMIKNRVHSIIDRNHVEPPKRSDLFAGHGRAWIDALALREPDDKLLKAHMELYDELRADTRQTEKWVDAALKGNKMVPILESLPGVGKILGALIALEIDTIDRFHSPGKLAAYSGLVPSTYSSSGKTVHGRLIPSNRHLKYAFIEAAWNAARVSPYFQGLYERLKERKGSCKAIGAVGRRLCEITYFCLKQNRAYEERPYRFRKHVDTPSEDFGRVALTIR

SEQ ID NO: 202078 - protein, 372 aa, unidentified
MPEVSSNAPFDVRVWVSLDVHKLSIVAAALPPAGGQPEVVQIETTRAAIRRLVERLGGPEGLAVCYEAGPGGFDLQRVLCELGVACDVVAPSLIPVRAGDRVKTDRRDAKKLVRLYRGGQLSFVAPPSPQTEGLRDLMRCRDDLRRARTAARHRVSKQLLRHGRVYRDGKTQWTKMHRGWVARQQLDDELAQAALFQMLIHLDGLDRQLDALDRDLETIARGERWADTVQILTRFRGIATRTALGLIAEIGDFARFRHPRELCAWLGIVPSEYSSGDQRHRGHITKTGNHHARRLLIEAAWSYQHPPRRPSRDPTPDPRAWHAQIRLHRRYHHLTAQRGKRSTVATVAVARELAGFLWAAATHQPFPTHTTA

SEQ ID NO: 202079 - protein, 414 aa, unidentified
MEKERINIYHKRNTCFVGIDMHKDTHCAVVIDCWMNKLGEINFENRPSRYPAFVEDVRKICGTKEIVFGLEDTRGFGRNLAAYLVGRKFEVKHVNPAYTSAVRLANPIIYKDDSYDAYCVARVLRDMVDTLQDAKHEDIFWTIRQIVKRRDLIVKGNVMNKNQLHSQLSYSYPSYRKFFAMIDSKSALCFWENYPSPEYIWNTTPEEIYQTIKPVHQALKIQRIHEIISMIERDGDTRKDYQPERDFIVRNIVKEIRHNKELIVEIDDELRKLLPLTGYKLHTMPGIDLVTEAQIISEIGDINRFPDSDKLARFMGLAPVQFSSAGKGKDQRCRNGNRALNAIFHFLAIQMVAVSASGKPRHPVFREYFEQKVKEGKNKPQALVCVARRLVRIIYGMMKTRTEYRPYEKTDDKN

SEQ ID NO: 202080 - protein, 341 aa, unidentified
MHSLYYVGLDVHKKSISYSVKTADGTRVDFGSIPATRTAVAAWVEALPGPWVGALEATLFTGWIYDFLQPFAVDLQVAHPAMLQAIACAKKKSDRLDADKICDLLRCDLLPQCYIAPPEIRELRRVLRYRNLLVRQAVRLKNRISGVLMEVGEPYNKKRLHGKMYFYELLDHLQHTPESAIELLAISRGMLETFQDLEGQLIAGLKRHALLARRVRLLESIQGVGEITALSWALEIGEPERFASVRRAISYCGLCAGLHESADKQRRAPISKQRNKHLQTVLVEAAKLAPRFNPELKAVRERELARGSRNRATLAVARKLTAYLLWVDRHRQPFVARARAA

SEQ ID NO: 202081 - protein, 407 aa, unidentified
MDITCGIDWAEAHHDIAVIDERGVVLACKRIASDAGGYGELLRILAEHTDDVAAVPVAIETDKNLIVVALQAAGNPVYAINPRAVARYRERHGQAGKKSDPGDALVLADILRTDRHRHRVLPEISENGLAIKALARQHQEAIWATHQTISRLRSVLLEFYPQALQAFPQLKHKAALAVLAMVPTPDAGQRLTARRLVALLHRCGRRNDPALVERILSDLRTPALRQAPSVEQALGRAVVGLVGIVAAMQSAVEELEAALSEEFERHPLAPVLRSAPGLGPVLAARVLAEVGDDPSRFASAQSLRAFAGTAPITRSSGRSRFVNARRVRNKRLGDACHWWAFSMLTKSPGARAHYDRRRAAGDNHNAALRNLANKILGRLWWCLQNETHWDEAAAWPSARPAPLAAAA

SEQ ID NO: 202082 - protein, 403 aa, unidentified
MNSVGIDISKGRSTVAVMRPFGEVVISPFEVRHTDSELSELARQLKSLDGETRVVMEATGNYHASVAKLLYDAGLYVSVVNAKLVHDYGNNELRRVKTDRKDAVKLANYGLDRWLTLPKYIPEEDTRLLLKNCYRQYRQYSKVQTVLKNNLISLLDTVFPNANRLFSSPIRGDGSEKWVDFVAEFWHCRCVSEKSERAFTSKYLRWCRKHGYNFSEAKAHTIYAEANGHIGVMPKSETTKLLVEQAVAQLRATSTALAALKHEMQTLASQLPEYPVVMDLFGVGPTLGPQLIAEIGDVRRFYSKKALVAYAGLDAPPNDSGDVTGRHKSMSKIGASSLRRTLFLVMSVYLQNAPLDEPVYQFMDRKRAEGKPYRVYMMASANKFLRIYYATVKAYLESLEHTA

SEQ ID NO: 202083 - protein, 342 aa, unidentified
MLYVGVDIHKSNLQVCLLDEQGNRCINTRVENSADAVEAFFRGISLPASVGMEPTHNWGRLYDLLSMMGLEVKVCHPRDAKLIGLAQVKTDRTDAYKLATLLRVGLLPESYVPTQDGRELRCLVRGRAALKGVSTALKNQIHAILKANWIKHPYSDLFGKAGREFLADLMIESGYRDVMETKLEVLDCIDAQVRRLDKQIALRAGEDMRVQIVMTAPGFGCYRAVLVVGEVEDISRFRRAESFVCSIGLNPREDSSGETTRRGRITKEGSSWLRWVFIEAAHQAIKQEGKIRDLYLRVLERRGHNKAIVAAARELAVSIYWMLRRMEPYSPSGRRVVSSEAR

SEQ ID NO: 202084 - protein, 454 aa, unidentified
MKKHKQAEAKTKSEAIKPIGEQEPDSAGIDLGANEIWVAVPADRDQKPVRQFGAFTRDLMAIVQWLVQLGVRSVAMESTGVYWIPLYQLLEEAGLKVCLVNARHVKNVPGRKSDVRDCQWLQYLHSVGLLLGSFRPAQAICASRSIYRYRQNLLSMAAQHVQHMQAALDQMNIKLHHVIDDLSGVTGQAIIAAILSGQRDPVQLAQLRDKRIKAPEAAIAKALEGDWRKEHLFVLAKAWAQYQEVQKQIQDCDQELWNYTRELEACTQVIKPAKVMRLKSKLMGVEPLSNPPTQKRFRRKTSKNQPEGPWQQELERFFGVDLTAIPGISVLTGLTLMTELGNDLRAFKTEHHFASWLCLCPDNETSAGKVLRRRTRRSQNRVRQALRMAASSLHHDKSYFGDKYRRLRARLGAPKAITAIAHQLAESFGPSLPANCPLIPVSLLTMKRPINSAD

SEQ ID NO: 202085 - protein, 416 aa, unidentified
MKIVRPICCGMDVHKNIIVATIGITNKKTRITEYIQETFSTLNPDLLNLKQWLINHKCFDACMESTGKYWIPIFNILEDEINIYLTHPKYVKAIKGKKTDKKDSKWICDLFKHDLIKFSFIPPKEIRALREISRYRYKLVGMRSSERNRYQNCMTVSNIGIGSVFSDPFGKSAQAIMKEVLESDIIEDEKILKCVHGSCKNKDKILDSIKHCNIETDQRFKMNESMTHMEELQVHIDNCEIEMMKRAAPMFDQFMHITQLPGISTLSAILIISEIGVDMKQFESDKQLTCWAGLAPANNESANKKKSVRISKAGQYLKPLLVQCALGAIKDKEGYFGIKYSRIKKRRGHKKAIIAIARMMLVSIYHMILTGETFNPSDYESFRNPKTPIKQQDLTEESAIEFLKKSGFDVSKLTKP

SEQ ID NO: 202086 - protein, 395 aa, unidentified
MLKYSVGIDVSSKKLDAVICTIDENQKVTIKSSKSGINNTQKGHVALMSYIERHHKNKEVPLVICMEATGIYYENCALRLIEAGYKVSVILPNKAKKYMQALGLKSKNDSIDAKGLAQMGAEQNLNLWQPMGEYYYKLRSLTRQHQNLQELKTSILNQIHALENGMYIEKSVIKQLKSSVALLKKQLKENERAIKLQLKADNNVFSKVKKICKIKGLDVLTIATVLAETNGFELFKNSKQLVSYAGYDVVENQSGAKYGKTRISKKGNSRIRRCLYMPALCTVRLKEKVFYDLYSRTFARHFIKMKSYVAVQKKLLTMIFALWKKDEEFDSKYLQNLNIQEKEQMHSSLHGSERAEKNSQAIESLTTQGKHPVSDHSVLPLCSSKDKANLVLEKV

SEQ ID NO: 202087 - protein, 341 aa, unidentified
MNITTIGIDLAKNSFSLVGMNRHGKVMFRKTLSRKKLLGFIAQCPPCVISMEACSGAHYWGREFQKLGHQVRLIAVKFIEPYRKGGKNDNNDAEAICEAVSRPNIWFVPVKSPDQQAELCIHRIRQGLVSERTGMMNQLRGLLSEFGFIMPRGRHPAQNAIGGILEDAENGLPMLARRVINNLWQRIKQANEEIRGYDRELRELVKANSVARQIMTIPGVGEQTASGVVASVPDPRLFRNSRQFAAWLGLVPRQYTTGGKIKLGRITKRGDQYLRTCLVHGARAVVASLGDKQDRVSCWIRALIERRGYLRAVVALAARNARLIWTLMMKREDYRAIAVSV

SEQ ID NO: 202088 - protein, 340 aa, unidentified
MKKPKYYIGLDVHKERTTYVVRDKIGNILSEGETATLYHELFPRLKPYLTQAVIGLEASTSYYTLYQTFLKQGYTIQVANTIQLRQLITKNDRLDARRLAEMLRLGTFPRSYIPDEHIQQLRSLIQIRHSQMEEKVRCNNRIQAFLDRNGVPMPPYKAFSKKWRYALMQHMGSGKVSIELRHAYDHYTFLEKKQEQIEQEIQGLTQKHWANEYNLLQSITGIGPVIACYAIAHILPIQRFSSNKKLRRYAGVVPTCKESGNTRSPGHIPKTSSRQQLRWALIQAANTIGKTNTNLGRYYRKKKKQKKNAGIAKVAVASSLTDIIYKVLTTKQPYTPHIKC

SEQ ID NO: 202089 - protein, 334 aa, unidentified
MKQVSQVGVDVDSEELVCALQRAGQRLPLARFANTAAGHKKFIRWATKGARPARVCLEATGIYSLEFALALHHAKNVEVMVVNPRAIKDFVRACMQRAKTDAVDAGGILDYLERMPFSAWQPPSPEILELQAINRRIDQLHTELTREKNRRHAAEFAGASADAIAHDIEINIHHLERRLERMQESGLRLVHRVPALAAKLAHLVSAKGIGEASAMRILAELLVLPDDLAAPQWVAHAGLDPRPYESGTSIHRPRRISKVGNSRLRAALYMPALVAIQHEPNVKAFYDKLVAAGKKPMQAVVAVMRKLLHAIWGMLKHDQDFDGNKFFKIAKENT

SEQ ID NO: 202090 - protein, 316 aa, unidentified
MTQDFFVGIDISKATLDVAILPGDQPWSLANDEQGLQQVASRLAELGSPQAVIMEATGGRERPVLAALAAAGLPVIAVNPRNVRDFAKSMGLLAKTDRIDARVLALFGERVRPACRPLPDEQTRTLQDLVVRRRQMLDMFSAEQSRLSVAINPKVHREITRHLDWLKKRIDRIDDDLDQAIKDSPVWQEKADLLKGVPGVGRVTALTLLGQLPELGTLTHKRISALVGIAPFNRDSGTLRGKRRISGGRAPIRAVLYMATLTAIRFNPSIRAFYKRLREAGKPSKVALVGAMRKLLTILNAIARDGEPWATAEVSA

SEQ ID NO: 202091 - protein, 458 aa, unidentified
MKDKGGKRKKVEFELQVMRKNVAGADIGSREHWICAPAVQGEGCEVERFGSTTGELYRMAQWMKARGVKSVAMESTSVYWISVFEVLDRQGFEVILVNARCLMSVPGRKTDVLDCQWIQKLHSCGLLKGSFRPADGVCALRALVRERATLISQQSDWIRRMQKAFDQMNIRLHHAVADISGTTGMAIVRAIVKGERDPKRLAEFRDARCKKSSEEIIAYLQGNWRDEHLFNLEQALKMYDFLGERMDAYDAAIMQALQRLEQPELQQSAPPDLPTTSKMRALMRRGQEPMREALYRLNGVDLLTIDAIGAETAETVLSEFGWNLSTFPTERHFVSYLRLSPKLAISGGKPLRGKRRQSTATRVGTALRTAASTLRHSKTALGAEYRRLARIKGPGVAVFAMARRLAVLIYRLLKHGQAYVDQGMQVYEERFQQRKLEACQNMAKSLGFGLVTLPQTAT

SEQ ID NO: 202092 - protein, 352 aa, unidentified
MMIIGCDFHPRFQQISFLLEETGECGQRRLMHTAEAEQYYRSLSGTRVRVGIEATGSYGWFRRLLSELGHELLVGDATRIRASNPRRQKTDKRDAEHILGLLVEGRFPAIWQPPAENEQLRQLLLHRSRLVRLRTRVTNQLEGMAKNEGLLVPGGWSGKRRKGIEALSLPGWYGERRKDLLGLLDRLEERIAPLNKAVSQAAANNAEACLLMTHPGVGPVVSLAYVLTIGNWQRFQRGKQVGSYFGLIPAEESSGDKRRLGHISKQGNTLVRWLLVEAASTAQRYDPSWHRQYLRLSMTKHHGVAKVAIAHKLAVRLYWMLRSGEDYQHVRERGSHARQSECPGGRSRRPIE

SEQ ID NO: 202093 - protein, 332 aa, unidentified
MYYIGMDLHKQDLVMAVEDERGPAGRPRRIACRDVDAIRTAVAGWRPFRAVVEASASYRWLYDLVSPLGEVVLAHPLRLRAIATARAKTDKLDAALLARLLRANLIPAAYVPPAPYQRLRDLTRTRARLSYGATLAKNQMHALLARANVHPPLKSLFGPKGRRYLAGLDLGLSGNLARDELVRRLEHYGREIAAFDAHLEAVASEFPQAEALQVLHGIGRYSALLIVAEIGEPERFRNARQVGAYAGLTARVHQSGKTEHRGSVSKQGSRWLRWILVQAAIKLVRRDARLQAFYQRVRKRAGRNVARVAVARKLAGISWVRLRRWQREQATA

SEQ ID NO: 202094 - protein, 328 aa, unidentified
MKMIWERVAGIDQHRDSVKVGVRSPSADGEREQIVRTHATHTADLLAMRDWLKALGVTHVTIESTGNYWKSTYYLLEEEFTVLLVNAAHVKHVPGKKTDTQDYLWLAELLECGLLKASLIPPPPLRVLRALTRRRKHLQQDRTREVQRLHDVLQDAGIKLSSVATNILGVSGRAMLNQLVEGRTDLEALAELARGRLRAKLPELRKALEGQFTLEHGQLVEGILAHIDFLEGALADLQQHIDSQVAPYAEAQQRLDTIPGWDVKTAQAFLGECGADMNRFPTPKQLGAWSGLAPAQHETAGKRRPQPTRHGNRYLRAALVEAAWAAVH

SEQ ID NO: 202095 - protein, 387 aa, unidentified
MPQPNDLSRSLVALDQNSTIIAVVELSQSSWLVGGVVPGIERQPRKKLEPNPERLLALLHRWQDEAVRAGHTITRIAVAFEAGRDGFWLARWLEARGVEAHVIHASSVAVSREHRRAKTDRLDTELLKRGFLGWLRGERGHCSMARVPTIAEEDAKRPNRERDCLVGERTRIVNRIKSTLARLGIRSFKPTLRKAAERLATVHTPEGMPLPPNTLAELQRDMARLGLVVSQIRQIEDARQKRLEQQHEAGPHAMVRLLARIVGVGVETADMLVHEVLSRPMRDRRAVARYAGLTGSPDESGARRREQGLARAGNARVRRGMIQLAWRFLMFQKESALTLWYRGRTADSRRGTRKTMIVALARKLIIALWRFVTTGEPLEGVVLRPAT

SEQ ID NO: 202096 - protein, 354 aa, unidentified
MNSVKYLGLDVHLSTISAAVLDGQGKLVMESVLATHSAAILDFVHGLRGTLHLTFEEGTQSAWLYDLLVRQVNEVVVCNPRQNALLKAGNKSDAVDARKLAELLRAGLLSPVYHGETSTVTVKHLGRSYESLTQDSTRVMSRLKALYRGQAIPSAGKRPYGGQRQEWLGKLGGAGLQSRAQRLYQQLDVLHALRREARKELIQECRKHAAASLLRSIPFLGPIRAGLLIGRVQTPHRFRTKRQFWAYCGLALETRSSADYRFVNGQLERTRKPVWIRGLNLNHNHDLKNLFKSAATTASARPGPFGTFYQGLLAKGMLPAMARLTLARKMAAITLSVWKKGERFDAQQLKPQAA

SEQ ID NO: 202097 - protein, 337 aa, unidentified
MPALTIGLDIAKNVFQVYGVDRGGRPVIQRKLRRADVLKFFSKLERSLIGIEACHGSHFWARELSSQGHTVRLLPTQYVKPFLVGGKNDANDASAICAAVSRPGIHPVPIKSAEQQSLQSVHRMRERLVHERTAKSNQIRSMFAEEGFIFPMGIVHLRQGVVALVNDADARITILLRRLGSMYIEQLAALQRWIDELASEIAEIFKRNESCQRLATVPGIGPLVATALFSGVGDPQQFRNGRQFAAWLGLTPRQRSSGGKSKLGSITKHGDTYLRTLLVQGARAVMRFVDRRDDRHSRWIKAVMQRRHVSIAAIALANKTARIAWAILTSNDSFRLA

SEQ ID NO: 202098 - protein, 351 aa, unidentified
MGTHDQHDLVTIGVDPHKHSWTAMGLDEHGRALATPLRVEATPAGFGDLQQWARPWPRRRWAVENASGLGRDLTQRLLDAGEQVLDVPAKLSTRVRLLAGGTPRKTDPADAHAVAALHTHDLRRPHAEGHTTVLRMLSDRRDELVRQRTQALNRLHVLIAALAPGTHRGKISPLAATQLLHGLHPTAPADRTRLLLASDLLAEVDALTARIARLEQELSRTLAAATTQLTELVGISTVTAAKILGRVGDVRRFPTAAAFAAYCGTAPIEVSSGDRIRHRLSRAGDRQLNYAIHVMAVTQQRMHPPARSYYARKRAEGKGRKEALRCLKRRLTDVVYRQLLNDLERSVSPAA

SEQ ID NO: 202099 - protein, 412 aa, unidentified
MQDILTCAMGLDIHRDVIVACLAKGELGADPEIEIRSFSTLIPEMRKLRDWVLEAECHHVAMESTGIYWQPIYEMLEPCFDGQISILVVNARHMKNVPGRKTDMRDAQWIATLLRAGLLKGSFIPDKTFRELRHLTRYRKSIVHDITAQKNRIDKFLQSSGFRFTAFLSDAFGASGRNIIRHLMEYGSISREALDRCLKTQTRKRIDEILIALNGSLSEHQRNFLRMIFGHLEALEQHRHTVEDAITEEITKHEEALRLLCSIPGIDVTAAAAIIAEIGTDMSAFPDSQHICSWAGLSPGNNESAGKRKSAHINKGNPYLKSMLCEAGWVISGKRTLHLSGWYWKIKQRKGAKRATIALARKLLALIYTMLKTGSPYSEECFETRRKQSERKRAYRMVNELQKLGYFVLPPD

SEQ ID NO: 202100 - protein, 391 aa, unidentified
MFTVKKHNQIRATLRKELVIMKDTIKYVGLDVSKEKIAVAIADEGRDEPRYWGMISNTPEAVKKLMKKIGTSENLRVCYEAGPTGYALYRLLLTLNIHCAVIAPSLIPHRPGDRIKTDRRDSVRLAQLYRAGELTSVYVPTSEDEALRDLVRCREDAKEDELRAKHRLSKFLLRYDIQPPSKGKKWTVRYYRWLDTLKFENTKLQVVFQEYYHQIKEIQQRVVRLEEEIRIQATEGSHAPTIQALQALRGVALITATSIAAEIGSFKRFSTPRQFMAYVGLVPSEHSTGDSRRQGKITKTGNRHVRRLLVESAWSYRYKPSVKGELQKRQNGQSPTVLAISWKAQNRLHKKYFRLLSRGKESGKVVTAVARELAGFIWAVTQELDEVVPKA

SEQ ID NO: 202101 - protein, 344 aa, unidentified
MTNIDYIGFDIHKKTISFCAKAQDGAILEEGTIPALRNKLLAWAKARPRPWIGAMEATLFTGWIYDLLKPLAQELKVAHPPMLKAIAVAKKKNDKVDARMIADLLRCNLLPECYMAPVAIRDLRRMLRYRNLVVRQATRMKNRIAGLLMETGTAYNKERLHGKAYFSELLGSLQEVPRSVVELLQLSRGQVEFFVAIQRQLLKKLREHPELSQRVMRLQGIPGVGEILALSWALEVGEVDRLPSIARAVSYCGLTSAQHNSAGKEQRGPISKQRNRHLQTILIEAAKLAPRHNTQLAAVHERELQRGNRNQATLAVARKLVAYLMAVDKSGQPFQIRASDKEAA

SEQ ID NO: 202102 - protein, 400 aa, unidentified
MISVGIDVSKGKSTVCILKPYGEIVSKPFNITHTQKDLSELSSMLFRLNDEVKIVMEATGIYHLPVLTYLQEKGFFVSVINPYLMKSYRNESLRKAKTDKIDSRIIANYGIDHWFKMKEFQTSGEIYEELKLLGQQYRHYMKLHLLSLAELTHLLDLTMPGIKNLLASWNETNRKDKRSDFVERFWHYDVITSMSEQEFTEEYILWAKEKKYVPSQEKAKVIYALAQESIPTLPSETSSVKILVTEAVRVLKEVDATLGLILSRMQEIAKTLPEYSVVIEMGGVGNTLAPKLIAEIGDVRRFRNGKALVAFAGIDPPPYESGQFVGCNRKISKRGSASLRKVGYETMRSLKMRSRPEDPVYRYVVKKESEGKSKKSAKIAGLNKFLRIYYARVTELYKNI

SEQ ID NO: 202103 - protein, 316 aa, unidentified
MVGIDVASTHVDVAALGAELPASLRQVSNDADGHSALAEGLARLKPHLVLMEATGGYEAALACGLQAAGLRVAVVNPRMARDFARAMQRLAKTDRIDAATLAEFAGVLARRPDAERFIRPLTDPEQQDLAALVTRRRQLVSMQLSERQRLRLARPVARPSIEALLEAIARQLDDVEAEMAQHVEQHHAQMARLLQSVAGIGRVAAATLIAELPELGRLNRRQICALVGVAPYANDSGASKGRRRIVGGRFEVRRALYMATLTATRHNDAIRGFYERLVAAGKLKKVALIACMRKLITHLNAIVRDHLNAQHHPSTA

SEQ ID NO: 202104 - protein, 340 aa, unidentified
MEQIIGIDLAKRVFQVHIVSIQGEKKANKMITREKLMAFIAQQPSSRIVMEACGSANYWSRQFKTFGHDVRQISPQYVSPFRMGNKNDKNDATAIVEADSRPGMRYVPEKSLEQQDIQCIHRVRQRLMKNRTALINQIRGLGLEYGIAIPEGAHKIMTCLPEYLEDAENELTTLSRQLFHEIWLELQDCQQRIKTLDVRLEQISTQNEDTARLVNIPGIGPLGASALTIALGDSRSFNNGRHFASYLGWVPGEHSSGGKPRLLGITKRGDGYLRGLLIHGARSVVYRTVNLPDERCSALQRWLKGIIVRGGVNKAVVALANKNARVAWALVNQRTEYRNQ

SEQ ID NO: 202105 - protein, 353 aa, unidentified
MKRIVKQAVGIDVAQDELVVCMGRMHEDLTLELYSHKTFSNTAKGFELLTTWVSKLSNADVELNYVMEATGVYHESLAYYLSDRGDHLSIVLPNKISNYSRTLDVKTVTDKTASEAITRFGLERKLDNWEPPKGVYRSLRQLTRERDQIVATRTIAKNQLHAEEAEAYPNKKSIARTKKLIAFLDKQEQEIKEELAQMIKEDEEVKRIVVLLCSLPGIGLLTAATILGETNGFDLIRNKRQLASYAGLDVKEKQSGTSVKGKPRISKKGNRYLRKAMHLPALTAIRHDERFKAIFARIVSKHGIKMKAAVAIQRKLLEIAYTLYKRQEKYDSQYLNKSEDKIAVEITELSIKN

SEQ ID NO: 202106 - protein, 361 aa, unidentified
MGDGSKDQPQLTAGLDLGDKYSYLCLIDTVSGEIMEEGRLRTTPEALGRRFSSEQPPIRIAIEAGTHSPWVSRVLEECGHEVLVANARKLRLIYANKRKTDEIDAENLARLARLDPNLLYPLKHRGEDSQAHMALIRSREALVSCRTQLVNHVRGTVKSFGHRLPKCPARTFHKKAPSHIPEALRPALEPILEQIASLTERICEYDRLLETISKEHYPETELLRQVEGVGTLSALTFVLTVEDPYRFEKSRSVGAYLGLVPAQDQSGDRNPQKHISKEGDEMLRRLLVSSAHYILGPFGSDSDLKRHGEKIASRGGNNAKKRAVVAVARKLAVLLHSLWMSGEIYEPLRNAHRSGGRQEAA

SEQ ID NO: 202107 - protein, 308 aa, unidentified
MLTAEADKCKTKVVVNTAAGVQALLAWCAKHGAQPAQLHAILEPTGLYHEQAATALPQVRVSLVNPAQAGTLPRPWRCAQNDALDSYVLARYGQTLSPALWHPAPLHARQLRALLTRREALSKDLLRELNRKEKSQFSPSAPLVDGSIDKAIAFLREQIKQIERAIDQHIDNHPDLKQDCELLNSIPAIGPQAGNAILAVMHNRHIDSAQSLAAYLGVVPVQRQSGSSLNSCARLSKAGPSQVRATLYMAALVGTRHNPHIRALYQRLLKAGKSKKAALGAAMRKLVHLCFGVLKNRIPYQPNYAMNG

SEQ ID NO: 202108 - protein, 398 aa, unidentified
MVNVGIDLHKTQFTVCVRSRKGDIFATYPTTENGYQAFLKQASVWKEKGEEVRVGVESTGNTRYFKNRMEEAGIGVTVINTLKFKVVNESVKKTDKHDASTIAEFLEKDMLPQSQLCSRKSEQLRRLLKARTTLVQSQVVMKNQIHALLSAEGMEDVKSALLQSKRGRKHILDTLQKCENGLAAQPLLETIERLEENVKSIEQQIRALTVGDRMVDLLMSIPGCGEIGAWTIRAYTDDIKRFASPKKYAAYAGLVPWVQNSNETIHHGKITKRGPKELRTALVQVVMGLRRMKEKTLPLRLMQRYEVMKKNKGSGRAIIASARKMAVVIWHMLNEDVEFEIGKMVDPKLAKKSEAMSKSMMLNKETLIERIEKNIDLMIEGKKVQKAGVAGRIREKVG

SEQ ID NO: 202109 - protein, 344 aa, unidentified
MVILGIDAHKRTHTAVAIDNTGRKLASKTTGTRTSDHLALLAWASELDDERLWAIEDCRAMTRRLERDLLAAGERIVRVPVKLMAKVRDSARTYGKSDPIDALAVARAAQRERDLPVARLDGPERDVRLLVDHREALVGERTRAVNQLRWHLHEIDSALDPKPRSLDRPKTWKVLDERLADEIGTVARLARQLIGRCRQLTIDITELTLEIEQLVARLAPSLLAICGCAALTAAKIVGETAGIDRFRSRDAYARHNGTAPLPVWSSNRARHRLSRTGNRQINAALHRIALSQAHWHPDAQALIARRRANGDGGLEALRVLKRRLSDVVYRALTDDLKANLNTTP

SEQ ID NO: 202110 - protein, 420 aa, unidentified
MEATTVHCAVFCGIDWAEDHHDVALVDTRGTVLARLRITDSAEGFAQLLALLAAHGDGAATPIPIAIETPRGLLVACLRAGDRQVFAINPLAVARYRERHSVARKKSDAVDAAALANILRTDIDAHRPLPADTELAQAVAVLARAQQDSVWDRTQAHNKLRSALREFYPAILAAFATKRDGIMRPEARVILAAAPTPTAAAKLTKTQLQTLLRRAGRKRSIDAEAARLQGVFRAGYLHQPALVEDAYGRQALALLRTLDAACVNADELETVATERFEQHPDAKIITSFPGLGALTGARVLGEIGDDRSRFTDARALKAYAGSAPVTRESGKSRYVMTRKVKNQRLAAAGYIWAFSALNASPGARAHYDRRRQANERHTAAQRNLFNRMIGMLYHCLQNGQIFDEQKAFQSTTPAPQQAAA

SEQ ID NO: 202111 - protein, 320 aa, unidentified
MKWLGIDIAKRKFDLAVLDNGKIRSKVFENTPTGHETLLAWLAARDHQLEELHACMEATSQYYEKLAIFLHDAGIRVSVINPLQIKAFGESRLSRQKTDRADAALIAHFAEQQSPPLWHPAPREIRELQRLLARLEAVQQMSVQEQNRAYEAEGEALESVDRTLAHLKAEEEKLRKRIREHIDQHPHLSEQHALLTSIPGVGEQVSSHFMAWLRPERFDDARQAVAFVGLSPRHRQSGDSVRGKTRLSKVGHARLRKILYLPAMSAIRYNSAAKAIAERLKASGKTGKVVIGAVMRKMIHWMFGVLKSGQPFNPDLALAK

SEQ ID NO: 202112 - protein, 431 aa, unidentified
MKNRINQRLEEISVTTLIVGVDISKAVHWARFVDYRGMEVGKAVSFKNNREGFEKIEAKIRDILGNKALRQPYETAIIGMEPTGHYWKAFADYMMKAGYRVVCVNPYHTKKAKELDDNSQTASDKKDAITIARLVKDGRFFTPYLPREEYGELRVLTNARVSVMKRGSAVKNTITAILDEYFPEIWTVFKKPLKGKASRQILRSCPFPAFIMELGETGVLAEIKKAVQRTVGMKKVRELMSSAKNSVGVEHGLTAAKMRIGWLLDELELIEKQLSEVEESMRKALDKTGYSNQLLGIKGVGIVTAASFLGEVGDPLRFQNARQIANYAGYNLVEDSSGKSKSGTCISKRGRSQLRSVLYQMAFTMVGKNDEMKALYKHLTTRKDNPLKKKQALVVVSKKIITVIYSLLKKREDYNPALVLGAVRKEVMMAA

SEQ ID NO: 202113 - protein, 331 aa, unidentified
MRFSTNQHAFYCGIDLHARTMSVCILSQDGEVVLHRNMQARPDALLKAIVPSRDDIVLAVACILTWYWLADLGAQAGLPFVLGHALYMQALHGSKATHDTMDSQKIAVLLRGGMLPQAYVYPAAMRATRDLLRRRTHLMRKRAELLAHIQNTNSQYNLPEIGKKIAYKANRDGVAERFPDPAVQKSIEVDLALIGHYDQLLRDVELSILKTAKQHNAQTLYLLRTVPGIGEILSLVLLYEIHDITRFPRVQDFLSYCRLVKCTKESAGKRYGTSGTKIGNAHLKWAFSEVAVLFLRANPAGQKYLTKLEKKHGSGKALTLLGQKLGRTVYY

SEQ ID NO: 202114 - protein, 433 aa, unidentified
MHEVEDEPLFAERVAGIDIAKAGIEVTIRVPSDTRPGRRQQETRSFATTCRQLLALADWLRAWGVTKAGMEATGDYWKPVYFVLESQGLDCELYHAAQVKALPGRPKTDRADSVWLARITERGSLPSSFVPPGPIRALRTHTRYRRHLTQARTAEKQRVEKLLEDGHLKLSSVISDIHGVSGRAMLEAIITGERNPKVLAQLARGTMRGKIAQLEEALDCSFLTQEHAGVLKMMLSLIDYHTTQIDELTTKIEVLAEPWLHQIGQLDAVHGTGRISAQDVIAEIGAGMSVFPTPAHLVSWARWCPQVAQSGGKRKGSNASGRGNPYLSAALGEITISASRTPSFLGAKYRRLVKRMPKKKALVATGNSVLTIFHALLSGPDASCHDLGADYYEQRMNIRRQARNHVRGLERLGYHVAIEAINPDTGELLPATA

SEQ ID NO: 202115 - protein, 388 aa, unidentified
MIYVGIDVAKDKHDCFAMNSDGEILIEKLTIVNNLDGFETLYNSLMNFSDSLDNIKVGLEATGHYSNNILNFLTEKGFNIYLINPLQTNLYIKGQSLRKTKTDKLDAHIIATMLISDNLKPYIPVSYHISELKSLTRHRFRLVKENSKFKTSLVRLVDIVFPELPKIVSSVAQKSCLALLYELPSAKEIAECNLKHLTHILSENSNKKFDRDKAIEIRELAKKSIGLNSNSVSFELKQTINIIQFLQQQIDDIEKRIKEILKEINSPILTIPGISFKTAGSILAEIGDINNFDKPSKLIAFAGTDPSENQSGNKLSSNDKTSKRGSPYLRHAIYTASLVAISNEPELRAYYDKKKSEGKHHFVALAGISRKLLTIIYYILKENRDYKR

SEQ ID NO: 202116 - protein, 408 aa, unidentified
MEQSRTNGRDLEGSGALQLNNNEQTNTPMKKELYLGLDVHKDCIITAVAEEGRKGEVRDTGVISNDLHALEKWVGRLRKAHGRDVILRACYEAGPCGFGIARRLKQLGVECEVVAPSLTPKRAGERVKTDRRDARKLARLLRAGELTPVYIPEATDEAIRDLCRARTDAVDDRRRSRHRLKGFLLRHGYRYQGKSAWSAAHERYLRELVLPHPAMKVILEEYLISIGAAGERIARCEEAMSDLLEKWRLAPAVGALMAMKGFQTVAAMILVSELGEVHRFTHPRQVMAYLGLVPTENTSSDKRRQGQITKCGNAHARWLLVECAQHYAAPPKVSKELSRRQQGQPREVLAISWRAQNRLHGRFARLSARRLQRNKALVAIARELCGFIWELLRTQSCYQAAIPLGLKR

SEQ ID NO: 202117 - protein, 346 aa, unidentified
MTIIYSGIDVSKDKLDVALTFDGNKILSTATFQNSILGFQKLSAWVEKHSKIATTAHFCIEATGIYHEEIAEFLCDKENFIVSVVNPFQPKSFAQSRLLRTKNDKVDANLLASYCAISKPKEMVKTSEELKTLRKLVRTLNYQIVERSKYKTKLHSVKDDYAAHVVNATIIFFTDSIANIEEKIKCHIRECSELKRKTDLLKSIISIGDRTAWQIMAEMKDIETDKINAKSQVAHSGLAPKEYQSGSSVNGKPRICRTGNKKLREAFYMPAMTAMRYNKPMKEFYERLVSKGKPKKVALIAVMRKLLVTAVGVLNNGVPFDENWLEKRKEIKNQEQNFHKNFALAS

SEQ ID NO: 202118 - protein, 286 aa, unidentified
MHATPESLPTSTVAIDLAKDVFELAFADAHGRIVERRRLSRRAFASALDNREPLQVVMEACGSAHCWARRFQRTGHRVQLLPAHDVRPYVRRNKTDRADAAGLLEAARCGAIHAVPVKTPQQQGVQGLHRVREHLKAQRTAAINLLRGLLREFGVIIPLGSAKVRPAVLSALEDADNELPMALRETLKALLDTMKTTEKDMLAIEDRLQAFADADPRSQRLQCAGGVGLITATALSASIGDFDRFPSGRRFASSLGLTPREHSSGSKRRLGRVTKRGDIYLTCPQS

SEQ ID NO: 202119 - protein, 343 aa, unidentified
MDQYVALDVSLRKTSVCVLNSSGRVVTEADVPSEPGALISFIRTRAPHASRIGLESGPTSTWLWHALKAAGLPVICMDARHAHAALSVRPIKSDRNDARGLAEMVRVGWLKEVQVKSLGAYERMALLGVRRRLVDIRVEIDGQIRGILKTFGLVVGSGNKGAFAQRARTLAQDHPILLALVEKLLDVREVAAAKVAVLDKEIRRFVRDDPTLRRFLTVPGVGPVTALAFRATVDEPSRFRRARDVGPYLGLTPRRYQSGETDRQGHISKCGDRFTRTCLYEAANVLLTKVQRWSPLKAWGTRLAKRIGSKKARVAIARKIAVILHCIWTDGTEFWWTKEMAAA

SEQ ID NO: 202120 - protein, 340 aa, unidentified
MHYIGLDIHKKTISYCVKDEGGRVWGEGTIAALRPTLDRWMETLPQPWTAAMEATMFTAWVYDHLLPRAAAVKVAHPLMLRAIAAAKKKNDRVDAGKLADCLRCDFLPEAYMAPSAIREKRRILRYRNLLVRQAVQCKNKIAQMLMEAGVSYTKEKLHHRGYFHQLLATNQEIDDSLRPLLRLTRENLVRLRRTESALLRSLRRDPLLAERVKRLMSIPAVGPITALTWVLELGDVKRFPSIKPVISYCGLCSSEDSSAGIAKRTPISKQRNRHLQTVLVEAAHLAPRLHPDLALLYEKEAQKGNRNRATLAVARKLVAYLLAVDRGERIFVMEHSQASA

SEQ ID NO: 202121 - protein, 342 aa, unidentified
MPQVAIIGVDLAKRVFQLHGAAADGSVLFRKKLTRERFLSFLASQPLCVVAMEACATAHGWGREIERVGHMVRLIPPIYVRPFVKRQKNDAADAEAIVEAASRPTMRFVAVKSEAQQARAMLFRTRDLLVRQRTQLINALRGHLAEHGVVAAHGPAHVKRLADAIANGDSCLPIAVRELGELLLEQIAVLDEKTRDLDKRLRDAAGRDGATKRLQTMPGVGPVTAVAVETFAPPMEVFRRGRDFAAWLGLVPIQRSTGGKPRLGKTSKMGQRDIRRLLITGAMSVVQAAGRSAPPENSWLAHMLGRKPRMLVALALANKMARGIWAMLTKGENYRDPVTTGA

SEQ ID NO: 202122 - protein, 348 aa, unidentified
MRFYTHQHCYTCGIDLHARSLYVCILDNTGQKLVHKNIKASPEALLKLIADYRDDLIIGVECMFSWYWIADFCEDHGIEFVLGHALYMKAIHGGKAKNDKIDSEKIARLLKGGMFPYAYVYPRGLRSTRDLMRRRIKLARERGDLMAHIKNTLSQYNLPAHPENLRYEKQREPMRHAFPDPSVQRSIDLDLSRIDFYDGQLAKLEWYLKRTAKSFDPKTVILLKSVHGIGDILSLVILYEIHDITRFPRVQDFVSYCRLVKCQRESAGKIYGTAGAKIGNPYLRWAFGEAAALFLRGNPEAQAWLEKKTRKHNKAKALTILAHKLGRAVYFMLRRENLFDQDRFLASR

SEQ ID NO: 202123 - protein, 315 aa, unidentified
MFVGVDVAKAELVVAVRPSGATWSVPNDARGQRTLVERLVATQPARVVLEATGGYELSAVAALAAAGLPVVVVNPRQVRDFARSTGQLAKTDGLDAAMLALFAERVQPPVRALPDAATQALDALVARRRQLVEMLVAEQNRLGMAQRRHDRQVTVSLRQTIAFLTRQLGTTDRDIGTMIRESPLWRERDDLLQSVPGIGPVASHTLLGALPELGQLDRRAIAKLVGVAPLNRDSGTWRGHRTIHGGRADVRRVVYMAALVASRRNTVLKAFYQRLVAAGKPKKLALVACMRKLLTILNTMLRTQQPWSPILSLDA

SEQ ID NO: 202124 - protein, 464 aa, unidentified
MKTYYMGIDVSKGYSDFVVLDKDKKAVLPSFKLDDTYENHIKLVNKIKSITHNNEIQLTCGLESTGGYENNWYNTILKETQFGNVKVTRINPFRVYFSKKVDLTKTSTDRISAEHIARFMINHNEKLYFNQTDLYSTEKKLYQYHQTISKQGSALKNQLQQILYNSFPELVKFMIKGLSNWFLQFLIKYPLPSSLKNVNKNNVINGIPYIKKEYVDYIFKMSQKSVASSDDTIIADITRKLADKILKINKEKCEIIKILSRRVDKNLFDLLRTIPGIGKQTATVILLLIGDISRFNDAKKMCSLFGLVPVYSQSGDSVKGSKISKKGNKLMRSTLFMAAKSAIRHPYFKELFNFYKTKNDNYYFAITCIMHKMLRIVYGMLKSNKSFDVKIDRSFRNYSNANKRKHIHQQSVIGISEDAPVSYRESIKRKQEPSQNFKFDTGSGSHSLLDGLNINHQSKISQKK

SEQ ID NO: 202125 - protein, 407 aa, unidentified
MIYCGIDWAERHHDVALVNDSGQLLAKLHITDDAVGYRTLLDLLADHGDTEQAPIPVAIETARGLLVAVLRTGKRKVFAINPMAAARYRDRHSVSRKKSDPGDALVLANILRTDMHAHRPLPDDSELSRAIAVLARAQQDATWNRQQISNQLRSLLREYYPAALAAFEPWRNALCRREAREILRVAATPTQAARLTRPQLQAALKRAGRERSIATEADRIRGIFRAEWAHHSPLVEEALGKQMLALLMQLEAACTAVDDLAQAVEDAFPQHPDAEILLSFPGLGVQLGARVLAEIGDDRSRFADARGLKAYAGSSPITRASGKKSSVSRRWVKNDRLNHAGYLWAFAAITRSPGAKVHYRRRRDHGDWHSAAQRNLFNRMIGQLYHCLQHGTRFDEAVAFPTEVHAA

SEQ ID NO: 202126 - protein, 315 aa, unidentified
MTNLKKSKTTINVGVDVGKAFLDIYIHEKGLHWQEENNEQGIKRILKRLSHYDVERLVMEATGRYEFNLAQIAYSKNIPVCIVKPLLVRRFAGAMNQLAKTDKIDAQIIALFGFMTKPKATPRKSKNLIAIKDLIARRRQLMSLRTQEMNRLKIMGKDFEVSCKRILKCLNAEIVRMENRLAKHVEDQADWTEKQTILKSVPGVGNTLIYTLLADLPELGDLNKNQVAALVGVAPINRDSGKLRGKRRVQGGRANVRTVLYMATLSATLCNPVIRSFYKRLVAQGKHKKVAITACMRKFITILNAMVRDRVEWGL

SEQ ID NO: 202127 - protein, 323 aa, unidentified
MQTPSAVLNIGADVAKDAIVVACAEGSFPVRAVANQRTAVLVFLKGLPAGSRIGVESTGSYHELFADAAHRLGFQVFLLNPKDTRHYAKAVGLRGKTDRVDAELIARMIAHEHAKLHAWIPPTPQQRELDRLLKRRATLISLREAVVMSLHDLDGFTAELKALRTRFNQLIARIDLRVQTLVAASPERQQNFTRLCTITGIGPVVGTALVNTLERVPVKSADAFVAFTGLDPRPDDSGQHRGKRRLSKRGPAELRRLLYLAALSAIKTKTWRPLYEQYRAKGLSSTATLVILARRIARTAWSIYTYKTEFDPVRLTNPMLRTH

SEQ ID NO: 202128 - protein, 352 aa, unidentified
MMLIGVDPHKSTSTATAVEPESNREVASIRIEATLREYRRLLTWAGRWPQRRWAIENAEGLGRHLASWLLARGEQVVDVPTTATARVRQLSRGGGRKNDRIDAAAAACVAALQGDARPLEAEGTTDVLGLLDERRANLSQARVRAVNQLHALLRALLAGGAPRGLSAAAAAALLRTVRPAGAAERVRKQIAGDLVVEIRSLDSRLKANEAAMAELVKSSGSTLTGTVGIGPVTAARLIGRSGRPSRFPSSAAFAAYSGVAPVEVASAEHARHRLSRSGDRQLNSALHIVAVTQIRTAGSLGNIYYRTKMAEGKTEREARRCLKRRLADHVWRTMIADEKRQRAKPASDSDAA

SEQ ID NO: 202129 - protein, 346 aa, unidentified
MKINRVGVDLAKNVFQLHGADRQGKTLWKRQLSRDKWLTVLFATVEPGTVIGMEACTGAHHWSRLLLDKGYEVKIIPPQFVKPFVKSNKNDANDAQAICEAMARPNMYPVKVKTIEQQDMQAIHRIRNEIKSHRIAKANQIRGLVAEYGLVAPKELTSLRSAIPKWLEDASNGLTMFFRQLLQGLYEDLSSVDKRMAELDKQIAVIAQQDPIAKRLQQLRGVGPLIATALVATMGDGKQYRKGRDMAAAIGLTPRQHSSGGKDRLLGISKRGDAYLRCLLVHGARSAMRTAKDKDDRLSRWITNLQDRRHANVAACAMANKMARMAWAMMTKGVDYDPDFSSVSAS

SEQ ID NO: 202130 - protein, 343 aa, unidentified
MKIAILGIDLGKNSCSLVGLDGRGKVVKRRHMRRASIVGFTKSLPPCIIAMEACCGAHHLGRLFKAQGHEVRLMSPEYVRPYVKAQKNDDRDAEAIAEAATRPTMRFVELKSEEQLDMQTLHRARDRLVGERTALINQLRAILLERGIVIAQGRRNLERELDAMLFEVDGLAVSPRLRKLIEGIREEWRDLDRRIAAFDDEFAARAKTDEAARRLATIPGIGVLNATALAAAIGEGQTFARGRDLAAWLGLVPRQITTGGKPRLAGITKRGNCYLRKLLIHGARAVLPTLCKSETLLGGWLRALLARVHKNAAVVALANKLARIVWAVLRRKETFNPSATALA

SEQ ID NO: 202131 - protein, 334 aa, unidentified
MGIDISKDDFHVCAKEKGVDSKVKIRGSRSFSNDAKGFTEFALWVSKREKEDFAVRYIMEATGTYYENLAYYLYEAGNNVSVVLANKIKHFAKSLNVKTKTDKVDSAIIAEIGIERELAAWKPMSLKYKELRDLCREMLSLKREKTRAMCQHHAMNYSHEKTASVLMIKSAQIEFYRQTILQIESEIERIVDADIELKQRIEKIKKVKGLGLITIIIVLCETNGFLLFSNIRQVVSYAGLDIEMKESGKYKGKTKISKKGNARIRQSLYMPALCAATYNEKIKELNERINERNPQIKKKGVVAGMRKLLILIFVLWKKNEEYDPHHEWQKNDIG

SEQ ID NO: 202132 - protein, 386 aa, unidentified
MPQPKSDLSRSLVALEQEKTVVAVVELSLATWLVGGVVPGIKREPLKKLVPDQEALLTLLHRWRDEAIAAGHEIARMVVAFEAGRDGFWLARWLRIRGIEAYVIHPTSIPVSRERRRAKTDRLDIELLKRSLLGWLRGEKKHCTMAAIPTLEAEDAKRPTREREQLVGKRTGIANRMKAALVRLGIRGFNPKLRKAPEQLAALRTPEGCPIPLNTLAELQREMAHLRFIDEQIKQIENARLEQLKQAPQQESNAKVLHLQRVNGLGIETADMLIHEILQRDLRDQRAVARYAGLTGSPDESGARRREKGLAKAGNARVRRGMIQFAWRFLIHQKDSALAHWYQASVIAGKKRKTMVVALARKLLIALWRFVTTAEVPQGVVLRPAS

SEQ ID NO: 202133 - protein, 392 aa, unidentified
MTTWVGIDVAKGTHWACALDEDGRVRLSRAVPNTQEGVDALSTELRALPPPVLVGLDVDGSIAAFLQAVLLADGLALVHVPGLAVNRAAHGYAGGERKSDPQDARVIADLVRTRPGLRPIRPEDDATASLRLLVSRRRDLVQDQTRRIARLRQLLSQAHPGLEAALDLTCKGPLALLTRYVTPAEIARATPKALVRHLRRTPNLRDPEGLAALARTCAARQRSAVPGEATLARLVREMAAEALLVRERLALLDKELEALVTAHPRGALVRSLPGMGAVLAAEFIATAGDVSRFRSPAALAAAAGLAPVLRQSGRSHTLRRARRGDRDLKRVLYLSAFSACASHPQSRAYYDRKRREGKHHAQALIALARQRTNVLWAMLTHGQAYDPNHHAA

SEQ ID NO: 202134 - protein, 408 aa, unidentified
MDVVYRCCCGLDVHKDSVTACVLWIEGGKSRREKRKFGTFTQDLLALSDWLRGCRVTHVAMESTGVYWKPVFHILEGQFELLVVNAQHVKAIPGKKTDPRDAAWLAELLQHGLLKSSFIPPEPIRELRDLTRYRVNLAQECNRIANRIQKVLEDANLKLASVATDALGASGRAMLKAIIAGEQDVEKLAEMSRGLLRRKIPQLQLALEGRVRTHHRFLLQQLMDHLEFIEAKMTRLEQEIAERLRPFEETVRRLCSVPGIDRVSAWGIISEIGLNMGQFPDEHHLASWAGLCPGNWESAGKRKSGRIRKGSAWLRRHLCQSAWGVSTKQNNYLSALFRRVAARRGVKRATVAVAHALLVIAYHILKHPVEYRDLGADYFDRLHPERLKRKLVKRLEGLGFQVTLASSV

SEQ ID NO: 202135 - protein, 335 aa, unidentified
MKKIHVGIDISKEKCNLCYRSGLEIVREEECSNEVRALKKAFKAALKALGASVEEVLVCAEYTGRYIYPLTVACQELDIFLWMDDPTRIKNSMGLTRGKNDAIDAARIAEYAFRYSDKAVRYSIPNAALASMKNLLADREFLLIDRKRYQSQLTDQKKYMAPGDFKHKNSRWKKVIKSMDEQIAAIDAEIESLIAADPVLTRQKELLVSIDGIGDRIAINMIAITGGFTRFQNARQFCSFAGLTPYKYDSGTSVRSKAKISKRANQTMKALLHMSAVNVATRMKDGEYKDYYERKLKEGKHVMCIMNVLRAKLVHRMFSVIRRDTEYTKQYEPAS

SEQ ID NO: 202136 - protein, 401 aa, unidentified
MNAVGIDVSKGKSMIAIMRPLGEVVATPFEVGHTAAELNELAKFILKISGETRVVMEYTGVYFEPIAMALYDAGLSVCVVHAQLIHNYGNNTIRKVKTDKADAIKIANYALDNWNKLKPYAPIDEVRRQLKAYSRQYRKFNKLKTMLKNNLIALTDSTFPGVNELFSSPPRKSDGHEKWLDFAIKFWHAECVCSLSQKAFTERYRKWCHKAGYYFLESKAEDIYAAACGHIGLLPKNENTKQLVQQTIIQLTSICSSLSVIENKMTELAGLLPEYPIVMEFRGVGRILGPQIMAEVGDVLRFEKKESLVCFAGLEAPPYESGKFESHNRTISKKGSPHLRAALFQVMDCLIKTQPVNDPVFQFIDRKRSEGKHYYSYMCAGSAKFLRIYYARVKEYLTALE

SEQ ID NO: 202137 - protein, 402 aa, unidentified
MSTFFAGLDWASQVHVVCVIDEHGAVETRFEVTHDADGLRELRRRLAAFGSIAVAIERPSGLLVDALIEAGFTVVPIHPNAVKASRPRYRSHGAKSDTSDAYLLADLLRTDGHRFKPLLPHSDDIRALRALVRGRDDLVATRVQLANQLRSLLESYWPGAAAVFAEIDSPIALAFIDRYPTPDSATRLGPKRMAAFCAQHAYSGRRSAEELLHRVHAAPAPTSSDMESEAKGELARCLGRTLARLVEQIRRLSSRIEHHVADLDDGRILMSFPRAGRLCAAQILAELGTDRQRFASDQHLAATAGLTPLTYQSGNHKAVTFRWACNHRLRAALTCLADNSRHASAWAAHVYAQARARGCDHPHAVRILARAWLRVIWRAWVDRKPYDPSHHRAAQRLQLAGG

SEQ ID NO: 202138 - protein, 332 aa, unidentified
MAWTVAIGVDTHKDIHVAVACNRLGAQLDVCEIEAGSRGYARLLAWAQELGEPAFAIEGCGSYGSGLARFLTAAGYAVWECERPRRRDRRRGKSDLIDAALAARRLLSGDGLSLPRSGERHDGLRLLLLERRGIVQAQTAALNQLQAAVLTPTLPERLRSLGGERLVRACLTLRAGSTERAVARRLARRIRQLDHELAEVDTQLRAAITSCAQPLLDECGVGVICAAQMIVSTGDARRMRSEAAFAALAGTSPVDASSGRQQRDRLNRGGDRQLNRALHIIALSRTRHHEQTRAYHQRLLERGKTNREAQRCIKRALARHFYRQLQTPPLTT

SEQ ID NO: 202139 - protein, 343 aa, unidentified
MKLTRVGVDLAKQVFQVHGVDRVERPAWCKRLKRSRWIADLERDVEPGAEIGMEACGSAHHWARLLQSKGYRVKLIAPQFVKPYVKTNKTDANDAEAICEAMSRPSMRFVAVKTVEQQDLQAVHRVRSSLIRERTAKANQLRGLVYEYGLVAPQQISSLRRAVPQWLEDAENGLTVRFRSLLAGLYRDLKQLDERVRELDQEVAAITREHEPVRRLMQINGVGPLIASALYALVGDARQYRNGRDLAVALGLTPRQHSSGGKEKLLGISKRGDKYMRTLLIHGARSALRTAPGRTDRISRWALALAERSHPNVAVTALANKTARVAWAMLRHGANYEPERLAA

SEQ ID NO: 202140 - protein, 408 aa, unidentified
MTQYYLGVDWADEFHQVWVSDPDGKKVIEKKVVENVEGLAEFGRWLDERRAQQIELWASIEKPHRRIVDFLLDHGVVVYPVNPKALDRARDRFRMSQSKSDGFDAYVLAQFLRTDHGHLRALKPNSDPAQELKLLTRDQQRLVRQKTRLLNQLTTTLKEYYPQPLEVFSDLESNIALDFLKQYPTPHDLSKLTRRQWNRFAKREHHLGEERCKELWEKLNQPQLEVPEHVVRAKARLLEVVVVQLKTLRDAVESYNERVRSFFACMPAAELVKALPGAKTGTIVATLWAELGDAKDRWESFRHLQAEAGVVPVTKASGKSRVVQFRFSCNKVMRHAAYWLAFVSLNRTEWANHYYRDQRAKGHSHHQALRALGAKWLKIIFVMWRDHKPYDENYHLANIARQQMRQAA

SEQ ID NO: 202141 - protein, 359 aa, unidentified
MMVLGIDPHKKSHTVVALEAATGEPVAELTVAADRRGHERLIAWARRLTPERRFAIEDCRHVSGHLERALIAAGERCVRVPPKLMAQTRRSARRRGKSDAIDAACVARAALREPGLPEARLAGPERALRLLVDHRSDLVGERTRIQNRLRWHLHDLGLGLEVPPKALGRACWLARLEEELAPLPGVQARIARELVARCRTLSAEISGLGREIAVLTEELAPELLALPGCGALSAANLVGETAGAERFASAARFAMHAGVAPLPVSSGQSNRHRLNRRGNRQLNAALHRIALTQLRMHEPAQAFVARKRAEGKSTREALRCLKRHLARIVWRELRNAEARRELLPVCGDPPARVALPLAS

SEQ ID NO: 202142 - protein, 454 aa, unidentified
MRVMYERCCGLDIHKAGIAACALISERGKTKEETRRFGTMTADLQELAEWLDQKEIRQVAMESTGIYWKPIWNILEPAGFELLLANAQEVKVVPGRKTDQKDCQWIADLHKHGLLRNSFVPPRMIRDLRDLTRTRAILTQEHTSVCNRIQKVLEDANIKLGSVASDVFGASGRSILRALMKDETDAETLAELSKGRLRKKIPQLRRALEGQVTGHHRSMITGHWQRMQFLERQIADLEAEIAQRMKPTREETACAQQTLPEGAPEPLSPREEASQLWMEIPGVGWTAACSMVAELGTNMDQFPSAAHLASWAGLCPGNNESAGKRLSGKTRKGNVWLRRTMCEVAWGASHTKDTYFAAQFRRIASRRGKKRALIALAHSILITAYHMLKYRRGYQELGGEFLDQINRDQVRKRLVQRLTKLGFEVTLKSKAENAGDNDASTEIDRVLMAATATH

SEQ ID NO: 202143 - protein, 337 aa, unidentified
MSVYVGIDVHRKRSQVAVVTEDGTVQLNKNVVNGSEPMLRLIGDLPAGTPVAFEAAFGWGWLAGLLEDYGFDPHLVHPLRCKAIASARLKNDKVDAAILAQLLRADLLPEAWIAPPEVRQLRALLRHRVGLVRLGTQLRNRIHAVAAGHGYDRSASYWTGPGRGWLAGLDLPAASREIVTDCLAVIDGLAPLIDRIDGELHQHAKADPRTKVLRTLPGVGEFTALVMLAEIGDITRFPSARKLASWAGLTPTARGSDLKVRHGNISKQGSAWLRWVMNQAAQTAKRSPDFAATYSSIAKRRGKKIATIAISRKLLTRAWHLLADMQAADASTPPRQP

SEQ ID NO: 202144 - protein, 346 aa, unidentified
MAVMIGVDPHKGSHTAVAIGTGEEPLGELRVRASAAQAQRLLAWAAGWPERTWAIEGAAGLGHLLAQQLLAAGERVLDVQPKLGARVRLLAAGAVNKNDPNDARSVAVAALRSASRREVTADDHAAVLKVWSKRHRDLGRTRTQVACRLHAVLCELIPGGVSKRLTAAHAGGLLEAITPSGAVEAARCELAAAFLEDLRRIDAQMRDAKKKLTVAVAASGTTVTEVFGVGPVVAAIVIGAVRDVSRFPSRDHFAAYNGTAPIEVSSGPRKIYRLSRRGNRRLNHAIHMAAVTQVSHRHSDGRAYYERKLAEGKTPKEALRALKRQVSDTIFARLQADAQRAAAGTR

SEQ ID NO: 202145 - protein, 308 aa, unidentified
MITPVVVGIDVSKATLDLFADGLGHRRIANTAPAVKAMIASLARPCFVVLEATGCYDALLRRELDQAGVPFARVNPEQARDFARAIGRRAKTDAVDARMLAEMGRRLDLAPTPQEDPVRQRLTKWQRRRDQLVAMRQQEKVRLADEPDEAFAPGLRAHIAQLGLAIAQADRAIDALLADSPALAQAEKRIRSVPGVGRVTAVILLALMPELGSRSPKQLAALAGVAPFNVDSGDKRGQRRIRGGRRRVRQALYMAALSATRSNPRLKAFAQTLKSRGKAAKPVLVAVARKLLGIINAIMRDKTQFAAP

SEQ ID NO: 202146 - protein, 309 aa, unidentified
MIIHPGIIGIDVSKAHFDIFDAERGRPERLPNSSEAAHALAQRLQSRQNGFAIFEATGKYDQHLRDVFEAEHIAYSRVNPQQARDFARAMGRRAKNDAIDAHMLAAMAQALAPARMQARDRSREALAALHKRRDQLVENRAAERTRLTETGDILASLHDHLAWLDAEIDRFDRLIANAIAQDKAIAEDVRLLRSVPGVGPVTAATLAALMPELGSVSPGTAAAIAGLAPFDDESGQSRGRRHISGGRRRVRRALYMAAITAVRSRSRFKGVYQSLRERGKPAKLALIAIARKLITILNAILRDRVAFHP

SEQ ID NO: 202147 - protein, 388 aa, unidentified
MTVYVGVDIAKELHYAAIMNSDGVVANPFSFENNNKGFCLLLSHLSPYLKESVLIGFESTAHYQDNLAFFLRSHGYRIAVINPLQTSALRKANIRNTKTDSVDAKLICLALMQHNIHGDQRDSSRLDDLYQLCKMRMDLIKKRTSCKIQLVSFMDRIFPELASFFSNNLHINTAYRLIESYPLPSLIKKTRIDVLTRLFHKASKGHFGKEKAQALKNLATISVGIPSVTYAFQAQQLIHQIEFYSEQIQAVDEKIDSDPEVMSSPLMTIPGVSSFCAACILSVIKNINDFDAPCKILAYAGLDPVIRQSGKFNARQTRMSKRGNSLLRYALVWTAGNAVKNNATFNEYYRHKTQDQGKSHYQALGHCAKKLTKSIYHMLKYNESFNLA

SEQ ID NO: 202148 - protein, 410 aa, unidentified
MERMLERCAGLDVHKKTVTACVRVPGTHGDRTQHVRTFDTTTAGLLVLRDWLAAHAVTHVAMESTGVYWRPVYYVLEDAFACILANAAQIAQVPGRKTDVKDCVWIAQLLEHGLLRASFVPPAPIRELRDLTRYRKVLIQERTRHANRLHKVLEDAGIKLTSVASRLLGVSGRAMLDALVAGTTDPEVLADLARGRLRQKLPALRQALVGRFRSHHAFLVSQLLAHVDYLDEAIQTVGGHIDEVMVPFTDELARLDTIRGINKRTAEVIIAEIGVDMTVFPTAKHLASWAGLCPGNNESAGKHRSGKTRPANRWLRAALIEAALAASTRAAPGAFAARYRRIMPHRGHKKAIVAVAHAMLVTIYHQLTRQTTYHDPGTDYYDRRHAERLRRRALQTLERQGYRVTLEPAA

SEQ ID NO: 202149 - protein, 399 aa, unidentified
MVEWNGRLPPLRNPWRFISLQSNLCRSLSIQRQTLTGKRRRSSQGDGTKVFTCNRGAKMNASKSVVGIDIAKRVFQLYWIDMETGEVSNLQLKREKFLEHFANRQACLIGMEACGGSHHWARKLTALGHQVKLLPGKEVKPFVTGNKNDRHDARAIWTAAQQPHVKAVAIKTEEQQAILALHRMRSQLVKFRTAQLNGLRGLLAEYGEVMAQGKAAVRKTIQDVLTRLADRLPAMVIDTLREQWARIENMDVEIATIERRIKDWLKQDQACQRIAEIPGVGPLSATAAVAIMGDAKAFKSGREFAAFAGLVPRQTGTGGRIKLLGISKRGDTYLRTLLIHGARAVLTSAKEPGQWVSELRQRRPINVAVVALANKMARTIWALVAHERTYQKCPVSQPA

SEQ ID NO: 202150 - protein, 402 aa, unidentified
MNCIGIDVSKGKSTIAVMRPFGEVVVSPFEVCHTVNELSELARQLKSLDGETRVVMESTGNYHAPVAWLLHDAGFYVSVVNAMLVHDYGNNSLRRAKTDKKDAVKLANYGLDHWLTLPRYVPEEDTRLMLKTCYRQYQQYSKVQTMLKNNLISLLDTAFPNANRLFTSPPRADGSEKWVDFVATFWHCECVCGLSEKAFTAKYQKWCKKHGYNFSEDKALDIYASAFAHFGVMPKTDTAKLLVEQAISQLRATSAALAALKQKMQSLAASLPEYPVVMEMFGVGPTLGPQLMAEIGDVRRFHSKKALVAFAGIDAPPYQSGQIDVRSRSISKRGSASLRRTLFLVMGVLLQCAPMDEPVYQFMDKKRSEGKPYRVYMMASANKFLRIYYASVKAYLDSLEHD

SEQ ID NO: 202151 - protein, 367 aa, unidentified
MKDSSTVVGLDVHKNSIQIVTAETDGAMEIRHLGRIGGTMDALDRAIRKLASKGSTLRFVYEGGPCGYEIYRHLTGKGFSCKVVAPSKTPKKSGERIKNDRRDAETLARLERAGELTAIYVPREDDEAMRDLLRAREDAGKALKTARHQLNAFLLRYGKRYPGKKSWTFFHLRWLSDVSLPHPSQQIVLQEYILTVTAGTERMTRLTEQIMKLLPEWRLFPVVKALQALRGVAPIVAATTMAEIGDLSRFPNPRQLMAYLGLVPSENSSGETTQRGSITKTGNGHVRRALVEAAQAYGFPARVSRHLLKRQEGLPEPVRAIAWKAQVRLCGRFRRLMARGKLRTKIVTAIARELSGFMWAVAREVKV

SEQ ID NO: 202152 - protein, 442 aa, unidentified
MATKLVNPNAAGIDVASNEHVVAVREDKSKDSVRTFKGFTRDLHQLAKWLLSCKVETIAMESTGVYWFDLYTILLDYGFEVYLVNAHHVKNVPGRKSDVSDARWLQQLHTFGLLRASFQPDNLTRSLRNHVRQRKNIVQQMSRQTQHMQKAFDQMNIKLNNVIRDLNGATGTKIITAILEGERDPKKLAQHRDRRIKASEQTLIKSLEGNWREEQLFNLQLAYDHYIFLQQQLKQCDAESEKIVQKMTSGNSPKSRTKKIQKSKNNPDFDVAQYLHAALGVDVTQIYGIKEVTALTIFSETGANLKEKFPTEKQFLSWVNVVPNNKITGGKVISSKVKKKKNVAGQAFRDGASALWRAKNPIGDYLRRKKAKSGAKKAVVATARKIAAIYYKMVTEKVEFNPLELTKGKEQYLQKRLKQLEMAKEQTQMQLSDFQQQNSLVI

SEQ ID NO: 202153 - protein, 310 aa, unidentified
MDIIAVGIDVSKDRLDVAVHPGGEAFVVERNGAGLEQLTVRLKQLAPSIVALEATGGFETIAAAAVGGAGLPIVVVNPAQVRAFAKALGQRAKTDPIDASVIAHFAAATRPEPRPLPDEATRFLSDLVTRRRQIVDMIGAERQREKRATSQHLRKSITRLIKALEKELVSVDTDIDDAVRSSPAWREAEDLLASVPGVGPIIARTLMAELPELGRLNRKQIAALAGLAPYTRQSGQWRGKSFIGGGRQAVRTVLFMGAMTARRHNPVLKAFFERLVANGKPKLVALIAVARKLLTILNVMIRTKTPWQPA

SEQ ID NO: 202154 - protein, 370 aa, unidentified
MKKNSTRPQSPRGAAARSKGPITIGLDLGDKTSRYCVVGDNGEVMSEGSVATTRKAVAQKFTGMGRCRIAMEVGTHSPWLSRMLTALGFEVIVANARQVQLISASSRKNDRMDAHLLARLARVDPELLRPIRHRSEQAQADLMTIRIRATLVEARTSLVNAARGFTKAMGERLPACDTDSLGVEKLEALPAALQPRLQPLLEQIEALTAQIKKLESNIEQIARIEYPETRLLTQVSGVGTLIALTFVLTLEDRERFQKSRDVGCYVGLRPKQSQSGQSQPQLRITKEGDRYLRTLLVQAAHLILNRRAPDTDLKRWGLKLAQRGGKNAKKRAIVAVARKLAVLLHRLWVCGEVYEPLRNSRPTPASKQAA

SEQ ID NO: 202155 - protein, 402 aa, unidentified
MNCVGIDVSKGKSMIAVMRPFGEVVVSPFEVRHTASELSELARLLKSLDGETRVVMESTGNYHAPVAWLLHGAGLYVSVVNAMLVHDYGNNSLRRGKTDKKDAVKLANYGLDHWLTLPRYVPEADTRLMLKTCYRQYQQYSKVQTMLKNNLISLLDTAFPDANRLFTSPPRTDGSEKWVDFVATFWHCECVCGLSKKAFTAKYQKWCRKHGYNFSQDKALDIYASACGRFGVMPKTNTAKLLVEQAISQLQTTSAALAALKQEMQSLAASLPEYPVVMGMFGVGPTLGPQLIAEIGDVRRFHSKKALVAFAGIDAPPYQSGQIDVRSRSISKRGSASLRRTLFLVMGVLLQCAPMDEPVYQFMNKKRSEGKPYRVYMMASANKFLRIYYASVKAYLDSLEHD

SEQ ID NO: 202156 - protein, 345 aa, unidentified
MKKVIAGMDLHSNNVVIGVMDMDGHRLASRKLPCELKEVVKFLTPFKRRLERVAVESTYNWYWLVDGLQALKYPVVLANPAGMAQYSGIKHADDTNDAFFIAELLRLAILPTGHIYDVELRPVRDLLRRRLMLVHQRTALMLSFKSLYTRTTGQELTLSKLKGMEIKAAQELYEHPANQLIAGMQIKHIEQLTESVEKIEKAVLGSARELPYYKKLATLPGVGRILGMTVTMEVGDIKRFAAPGHFASYCRTVEAKRMSNNKKKGENNSKCGNKYLAWAFVEAANFARRYDEQCRKWFDRKAAKTSNVIAIKALACKLAKAAWYLMAEGTDYDPKRMFGQPAKTQ

SEQ ID NO: 202157 - protein, 457 aa, unidentified
MTRKSPSRLQRDLAPVHPHAAAVDIGARMHVAAVSPRCDSEPVRTFGTFTGDLQRLADWFEQCRVATVALESTGVYWIPLYEILTQRGFAVVVVNAREVKQVPGRKTDVCDAQWLQRLHEYGLLRASFHPQGEIATLRSYLRQRERLLEAAAAHIQHMQKALIQMNLQLQHVVADITGQTGLRIIRAIVAGERDPDRLAALRDGRCKTPLVTLRAALVGNDREEHVFALAQALELYEIYQTKVAACDERIAAVLERLQAQNPPPAAALPLPRRAQPQANEPAVPVRAALHAILGVDLTQIDGIGPYLALKLVSECGTDLAAWPSAQHFTSWLGLAPHNKISGGKVLSSRTRRSGSRVAALLRLAAGAVGRTQTALGAFYRRLAARVGKAKAITATARKIAVLVYNTLSHGMAYADPGASYYEERYRQRVLSNLRRRAKSLGYVLEKAEPASTAVVVS

SEQ ID NO: 202158 - protein, 419 aa, unidentified
MKNSNTKKLKSINEETLLVTLDIGKIKHTGYWRFPNGTEGKPFEFFNSRHGFEEFWWRVCQARRSGNLKEVVVGFESTGPYAEPLLHFLRKRDVRLVQVNPLHTKRLKELQGNSPNKTDQKDPKVIADIIELGHALTVIIPEGTVAELRRLTQARERSIQRMRMLMSQLQDLIFLIFPEFMPVMKDITTKSTQYLLKNYPRPQDIAEQGIDRLAQILKKVSRGRLVKERAEALYEGAAESIGIGEGRESIVLEIKETVSTIENIEKFVKELEHCMSKYLRDVPYSRCILSIKGIGEITTAGLIGEMGDFRKYSTLSEVIKHAGLDLFEISSGKHKGKRRISKRGRPLLRKLLFFASINVVRKGGILHKQYQHHLEKGMPKIKALIAISRKLLTIIFALVRNQSVYIMQYSKTQEVKEAA

SEQ ID NO: 202159 - protein, 343 aa, unidentified
MQVSTIGLDLAKNVFQAHGVSAEGKVVLTKQLRRGQVLSTFAKLPPCLVGMEACAGAHYWARELRKLGHDVRLMPARDVKAYVKRDKTDAADAAAICEAVSRPSMRFVALKTPEQQGRLMQHRVRDLLLRQRTQTINALRAHMAELGLVAATGRQGLGLLLAILADARDARLPQDARASLQLLASQITALQAQIDTLDKRLHAQHRQCPASRRLETIPGIGVIGATALAATITDPKAFKSGRDLAAFIGLVPRNNSSGGKQRLGPISKQGDRYLRRILVVGAHSILKQARARPDKHPWLARLMARKPGKLAAVALANKTARIAWAVLARGESYRAPTAPAAAG

SEQ ID NO: 202160 - protein, 338 aa, unidentified
MQYIGVDLHKRSFTAAYKSGDDVKLQSFKMDNRGLEEFKRTISREDSIAVETTGNSMYFVDEIADCVKEIQIVNTRQFKIIRQSAKKTDNNDAMELAKYLEKGLLPTVRYQAKDQRDLKSLIVTRDKLVKMRSSLKNKLHGLLLSNGIDSKKEQFSSRKQLEKLMGTPGLSEANRFELKILVEQLESLGRSIKELEQKIIDEGKDMKGQSNLQSIKGIGKLSSTILLNAIGDVRDFESSRKLSSYTGMVPKVYNSGGQVNHGRITKRGNKILRTTLVQVTLIAIRYSPYLRSYFVKKKLVKGSGKAIISTARKMLDIIYNTLSNDWVFKDFPNFVLAE

SEQ ID NO: 202161 - protein, 313 aa, unidentified
MKKTICGVDVSKAKLDACIEPGHRLASFDNDAAGIAELAAFCREQAVTLVVMEASGGYERRAFVGLWEAGISCALTNPRNVRRYAEAMGILEKTDRIDSSIIARFADAKDLAPTPLPSQAQQRLKALVARLRQVTNDLTVQKQRRASLLDNPEILVSLDEVIALLKRQSRSLEGEIASMIDDDPLWAKLAETWRDMKGVAGRTVAHLHAEVPEIGTLSNKAIAKLVGLAPIANDSGKRKGKRPTRGGRAGVRSILFLVAAIAARYDKSLGEFRDRLLKAGKEKMVVRIALARKLLVRLNAKARDARAEYANAT

SEQ ID NO: 202162 - protein, 412 aa, unidentified
MEVVYTRCCGLDVHKQSVVACTIVPGAARRPTKTIRTFGTTTDQLEALAEWLLAQKVTHAVMESTGVFWKPVFNILAGRIEVVVVNAQHVKVVPGRKTDVADSEWLADLLRHGLLRASFIPDQAQRQLRDLTRTRVALIDERSRTIRRLHKVLEDANIKLSSVATDVLGVSGRAMLEALVAGTTDPHAMADLAHGRLRAKLPALEQALTGRVSEHHRLLLKTHLAHIDFLNQAITQLSEQVTECLRPFEAELERLETIPGIKRRTAEVLAAETGLDMGRFPSAAHLASWAGMCPGNQESAGKRKTGKTRKGSKWLRRALVEAGRAAARKRGSSFFAQYRRLAARRGPNKAAVAVGHALLTTVYYVLARQDTYRGPDPVQQEQHLRARTEKRALRQLQDLGYTVTLTPLAQAA

SEQ ID NO: 202163 - protein, 341 aa, unidentified
MDKELYFGVDVSKKTLDLAYYDGETIDWKNAHIKVSNDDAGFKKIGSWVAKVGKDFDTFLFCLEYTGLYNQNFRLWLESKEYIYSMVEPRKMHRFEPDLDDDQRSLDRIKTDELDAFRIAIYCEQNHKKILRNPSKLPSPLYFKLKRLLVERKQNTKQSVLYKQQLHDICAYDTDLSVERKKLLLKNMKENQKAIDKEIDSYMNEDASISKNFNLLSSIPGIGRIIALETIVLTENFTAINNPRKYACYIGIAPFKKESGTSVRKKTGVSKKGFSEAKADLSIAVLSAIRNNPSIRDYWIRKRKEKCGGIVLNAIKFKLVLRMFAVIKRGTPYVETDAYKN

SEQ ID NO: 202164 - protein, 316 aa, unidentified
MGMTDTPAAARPILAIDVSKARLDGFDAATGETFSLDHTPSGHTALLRRAAAGGHLLALEASGGYERPLLAACLKAGLPTRLLDPRRVRHFARASGQWAKTDRLDARLIAAYAAAIPGDFHQPDPEAAQLAELVTYRRQLIDIETTLANQAEHLTDPELRRDAKRRLDTLKLRLTRLDARIDAAIAASPTLARKATLLRSIPGVGPVLCATLLASLPELGHLNRREIAALVGVAPMDNSSGQRHGAKTIHAGRPAVRATLYMAALVAGRFNPPLAAFRDRLRAAGKKPKVAIVAVMRKLLVLANALLRDNRTYAAP

SEQ ID NO: 202165 - protein, 428 aa, unidentified
MRHIGLDVHRDFCEVAIAEGGKVRSAGRISTTKAQLELFARSLGADDQVALEVTGGAEAIARILRPHVARVVIANTKKLRSISEAKAKTDRLDARALAELLASGFLAEVWSPDEQTRALRRRVARRAQLVRQRTRAKNEIRAACQRNLAARPEVSDLAGKKGRSFLAGLDLPADERQTVDGCLRQISFLDEELALIDSELSQAALASEQMRRLMTVPGVNLHTAATFMASVGDIGRFENPRKLVSYLGLDPRVRQSGSEPARHGRISKEGASEARHMLCEAAWVLMRSPSPLRAFAERVRARRGANVAIVALARKLCVLFWHLLTKGEDYAFERPSLTRQKLRRLELMAGAEQRPRGRRAGAAPVPTQAAMKAAERELAEQSERAYRRLVADWRKAPKRGAGATQGRASSGRQSGKQRGRASVPDPAL

SEQ ID NO: 202166 - protein, 333 aa, unidentified
MHVLEEGGATREVTAVSPDADALRTLAAQAARWGEPVRAAIESMNGARFVHDTLELHGWDVEICDAKKVKGLAPLACKTDRIDAWVLAELARRDLIPAIWLPTPGVRAERERARFRLHLVRHRTALKNRIHAALIAFGHPCPVSDLFGRAGRELLSRLELPEPWAGTVRASLELIEDLDERIASCERELRALGADHPYVPRLMTVPGIGWVLAYTIASEIGDISRFPSPKKLTGYTGLCPRVHQSGGKDHRGPLSKNGPRYLRWALIEAATHAARHPCYRDHYERTKRRLGKQRGAKVARVEVARKLAEAIWHMLTRNQPFAPAGPTRSALVA

SEQ ID NO: 202167 - protein, 387 aa, unidentified
MPLAADLPAQTQPVPRPAQVLYVSLELSPSKWLVTSLLSGTGRMSKHLVIGGDGNALLRLLAALRTRAEQRAGAPVVIVPIQEAGLDGFSVHRLLEADGVESWVVDPASVAVPRRMRRAKSDAIDGETLLRTLLAFRRGEPRVCSMVHPPSVEEEDRRRITRERRTLLRERIEHTNRIKGLLMGQGVTGYDPLGKDRWARLESLETRDGHALPPRLKAEIGREIERLELLARQIRQVEAERDALAATVPEVAASPAALLLRLKGVGPEAATLLWLEGLFRTFANRRQLAAYAGLAPTPWLSGRIRREQGISKAGNPRLRTAMIELAWLWLRHQPESALSRWFGERVRAGGGRNRRTTIVALARKLLVALWRYLVHGQVPDGAVLKPS

SEQ ID NO: 202168 - protein, 428 aa, unidentified
MEQQDGIRLEQFRQLKREVRSSDGYLIVGIDVSKDRHHACFRAASGRILLKRLVFENSYEGFERLLNQADVLRLENGLREVVFGMEPTGNYHKPLGEFLIRRLALVVLVSNVAAKENRKSLDGRWDKHDEKDAANVADLVSQGKFLFYEYPEPRIKELRVLLGLKRRLKRQEHGYRVRIRNHLVAKYFPELDRYFDQSEKYSLAIVRWCLDPRSLSGYEFEEFVRMVAPQMRSGQQSGRLRTILQRAQHSIGCEMGPGAEFEARVMVEGLRQIRIVIGDTDKQIQERCLEFSEYEYLLSIPGFGPDVSAKVLGAIGDPFRFQNGSQVIKMAGLDLNAERSGKGSEWARPRISKKGKADLRYALYQAAFIASTKNRHFMVYYRNQLQGREREPGIKTKMRVKLAAKLLVIAWTLMKKKEPFNPDYLNLE

SEQ ID NO: 202169 - protein, 322 aa, unidentified
MSVKVLGIDIAKQKFDVALLADGKIKNKTCRNSREGFEILKVWLEKQGIQKVHACMEATGNYGEDLAIYLHEVGHTVSIVNPARIKGFAQSELVRTKTDKLDAGVIARFCLAMKPETWIPPAPEIRSLRALVRRVDSLIDMRSQEKNRISTAHESVIVLIQEHIVYLDQEIEKIRKQIDDLIKRNPHLKQRKDLLDSIPGLGKVTVPHLLAELDNLDKFTHVREMVAFIGLAPKETISGSSIKGKPRLCKIGNARLRKALYMPALVSIQCNPVMIAFYNRLKERGKNGKVIVCAIMRKLVHVIFGVLKSGKKYDPNYKPALS

SEQ ID NO: 202170 - protein, 398 aa, unidentified
MHGLAHSITFNRIVAIDLGKFNSVICLYDPATTQHSFLTVQTTPQAVHDLLTQYAGEDPSQTLVVFETCDCGGWVYDIAAAMGFTVAVANPSHEAWRWTKVKRKTDRDDALKLASMAAMRQLPTVHMPSPQQRQKRRLIHQRRSLVQRRTEVKNSIRSIFSQQGLPLVRGTKQWTKAGIEQLKSESRPLKTCSVDELWRGRLRVELDLLEMIDAQIKVVDQTLDALGKTSEPIKRLQQVKGVGPRLAEALVAHLDDPHRFRTARQVSAYVGMVPKQFESGTMKRVGRITRRGPSLLRGMLIEVAWMVYRHNAWARSFVQQVSRGMKQRKKIAIVALARKLLVKLWAMLRDGSNWRDPDAPREQNKGQDGGVPPTGVWCSPPEDTERVTAVSSVAGAIA

SEQ ID NO: 202171 - protein, 403 aa, unidentified
MTKQLMAGIDLHSNNMFCGIVDQDGKRVYEQKLPCELPRVLQALKPFKGRIEKIAVESTYNWYWLVDGLQDQHYPVVLANPAKMEQYNGLKATDDKSDAFFLAEMLRLNILPTGHICDRQWRPVRDLLRRRLSLVRQRTSLILSLKSLHVRTTGQDLPLGQLKALPPESAGGLFENPFDQLTAQVQTQLLDQFNQRIGEIEKALLGKVSGLPRYQVLQSLPGVGTILGLTITLETGDPTRFASAGCYASYCRCVDSRRLSNGKKKGRNNEKCGNKYLAWAYVEAANFAKRYDAQCRRFFDRKAAQSNTMVATKSLACKLAKAAWHMMSQQTSSDAGRMFPGQAGAIRPDETKAGGTAVGDAPIRTGQAGPLRGRDRRRRELKSSEARRRRRPARANKRRDDDL

SEQ ID NO: 202172 - protein, 385 aa, unidentified
MQRNDMSRSLVAFDQNSTVVAVVELSLSTWLVAGVVPGLKRQPLKKLSADADKLVALLERWRAEAIKAGQVINRMVVAFEAGRDGFWLARLLRGRGIEAYVIHASSIAVSREHRRAKSDRIDTQRLMRSLLGWLRGEAEHCRMAAIPTLAQEDAKRPNREHESLVADRTRLVNRMKAALIRLGIRNFNIKLRKAAEGLCALRTPEGEPLPPNTLAELGRELERLALIRAQIRAIEQARLQRLKAAPHQATHPMILMLAKVMGVGVETADMLVHEVLARPLRDHRAVGRYAGLTGSPDESGSSRREQGLAKAGNARVRRGMLQLAWRWLMHQKDSALTQWYRSRTADGRKDTRKTMIVALARKLLIALWRYVTTGEVPQGVVLKAA

SEQ ID NO: 202173 - protein, 347 aa, unidentified
MTIVEDRPVITGGVDTHADMHVAAALDPVGGLLGVQEFPATAAGYASLLSWLRSFGILDVAGVEGTGSYGAGLARHLAAAGVRVVEVDRPDRQDRARQGKSDPLDAVSAARAALSGRASGAPRGRDGAVEAIRALMVAKRSARQERTQAVNQARALIMTGPEELRARFVRRSPAQLIEAIAALRPRPGDVPGYATRVALRELGRRAQFLDAQLDRLDELIGPLVTARAPGLLALHGVGPDTAAMLLVAAGDHPERLRSESSWAHLCGVAPIPASSGKTAGRYRLNRGGDRQASSALWRIVIVRLSSHPATRAYADRRSKEGLSKKEIIRCLKRYVAREVYRQLRNGA

SEQ ID NO: 202174 - protein, 366 aa, unidentified
MKKISTVAIETMEIFKEHRLTIGLDLGDRWSFYCVLDEAGKIILEQKVSTTPEAIQQTFGKIPRSLIALETGTHSPWVSRLLTELRHEVIVAHAQKVELITKSTRKDDRHDARTLARLARIDPELLGPVRHRSAKAQIHLTVIRARAELVSARTALVNAARGLVKSYGERLPKCGTYQVSRELAAGLSAELREVLEPLLKEIESLNERIKEYDERMEKIAKEVYPEVFLLKQVKGVGTQIALTYVLTIEDPYRFAKSREVGCFLGLKPGRRNSGKSEPQKHISKEGDRYLRTMMVQGAHYILGPFGEDSDLRRWGRKLGERGGKNAKKRAVVAVARKLAVLLHRLWVNGEVYEPLRNSQQAMRAVA

SEQ ID NO: 202175 - protein, 344 aa, unidentified
MNQIIRIGMDTSKHIFQLHGVDATEQVVLRRKLRRNQVLEFFAKLPPTVIGIEACGAAHYWARELRKLGHEVKLLAPQHVKAYVKRNKNDGRDAEGLCEAMSRPTMQFVPVKTEEQQAVLMLAGVRQQLIARRTQLGNAIRGYAAEFGLTAAKGLDKIEPLLAQIAQDETLPEMARELLALQGRDYARLQIELKAIEAKLMAWHRANPDSRRLAQIPGVGPIGATALVMKAPDPRLFPSGRHFAAWIGLTPKDHSTAGKTRLGKITRAGDEMLRSVLVAGATAVIKQAKHGRGSPWLLALLKRKSPKLAAVALANKIARIAWKLMVTGESYDGARMLGASAFAA

SEQ ID NO: 202176 - protein, 469 aa, unidentified
MGNSKKQKRKNKKHRKVDISNLEQLNLNAAGIDIGAELHYVALPNGRDPEGQNVRHFSTFTADLHKLADWLRQCKIDTVAMESTGVYWIPVFEILDSQGFDVRLVNPRNIKNAPGRKTDVLDCQWIQQLHTYGLLQSSFRPENQICKLRAYLRQRAMLVSYASHHIQHMQKALEQMNIKLNQVLSDVTGLTGMKIIRAIISGERNPVKLASMRNERCNNSESIIAKALKGNWRSEHIFALQQAVELYDFYKKQIIACESHIQRHLESFDDRSNGTSLEKPPRNSRGSSNQFHFDARGYLHRMTGVDVTRIEGIQAPTALNIIGEIGIDMTPWPTEKHFASWLGLCPGSKISGGKVLSSKTKPSANRAAHAFRLAAYSLQRSKSAIGAFLRRKKAQIGAPKAITATAHKIARIFYNMLKYGTEYVDLGQEYYEQRYQDRVVANLKRKAKQFGFDLVNIKEHKLLTGLPVN

SEQ ID NO: 202177 - protein, 344 aa, unidentified
MENYAGIDVSLELSSVCVVDAQGQILKEAKVASEPDALVEFFERLGFAVKRIGLEAGPLSQWLHAGLKGAGFETVLLETRHVKAALSAMTVKTDRKDARGIAQLIRMGWFRPVHAKSVDAQEIRALLIARKQLLGRLIDVELSIRGILRGFGLKVGPVTRKNFEARIRELIAGQATLERIATAMLSARSALKAEYGRLHKAVLAIVRDDAVCRRLMTVPGVGPLVAVTYKSAIDDPHRIVKSKAAGALFGLTPKKYQSGEKDVTGGITLAGDEIVRTVLYEAANVLLSRITRFSKLKRWGMDVAKRRGSKRAKVALARKLAVILHRIWVDGTTYRWGEATPIAA

SEQ ID NO: 202178 - protein, 324 aa, unidentified
MKNADLIFVGIDVSKAKLDVCVGLDGKPGEFSNDGPGHDALWQVLRQLRIGLVVLEATGGYEFACAAALQAQGLPVTIINPRQARDFAKAMGRLAKTDRIDAAGLAHLAQVLAARPDAARFVKPLADAQQQKLAALVGRRRQLVQMRVMETHHLSVAHCSTHKSIKAVIQSLGTQLRHVEADLARHLAHHHADLNTLLGEVKGLGPATVATLIGELPELGKLNRREIGALVGVAPYNHDSGRLKGKRCISGGRAALRTALYMATLVATRYNPVVRVFYQRLLAAGKPKKVALVACMRKLLGILNAMVKNNSSWDDSIHLKTKTA

SEQ ID NO: 202179 - protein, 348 aa, unidentified
MKHYVGLDVSIKETSVCIVDENGKLCRERKVASHPDDLVAILNDPALNLDRIGLEAGPLSQWLFDGLAKAGFPVVCIETRHTKAFLEALQQNKSDRNDARGIANMMRVGLFKDVHVKTLGSQKRRALLTARSLLQEKAIDLENEMRGLLRNFGLKVGQTSGGTFERRILELVENDAELVEIMQPLLDGRRKLREGLAKLEKRVRSEAKNDDVCRRLMTVPGVGAVVSLAYVATVDIPTRFRHSRSVGAVLGLTPVLNQSGEVSRVGHVSLRGDAMMRRLLYEAAQSMMTRVVKWCWLKAWAMNVAKRHGSKKAKVALARRLAVVMHRMWVDGSEFRWTKIEPPTSVAA

SEQ ID NO: 202180 - protein, 403 aa, unidentified
MNAVGIDVSKGKSMVAIMRPFGEIVSTPFEIKHTTSDIHSLVELINSVEGESRIVMEHTGRYYEVLAHQLSEANLFVSTINPKLIKDFDNDSLRKVKSDKADAVKIARYALDKWQNLKQYSVMDELRNQLKTMNRQFGFYMKHKTAMKNNLISILDQTYPGVNTYFDSPARSDGSQKWVDFASTYWHVDCVRKMSLNAFIDHYQNWCKRKKYNFSQSKAEEIYGKAKELVPVLPKDAITKLIIKQAIDQLISVSTTVESLRTLMNETASKLPEYPVVMAMKGVGTSLGPQLMAEIGNVYPFLPHKSAITAFAGVDPGVNESGTYEQKSVPTSKRGSADLRKTLFQVMDVLIKTHPQDDPVYQFLDKKRAQGKPYYVYMTAGANKFLRIYYGRVKEYLASLPES

SEQ ID NO: 202181 - protein, 401 aa, unidentified
MVISIDGVGVFLGLDVGKAAHHGHGLTPAGKTVFDKPLPNTEPKLRAVFDKLRTKFGTVLVIVDQPASIGALPLTVARDAGCQVAYLPGLAMRRIADLYPGEAKTDAKDAAVIADAARTMPHTLRTLDLADETAAELAMLVGFDQDLAGEANRTSNRVRGLLTQFHPSLERVLGPRLDHQAVTWLLERYGSPAALRKAGRRRLVEVVRPRAPRMAERLVDDIFTALDEQTVVVPGTGTLDVIVPSLAKSLAAVHGQRRALEARIEALLEAHPLSGVLTSMPGIGVRTAAVLLATVGDGSSFPTAAHLASYAGLAPATRQSGTSIHGEHAPRGGNRQLKRAMFLSAFAALHDPASRTYYDRCRARGKTHTQALLRLARHRITVLFAMLRDETFYEPRSPRTA

SEQ ID NO: 202182 - protein, 457 aa, unidentified
MRQRGRRTKGMEEAHPFAGMSRVNPDAAGVDIGAEEIIVCVAGDETTQVVRAFGNYTVDLQAIGKWLHEHHVKTVAMESTGVYWIPLFEELERQGFQCLLISSRSLRRVSGRKSDIQDAQWIQTLHSYGLLESSFRPQGELVALRTLLRHRNQLVEHRSPHIQHMQKALLQMNVQLSQALSDVTGETGLRIIRAIVAGEREPQTLAALRDRNCKKSEEEIGKALTGSWRVEYLFIVKQALELYDFYTKQVEACDAEIERMYGLTRPDGSKEAVQPLPPKKRNSHSKNAPQNKEQIRGHLKRISGVDLSVVDGFGVSLAQTVIMEVGTDMTKFPSEKHFCSWLGLAPKHEISGAKVLKNRTMKTKNRAGQAFRMAAQSVKRADCVFGSLYRRLKSRLDKAQATVATAHAIARVVYRMLKYKVEYEQVSVEEYEQKYKEQQLKYMKKKAAKLGFQLIPA

SEQ ID NO: 202183 - protein, 419 aa, unidentified
MAEEIVEEAELVARVAALDIGKASLVACVRVPGEGRTGRRQEVRTFGTVTRSLLELRDWLIDLGVSLCVMEATSAYWKPPFYLLEDVIECWVVNARDVKNVPGRPKTDRLDAVWLARLAERGMLRPSFVPPPWQRQLRDLCRYRRTLVQERSREKQRAEKLLEDAQIKLSSVISDIFGVSGRDMLEALISGQRDPQVLAGLARGKMRGKNSVLQEALTGHFGDHHGYLLRIMCDRVDALTAQIEALTGRIDEVIAPFAHQVSQLDEITGVGKTGAQELIAEIGVDMTRFPDAAHLVSWAKYAPTARQSAGRSKPGTTGKGNPWLAGTLGEAVIGAARTKTFLGARYHRLARRRGKPRALVAVGNSILVIAWHLLSDPDAHFTDLGPDWHDRLAPIRRKRQLIAELERLSGQKVTLHQAA

SEQ ID NO: 202184 - protein, 431 aa, unidentified
MKQERKPYLSVGIDIGADFSLMAIALPTQEIVGKSYKILHSSTRSVQGAVDRILALCQTHNLSARVYMESTSIYHLPLYYRLKEAGLEVFVLNPIVTHANQNTNIRNIHNDKLDARRIALLGLRPDLKTSLIPEDEIAAVKALLREYHVMKKEISTYICRLKNQLRQIFPQYLPLFSKVNGKASLEVLSHCPSPNAVLSAGADELIKLIREASGKGEAMARKKAENLLTAAEEALSFGHGNSGITFLIGHYVEMIRILAEKTVAILKQIKSYLQERPDSLLARQTKLLESIPGAGFLTAVTIVCEIGDFSAFRRPKQLYSYFGLDPVVRQSGNSTGTNPRISKRGSPYARRCFYILALQSISLRKNGEPKNPVLRAYYQEKCKCKAKMTALGAVMHKLCNIVFAVLRDEQPFILISSQEHRQNYLSMRKAA

SEQ ID NO: 202185 - protein, 317 aa, unidentified
MSALPVFVGIDVAKTEMVTGLRPSGEVWTVSNDETGIHELLQRLRPHGPVLVVIEATGGYERGVVAALAAAGMPLVVANPRQVRDFARATGQLAKTDRIDAQVLALFAERVRPEPRPLPDEATRTLTALLARRRQILEMLTAERNRLEHAVPAVRRDLIQHIRWLERRLRDVDHDLDRTVQSSPIWRAKENLLRSLPGVGPVTSRTLIGSLPELGFLNRKQIAALVGVAPLARDSGTLKGKRLVWGGRAPVRAALYMAALVASRRNPALRAFYARLVAAGKPKKLALTACMRKLLTILNAMVKTNSAWQRIDHPKTA

SEQ ID NO: 202186 - protein, 393 aa, unidentified
MVYVGIDVAKDKHDCFIVNSDGEVLYDVFTIQNNMDGFEDLFFKIKTSSMDLSKVKVGLEATGHYSCNILGFLHNKGLSTIVINPLYTSLSRKSVSLRKTKTDKVDARTIASMIMSDVSLKPYSDTLYHNEDLKSLSRYRFDKVSGRAKLKQSVSRLVNILFPELEKLVSTLHTKAVYELLSEFPGAHQVASANLKHLTALLISASKGHFGRDKANEIREAARRSVSSYLPAKSLELRHTIKLIRELNDEIAEIETEIKKIMDSIDSPTLSVPGISYALGAVIVSEVGDFSRFDNPDKLLAFAGCSPSTYQSGQIYSTHAKMEKRGSRYLRWALLNAAKYVCKWEPTFAIYLRKKRAEGKHYNVAVSHAAKKLVRLLYHLETTGEKYIPQTLS

SEQ ID NO: 202187 - protein, 353 aa, unidentified
MKRDQYMGMDVHQATTVVTVLDAEGKLTLETTVATEAKAIVRLLQSMSGPLHVTFEEGTQSAWLYDVVRHFVAEVIVCDPRRNKLLSEGSKADKSDSRKLAELLRVRMLRSVYHGHEATRKLQQLVRGYETLSGDMQRAMVRIKAIYRGCGIANKGRAVYQVQQREQWLKKLTEPGRRQRAEWLYAQLDHLRPLRKQAKQAMIVESRKHRAAELLKTIPQLGAVRVAVLVATIDTPHRFRTRQQLWSYSGLAVVTHMSSEYEIKDGRAVRRRKPIQTRGLNRNCNHRMKEVFMGAATGGSQSEPYRSYLESLEKRGIRREMARLTLARKIAAVTLAIWKKGETFDPKKLNWTT

SEQ ID NO: 202188 - protein, 566 aa, unidentified
MVKYLKSNITAKRGVNFVREVVESSGCLFHKIEQENDLGIDGIIEFIQDEKPAHKSVAVQIKSGPSYFQSKKEICIIPIENHREYWSNYALPVCGIVYVPELGLGFWTNIKSHLENDKKSKSIKFVAGRSNQLDLANFNRLFLPNVLNQTPNLSLNEAISFFDSNIDNEFVLGSLILFRKYINEKITWDKYISHINESDAKDINKGIIYRLSHIPWHSDIWYSGEPILAETNKYVLDKINQFKKSDVIKFLSLIEEGIGFQRGTIGQSIEAILSKVNRIENILAEIIREKNTDLIIRHSAAVIYAYYLQEKSIQLSVENPLAVKRFIQMKLSKVKTDKSDSKLICEYAKQVELKLWQGNTKDELECFQLTRTLSVYTKQSTMLKNKLHGEKVLAEPSKAVVRSLKRSLKFVKKEIKILEDKLLVLIKVSHQDLLTRLKTIPSIGPKTSIMLIVLTGGFVRFKSASELCSYAGLTPVIRQSGSSVKARPRISKIGNQKLRNLLYMCSLNACKCNKACRELYQRIVAKGKSKKLALIAVCNKLLKQAFAIAKSGLIYDESYRSTLVKN

SEQ ID NO: 202189 - protein, 396 aa, unidentified
MQALLPCCCGVDVHRDVVQACILKGLSDNPEVVRAEFKALPADLEQFVNWLIEHECNHIAMESTGVYWRPVYEAIEEQHTDYQCLMVVNAHHMRNLPGRKSDIKDAEWIATLLRHGLLEASFVPDKVIRNLREYSRLYRSFVSEKSRYLNRLEKFLQTHGFKLSTVLSNIYGLSGRNLLYKLSQTGQLTPGDIIQAVNNRVKASTEDIHEAIKGRLGLHERRLLHTLLKKIDQVQTEIEDILLTMQEVAAPYQTAIEQLDSIPGIDTLSALTVIAEISATPQEHFSSSAKLCCWAGLSPRNDESAGKVKSKKILHGNPYVKSILCQVAWAAVRVRKSSFALWFWSRQGKLGRKKAIIAVARKILTLIYKLLESGEFYDSNIALQACSSPPRHNSLS

SEQ ID NO: 202190 - protein, 404 aa, unidentified
MKSNTQNAKIEAITEKTLVLGIDVGSETHYARAFDYRGVEYSKKPFKFSNTEAGFVTFKAWVLDIKEKHGKDKVIPGMEPTGHYWFNLGKFLQDNEMKPVLVNPHHVKKSKELDDNHPTKNDRKDPKVIAGLVREGRYMIPYLPDGVYADLRTASNIRFQLQAELTRIQNRINRWFNIYFPEYKTVYGKPDAKSGILILKEAPLPEDILTLSIDGVNQIWRDAKLRAVGKARAKTLIEAAEHSVGSKEGAVSARMEIRMLLEDYESRNIRLQEVMGLIEGLVNQIPMAEKLLEIKGVGIKTVSGFLAEVGDIRRFNDPKELQKLAGLALVENSSGKHKGKTTISRRGRKRLRYLLFEVAMSLVAKNPEFRELHNYYTTRRLNPLKKMQSLMAIAAKLLRVFMPY

SEQ ID NO: 202191 - protein, 371 aa, unidentified
MAKLTRTMQYVNNTELSSREETRCQFNGGKAVIKLGIDVHQDFYVVVEQVGGSNPKPPQRFQKDAFLRWAAKVKEKSGAEVHAVYEACGFGFGLQRKLSALGIECYVVCPQKLDERNRRVKTDGLDAKALCLKLDRFVQGNRDALAIVRVPTEEEERSRAIHRQREQLVKARKQLEAQGRSLLVHHGLEPVQNWWKPRTFAALPVPQWMKELLQNSQPVLLGLQEKIAALTAQLQSAAAPDQPRGLGKMTSVVIDREVGDWNRFNNRRQIASYTGLCPGEYSSGNTRLQSCVTKHGNPRLRAALVELAWRLVRFQPNYKPVLKWRAILAKGALATGAARKKAIVAVARQLAVDLWRIKTGRLRPEELGLSN

SEQ ID NO: 202192 - protein, 302 aa, unidentified
MGEVSTIGLDIAKSVFQIHGVDVEGAVVIRKRVNRAKVFEFFAALPSCLVGIEACPTAHHWSRRLQALGHTVRLMPPSYVKGYLKRSKNDANDAAAICEAVTRPSMRFVPTKSEQQQSILMLHRSRQLLVRQRTMLSNAIRGHMAELGIISAKGRNGTTELLDILANERDGRIPTAARFSLDVLARQYAVLMTEISVIEKRIHAWHRSCEESRRLQEIPGVGPIVATALIAEVGDWKAFSSGRGLAAWIGLCRGNIRLAARSDLAESQSRAIDICDGCSSPALWLSFAMRAGTAQRGCGWFA

SEQ ID NO: 202193 - protein, 414 aa, unidentified
MLKIVYPICCGMDVHKSFVVACIASTNDQGVTTYKSKRFSTFTGDLRRCAAWLAENNCKDVCMESTGKYWIPIYNILEPTYKIVLAHPKYVKAIRGKKTDKRDAKWIADIFKHDLVSGSFIPPADIRQLRDLVRYRWKLTNFTTGEKNRAQNCLTVSNFKLDDVFSNVFGKTASAITARILENPTEKITDVSSFCTKRLKATDEEILAAVDGEMCEEQAEKLRIIRSHMDNLELCKLNLDSLILSTVEKYLPQLDLVMTAPGIQSFAAIGIISEIGVDMSVFPTSKHLCSWAGLTPQNNESAGKKKTTRISRTGAYIKPLLVQCALSAVKAKQFPEVRNRYLALKKRRGHKKAIIAIARMLLTAIYNILKKNEPYNSELYRSADRPPRNREVSVEEAVYILQRQGYLVTAPSTT

SEQ ID NO: 202194 - protein, 462 aa, unidentified
MPAKMTTIPAKITTSHAIPELNSNAAGADIAATEIFVAVPCDRDPHPVRAFGTFTEDLQALADWLEQCGVKTIAMESTGVYWIPLYQILEERGLEVCLVNARHAKNVPGRKSDVLDCQWLQYLHACGLLQRSFRPVQEVCALRSVQRHRETLVTYAASHVQHMQKALDQMNLQLHHVITDITGKTGLAILDAILAGERDPHTLAKLRDHRIKANEETIAKALVGDWRPEHLFTLRQALAAYRQYQQFISECNQEIEQMLRDIEGRIDLEEKPLPTGTATQAKLHSNTICLKDGDLRTELYRILGVDLTAVPGLASGTIHRLFAEIGRDLSAFPTAKHFASWLGLCPANKVSGGKVLSVKTRDVRHRAADALRLCAQSLHHSKSALGEFYRRMRARLGAPKAITAAAHKLARIVYHLLRTQQPYEESAFTRSEAHYQQRRLNRLHREAAALGYTLAQQEIIVK

SEQ ID NO: 202195 - protein, 356 aa, unidentified
MTSSTKYIGMDVHKESISIAVRNAAGKIVMESLIETKANMILQFIDGLRGDLHVTFEEGTSAAWLYDLLKPHVTKVVVCDPRKNKSMREGNQSDKIDARRLAELLRLNHLTSVYHGEHGLRTLKELVRTYLTVTKDVARVMARVKAIYRSWAIPCSGKQVYARCHRAEWLGKITEPGVRRRAEFYYLQLDALRVLRRDARRELLAESKKHKAWKRLCQIPAIGPIRAAVLLGILQTPHRFRTKRQLWNYGGLAIEMHSSADYRNVDGELQRSRKNVLVRGLNRNCNHDLKNLFKGAAAVASSKPGPFEKFYAALVAKGMKPEMARLTLARKIATIVLLVWKKGVCFDAQHLKPQTA

SEQ ID NO: 202196 - protein, 343 aa, unidentified
MDHYVGIDVSLDDSSVCVVDATGRIVREAKVASEPEALIGFLGGLDLRLARIGLEAGPLSQWLQAALVKAGFEAVLLETRHVKAALSAMIVKTDRKDARGIAQLLRMGWFRPVHCKSAPAQEVRALLVARKQLQAKMRDVELSLRGLLRGFGLKVGEISKGQFAARVRTLVAGHTMLERIAEAMLQAREALRVEFGKLHRAMLAIVRGDEVCRRLMTVPGVGALVAVTFTSGVDAPERFARSKGVGAHFGLTPRKYQSGETDVTGAVSRVGDAMVRTALYEAAHILLTRAVRFSALKRWALEVAKRRGMKRAKVALARKLAVVLHRMWVDGTTFRWGREAAAA

SEQ ID NO: 202197 - protein, 344 aa, unidentified
MNSIKVVGIDLAKSVFQVCVWMSDGTVASNRKIPRNKLLDTLRQFPANTLIAMEACATSHYWGRTFKSIGLLVRLIPTQHVKAFTRHQKNDANDALAICEAALRPGIHFVTIKTVGQQDIKALRSARQLMVEQRTAVANQARALAAEQGIELPVGIHILSQRLPELIEDPALDISPVLRGLLFSLLENLHLLDERIRSTEHNILALCQQLPKYKVLMTIPGVGPLIAAAFLSEVNAEQFTNGRQLSSWCGLVPRQRSSGGKNNLSSMTKNGNRDLRTLIIHGARSVMFWSQKRDDALGSWMKHLIERRGKMKATVALANKLTRIIWRLLTGSENFNINKAFATN

SEQ ID NO: 202198 - protein, 471 aa, unidentified
MSTIPTSSKQRRGVRIVSKTKVPLPPQLKRVNLNAAGIDIGAEEHWVAVPPGRDTEGRDVRRFGAFTGELCALADWLKQCGIQTVAMESTGVYWIPLYELLVERGFEVLLVDARQARNVPGRKTDVLDCQWLQELQTYGLLRGAFRPVDQVCILRSYLRQRSMLVSYGSHHIQHMQKALEQMNLKLSHVVSDITGLTGMGIIKAILSGERDPVKLAKLRDPRCKSSEAIVARSLEGHYREEHLFTLQQAVELVEFYQQQMTACDRQIEACLRQFEEKRSETPVTTRRRKRRRGGIAFDARSYLYRMTGVDLTQINSIEANTALTVIGEIGLDMSRWPTEKHFGSWLGLAPGSKVSGGKRLSGRTKPSANRAAAALRLAAQSLNQSQSALGAYFRRLKARLGAPKALTAAAYKLARIVYRMLKYGAGYVDQGEAAYEERYRDRLLRNLKRRAAELGLQLTAIELNSGQAALT

SEQ ID NO: 202199 - protein, 465 aa, unidentified
MKHHRRRPSPKPRTSPHALERLHPHAAGIDCGSAEYFVAVPPDRDPTAVRSFPTFTADLYRLADWLTACHVTQVAMEATGVYWIPIFEILDARGFQVILVNARHVKNLPGRKSDVSDCEWLRDLHILGLLRGSFRPADGIVALRGYLRHRATLIESAGSLVQRMQKALVQMNLQLPLVVSDITGVTGLRILRDIVAGHRDPQQLAAHRDYRCRASEAEIVAALTGHYRAEHVFVLQQNLELFDGYQRQLAACDVAIEAHLAQLAATSAPPAAPLPAPRRRQKPRENEPRFDLRTPLHQLTGVDLSQIDGIGPYNALRLLSEIGTDMTRWPTDKHFTSWLTLAPNNKISGGRLLSSRTPPSANRAAAILRLAAMNLGRTQTALGAFYRRLAFRVGKAKAITATARKLATLIYRTLKDGLVYADPGADTYDAQHRTHVLRRLRQRAANLGFDLVNRATGELVEGTVS

SEQ ID NO: 202200 - protein, 409 aa, unidentified
MDILYERCCGLDVHKKTVVACVLVPGSGRQPTKEIRTFGTMTADLLELGDWLAEKGVTHVALESTGVYWHPVWNLLEGNVELLLVNAQHIKQVPGRKTDVRDCEWIANLLRHGLLRASFVPERPQRELRELTRYRTSLIRERAAEINRIQKTLEGANIKLGDVASDILGVSARRMLEALIGGTTDPAELADLAKDKLRKKLPQLERALKGQFRAHHRFLLAQQLAHLDGLDELIDSLGSEIAERVRPVEQVVERVDGIPGFGRRTAEIVVAEIGTDLSRFPSYKHLASWVGLCPGNNASAGKRMSGKTRKGDVWLRSALIEAAHAASRSKDTYLAAYYHRVAARRGKKKAIVALAHTLLTIIYYLLTRDCDYEDLGPEYLNEHDREQTERRLIRRLQGFGYTVTRETAA

SEQ ID NO: 202201 - protein, 532 aa, unidentified
MEKRANLEEVGRKKLVVGIDVALKNHWAVMGDNKGQEMIKPFRFSNNAEGINLLEGMIKQTGKAENKGEAIIGMEPTGIYWKPIGHYLMDAGYRVVLINPSHTHKTKELEDNSQTKNDRKDSRVIQTLTREGKYLEPIILRGIYGELRRLGQSHKSVLKRENGISNKIKMIVDEYFPELREIIKDTNGKTAIGLLKERPFPEDIIRLGEKRFYKKLKKWSNSRFGEKKSLKVWEAAKKSIGVKEGQESARIELRQLVEEMALVDEHREELAKKIEEKAKETEEGKRLIKLPGLGYLNIGKLLGETGSIKSYKGVGSLEKLAGLNLIESSSGEKKSGKKISKRGRKLMRTTLYQIALASIRNNKAIKCEYKYRVEVKKQQKIKALTATACKMLRIIYVLVSKNREYDERKASKYYYESEIKREENICEWVTPKLSPSGPGYNSGDTAIKNIGHPLPMTLNEVMSGVRLRRDDTGRNDRVRRRKSGGINPLTNEKEVGRKDVTTPCEVSREENREFRTGIVWFAKDRYKTIKTS

SEQ ID NO: 202202 - protein, 430 aa, unidentified
MGLIVPTTIRPERADQPLPYEWFVGIDWGSQQHQVCVLDRDRRRVGERAVDHDGASLARLADWLWGMAVGQPQRVAVAIEVPRGAIVEGLLERGFHLFALNPKQLDRFRDRHSVAGAKDDRRDAFVLADSLRTDQPSFRRLQLDAPQLLLLRELSRAEETLLEEFRRSANRLRDQLHRFYPQMLQLCSAADAPWLWDLLDLAPTPAHAALLSAEQVQRVLKAHRLRRITAPEALACLQAPALPVAPGVTEAAQAHCGFLLPCLRVLAEQLRACGQQVDALLRTMADEPGAGERPSDVAIVLSLPGVGRKITAWLLAEAAQPLAARDYQVLRTHSGVAPVTKQSGKRRLVVMRRGCNPRLRHALYHMARVAMQRDTHFSSVYTALRAKGQRHGQALRAISDRLLRILVAMLRNGTCYDASRIRRESAVQMG

SEQ ID NO: 202203 - protein, 320 aa, unidentified
MRNAVGLDISKLTFDAFAMVGNAEYSAKFDNNSKGLNRFSDWLKSLGCQNLHICMEATGNYYEDVADYFAKYYSVYVVNPLKISKYAESRFKRTKTDKQDAKLIAEYCQSMKESELVKRQKPTDEQYRLSRLTAAYAQLKSECAAMKNRYQVAKDEEVAKAYAEIIKSMNEQLEVLKAKIKEQTEKPDCKEGVKRLETIPAIGRITAAVLFQYLTSSKFETSNKFAAFAGLSPQQKESGTSVRGKGKLTKFGNRKLRTALFMPAMVAYRIRAFPDFIKRLEAKKKPKKVIIAALMRKLAVIAYHVHKKGENYDPSRYKLA

SEQ ID NO: 202204 - protein, 391 aa, unidentified
MAQYFVGIDISKYKHDCCIIDAVDQQVVSKFTFTNDKEGFSELLTSLQSLSIPEDIRIGFESTAHYALNLELFLEKAHHSFMEVNPVLISEYKKSTSLRRTKTDRVDCESIARWLMTVEYKPHSKGFYHAYSLKSLTRLRDRLIRQRSFYLVKITNVLDHTFPEFKPFFNEHFSKTALYLLENYGSAEKMARMNSASYEKLRSLSRGKFSPKQFLELKSLAANTVGINNSIFDVELNSLLALYKAVAEQVTILETQITELIEEVHPHYMSIPGIGPISAAVIYAEYGDISNFSSPSQMLAFAGLEPGINDSGTESRKGRMVKRGSSQLRYVLMNCALPLIRFDMTFAAYYAKKRSEGKTHRVALSHVTKKLVRVIFALERQNTDFAPQALR

SEQ ID NO: 202205 - protein, 349 aa, unidentified
MSSKLDSEIAVIGIDIGKNSFHIVGLDRRGAIVLRQKWSRGQVETRLANLSPCLIGMEACVGAHYLSRKLTSLGHDARLMPAKYVRPYSRGQKNDFRDGEAIAEAVQRPTMKFVATKTAEQLDLQALHRVRERLVSQRTGIINQIRAFLLERGVAVRQGLRFLRIELPRILATPSEVLSPRMVRVIEDLAGDWRRLDERIEGLSSEIETLARRDAGCERLMSVPGIGPIISSAMVAAIGSGDAFTKGRDFAAWLGLVPKQISTGDRTILGKISKRGNRYLRVLFVQAAWVVLIKPKSWDRHGLKPWLEAAKKRLHHNVLAIALANKLARIAWSVLAHGRTFEASKIQAA

SEQ ID NO: 202206 - protein, 347 aa, unidentified
MIIIGCDLHTRSEQIAMLNTETGELEERRLEHEDGEARRFYAGLKEPALVGIESTGYTRWFTEMLAELGHELVVGEAGKIRAKETRKQKHDRRDAEHILNLLLRGDFPKIWLPSAEERDVRVLLEHRHQLVELRTRAQNGLQAIALSYGLRRRRGLWSERGQEELKKLPLREGMERRRADLLRLVRQLDTWVQELDRRIEQEAAQREEAQRLMTHPGVGPQTALATVLVLGPVERFPDDRHLTSYLGLIPQEDSSAGRQRFGHLTKQGNRLLRWLLVEAAQTASRYDPRLARAYRRLTFRKGRAIAKVAIARKLAIRLYIMLRDKIDYAEFCRRGSHAGMLEDVALV

SEQ ID NO: 202207 - protein, 482 aa, unidentified
MKKSNIYQDRSQELSKLFEQAGSNSNIMCIPIDYAKKDHVVMFCNGYGDILRKPFNVKNTPEGVKYLIDQTTRSCQHRHIKKEHVFFGGEDVNSYAQNFVHALRTKGWLVASVNAHDAKIQRQSIQASTDQLDLLGIATMLLNRRANCNPVQSGVYRNLRTIVRHRRKLVKMKTEVRNRIHTVVDQLFPGFLSEKKSRITPFSPSSLYLMEDRFSAHQIRRRKRSTLVKRLKQHGTKSPEETAAKLQTYAGQVLAPADEYTSTLQVSLSSHVNLLRCLIDSAQMLEREMAIRLAQTTGAFLTSVKGIGIVLASGVTAEIGDPVSQKSANNLVSYAGVVPRVKQSGGAEGQPRIGHVSKRSNHILKDQVVQSAHHIGRYGPKDLLADHKRREANGQHADFGMGRRFVRMALCLVRTEQIYLPPHLRKADTDPRERGEYYLSLWPYLHNKWDKLGASKVAFSKDRPLGQWRHIVQELYGIRLKL

SEQ ID NO: 202208 - protein, 360 aa, unidentified
MSEIIRIGIDTSKSVFVLHGVDGTERPALRKKLRRRDLVDFLAKLKPTRIGIEACGAAHYWGRTFQALGHEAVLLPTQLVKPYIARNKNDGADAEGICEAMSRPRMRFVPIKTAEQQAAQMLIGLRDRLVRQRTQVSNAIRGYAAEFGLVAAKGLDKIEPLLARIADAPDLPDLAKELFALHSQEYVQLKVRLRQIEAKLMAWHRHNELSRRLAEIPAIGPIGACALAIKVTDPGAFRCGRDFAAWLGLTPKDHSTAGKQRLGAITRAGDEMLRSVLVVGATAVIQQARRGRGKATPWLIDLIKRKPPKLAAVALANKTARIAWKLMVSGERYDPHHQGRGRSNPPSPPAVSTAPGSHGA

SEQ ID NO: 202209 - protein, 421 aa, unidentified
MPNIEIGVDFMVKENFIYVGIDLHKETHTAVMIDCYNQKLGEITFPNRPADFPKLVTKVKKCNTDAKEVVYGLENAYGYGRPLAVWLIDKGYFVKDVNTAISHRQAKHRGAMYRKSDSDDAEAIALATLNMLDKLPDACPNDAYWSLGQLVHRRDNIMKQRTRLVNQLHEQLCIAYPSYKSFFNDISRPTALYFWEHYPSRKYLRGKSVEDLRKELVPVSHNKCSTRTCEKILDAIAGDKVKNNAYQDARDMVTLSIVSDLQHYDKQLAEVDKMLEQMYKMLGCTLTTIPGVNVITAVKILAEIGDIKRFSNANKLAQFAGIAPLHLSSSGKGKDVATKQGNRRLQATIYFLAIQMVQVSSKGTPRNPVVRAYYEKRKAEGKTSQQALICISRRLISIIYGMLKNGTEYRMPVVENAGENR

SEQ ID NO: 202210 - protein, 365 aa, unidentified
MVVVGADVHKRTHTFVVVDAVGRKLGQKTVKADGKGHDQAIRWVQVEFGEQITADVAAGGEGLRWGIEDCRHLSARLEIDLLDAGQSVVRVPAKLMAEQRRTARTRGKSDPIDALAVARVVLREPDLPVAAHDEASRELKMLVDRREDLVKERTAMMNRFRWHLHRIDPTVDPKPKSLKQAKTRRQLAEFLAEVPADQDGIDARMAREVLADIDRVTPVINDLEREVTALVAAQAPALLELPGCAGLTAAKIVGETAGIDRFAHEAKYAMHAGVAPIPVWSGRTEGRVRMCKAGNRQLNAALHRIAITQVQREGAGRTYYEKRLAVGDSKTEALRCLKRRLARVVYQTLKTTTSTPAADLLPTAA

SEQ ID NO: 202211 - protein, 344 aa, unidentified
MQITTIGLDLAKNVFQVHGVDVTGQVVVRKSLRRSQMLPFFAKLPSCLVGIEACGTSHYWARELIKLGHEVRLMPPAYVKPYVKRGKTDAADAEAVCEAVTRPTMRFVPVKSPEQQAALSMHRTRDLLVKQRTQLINMIRGLLAEFGVDIPKGLERALLMARQIVDGKAPEVPIEAAKIVATLSQQALDTHIRLREIDRDLAVWLRGNDVARRLMTIPGIGPIGATALAASVTDPHQFRSGRQFAAWLGLTPLQKSSGGKERLGRISKMGDKYLRKLLIVGMTALVRRAKYNPGKIDPRLADLLARKPTRVATVAMANKTARVIWAIMARGETYRAAHQPALAA

SEQ ID NO: 202212 - protein, 400 aa, unidentified
MRAVFGIDVSKASSEVAILVNGEKVHGYTMSNDAIGFARLLGDLRTVHKPEIIFEATGVYSRRLQTFLEDNGYAYTRLNPLEAKKQLDSLRVRKTDQIDAEKLAQSQFVLNRKPTYVQEEVYQNLRTLNRFYQNLTEDIVRAKNRLHKVLQVTFPELETILSTPSGQQYWNLVIDFPCKDFVLELSKDELSESIRQSTSKRISDKRVAYLVEKLTALANQSYCAVKKTSPIMEEVRYYAKELLRLSGQRQAVLDEMVELAQPLPEYDILLSIPGIAETTATSIIGELGDIRRFQSANQINAFIGIDLRHYESGNFLAKEHITKRGNPYARKILFKCIHNIASASHTNPCHIADFYEKRKRQSQTTSTKPHTIASIHRLIRTMYYLITHNKLYDYRSTQNQ

SEQ ID NO: 202213 - protein, 311 aa, unidentified
MTDHNIGVDISKSHLDAFRLEDGAAQRFDNSAMGFRALTKWLGKAPVARIVFEPTGPYHKAFEAKLGETFPLVKVNPLQARRFAEAHGTRAKTDAVDARIFARMGVAFDLVPQVPCSKEILVLRDLHVARTGLIKDRTRLRNRAQTQDIAVLKLQTKARLAQVERHVVELDAEIAALIAAGQTTARNCDILCSMPGIGTVTAAAMLTLMPEIGTLERKQVASLAGLAPITRQSGQWQGKAFIGGGRKPLRDALYMPAVVAMRCNPDLKAKYEQLRAAGKPAKVAIVAVMRKLIEMANALVKADRTWTPKTA

SEQ ID NO: 202214 - protein, 317 aa, unidentified
MISTAKTATMFVGVDVSKATLDVYRPDTKEFLKIENTDEAISQLCSQLEKKKRQVMVVMEGTGGYEYLLVKHLASHKLAAAVFNPRRVRDFAKGIGLDAKTDPIDAKVISRYAEVVVPKPMATKSDHELKHSALVARRSQLLELINQENNRLKQSWDDDAKQSIRDVLEVLKKQLKNVDSLLSKMLAKDTANARTIEILQSVKGVGTVTISTLIAELSELGKLNRGEVAKLVGVAPINRDSGTKSGKRFIGGGRGQVRRVLYMATIVAIRHNATIRAFYIHLKSKGKESKVAIVACMRKLVTIINLLVKSNQTWQAK

SEQ ID NO: 202215 - protein, 512 aa, unidentified
MHKRAEQPAPARGRELVNNCAAGENFVGGRPASARSQSQSPHPKRVIGRPLAEPEALAPTSNRKRPQEGRNISRMEGKAKRRKNLKQDKSSMSDPEQWWQQHRVFGAVDWASEKHSVIVVNQAGKIIEQFEIEHSALGWKKFREKLQAYGSIPFAIETSRGAAVEQLLEAGMIVYPLNPKSAQAYRERKAPSGAKDDWLDAWSFADALRVDGHGWKALRPEQALIKELRLLCRDEVSLIQQRTAFIEQLRHALAEYYPAALEAFEDWTSVSAWMFLERFPTPHELAKAGKRKWQNFLHSRRLWGSNEGTRRMEIFARAIEFAGSLPTVKAKSLLALSLVQMLFAIEKQLAIYRQRIEELFARHPDHELFGSLPGAGPKIAPRLLSEIGDDRQRFDDVQALQCLAGTAPVTKRSGKKRKYCHVHQRWACNKHLRHVLHLLADKSLSRCVWAETYYQFHRQKNQSPASALRRLANRWLKIIYKMWLDRTPYNAEFHHRNQVKHGSWIFQLQPDQ

SEQ ID NO: 202216 - protein, 379 aa, unidentified
MKENHRRCCGIDVHKSSVTVCVLPPVGQTHLEVKKRKFRTFTRDLRQLRAWLKNCQVTEIAMESTGQYWRPLWNLLEGQFTKVILVNPQHIKGLNGYKTDPKDAQWIADLLESGKLKGSWVPPRPIRELRDLTRQRVHILEDLNRAKNRIEQLCQTGNIKVSSVASDLFGVSGRKMLKAIVEGKRDPGWMADYAKGRLRDKRRELELALEGTFTDEQRWLLEKELRQVEWLEGQVQTLEEEIERRVEIFEEPIQRLLTIPGIDRKTAWTIAAEVGADMNAFTDARHLASWAGLCPGNRESGGKRFSGRTRKANRYVKRAMCQAAWAASHTKNTYLSAFYRRMSVRKGAPKAVMALAHHMLVVIYQVLSRNEEYVEFGGD

SEQ ID NO: 202217 - protein, 351 aa, unidentified
MWIIGVDYHPSVQQIAFVNTDTGECGERRLSHGDREAEKFYRGLKAEGCKVRVGMEATGYARWFERLLAELGFELWIGDPAKIKAKRVRKQKTDRLDAELLLQLLLEDRFPRVWVPSPENRDLRQLLWHRHRLVQMRTRITNQLQAVAMNEGVRRKKALWSKPGRAQLESLPLAPWAARRRQDLLELLDRLNPTIEELSAVVEQQVKHRPEVLRLMTHPGVGPITALAFVLIIDSAERFACGKQIASYVGLIPCEDSSSDRRRLGHITKQGNSLLRFLLVEAAQAAVRRDPDWRRRYTHLAMRRDKRIAKVAMARKLAVRLYWMMRKEWNYEQLKKFGSYAGESDYGHGVQ

SEQ ID NO: 202218 - protein, 388 aa, unidentified
MYMIYVGIDISKYKHDCFICKDTGEVIVENLSFTNNKKGFQQFLDLLKPYDNSNVHIGLEATGHYGLNLKLFLEKNNYSFMEFNPLLVKEFYKSLSLRKTKTDKVDAVVITQKLMSVPYKSNSKLFYHKYSIKSLTRLIENLVKQRSKYKVQLTNILDIIFPEFKPFFSNSFSVTSLYILNKYKTPEKIANMRDFDTLNKLSRGSFTYAKFVKLKDLAKNTIGESNAIFEIELSSILNLYKNIDDHINELDKQISTIIKDLNPPTLSIPGIGVISCASIISEFGDISKFSNPSKMLSFAGLEPGIIESGTMSSKGKMVKRGSGYLRYSIMNVAMTVIKFNPTFYDYYYKKISEGKCHRVALSHVCKKLIRVIYILETKNIQFDPSLLK

SEQ ID NO: 202219 - protein, 393 aa, unidentified
MIYVGIDVASDKHDCAIVDSETGEVCEIFVFPNNRVGYDTLLSKLALYSKKKDFSDIEIGLESTGHYSNNIVNFLHEKRLSVKVFNPLTVQRLQKAQTLRRTKTDKSDAKFLACMLIGDDSKSYEKSLPQIEELKTLTRHRFRLVKEKTKHKLHISRLVTIVFPELTSVFCTTSLATVRELLLQFPSATAIATVDIRKLTNLLWATSKHRFGRDKAEEIRNLARTSVGTSNRGADFELKHHLQSMQFLEQQIKEVDAQIKAIMVELNSPILSIPGTSFTLGAMIISEIGDIKNFRNPAKLLAYAGLDPSCYQSGKFTADRTPMVKHGSSYLRYAIMQAASCVKRYAPEFRVYHDKKIAQNKHYYVALSHVAKKLVRVIFSLLKYQKQYASQVA

SEQ ID NO: 202220 - protein, 430 aa, unidentified
MAELIPLVALLGIDWADQSHEISLQPGAPPAEDAGVERHQLPHTPEAIRAWMGELRARFPVGAVGVAIESSRGPLIHALLDYDWVVLYPVNPRSLARFRETFTPSGAKDDAPDADLLRELLAKHRDRLRPWMPDTEATRALRRLVESRRHAVDLRTKFTQQLTAALKEYYPQALEWAGTDLGSEMACEFLLAWPTLEAVQQVRPQRLRSFYTRHHCRRPDRIEARLAAIREATPLTVDRAVIESGVLVVQMLARQLETLGVSIRRFDDEIAARFGAHEDAPLFSALPGSGAALAPRLLAAFGSDRTRFPHASEVQAFSAIAPVRERSGKSWVVRWRWSGPTFVRQTFHEFAQQSIRYSAWARAYYALQRARGKDHHAAIRALAFKWIRIIWRCWQARTPYDEARYLRALADRRSPLTAHLPSPSTDSLAA

SEQ ID NO: 202221 - protein, 363 aa, unidentified
MRKGTKAVAIEAGWTMGVDLGDRISRTCVLDADGVVVSEGRVATTPSEIERYFARLPRLRVAMEAGTHSPWVSRLVAKCGHEAIVGNPRRMRSISASLQKSDRVDAEQIARLARSDLKFLSPITHRSQEAQIDLARIHARDALVRTRTLLIQHVRCTLKSCGVLVSKFSSDAFPKRMAPQIPPDLQPALTPALEIVAELNTRIRQFDHDLEQLADERYPVTHAMREIAGVGALTATAFVLGVADASRFKKSREVGAYFGLTPRRKQSGASDPQMRITKAGNSLVRRLLVGAGHYILGPFGPDCDLRRVGVKIAARGGKSAKKRAVIAVARKLAVLLHRLWVSAKPYEPLRARAHAPSPLTASA

SEQ ID NO: 202222 - protein, 416 aa, unidentified
MGRVVIGMDPHKRSATIEVLDEREKVLSTGRFGTDREGYRNILAAGRRWPQRVWAVEGCQGVGRPLAQRLVADNEPVVDVPAKLSARARVFSTGQGRKTDATDAHSIAVVALRTAGLRVVKVDDVTVALRLLVDRRDELGGARTLTVNRLHRLLGDLIPGGAKRFLSATQAKVLLGAVRPRDVVGKTRRKLAAELIVELDGIDKKIKVATKELRELIAATGSTLLEVNGIGPSGAARLLGDIGDVSRFPTRGHFASWNGTAPIDASSGDQNRHRLSRAGNRRINRVLHIMAIVQLRNDTEGRAYYRRKLAAGKTPMEAIRALKRRLSDIVYHQLVSDQKRLRQKVKVTDPGGQTGAATDSSAADSNPNVDASEKSLPGPANSEATPETTAGPEPSSSRSRRPVTAPTRSRRQAQSA

SEQ ID NO: 202223 - protein, 388 aa, unidentified
MDVLYQSCAGIDVHQATVVVCILHGPLTSTRPKREMAQFDTTTKGLKACHDFLSQFHVEAVGMESTGVYWRPVWHELCDDFELILAQPAHMKAIPGQKTDKKDAHWIAQLTRIGLLPRSFVPDETIQELRELTRQRKHYVESRNRETNRIHKILQSGGIKLTTYIEDIMGASGRNLLQLLIDETPITPRIVHQSVYTSLKRKVPQLLEALDGYFSAHHRFMLAQSLEIYDFYQKQIDCLEERMNGYLNLYERPVEILDSIPGIDLTTASVIIAEIGVDMNQFPTAGHLASWAGLCPGNNESAGKKRSTKIRHGNSYLKRCLCQTVFAAKKQKGSPLAERYYQIQSRRGPQKATIALAHQLLKIAYILLKENLTYQEFVLQKRLLETSQ

SEQ ID NO: 202224 - protein, 349 aa, unidentified
MTEQRHSYAGECVYVGVDVHKETYTVTCVCHKQIVKTATVQAEPASLAASLQRWFPGATLASAYEAGFSAFVLHRALTKVGISNIVVNPASLAVAANDKVKTDRRDSKRLAVDLADGRLRGIYVPTEEEELARLLPRTRAQLVEHRATLARQIKAKLHQFGLITPSSRRLLSHRYLREIESWTLPPELRASLKMLAEQWRFVTRQLIEMRRLLREQATAQAAIDKVYRSVPGIGEVVARTLATELGDMTRFANERALFSYTGLTPSEYSSGAAVRRGPISRQGSSRVRHLLVETAWRALPYDAVLQTMFERIAATRGKKRAIVAIARRLIGRVRACFRQGTMYAVGTLA

SEQ ID NO: 202225 - protein, 360 aa, unidentified
MTTHSGSRQVMIGVDTHKLTHHGAALDADTGKLLDEREFPATPAGYRQLLSWARALGTLVKAGLEGTGSYGAGLQRFLQAHDVTVIEVSRPNRQDRRRRGKSDPIDAINAARAVLSEAALATPKDRQGYVESVREIRATRRSAVKARKAALAQIHGLLWCAPDDVRTKLSSYDRAALVARCARLRIPTKGTLDDPTLTARRMLRRLAKRIQLLDQEITDANQELEAILTKHAPNLLAVNGVGTEAAGQMLTTAGQNVDRLKSEASLARMCGVAPIPASSGNTTRHRLHRGGDRDANSSIYLIVVNRLRWHEPTKAYVVRRTAEGKTKKEIIRCLKRAVVRELYRALQADLAEPKLVLDAA

SEQ ID NO: 202226 - protein, 347 aa, unidentified
MDQQCHYVGLDVSLETTSICVIDDAGAIIWRGKCRSDPDTITAIVRQHAPGAVRVGLETGQLSNWLTLSLRRRGVPVVCMDARHAKAALSLQINKTDANDAFGLAQVVRTGWYREVAVKSMDAHTLRMLLVARSRLVSQRQATANTIRGLLKTFGLVVARGSKGLFPVRVREQIAGNPALIAIIEPLLAVWHAIRDQVAMLDRQMLARARNDQVARRLMTIPGVGVVIALAYTAVIDDPARFRRSVSVGAYLGLTPRRYQSGEVDTTGHISKCGDSLLRGYLYEAAAVLLCRDGRASILKSWGLGLAKRIGMRRAKVAVARKLAVIMHRIWSDHGEYRWTAIPPIAA

SEQ ID NO: 202227 - protein, 402 aa, unidentified
MNAVGIDVSKGKSMVAIMRPFGEIVSTPFEIKHTSSDINSLVKLIKSIEGESRIVMEHTGRYYEVLAHQLSEANLFVSAINPKLIKDFDNDSLRKVKTDKADSVKIARYALDKWQNLKQYSVMDELRNQLKTMNRQFGFYMKHKTAMKNNLIGILDQTYPGVNTYFDSPARSDGSQKWVDFASTYWHVDCVRKMSLNAFIDHYQNWCKRKKYNFSQSKAEEIYGKAKELVPVLPKDALTKLIIKQAVDQLNSASTTVESLRTLMNETASKLPEYPVVMAMKGVGTSLGPQLMAEIGDVSRFTHKSAITAFAGVDPGVNESGSYEQKSVPTSKRGSSDLRKTLFQVMDVLIKTHPQDDPVYQFLDKKRAQGKPYYVYMTAGANKFLRIYYGRVKEYLSSLPES

SEQ ID NO: 202228 - protein, 359 aa, unidentified
MDEITTVGVDLAKEVFAVCMLDARGAVVERKVLRRAAFERWAATLPTCTVAMEACGSAHHWGRYFAARGHTARLIAAEFVGAFRQGGKNDGNDALAIAIAARQPTMRFVAVKTVEQQTILCWHRARAGFNDERTALINRLRGLLAEFGIVIPRSSERLLKALAPLTEDARVPVSLRPLLLEARAQFEALAARIARCDLEVAAHVRDNDAAMRVREVLGVGVLTASAFVATVPDPTVFRHGRQLSAWLGLTPRQKSSGGKTRLGDSSRRGDGYLRTLLVQGARSALQVALKTPPDKATRLQGWITALYLRKGYHKTLIAIANKHARILWAMRVRDQHFDPNAWQRHPRAAPSTTAMVATA

SEQ ID NO: 202229 - protein, 392 aa, unidentified
MRISVGIDIAKEIHWVTAIDAGGVVQVDRKLLNTPAGIATLVDELTALRGTVRIGLDVIGGIAGLAEAMLADAGFALVHVPGIAVNRARQGTVGGENKSDPRDARTIAEQVRTRSDLRPIEPATELDLEIRLLVGRRSDIVQAQTQRLSRMRDLLVGIFPGLEACLDLKTKGPLHLLTKFVTPAELRDAGKKRLVRHLQAAGGVPKVEDLADRVLTVATEQRIAVPAERTTARLIRELAVEALASRTRLIELDRELEALLARHPDAALIRSLPGMGAVLTAELIAEAGNLARFRSADALASAAGMAPVLRQSGRSRFLRRPSGGNKGLKRVFYQSAFCSLAHDDSRAFYERKRREGKRHHQAVIALARRRVNVLWAVVHSRTPFQTAFKTAA

SEQ ID NO: 202230 - protein, 412 aa, unidentified
MPKIVFPICCGIDVHKSFVVARIAKTDENLVTTYSKSMRFSTFTGDLRRLADWLAQNNCRDVCMESTGKYWIPVWNVLEPTCDLVLAHPKYLKAIKGKKTDKRDAKWIADLFKHDLLNGSFIPPPDIRQLRDLVRYHVKLTSYTTGEKNRAQNCLTVSNIKLDDVFSDVFGKSAYAITTQLLERPGEPFDVAPFVDIRCKAPIEEVQAAVDGIMCVQQAEKLRIIRSHMESLELCKLNLESEILAVAEKYLPQINLVSTVPGIQFFSAVAIIGEIGVDMSVFETSRHLSSWAGVAPQNDNSAGKKKTTRISRAGVYIKPILVQCALAATKSNKHPEVKNRYHSIKKRRGHKKAIIAIARMLLTAIYNILMKAEPYNAELYRQSDKPPIQREVTVEQAIFILQRQGYLVTQSN

SEQ ID NO: 202231 - protein, 335 aa, unidentified
MQKGFSMIVHSPLSAKAVPAVGTLPPGVFLGVDISKSWVDIADTIGRRARVDNDAASLAGVFVGAWAPEACANVVYEATGGYERALELVAGTLGLPLRRVHPNRARAFAKARAQLAKTDAIDAQVLAVFAAFTAAEEAPPLPGPQQRELAELVSRLRQLKDLRQAEGCRAKQAAGRAVRTSIEGMLGMLDEQIATVQKVINAAIAADASLAHKATLMRSCKGIGPQSAQAVLAWLPEIGTLNRRRIAALVGVAPITRRSGSSINSAHIEGGRKPLRDILFMAALTASRHNPTFKTFYQRLRADGKPHKVALIAVTRKLITTLNAIVKSQTLFKST

SEQ ID NO: 202232 - protein, 415 aa, unidentified
MTKVMESIIGCCAGFDVHSKTVAVCIRRTGELGEIHSEVHTFRTLTRDLLELCDWLSREGVTHVAMESTGVFWKPIYNILEGQFEILLVNARHVKNVPGRKTDVKDCEWLAQLLQCGLLRGSFVPPRPQRELRDLTRLRMQLTHQMASVANRIHKVLEDTNIKLGLVATDILGVSGREIIKALIEGETDTVKMADMARGRLRDKIPLLEEALVGKVTEHHQFLLKALMDQLIYLESQIERFNQRIEQAARPFEKAIAALIPMPGYNYVSAQSVIAEIGPRLETFPSQAHLCSWAKVCPGNNESAGKHKNGATGHGNRWLEAMLVQVAWAASHKKGCYFQAQYRRLAGKRGKKRAIVAVAHSILTDTYYILKHKRTYKDLGGDYFDRLSHDRIRRYHVKRLQDLGYKVELAEKPAA

SEQ ID NO: 202233 - protein, 320 aa, unidentified
MSDSTERFVGIDVSKDSLDLFADPPAPQLPTHCGYDDTAVRTLCDALADLAPTLVVMEASGGLEQRLAAELAARGVPLAVVNPRQVRQFARALGELAKTDALDARILCAFARAIRPQARAPHDADTRDLADLLSRRRQLVDMRVQELQRQHSAHSRTMRKSLAEHIAWLDKRIAQLDEDMGQRLRASEVWRAKDDLLQSIPGVGPVLSLTMLGLCPELGELNRREIAKLVGLAPLANDSGRHRGPRRIWGGRADVRRVLYMATQVAIRHNPVIAAFAARLRLAGKKPKVVIVACMHKLLTIMNTMLKTGQTWRTPEPLAQ

SEQ ID NO: 202234 - protein, 366 aa, unidentified
MDKDTTYVALDDSKRKLAVAILRPGQTELEQREMAKEPHLIQRVFRRLAREGAVAACYEAGVSGYDLYRQITACGVACHVIAPALTPRRPGQRIKTDRRDAAKLVRLFRAGELTAIHVPAEAEEAVRDLTRCREDVRRDVLRWRHRLLKFLDRHGRLYVTGKNWSQRHWAWIRQQRFDLPPLQRTFEATLFALEQARAHQAELDQEIAALAEQAPYREPVGWLRCFRGIDTLSAMILRAEIVDFQRFTHPRELMAYLGLVPSEYSSGDRERRGALTKAGNTHARRVLVEAAWHYRHRPTLGRALAARAQGQSPACRAQAWRAQQRLYRRYRHLVGHGKRPPVAVAAIARELVGFIWAVMTQRAPAA

SEQ ID NO: 202235 - protein, 404 aa, unidentified
MTATTTPATELDAVFGGVDSHADTIHVAVITDRGGHVADAEFPTTAAGYAAAIAFLNAHGTVTAVGVEGTSSYGVGFTRAARHAGLTVVEVNRPDRAERRRIGKSDHIDAYAAARAALSGRAKVVPKDDSVSGIRALHNAARSAVKARTATLNQIAHILITAPDDIRVKYTALRGKTQVDALCRLRPTGTGPRVALLTALKTLARRVQALTAEHDALTAALDAAATEHNPGLRAAFGVGPDTAAQLLVTAGGNPDRLRTEASFAALCGVAPVPASSGRTNRHRLSRGGDRGANAALYRIALVRMSSDARTRAYVARQTAAGRTKKEIIRLLKRAIAREIFRYLTTPVSVPEVSDLRPARQAKNITLTTVAEHFGVWPAVISCIERGTRRDDDLAGAYRDWLTAA

SEQ ID NO: 202236 - protein, 436 aa, unidentified
MQVNTRSSRVSIGIDAAVVAPHQIAIRGEVREDFKVSPTLAGLATLTERLERYAGSMVVAEPTAGTWLPLAYAVTDAGCDIGFVANRDSARLRKAIAGANKTDVIDADMLARCEDVLGVVAAPVPPPGQIALRRAIRRRHIATVDAHRVECRLWSLAAWAFPDVWKAMGGHTLAQPLLARWPHLERLARARLSSITEIVAAHSRDTHPERRAARIRDAAGGWSTFWDNRLDLDALGWEIAAMLDDIDTTDRRHRDATDHALGLWQQHWPDDPLVSIPGLGPICASTIRGWWGDATHLKSAKAATAHAGLNPSVWESGLSEAPSRRITKQGPAELRLALYQAANVARRRDPQLAEHYRRLMTERGHNHISANTAIARKLACRAWVIATTARLYEPRDLEGNPISLADAAALAVELAVPDEIRSRRRGNTRKGRLNLT

SEQ ID NO: 202237 - protein, 350 aa, unidentified
MKKNSKTVSRREAETIGIDLGDKVSQYVVLNEEGSMVEEGSFRNCLDSISKHFANRGRARIALEVGTQSAWISRELSKLGHEVIVANARELKWITASDRKNDHNDAVKLARLARADRNLLAPVEHRTAEQQTELAVIRCRDAMVRTRTLLVNTARSLAKGFGLRLPASITATFGARALAKLPETLHEAMSGLLKQIDQLGLQIGDYDKRIARLAELHPEVKRLAGIPGVGTLTATTFVLTLGRKERFVHSRDVGSFLGLHPRQRQSGERDPQLGISKSGDKYLRKLLVQCAHHVLGSWGKDSALRQWGLSKNGSDGGKKRGVIAVARKLAILLHRMWVTGEIFKPFPKTV

SEQ ID NO: 202238 - protein, 379 aa, unidentified
MSAPIFWVGLDVHKDSVTAAVFRNRDTEPLRVDRLPNEPRRLRRYFERLSAEGTVRACYEASGAGYVLQRSLAEWGIHCELAAPSLIPRRAGDRRKHDRRDAIDLGRLYRAGELVLVHIPTEEDERVRDLVRCRETFQREIVKSRHYILKFLRRRGFIYRQGTHWTTRHLNWIRQVLQPGTLAEEDRIVLTEYFALLEYKLQRRDELDCHVEALALTPRYKPVVDRFACFRGLKTHAAMVLATELGDLRRFESPRQLMSYVGLVPSEHSSGDRRRQGAITKAGNARCRHVLIQAAWCYRRRPAVGASLKRRQQGQDPSVVAHAWKGQHRLYKVFHRLAAKKPNQVAATAVARELIGFIWAVLQDHELYQSPHPEVNHAA

SEQ ID NO: 202239 - protein, 317 aa, unidentified
MSQTTMISAGIDIAKEKLDVAVDGNKQRWVMSNDPAGFLQLARLLRTHKVTRVGLEATGGYERHVTQYLRKAGFTVLVLQPRQVRAYAEALLRHAKNDRIDAGTIASFTALLKIARDAPDPRYQPLADLLTFIEQIEEDTARIKVRLEHVEDAAYRRIMEADIKRLKLRRTRMVKKLDTALRCHDDIAKRLDLVITIDGVGHRTALAFIIRMPELGCLTREQAAALAGVAPFDDDTGKHRGERHIWGGRARLRSSVYAATLPAAFQWNSQLIALYKRLIAAGKPHKVALVACTRKLVIFANTVLARGTPWTKSAPTI

SEQ ID NO: 202240 - protein, 359 aa, unidentified
MKKQHKAHSPVVGGVDTHKVIHVASVVDEYDRVLGSKTFATTTHGYKSLLAWMRSFGELERVGIECTGTYGAGLLRYLQRCDVKTLEVTSPDKTARRKRGKDDVMDAENAAHAAFAGIRTVTPKTRDGMIESLRVLKVCRKTAVAARRVALQIIQTQIVSAPETLRDQLRSMTRMKLIRTVAAWRPDLTGYRDVTTAYRIALKSLARRYIELHDEVAELDIMIKAIVDDLAPNLIARRSIGYEAASQLLITAGDNSERLHSEASFAALCGASPVPASSGQRQRYRLNRGGDRAANSALHIIAIGRIQYDPATQAYVKKRTEQGLTKLEIIRCLKRYIAREVYHLIRARNHMINQVQIGT

SEQ ID NO: 202241 - protein, 336 aa, unidentified
MRYIGVDLHTTQLTVCYLKTVDDYEFKQYRLDEIETFAASLEAADELAVETTGNSRWLVGVVERRISRVVVVNPSEFEVIKRSVKKTDKRDALNLARFLAVDMLPAVRQRSELAEAVARMNETRNKMVGLKTSLLNKIHGLAVSRGWKLRRESLSSKKGLTKVTEFEWTAIERIELEIIIEQIGSLKESIKRLDEAIAEISPQMARFENLITVTGIGTRSAAVLISVIGEVADFATESKLASYFGIVPRVSNSNEQVHHGRITKRGSKMGRTTLVQCALVAIRYNPYLKKYYEQVKARRGHGKAKIAVARKYLGIIYNTLKNNWMFEDFNNFVLAE

SEQ ID NO: 202242 - protein, 324 aa, unidentified
MENQYYIGIDIAKAKFDMAFFDENNKPVHEIFDNTKKGFVKMINFLTEKGMKKAHFAIESTNVYWQELADFLKKKEDIVVSVINPVQTSSYSKCRMQRGKTDKIDAFLLARFCRNERPKAWRPLNKANAQLLKMVRQLEHLKDLQQQEKTRLQTADQLVKKSIKAVIAMLSRQMKAMEKNILTHIKSDESLLKGFTLLKGIPGVGDNTASWLLATLDNGERFGRGKQAACYAGLTPRPWQSGSSVKGKTSISKVGPSELRKILYMPAVVVSYGRYKHYQNFVKRLESKGKNKMEVIVAVMRKIITIAQAVLRTKTPYDATLHAG

SEQ ID NO: 202243 - protein, 347 aa, unidentified
MQILSLDLGKNKTVGCDYEGESGKHRFKTAFSTRAGLAQLVKEVKPDRVVIEVCSMAGWVCDLLREMGIEVQVANTSDDAWRWRKVRKKNDRRDALKAAQLSAVNQIREVHIPTIEVRQWRALIAFRQQLVRRRTRVKNHVRDLLLREGQILPRGGKCWTQLGVAELEAMAQPLSEVGMNELWRGELAIELRQLQAVQAEIEVAEEKLDAIGAADPRVRLLRTIPGVGPRLAEAIVALLDRPERFRKASEVSAYIGMVPKELDSGETQRRGKITRHGSRVVRSLLVEVAWAGLRHNPWVRETYQRISGGKKSRKKIAIVAVGRRLFVRCWAMLRDGTIWQWPAAKVT

SEQ ID NO: 202244 - protein, 347 aa, unidentified
MRFYNRQHQYYCGIDLHVTTMYIYILDATGQVLVHRNVPSTPDAFLAVVAPYREDLVVAAECMCTWYWLADVCAAEGITFVLGHALAMKAIHGGKAKNDKIDSHKIAVLLRGGLLPQAYVYPAAMRSTRDLLRRRLHLVRKRGQLLAHIQNTRAQYNLPAFEKRLAYPGNRDGIVERFPDPSVRKSIEVDVTLIDQYDALVNDLELTIVREAKRHDGDAFHRLRSVPGIGKVLALTILYEIHDIQRFDRVQEFASYARLVKCQKQSGGRTLGTSGAKMGNVHLKWAFSEGAVLFLRHAPGGKKLLAGIEKKHGKGKALSILAHKIGRAVYYMLSRGTVFSMDKFRAA

SEQ ID NO: 202245 - protein, 403 aa, unidentified
MDRCAGLDWAKDTHQVCVLEGDAEPLVQRGFTHDERGLDGMCELLVESGVKRVAIERPDGVLVERLLEAGLIVLPIHPNQLKAARPRFRASGGKSDSFDAFCLAELARTDHHRFRILAPDSDETKALRALTRVREDLVKTKVSLTNRLQAELDAFWPGAARVFCRLDSPIALAFLERYPSPTDARSLGEKRLQSFLARHSYCGGKSAAQLLAKLRSAPRGLAKETEKAARRAAVLSLLAALRPVVEQIGLLESRIADAVRAHPDGELFLSLFRHPDSTLTAAKLLCEIGDRRERYPSAEALAADAGMSPVAKESGRCKVATFRRSCDKRLRDAMTTLADSSRLHNPWAKDIYLRARGRGCDHPHAIRVLGRAWLRVIWRMWQDSVPYDPLKHGGRRRLDAAGG

SEQ ID NO: 202246 - protein, 402 aa, unidentified
MNSVGIDISKGRSTIAVMRPFGEVVISPFEVRHTDSELSELARQLKSLDGETRVVMETTGNYHAPVAKLLHDAGLYVSVVNAKLVHGYGNNDLRRVKTDKKDAVKLANYGLDRWLTLPRYVPEEDTRLLLKNCYRQYRQYSKVQTVLKNNLISLLDTVFPNANRLFSSPIRGDGSEKWVDFVAEFWHCRCVSEKSQGAFTNNYQRWCRKHGYNFNEAKAHTIHAEASRHIGVMPKSETTKLLVEQAVAQLRATSAALIALKREMLTLAAQLPEYPVVMGIFGVGPTLGPQLIAEIGDVRRFYSKKALVAYAGLDAPPNDSGDVSGKHKSMSKIGSSALRRTLFLVMSVYLQNAPLDEPVYQFMDRKRAEGKPYRVYMMASANKFLRIYYASVKAYLESLEQV

SEQ ID NO: 202247 - protein, 364 aa, unidentified
MFERTSVGLDVHARSVAGCALDAQTGEIIPHRLTPDYAEILAWIVSLPAPVRVVYEAGPTGFGLARFLLAAGIDTLVAAPSKLQRPSGDRVKTDAKDALHLARLLKLGEITAVRVPAADQEAARDLVRAREDARGDLMRSRHRISKLLLRQGIVYSGGRAWTGTHELWLAQQRFDAPALQLTYASSLEAMHEILDRRDRLDEAITTMAYRSEYTPVVRSLECLRGISTLTAFGLALEIGDWNRFTGSTIGAYLGLVPTEHSSGASRSQGSITKTGNTHARRLLVEAAWHHRRPYDHPSHLMRSRWEMASPDARARGHAGNRRLHNRWISYLERRKRPVIANVAIARELAGWCWSLASRTDQPSQ

SEQ ID NO: 202248 - protein, 410 aa, unidentified
MHHKLKYLYIGIDLHKRHHTAVMMTCFHEKRDEIQFENKPSAFPKFLQRIEKMAKREGLTPVFGLEDVGGYGRGLAMFLNENKYEVKSVNPALTISIRRSSPNNKKTDAWDAECVARILISNLDTLPTANPHDLYYAISQLVTRRENIVSVVTGIKLQLHQLLGYHYPSYKKFFSQVDGKTALAFWLKYPSPSCLSGVNVDELANFLYKKSNRYMSTKKAEDILSLVQQDGDTSKDYQGVNDFLVKNVVRDLIARDHQLSQIDTELAKHLALLDYKLETMHGISTVTAAELIAEIGDISRFSNADKLANFAGIAPVQHSSGNKQKSKKSKLGNRSLYDIFYNLAIRQLGVSRAKKPNHPVYHAYYERKLAEGKTKWQAIICVMRKLVNVIYSMMKYKTEYKMPVLTEQAA

SEQ ID NO: 202249 - protein, 339 aa, unidentified
MNEISTVGLDIGKKVFQVHGVDCSGAVVVRRELRRRQLRAWFSRLPPCLVGLEACATAHYWARELSKLGHDVRLIPPAYAKAYVRRNKNDPADAAAICEAVGRPSMRFVAIKTEQQQAAVGIHRVRDLLMKQHTMLRNQLRGLMAEFGVVAAKGQRGLNELLAILADPEDQRIPNPLREGLTAIAETLRGIDRKLAAIDRQIVAAGRQNAAYRHLITAPGYGPILSSAMAAFVTDPAVFRRASDFAASLGIVPRQEGTGGKVWLGPISKRGNGYLRRRLVNGATALLNSKRAKQDPWLAKLLATKPRKLVAVALANKMARIGWALMTRQQDYRNMPATT

SEQ ID NO: 202250 - protein, 424 aa, unidentified
MKRHPDVEFAAFAGIDWSDTKHDICLQAANSEERELAVVPHRPAAIDAWASALRQRFGGQPVAVCLELAKGPLVYALQKYDFLVLFPVHPATLAKYREAFAPSHAKADPTDAQLALELLLRYRVKLKALTPQSVPMRMLLRLVEQRRRLVGDQNRISNRLTDALKQYFPDVLVWFPDRDTPLFCDFLTRWPTLKQLKRARRATLQSFFHDHHVRSPSRIEERLRAIKSATPLTDDPAVLRPNQLLVLALVEQLRVTLQAIESFDAESATLSETLPDYALFRALPGAGAILAPRLLAAFGEQRERYQSAAEMQRYTGIAPVTESSGKKHWVHWRLQCPSFLRQTFVEWAGATIPRSFWAAAYYRQQRDKGCSHQAAVRALAFKWIRILYRCWQTRTPYDESTYLNALKRRGSPLLASIATTAKNT

SEQ ID NO: 202251 - protein, 472 aa, unidentified
MGKGSGNGTTRGDRKRNARRERLRGLLPRDGAVIGIDLAEDKQAIAVVDHDVRVLARKTVRVKAFRLGEALDWAVGQARAKGFASVTVACEPTGPRWMQVQRLCAERGLPLVCIQPLVSHIAREQQDYTTHKTDESDCVMIGRLAVELHCYIPEELDETWAHLRHLGRRRAQLITASTASMQRIQDFLSVAWPVVTGTCVQPLLSKTWLAALQLVTSRCGADPGNLAALGCEAFTALVRSAVAGWGGKKAWGTICARIFAALTDTEGVVVSSRRGLLRRVADELADLQRTRAQLRRVEADMVAVLDELGLSRLAGIPALTAVGAAAILAETGDPRRYDSSSSLVKHAGMSPSDNASGAFSGDARISRRGRPGLRLAAWRAVWPMLQFNPVMAAKYQAMTQAASDTAAGTSSRQASAAAAAARARRARARVACAASLLRWIYSMVVHGTSWDAAVASGDAACQHALRCPAEAA

SEQ ID NO: 202252 - protein, 346 aa, unidentified
MLHAGLDLSRRKVDVCLLSGAGEIVDEWASPPDADGLRGLAARAAMWGGPVRGVIESMNGARFVHDRLEEHGWEVLIADATKVKGLAPLACKTDKIDARVLATLSARDLVPEIWLPDPSIRRERELARFRLHLVRHRTTLKNRIHAALVAFGHPCPVSDLFGHAGRELLDRIELPEPWRSNVDVSLALIEELDVRIGELTVQLKRQGADHRYIPVLVTAPGIGWINAYTIASEIGDITRFPSPAKLCGYTGLCPRVKQSGAVDARGPISKHGPKYLRWALFEAALNACKHPYYAERYQNTKRRLGRQRGPKVAQIDLARRLTEAIWHMLTNNQPFAPAGAPFRLAA

SEQ ID NO: 202253 - protein, 353 aa, unidentified
MKKYIGCDAHARYSLFAILRENGQWEPPVRVEHNGMEMERFLKQLPVGSPVAIETSGNWYWLVRAVEEAGLDARLVHALEAKKRMPGRHKTNHLDAQGLALLLRNGALPEVWKPPLRLLDLRDLMRTRLATRQQGSELKCRILAALRRYGVRDYSHGSDLFASCRRAQLAVSIARLPQECRIATSEEWALLDQLEDHVEALERRIRERVASLGWVRLLKTLPGVGTILGSTIYLEIGDVTRFPDAAHLASYAGLVPTVHSSGGKCWQGPTPRAANHFLKWAFVEAANGIVMRQKAWAGKHVVRTYQRLKVTKCHAKAVTAVGRHLAESSWWILTKKQAYREPALATRSSSENG

SEQ ID NO: 202254 - protein, 338 aa, unidentified
MQAILMVGVDMAKKDFVAALFQGQPQALLGKFTNDVAGYEALSAQVSEACHELGVAQVQLVIEATGGYEAALVAYAYAQDWLVSMPNAKQVRDWAKGVGYRGKSDRIDAQILAHYGAERRPKPRPQLAEEVSELDSLLKRRADLEQALQKEQTRRSELAGRPGISPQVAESLRQVIEALTEALAGIQHAIDERCQSHQPFQQQLTRLLALPGVGPKVVLPLMVKLFQWQTLTNGEGNANGLTAFVGLDPQPYLSGTSVRKHPGISKMGDNELRRLLYMGALGGVRGHNPLMPFYQRLVGRGKAKKVALVAAARKILVWAWTIFSREIDWNPDLHQIGA

SEQ ID NO: 202255 - protein, 354 aa, unidentified
MSQTANTAIAVIGIDIGKNSFHVVGHDARGAIVLRQKWSRGQVEARLANIPPCLIGMEACVGAHHLSRKLASLGHDARLMPAKYVRPYSKGQKNDFNDAEAIAEAVQRPTMKFVATKTAEQLDLQALHRVRERLVSQRTGIINQIRAFMLERGVAVRQGIGFLRTELPTIIATRTDVLSPRMLRVIEELAGDWRRLDQRIDGLSGEIEALARQDQACSRLMTVPGIGPIISSAMVAAIGTGDVFSKGRDFGAWLGLVPKQISTGDRTILGKISRRGNRYLRVLFVQAAWVVLVRIKNWERYGLKSWIEAAKRRLHHNVLAIALANKLARIAWAVLAKGRAFELTRTDDAGVRPA

SEQ ID NO: 202256 - protein, 435 aa, unidentified
MSCIDDIRLDHFLQLKKEIRGSEQYLIVGIDAAKEKHNAFFGTAKGRTLVKNLVFDNTIEGFEKLDAFVERVKVQYSLSKIVFGIEPTANYHKPLAEHLIECGRMVVLVGGVAVKNNRQLLDGRWDKHDVKDAANVADLIAQGKCLFYEYPLMTLRNVRTLIALKRRLKKREHGTSVCIRNSIIAQYFPELDQYYGSAETLAVVRECLDPSEIAGMEYDAFCRTVSPGKMTLAKGRRTGAIWRAAVDSIGCTMGEAASYEAQVMVDNLKQLRQAIKAVEDKLEDACLEFPEYTYLLSIPGFGPDVSSKVLGAIGDPHRFTSGKQVLKMAGLDLCANRSGKTSNSATPVISKQGKADLRYALYQAALIASLKNKDFIAYYTNKLKGRAKEKGIGTKMRVKLAAKLLIIAWTLMKKKECFDPAYLKLENQEEREKAA

SEQ ID NO: 202257 - protein, 412 aa, unidentified
MEEITEEPGALVERVAALDIGKATLTVCIRVPHEDKPGARRQEVRTCATLTPALLELRDWLICQGVTLVVMEATSAYWKPPFYLLEDDIECWVVNARDVKNVPGRPKTDKLDSVWLCKLAERGMLRASFIPPRPQRQLRDLTRYRRTLTQERTREKQRAEKLPGDAQIKLSSVISDIFGASGRAMLDALIAGRRNPHALAALAYKNMRAKTSVLQEALTGHFTDHHAFMLGMMLARIDALTTQIDTLTTRIGQAIAPFAAQVAQLDEIPGIGITAAQDLLAEIGTDMSRFPDAGHLVSWAKFAPRARQFAGRSKAASTGKGNPWLGGTLGEAATGAARTKTFLASRYKRIVRRRGKQRALVAVGNSILTIIWHLLSDPAARFTDLGPDWHDRLAPLRRKRQLIAEHPPRSRP

SEQ ID NO: 202258 - protein, 347 aa, unidentified
MKIIGCDFHPSYQQVAWLDTETGEVREATLAHENGEARRFYESLRGPVRVGMEAVGNTLWFERLLAGLGHEVWIGDAAHIRSLVVRRQKTDRRDAVHVLELLTSDRFPRIWVPGPEQRDTRQLLFDRHKLVRLRARVKNELQHLALNQGVRRKRKLWSTAGRQLLESLPLDGWTAQRRQDLLQLLDQLHRRIGELDRAVEAEAARHPAAQLLQTHPGIGPVTGLAYVLTLGPWQRFRCAKAVASYLGLNPREHSSGGRQKLGAISKQGNPLLRSLLVEAALSAVRGDAELRRAYRRLAQRKHTALARVMVARKLAVRLYWMLRSNQPYAPRPAVRMPGSPSHSVVAV

SEQ ID NO: 202259 - protein, 340 aa, unidentified
MKDIKVLGIDLAKNVFQLHGNNTKGKRVITKRLTREKLVEFLSQVKPCTIGLEACIGAHYWARVFKKMDHTVKIMAPKFVKPYVMSNKNDANDARAIAEAVTRPDMRFVSAKSIEQQDILLLHRAKELTMKHRTALINQIRGLLLEYGVVIPQGTSHIKRLLIILEENQDKLTEKATAVFAKLYEQFKSYNTQVESYDDEIALSAKKNELCKEVMKIEGVGPITASAIVATAGDAKMFKNGRQMAAWLGLTPRQHSSGDTTRLGGISKCGDGYVRKLLVHGARSVVQNCEKKFDKKSRWVADKKERIGYNKACVALANKNARIIWAIMATGECYRKSVAA

SEQ ID NO: 202260 - protein, 405 aa, unidentified
MKVYIGIDWSTQKHDIVYLNEEGGIILYQTIPHSPAGFEAFDEQRMELGVSVEDCLVGIETEHNLLIDFLTSHQYQQIYVIPPSMIRDSRGRFGASKAKTDRSDAHLIADMLRTDRARLHAWHSDSLLTQQIASLVSLERFLTRTIIQTTNRLRNVLWRYYPNAAGVFSSLDQQIALEFICAYPTPEAATGLTIEQFKSFAKLHHYPRPSKLSACYARLQKPQPDAKQQTVLAYQSEAVRLAHLALQVVQDKAATLKETQELFVDHPDYPIFSSLPGAGRILAPALLAKFGDDRQRYPTPQVLQCVAGTCPVTKASGKHKYVSFRYACDHEFRLIVQQWAKSSIDYSVWANTYFQTIRPHCGSLSHAYRRLAHRWLEIAWRLWQDRVPYDEGRHLRQHALRVKPK

SEQ ID NO: 202261 - protein, 402 aa, unidentified
MNCVGIDVSKGKSMIAVMRPFGEVVVSPFEVRHTASELSELARLLKNLDGETRVVMESTGNYHAPVAWLLHGAGFYVSVVNAMLVHDYGNNSLRRGKTDKKDAVKLANYGLDHWLTLPRYVPEEDTRLMLKTCYRQYQQYSKVQTMLKNNLISLLDTAFPDANRLFTSPPRADGSEKWVDFVATFWHCECVCGLSKKAFTAKYQKWCRKHGYNFSQDKALDIYASACGRFGVMPKTNTAKLLVEQAISQLQTTSAALAALKQEMQSLAASLPEYPIVMGMFGVGPTLGPQLMAEIGDVRRFHSKKALVAFAGIDAPPYQSGQIDVRSRSISKRGSASLRRTLFLVMGVLLQCAPMDEPVYQFMNKKRSEGKPYRVYMMASANKFLRIYYASVKAYLDSLEHD

SEQ ID NO: 202262 - protein, 316 aa, unidentified
MSAPQVLVGIEVSKAQLDVALRPTDGGGPVNHDEAGIAGLLERLRTVQPTLVVLEATGGLAVPVTGALAAAGRPVVVVHPRQARDVAQATGRVAKTEARDARGLAPVAEAVRPTPRPLPAAQAHAVRAWLTRRRQVVPRRTAERRRLQTAPQPIRADIEAHLTWWTRRLARPEDDVAAAISSRPRWRATDARLQRTPGVGPSRSRTLVAAVPEVGGLNRQEVAALMGVAPLNRDRGTWRGTRAVWGGRAHVRAVRSRSPLAAGRHHPVLTAFYARRRAVGKAPKVARTACMHTLLTILNARLKPRPPWHENDATHA

SEQ ID NO: 202263 - protein, 369 aa, unidentified
MKKGSTLHVGLDVHKDSITVAYASSDGGDPLHLGAIGTRHCDIDALVRKLQSKSPQLVFVYEAGPCGYWLYRYLTRKGLACVVVAPSLIPRKPGDRVKTDKRDALTLARLARSGDLTPVYVPEVADEAIRDLARAREDALGDLNAARRRLKALLLRNDIRYTGRANWGDAHRRWLARFVFPTPAQQIVFQESVRTITERTELLQRLDAALLEQAKTWRMSPVVDALQALRGVQFTVAVITIAELGDLTRFDRPPELMKYLGLTPSEYTSATRRRLGGITKAGNGHARRALVEAAKAYRHRAKVSEQIQARQQPLSQAICDIAWRAQVRLCGRYRKMLARGKHPNTIAAAVARELIGFMWAIAKAQPLAA

SEQ ID NO: 202264 - protein, 345 aa, unidentified
MDQLNNRKCSTPLHWVGADVAKHTFDAALVRCDRHYPETALREIPARTFSRTFQGVERFIDWLDEHGVDHEDVRVVMEATGKYSVELAVWMIAQRPTLSPAIANPQQTSAFITSMGLRNKTDRLEARALGFYGVERRPLAYEAPTPECKELRALSRYRDSLVRQRTALKNQRNELDDSTFVQKNQTKRLRLLTGDITRVEDEMKALVNQHQALKRDIELLTSIYSIAFINATTILAELGDLRRFPLARQLSAFAGMSPRHHQSGTSIHGRSRLCKQGNPRIRQCLYLAAMTAIRGQNQFRHTYQRLLTEGKPRMVALGAIMRKLLILMRAILISGKPYKPLGITR

SEQ ID NO: 202265 - protein, 446 aa, unidentified
MPLDCCERARGSVSWQRSLRTDAVRRWSPHGGRRDVMEVLFDRVAGLDVGKESVTVCVRTPGPRGGRRSETRTFKTMFGSLRVMRDWLIEAGVTIAAMESTSTYWKPPFYCLEEVMVVWLLNAAHMKAVPGRKSDVRDAEWIAQLLEHGLLAPSFVPPPQIRRLRMLTRYRMQLMGDRSREMVRLELMLEDASIKLSSVASSLKTVSARAMLTAMINGESDPLRLADMAKGRMRRKIPDLAQALTGTFEAHHAQLARSMLRRLELVEQALAELDAVIAEACRPWQHHIELLQTIPGVGETVAQVIVAETGADMSRFPTAAHLSAWAGLAPAMHESAGRQTPAGKRHGNKWLTAMLVEAAGSVGRMHGRNYLAAQHARLMKRRGMGRAQVAVAHSMLVAAYWMLKRDEPYHDLGADWHRRRSDEAHTRRLVAQLEHLGHTVIIDPAA

SEQ ID NO: 202266 - protein, 315 aa, unidentified
MAMLVAQTKPVVGVDVAKNELVIYQDQSDRLEAIPNNKASISKWLRTLAGTVSIAVEATNTYHVLFADMAYEAGCTIYMIDGYQLSHYRKGVNVRAKTDALDARLLARYLKKEADELHPWVPPCPLYRQLLSLFRRRAALVQARTGLVQSWSNEPLLKTAFAAQINSMKRLEALVEKKIKDVLQRAGLMGQVSRCMKVEGIGFLTAARLVTTFQRGEFSNANAFIAFLGLDLRVSKSGQSDGPRRLTKRGDPEARRLLHNAAMSGSRTAAWKPFYEEQRKRGFSTTQALVMLARKMARVVFALLKTQSEYRSKAA

SEQ ID NO: 202267 - protein, 440 aa, unidentified
MKQFLECCAGIDIGKREMTVTILTGSVEVEPIPQMGTFGTTVQELNRCLEWLLGNHCSTVVVESTGTYWVPVWNVLHERVAVIVANPEHVKARRGEKTDPEDSRRLAERLRVGDVRGSFVPSAQIVELRDLTRRRKRLLSAANSERNRIQKLLEQANVKIGNVVTDVFGVSGQRILHALLQHPELTPAALADLAKGRLQHKRQALIETLQGHRLNDHVRWMIQHSLDHLVFLENQLTELSQRTLLKLQPFEREYELLQTIPGIAAETAAVILAETGGNMAQFPSPKHLTSWAGVCPGNNRSAGKQKSASIKRANKWLLAALVQSAWATVRQRGSIFQKRFYRQMQHRGRKRALIAAARSLLEVVWQVLQRMTPYNEPANEVLQQQERGKKIRHHLQRLRQLGIDISDLQLPPLTPLIPSNGTRLLTGTPHPLGVLGIHAR

SEQ ID NO: 202268 - protein, 318 aa, unidentified
MARNGLVVAGIDVAKDKVDVCIRSPLLRRTFASNHEGRRQLTSWLRRHKVSTAVMEASGGYEGDWARALRKADIAVRIVDPKRVRSFAQSAGRLAKNDQIDAEMIAWFADIFQEAPGQDHDEEREQLRQMVTARQTLLDLQTALQNKGEHSVPGAVQRMQARLLKKMAAEIAALEVAIEAKVRTTRHFAELAEIIESVPGLAGTTSAGLIATMPELGQVNDKIAAALLGAAPYDDDSGKRRGSRHIKGGRRRIRNIFYMACLGAATRHNPVLKAFYRRLLAKGKQKKVALVACMRKLIVILNVMIERRQKWDPTLHAM

SEQ ID NO: 202269 - protein, 337 aa, unidentified
MYYTGIDLHRKTSFLTTVDSKGEIVKKANLKNDEATILEYFLSLDDDTQVVIESTATWYWLYDLLTAHSIPVVVSNPVKTKAIASARIKNDKLDSHMLAQLLRADLLATVHVSSPQTRQLKELLRHRHKLVRDCVRMKNRIHNIMAKNNLRVPVSDLFGKKGLQFLSQAQLPHYQRHQVDTYLKLYHQLKEHTDDLTKQIRQTAASDPRAQLLMTIPGVGAITAMFIAAEIEDISRFKSYRHLSSYAGLVPRLDASADKQRMGRITKQGSPYLRTALVEAAQATTRTKSRLNIYFRKRIVRSGYQKAIVATAHKIIQYAYYILRDQKPYRDGIDALA

SEQ ID NO: 202270 - protein, 352 aa, unidentified
MRRPKDKIIAGLDLHSNNVMIGLMNQDGKRVAHRKLDCDLKEVIEFLEPYKAQLQSMAVESTFNWYWLLDGLRAQGYPIDLANPAKIEQYKGIKHVTDKDDAFHLAELQRLNILPKAHVYDPDLRPVRDLLRRRTSLVQQRTALLLSFKSLYARTTGQRLDLKDLKKMEPKEAPKLYTHPANQLIAQVQCQLIEALDKSTARIEKAVLECARQIPLYEKLLTIPGIGKILGMTITMEVGDIKRFKTDGDFASYCRMVNARRFSNGKVKADNNSKCGDKYLSWAFVEAANFARRYDIDCRRWYDRKAARTSKVLATKALGCKLSKAAWHVMSNQSNYDPKRMFPELANKMDKK

SEQ ID NO: 202271 - protein, 348 aa, unidentified
MRFYTEQHQHYCGIDLHARTLYLCILNAEGNVLLHKNLPCDRVRFLEAIAPFREDLVVASECIFNWYWLADLCAEHSVPFVLGHALYMRAIHGAKAKNDRIDALKTASLLRGGLLPMAYVYPAQMRSTRDLLRRRTHFVRKRAQLMAHIQNTFHQYNLPRPPGRLVYKYQRAPIPDAFDDPILKKSVETDLALCHTYDQLIRDLEKTVLRQARSHDPQTLLRLNTVPGIGEILSLTLLYEIHDIGRFPSVQDFASYARLVKCEKSSAGKRVGTSGHKIGSVHLKWAFSEAAVSVIRHLPKSQRLHDRLKRKYGKGKALSIFAHKLGRTVYFMLKRNQAFDADRFLANA

SEQ ID NO: 202272 - protein, 359 aa, unidentified
MIDTGDIDVFLGLDVGKGEHHATAVTPAGKKAFDKRLPNAEPKLRELFAKLQAKHGTVLVVVDQPASIGALPLAVARDMGCPVAYLPGLTMRRIADLYPGEAKTDAKDAFIIADAARAMPHTLRVIDGEDETIAELEMIVGFDDDLAGEATRVANRLHGLLTQIHPSLERALGPRLQHPAVLTLLERFGSPAQIRKAGRRRLVTLLRPKAPRMAERLVEDIFTALDEQTVTVPGTEAAALIVPSLAASLTAVLDQRKLLAGQIEELLEAHPLSKVLTSMPGVGVRTGARILIEVGDGSTFPTAAHLAAYAGLAPATRSSGSSIRGEQPSRRGNFPISMSSHCGERRRDLKRRLVSDHGP

SEQ ID NO: 202273 - protein, 331 aa, unidentified
MVYAGIDVHRKRSQVPVLDEAGTELVNRNVDNGSEAMIDILEELEVGTPVAFEAAYGWGWLADLLERYELEPHLVHPSACKAIASARLKNDKVDARMLAHLLRTDLLPEAWLAPKEVRDLRSLLRHRAALVRMRTAFKNRIHAVLADEGLKAEGEALWSDTGHQWLVRVPLRANHREIVDDCCGMLDALAIPIGRLEAEIHSLAKADPRVDALCELPGVGILTAMTLVAEVGDIARFPTARKLCAWAGLTPSVRNSDTKVHHGHITKAGPAAVRWILTEASYQARHFPPFSATFEATTKRRGKRIAGVAVSRKLLARSFHVLKSLEQAPIQ

SEQ ID NO: 202274 - protein, 426 aa, unidentified
MARYVGLDVHKRTIAACMLDSEGRPVRRASFDCTRTAISKFAQEQLEHSDVVALEATTNSWAVAEILEPYVARVVVSNPLKTKAIAESTVKTDKVDSQTLAQLLRVGFLPEVWHPSGPFQLLRQLTVFYASLINDRIRVKNRLQSLFHRRLIHCPVSTLFSQAGVRWMDSLELSEHDRLILELAKQQVFDLNAKIAEVEQRIARLAQNDHSIKLLMTLPGVSLMTAACLVGAIGEVARFRDGDHLAAYFGLVPRVKQSADHCYYGSITKVGNNQVRKMLVLAARNLRTHPGPLGAYFRRMAKHKHINVAATATARKMVTVAYLILKNGEPYRYAQPATTSQKFGQLHMLATQSKRAAVRVEAQPGEPVPPAGYRLERKPSLDQVLVRDGLSPIRWQAVPKGEQVVIEKFRDYIEGIGKPSATVRKG

SEQ ID NO: 202275 - protein, 347 aa, unidentified
MKIIYPRVCGIDVHKKFIVAVICISESVEPIYLKKRFSTFHNDLIRFREWLIQNDCQNVCMESTGKYYIPVYNVLESHISNIVVANPKWVRAVNGEKDDDKDAKWIADLFKFGIVRSSFIPQKDFRILRELTRYRYKLVNMRSSEKNRFQNALTSGNCKLDMVFTDVFGKSASNIIDLILSDNPYTDEDILSKVHKKCKASPDMILDSVNGTDLTPVQKARIELVNDHIKQLSSNIQKLDKLIDLMIEPYEDYISFLCQIPGVSRNSAIIILSEIGIDMNQFTTSRRITSWAGLTPSSNQSAGKKKSVRISRAGVYLKPCLVEVAHAAVKDKSHPYYANKFNKISKC

SEQ ID NO: 202276 - protein, 334 aa, unidentified
MALNTLAIDVGKNSFHVFGIDKDGVIVSRKVSRAKLAATVERLDPKIVAMEACGSAHHWGRLFQAAGRAVRLINAYFVKPFVRGSKNDATDAQAIFEAASRPTMRFVPVKSLECQDLQSLHRIRDRLVHNRTSLINHTRGLLAEHGVVLPQGAKRFTVQVGEAVAEAALSDLARELFLDLLDQLGDVDRRIARVDTRLVAICRENAACQRLVGMPGIGPVVATALVAAVDDGRHFRSGRDLAAWIGLVPRQYTTGGKPKLGGIGRRANHYLRRQIVHGARAVMSQAGRRSDPRAEWMKGVAARRGFNRAVIAVANKMARAAWAMLVREETYAPA

SEQ ID NO: 202277 - protein, 317 aa, unidentified
MALQRSFVGIDVSKEWLDLWLAPLKRFERAGNDGAGWAAVIGLLKSLGIEAGVVVAFEATGGYEQGLRRALLEAGFDVRRLNPLRVRLYAKSLGRNAKNDRIDARVIARYAEAADTTPDILDPARKRLAELVSHRRRLVDERVAVGNQTSTLHCVLLQAQNRKRLALIERQIDETDALILEAVGQVPSLVAKVGLLKTLKGVKDVTAIALVALLPELGRITRRAIAALVGLAPFDHDSGKFKGTRSIAGGRAAVRTALYMAARAAARSKSPLGDFYQRLIAAGKSPKVATVALMRKMLVTLNAMIRDNEAWKHAKPC

SEQ ID NO: 202278 - protein, 442 aa, unidentified
MDEHGEVVELEQDVEQVGRVAAIDIAKASAMVCTRLPREGSGSGRKVRRTWPVGATTSAIAELADHLVCQSVELVVMEATSDYWRPFFYLLEARGLKVWLVNARDVKNVPGRPKTDKLDAIWLAKLAERGMLRPSFVPPAPVRHLRDLTRLRKTLVEDRARYRQRVEKTLEDACIKLSDKDNGASDLFGASGRAMLDALCAGQRNPRVLAELARGRMRVKIPFLIEALTGRFEEHHALVIGLLLEDHDRLSAQIEVLTARIEQAIAALEPPPPGDERPGRMPLIDRLDEIPGVGRDTAQMIIAEIGTDMTVFPTPGHLASWAKLVPRTIQSGNKHAHGTTGKGNRWLKGPLAEAAVSAGATKTFLGARYRRIIKRAPKKKAVVAIARNILEIAWILINDPDTRFNDLGPDWHERYIARARKTRQHVRELEHLGYNVTLAPAA

SEQ ID NO: 202279 - protein, 418 aa, unidentified
MNAEGNTRGTRRYVALDIHKHYCVIAAVDREGRIMLPAVRVEHADLESWLKKNLRASDHVVFESTTNAWHVYDLLSPVVERVVVANPIKVKQIATARVKTDVRDTLILARLLAANLVPDVWVPPAHVREMRQLLSQRRQLVETHTQIVNRMHSVAHRHHLKHERGKRFNAKNTLWQKDKGLSKTEQFQLELEMDNRAYTEKQIGRIGKEVAKMSHQKPWAESMTYLMQLPGFGVITAMTVLAAIGEIQRFGSAKHLASYSGLTGGVDQSGTHLVQKGITKEGRKELRWAMVEVAQRAVKSDPVWKHRFQEMQKRMHRNQAIVAVARRLLELVWYVLTRRQPYRHFSQERIAYKYLTWAWQMNDEARDGLTRQQFARYYLMRLGIGHDLTRVALNPEYPRKLASEAELLAIRPELNHIE

SEQ ID NO: 202280 - protein, 339 aa, unidentified
MKLYGAIDLHSNNNVTVLIDEQDKVVYEKRLPNDLGVIAQQLAAYQSSLEGIVVESTYNWYWLVDGLMDKGHQIHLANTAAIQQYEGLKYTDDHSDARWLAHILRLGVLPQGYIYPKEERAVRDLLRKRGQMVRQRTANLLSIQNLITRNTGSSISSNRIKTLDSETVDALLPNQDLALAVKANLAMIQCADGQIDILERTVTDRVKLRAEFSFLKTVPGIGQILALTIMLETGEIQRFSTVGDYASYCRCVGSQKLSNGKKKGSGNTKNGNKYLAWAFVEAANFAIRYNARIKSFYQRKKAKSHGVLAIKAVAHKLCRACYYIVKNRVAFDIAKAFAG

SEQ ID NO: 202281 - protein, 342 aa, unidentified
MFYIGADVSEKSSYIYVTDRGGKKIEGLEIPTDKDGYRQYFKKWVGKQVKVAVEAGGHSRWIHDTLKKLGISVYIVNPNKVKLIAKNKKKTDKVDAEFLAKLLRIDELPERVYVAEGQSRELRDLLGSRHQLVTSTTCIMNHLRGMLRQEGVKLKAKAFNDESTFSRLLTNKSVPKHLHPIITSYETIIDGLRKQRRALDDVIAEYGNKDIELLQSVPGIGEVASKTTYAAISTIKRFKRAKQLTSYCGLVPSVFSSGERANYGHITREGRSEVRHVAVQSVWAILRSTNSESKPLRKWYERLARRRGPKTAVVALARKLIEIIFYVLRDQRPYNAQLLHVH

SEQ ID NO: 202282 - protein, 371 aa, unidentified
MSKSSTVFVGIDVHKDSIDIAVAEGGSRGEARHWGVVGGDMASLDKAVRKLVSLGRPLHFVYEAGPCGYWIHRHLTAKGFQCEVVAPSCTPKKPGERIKTDRRDGLKLARLARAGELTAVYVPDQRDEAMRDLMRAREDAVYAQRRARQQLQALLLRNEIRYAGRTPWTPGHVRWLARLKLPEPQQQIAFQEYLEAVSEATARVARFEAAIAAQVAHWRVYPLVLALQALRGFRLIQSATIATEIAGIERFERARQLMGYLGLVPSEYSSADSRTQGRITKTGNGHARKALIEAAWHYRLPARVTPTIARRQSGVPKTIRDIAWKAQVRLCGRWRKLAARRLPQNKIVTAIARELAGFVWAIARELDLGRR

SEQ ID NO: 202283 - protein, 346 aa, unidentified
MTIVEDRRVITGGVDTHAGTHVAAALDPIGGLLGVREFPVTPAGYARLLGWLGGFGAVALVGIEGTGSYGAGLARHVTAAGIRVVEVDRSDRQDRRRQGKSDPLDAVSAARAAQSGRARGTPKGGDGAVEAIRALTVARRSARSGRTQAVNQARALIVTGPDDLRARFAGHTTAALVSGLASLRPRPGGTVGYATRIALRELGRRAEFPDGQIGRLDELIVPLVTARAPGLLALHGVGPDTAALLLIAAGDHPERLRSEAAWAHLCAVAPIPASSGKVTRRRLNPGGDRQANHALWRIVITRMSSHAPTRAYVERRTAGGLSKKEIIRCLKRYVAREVYRHLRPAA

SEQ ID NO: 202284 - protein, 383 aa, unidentified
MSSNSVDQENIITIAIELSCSTWLIAARLPGVEKPHFHKIDAGNTAALLSHLSSLQSRVLDRSGVTPSLSCCFEAGRDGFWLHRFLFAHGIDNHVLEPTSILVNRRARRAKTDRLDAQGMLRVLAAYLQGDRHICSMVRVPTPQEEDAKRIHRERGHLVQERLRIENRIEALLFTQGIHKRPSLRSWERDLAAMRTGDGRELARHLRAELNRLRRRLVIALELIREVEAERDEAASADPQNLTCRKIGALCCIRGIGANFAAVLTREVFYRSFNNRRQLASYVGITPMPHQSGGMDRDRRISRAGNPRARTTMIQLAWLWLRYQPESDLAKWFRDRVGDRTGRTRRIAIVAMARKLLIALWRYCEDGVAPAGVEFRVEVTATS

SEQ ID NO: 202285 - protein, 456 aa, unidentified
MAKTRKAKMIKSPDGNKLAIVNPDAAGIDIADTEMQVCVPEDRDGENNRRFGSFTCDLNMIVDWLKACHITTVAMEATGIYYLQLFLKLQDAGIEVLLANPRDVKNLSGHKTDSADAEWLMLLHRYGLLKPCYQPGNAARQIRNLSRQRNNLIRSADKQIQYMQKAMEQMNIKLSTVITDITGLSGRTIITAILQGKRDPVELASLAQSNCKASREDIAKSLEGTWDVDLLFMLQQSLDAYDFFISQTEECDKQLEVLLAAYQARMDTNADMLVRHDRRKGARSKNAPDIDVEKYAYAIWGVNVFDIPGLKDLAVMQLIGELGHDFIDKFESAEKFCRWCNLTPENKISGGKILSSRVQKRKNPVGQIFRKAAAPMAREKSEMGNYYRRIRAKSGALQANVATAHKIAKIFYAMVKTKEKYNPAKVGIDEREIMERKIVRLERTLEKLNQKYKQAS

SEQ ID NO: 202286 - protein, 409 aa, unidentified
MQDQPGALHVGVDLALEKNVVIVINEKAQRLDHFSFPQERGGYDYFLQRLEGLRQKHQASEVVVAMEPSNYFWKLLARELEEKRIPYRLVNAYTVKKHREGNRLDRSKDDQRDAGQIAELSRNGHYTQTRLQKGVYEELRQYATLYDQLMQAIVREKNVLWGLVGQVFPELFQVFKDLSKETAEALLGSCVPAANIRKLSLESFIALVRASYSGKKLCVAKLRRVHQLAATSIGVTEGLLAIQQAIQVHLAELQTFQEQLKRVISAMAACLAPMPETPYLLSMKSLNTVSAALFLAEVGDPYRYHSSAQWVKLAGIQPAPNNSGKKQRSQTPMSHQGRPRLRTMLYYSCLRLVHQDQHFAQLYTQLQRRPNNPLTKMQALGVLMNKLLRILWALIHNQTFYNPSFNQSI

SEQ ID NO: 202287 - protein, 316 aa, unidentified
MYIGIDVSKEKLDVASDDGSLEARFSNDEQGHLELLKRLREQSPTLVVLEATGNYQLEVSIALAAAKLPVAVVNPRQVRDFAKALELLAKTDAVDAKVIARCGATVKSAAQSLSDAETLELEAMMTRRHQLVTMIASEKNRLQALFGPAKGSWAEKSIRDHLSHLIKQLSQLDKGLQKRLEKSPIWKAKDDLLKSVPGIGKVTSFTLAIDLPELGTLDRKQIAALAGLAPFNRDSGISTGKRRIWGGRASVRTALYMACVASLRCNPIIQALYARLTKHVRKPVKVALVACMRKLLTILNAMVRHQKNWNPALAGS

SEQ ID NO: 202288 - protein, 420 aa, unidentified
MPRLATDVAGQTVQPAKPSMQENQQHSSVDVFVGVDVGKDHHHAVALDRRGKRLYNKALPNDEAELRALITELKTHGRLLFVVDQPATIGALPVAVARDEGVLVAYLPGLAMRRIADLHAGEAKTDARDAAIIAEAARSMPHTLRSLRLADEPLAELTMLCGFDDDLAAQITQTSNRIRGLLTQIHPALERVLGPRLDHPAVLDLLEQYPSPAELASASEKTLANRLNKLAPRMGKSLASDIVQALSEQAVIVPGTQAATIVMPRLAQQLASLRKQREEVASEVERLVHAHPLWPVLTSMPGVGVRTAARLLTEVAHKAFASAAHLAAYAGLAPVTRRSGSSIRGEHPSRRGNKVLKRALFLSAFAALRDPISRDYYARKVQQGKRHNQALIALARRRCDVLFAMLRDGTLYQPKSAPTA

SEQ ID NO: 202289 - protein, 258 aa, unidentified
MYTLGIDAHERESQVAVLDEDGEIVREVRVQNANLDDFGQEYAGADPAIEATGNYYTIYDTLDEHLDVTVADRNQTKAIRIAEIKNNRLNAKLLAQLRRAEMIADSYVPPDEICKRRSLVRASKRLVEKRTEFKNEVHTLLNKHRISLDKNVFSAKGREVLAGEDFALDRVSETFLKSYLSIIDELTAQIEAIKDMIEEFAASPLETQLLMTIRGISFYSSLWITAEIGEIDRFNEAGGVVSYAGLDPIVRESWEFAD

SEQ ID NO: 202290 - protein, 348 aa, unidentified
MSKSSQYVGLDVSLKETSICIIDDAGKIVWRGRVDSTPEAIATAVKQHAPNAVRIGLESGQLSSWLFHELKEAGFPVICVDARHAKAALSLKVNKTDANDAFGLAQIMRVGWYREVTVKGLDCQAVRALLVARAQIVSQITTLKNCVRGILKTFGRVLPKGLRSQFPGRVRAAIDGHPVLGAIIEPTLRVLEAMRAQLLVYDRAVIQRARSDDTARQLMSAPGVGTVVALAYTTGVEDPARFKRSSSVAAYFGMTPRRYQSGEVDHAGRISKCGDGMVRGLLFEAAKVLLSRSARPSAPKTWGEALGKRVGAKKATMAVARKLAVILHRMWTTGKTFQWNAEAASPAA

SEQ ID NO: 202291 - protein, 341 aa, unidentified
MTPVYLGIDIAKASFSVARWQNNQGESLDEFANTHAGFLQLVATVTQAAGVHPGDPIHVALEPTGGYELALALFLHEQGWQVSRPNPKRVRDFAKGLGRRAKTDRLDALVLAQYAAERKPSAWAPLQSEVSELESLLSRQRELEQMLGQEKRRLEALSGRPGVAAGVPETIERMIESLQATLTQVEEAIRAHLKQYANLQQEAKRLRQVPGIGERNGLALLVLMHRWHTLTGGRGEAKGLVAFVGLDPQTHESGTSVRGRGTISRMGDRRLRPRLYMGALGGVRGDNALRVFYQRLVGRGNRKKVALVAAARKIVVWAWAVFRDQSDFQSPYGAAGAAATA

SEQ ID NO: 202292 - protein, 436 aa, unidentified
MIDRILAGYGAIDIGQEKIFVACSGEEAVRSFGTFSAELELAAEYLVQRGIGRVAMEATGVYWIPLHDLLEKKGLTVTVFNGAHARNLPGRKTDVQDCQWHAMLHSHGLLTGCFIPPEEIRQLRCYYRLREDHLGIATEHIQHLQRALDLMNVRLHLVISQIHGVSGLRVIKAILAGQRDPVALSELCDAQILKHKRAEVIKSLQGHWQEHHLFALRQALESYEFCLRQMAACDQQIEALLQQITQDQPPQSPEPGRKLKVVRHNVPQIEDLHGLLITMSGGRDATHLPGISPLGFMKLVGEIGIDLSKWKTHKHFTSWLGLSPGNSQSGKRRKRLRRKKTVAGQIFREAVLSLAKSKHLALGAAYRRLRAKKGAPIAIVAIARKLAILYYNLFTKGLDYVEEGVKRYEEKYRQQTLRYLEKTAKAFGLALTPTTA

SEQ ID NO: 202293 - protein, 411 aa, unidentified
MEPLYRWVAGIDVHKKMLAVVVRAPQGEYVQRKFGTTKTEIGHLAAWLQDHQVNEVVMESTAQYWRPVWYGLEAHFKLHLTHPLKTRAPRGRKADFRDARRLADRWHSGDLEDSFIPGAEQRSWRWLTRSRVHLKRMLGVIRNQVEGLLEQGGIKLSAVASDIFGVSGWAILERIAAGESDADKLVDEARGVLKRKKSKLREALQGKLDPIYRLLLKQHLAQAQLLCQQVEELNQALADALKEHVAVLCRLTKVPGINLYAAQELVAEIGPGAVAFPSAEQFASWVGVCPGSQETAGVNYSRRSAKGNRYLRRLLCQNAWGAIHTKNTFFAGLFARLKPKIKAKGAAWAVAHRIAKLVWLMLHEGVEYVEKGTAPLNPRTLVRKFRRLLREFDRHGIDAKSLLEQELVATS

SEQ ID NO: 202294 - protein, 343 aa, unidentified
MKLSRVGVDLAKNVYQLHGVDRHGKTVWKRRLRRGQWLRGLMDKAEPGCVIGMEACTGAHHWARELQSRGYTVRLIAPQFVKPYIKSNKNDANDAEAICEAMSRPTMRFVTVKSVEQQDIQATHRVRTELKEQRVAKANQIRGLVAEYGLVAPQTLLALRRAIPCWLEDADNGLTDHFRSLLHGLWGDLVALDDRMTELDKQIKALADNNEVTRRLQQLRGVGPLVATALVATVGTGEQYRKGRQMAAALGLTPRQCSSGDKQRLLGISKRGDVYLRTMLIHGARAVVSQAKHRDDRLSRWVTSIAKRSHANVAAVALANKTARMAWAMLRNDSNYDPDFVNS

SEQ ID NO: 202295 - protein, 403 aa, unidentified
MLFVGDDWAEDHHDVYLMDDAGTRVAARRLPEGVASIAALHELIAAHAEEPGDVVVGIETDRGLWVNALSAAGYQVFAINPMAVARYRDRHRVSGAKSDAADAKLLADLVRTDRHNHRPLDGDSPEAEAVKVLARAHQSLIWARARHIRMLRSALREYYPAALQAFDDLGGRDALAVLGRAPTPAQGARLSVSKIGTALKAAGRQRSIESRAQQIQAILRAEQLSAPEAVAAAFGATTRATVNIVIELNEQIRDLETTLANHFEKHPDADIYRSLPGLGVILGARVLGEFGDDPNRYTNAKSRKNYAGTSPLTIASGKKKAVLARHVRNSRLYDAVDRWAFATLLSSPGARAYYDQHRAAGDTHHQALRALGNRLVGILHGCLRHRTLYNEHTAWAHRITTAA

SEQ ID NO: 202296 - protein, 315 aa, unidentified
MTKPVIGIDVGKAKLDVGVHGDKKVRQWRNDEPGRAELRTWVLQQEASLVVVEASGGYEAAVVSELVSSGQAVALVNPTRVRAFARAEGVLAKTDKIDAQVIARFGATMKPEARARRTEAQAQLNELITRRRQLVEMLTAEKNRRQTASPAMRRHIASHLAWLQDQIDELEHQISQAIEANPGWAETAQRVDSVPGIGPITAATLVADLPELGQLNRQKIAALVGVAPFNHDSGQHRGKRRIFGGRTSVRSVLYMATLSAIRHNPVIKVFYQRLLKAGKLKKVALTACMRKLLVILNTMVKTGQDWHSPSPSPVI

SEQ ID NO: 202297 - protein, 382 aa, unidentified
MNRILKIGMDVHSTSYTLCAMEPVLGGEDRIFANIQVTSDYRNVIQFIDKLKEKLGSSDSYSIECGYEAGCLGYSLYHQLTKAGVKCTILAPTTMLTQQGKRVKTDKRDAVMIAQCLSYGGYHAVHVPADKDVSVKEYLRMRDDHKVALKKIKQQINAFCLRQGYFYAGNKWTIKHLNWLKKLVLSDLYRETLNEYLTSYEEQIAKIERFDKRIEELAEDSDYQENVKKLGCLLGIKTHTALSLIVETGDFKRFRKGNTYAAFLGLAPGESSSGEKINRTGITKAGNSHLRTLLIEAARGMCRGRIGYKSKVLRSRQDGNPTEVIAYADRGNTRMRSKYYRMIRHGKKDNVAVAAVARELACFIWGLMTNNITSKEEGTKAA

SEQ ID NO: 202298 - protein, 363 aa, unidentified
MARPSTRQRKLAGQPEGRRLSVDVAVLGIDLGKNICSVVGLDAGGRVVLRRRLHRDGVVKLAAGLTKCVMAMEACCGAHHLGRRLREQGHQVRLMSPEYVRPYVKAQKNDDRDAEAIAEAATRPTMRFVEVKSEEQLDMQSLHRARDRLVGERTALINQLRAFLLERGIIVPQGRRKLELHLETLLAAEQVSLSPRTRLLVEDQRAEWRELDRRISAFDEEFGLQARTDATARLLTTIPGIGPLNATALAAAVGNAQTFGHGRDLAAWLGLVPKQMTTGGKPKLLGISKRGNVYLRKMLIHGARAALPTLSKKETPLGGWLRSLLARAHVNTVIVALAAKLARIIYAVLRSGQVFEMKVATAS

SEQ ID NO: 202299 - protein, 341 aa, unidentified
MSDYSYFCGIDLAKNHFSLHAVDQNGKVILHKSVTRSKLLTTIANMPLMRIGVEACGGAHYWARTLNKLGHDARIMAVKYVIPYRTKGKNDLNDAVAICEAVQRPSTRFVPVKSPEQQAILSVHRMREHWVRERTALMNRMRALLSEFGLIIPVGRSSLMKHVPLMLEDAESELPHLARTVIADAYHHLGELNQRIADTEQVFDSFAKVSANVQRVMKVRGIGPQTATAILASIGNGSQFDKIRDFSAWLGLVPKQYSTGGKPRLGRITKHGDKYLRTLLVHGARTVITNLGDKQDKLSQWCRGVLERRGMNRAIVALAAKNARIIWSLLHNQTEYENYAA

SEQ ID NO: 202300 - protein, 353 aa, unidentified
MKWDKYIGMDVHQATTVVVVLDAEGKLVWETIVATETGAMIRLIQSLSGPLHVTFEETTQAAWLHEVIRHFVTEVVVCDPRRNKLLTEGSKADKPDARKLAELLRAGLLRPVYHGHNGMRKLKELVRVYETLSQDTERTMVRIKAIYRGRGIRTPGRVVYQPKQREGWLEQLTQPGARQRAEFLYEELDALRPLRRKAKQAMLIESRAYQAVTLLRTIPQLGPVRAAMIAATVDTPYRFRTKRQLWSYSGLGVVIHTSAEYEMEAGRVVRRRKPVATRGLNHNCNRRLKEIFTSAAAGGSQTEPYRSYLEELKQKGMRAEMARLTLARRIAAIALSIWKKGESFDPKKLNWTT

SEQ ID NO: 202301 - protein, 466 aa, unidentified
MKPFYMGIDVSKGYADFMIINAKKKPVIRSFQLDDTFEGHQTLYSIIGRFLSKHPDSMLFCGMESTGGYENNWYNSMVAFQSSLDIQTARLNPLGVKHNSKADLKKNTTDKISAQNIAEYLVAHPEKVIYQQQDRLAGLRKQWGFIQTLTKQCTQFLNQFKGLLYTSNPELLSYCQSETPAWILKLVIKYPSAARLKRANVKSVAKIPFVSKEKAQQLVSDAKRSVASATDRATQQLIVATAQQIIHLNQTINVQTQRMIKACKLPEVELLKTFAGISDKSAIGLIIEIQTVERFAAVKKLASFFGVHPVYKISGDGVGGVKMSKQGRKRPRHILYMIALAAIKCNPLIKQIYEEHQKNGKHNMAAMGVCMHKILRIIYGMLKHQKPFDPQIDMANRQRSLRTRKAGPGKNASRRFQAYDIGAPISRRQKKKRLEQDGSHSVNGTKSGITAPVPVADIIANILPEL

SEQ ID NO: 202302 - protein, 341 aa, unidentified
MSEVSTIGLDLAKHVFQVHGADASGKVVFRKRLRREKVLEFFAGKPACVVAMEACSSAHHWARELTRLGHIVRLIPPAYVKPFVKRQKNDAADAEAICEAAQRPTMRFVAVKSETAQANAVVFRARDLLVRQRTQAINALRGHLGEYGLVVAKGPGHVIKLVEHVEDPDSNVPDAARLVLRTLVEALRFLRERIDLLDREIARRARENNEVRRLMSIPGVGPITATALAALAPPADAFRKGRDFAAWVGLTPSQHSTGGKQKPGTTSKMGERTLRRLLIIGASSVVRKALRQGTAAGSWLGRMLARKPRMLVIVALANKMARIAWAVQAKGEVYRAPVVAA

SEQ ID NO: 202303 - protein, 344 aa, unidentified
MDHYAGIDVSLECSSVCVVDASGKVVREAKVVSEPEALIGWFGSLGFELARIGLEAGPLSQWLYAAMKQAGLAVELLETRHVSDAFKAMPVKSDRNDARKIAQLMRLGWFRPVHCKSITAQEIRAMLTARKLVQSKLLDLENSLRGILRGFGLKVGKTTRTNFAGRIEELVKGHPNLQTIGQALLRARAVLLAEFNGFEKRVRAMSRLHDKARLLMSTPAVGPIVSLTFACAIDDPSRFTSSKQAGPHFGLTPKKYQSGETDYTGRISKHGDASVREALYEAAHIMLTKPIKRCSGLKSWAMRIARRAGTNKAKVALARKLAVIMLRMLKDNVPFNPAAKPATA

SEQ ID NO: 202304 - protein, 449 aa, unidentified
MSNYAGVDWAADKHDVLVADDAGEELLAATFAHDEKGLRALCRALVRLKVKLVAIERPDGLLVERLLDAGLRVLALHPNQVAATRARFRVSGGKSDRFDAFVLCELARTDSHRFRVLEPDGDETKALRALTRAREDLVHARVALTNQLRAELERFWPGPIGLFSDLHSQISLAFLERYPSPGDVRGLGEQRLAAFLARQHYPGGQKPAQLLAKLRRAPEGRVGEAELAARRALVLALVAALQPLVAQIKQLNEQIATALREHPDGEIFTSLFRDPRSVVTAAELLAEIGDCRNRYPTRDALAADAGQAAVAVESGKRKTAAFRWGCNKRLRGAFCTLADSTRHWHPWAADRYAAARARGHDHPRALRTLGRAWCRVVWRCWQDRTPYDPARHRALQQHCAVTIPTSSGSLPDLAATQRMLGAAVTEPAARRAEREALDGKPTSAIKLGG

SEQ ID NO: 202305 - protein, 359 aa, unidentified
MTFVGLDLHKRYLTVCALDADGALLGEVRRMPVTMEALTTFFATVPAPIACAVEATLSWAWLHDQLVRAGHTVHVVHAYQAKLIWQARSKTDPIDARKLAELLRVNLLPTIWVPDTETRERRQLLRGRAFLVRQRTAVKNRIHGHLSAENHVCAVTDAYGRAGRAWLATVPLSPMLRVQVDHLLRVHDFLTTEIRELDTQVKRYAHREPRVAQLATIPGVGTFGALFLLSEIGTITRFRSSQELAAYAGLVPTTRSSGGKTAHGGVGRASNRWLKWILVEIVQTLKLAPGPVGSHYRNLLRAKGKPKATVAAARKLCSYLFWMLKEGWSYEQWLQQHMQDHTQLHQSEVRPGQRMGAVA

SEQ ID NO: 202306 - protein, 337 aa, unidentified
MIIIGCDFHPSFQLIAMLDTKTGATEEHKLMQTSGEAESFYRKLASPAVVGIETVGNDQWFVQLLQKLGHEVRVGDAAQIRASYVRKQKTDRRDAKHILQLLVEGRFPRIWIPDAGMRDHRQLLIHRHKLVQIRTRVKNELQHLMLNQGMQKKQKLWSTEGRAALASLPLEPWTDRRRKDLLNLLAMLDAQLESLDDAVTRVAKEYPGVPLLMSQPGVGAVTALAFVLTLGDVHRFPRGKQVASYLGLVPREHSSGGKQRMGGISKQGNRLLRFLLVEAANIAVRFDPELRKEYLHRCHQKHFTVAKVATARKLAVRMYWMLRTQTPYPQVLSSRVA

SEQ ID NO: 202307 - protein, 453 aa, unidentified
MEQPQEIEDEEYERTWERVAAVDVAKGSGVVCTRVPEQDRQGRRKTHVWTVQATKRAVIELADHLRGLQVQVVTLESTSDYWRIWWAVLEAAGLKVQLVNARHVKNVPGRAKTDKKDAVWLAKLTERGLLQPSFVPPPEIRRLREFTRLRADLVHERTRHWSRLEKLLERAQIKISAVLSKLTTGTARAMIEALIDGQRNPKVLAELAIGKARSKRAELAEALDGDWQPHHGELARILLDQIDALTAQIGTLTDRVRELIDQIPAAWGADAGGVTGPQAGAGPDAVIMPAVTRLDEITGCGLIAAQAIIAEIGLDMTVFGTPGRLVSWAKRCPQTRQSGKKTTGGKAGKGNPYLNAMLGEIAASASRTDTFLGERYRRLARRRGKRKALAAIARSILVIIFHLLADRTARFADLGPDWYDRHIDKQRKTRNLIRQLEALGLSVTLTPAETPAA

SEQ ID NO: 202308 - protein, 379 aa, unidentified
MNGEIFKVCDEMDALANPASANCAKQVYLKTGYMEGVHMKKHSLISIDLAKMVFQVCLLENNKVKKNKTLRRSELLPYIAVQKPTKIYMEACYSSHYWAREFEALGHNVFLIPAQHVKPFVRGNKNDRNDALAIAEASQRPGINFVPIKTVEQQDVQMLHRIRDRKVAQRTGLINQTRGILSEYGVIAPQKLKAFGQLLSRCTDEKLNQVTPMLREQLWGIREEYEFLCDRIDDLNDKLRKLAQANPLTRRLMTIPGIGYTIATALVSAVGKGEQFNNARQMSVWLGVTPSQYASGTTNKLGHITKRGSRYLRKQVIHGARAAMYVCKNNDDQMIAWARDLAKRRSPNKAVVALASRMTRLAWTLLQNEQDYRPNPTMS

SEQ ID NO: 202309 - protein, 343 aa, unidentified
MEQYVGLDVSQEQTSVCVVDGGGKVIWEGKCTSTPEAIAATLRTRAPEAVRIGLESGPLSAWHWHELRKLDLPVVCLDARHAKAALALQLNKSDRNDARGLAQIVRTGWYREVAVKSVDNHLVRSLLTTRAQLVRMRVDLANQIRGVLKPFGLIAGKGGGRPFAERVRALVAGGPLQEVAGALLAAWQAIGEQIAVLGRRLVAVARQDEAVRRLMTAPGVGVLVALAYVSVVDAPERFAKSSSVGAYIGLTPRRYQSGEADYTGHISRCGDKLLRTYLYEAAGIILHRVPRWSALKAWGTRLARRIGTRKATVAVARTLSVILHRMLRDGSEFRWSAKEVHAA

SEQ ID NO: 202310 - protein, 326 aa, unidentified
MAKRITICAGIDTGKSKLDVALDGSSEHLQVENTAQGHKVLLAWLRRHKVKRVGIEASGGYEQPVVAELRRQRFVVVVFQPAQVRAYAKFHLQRAKNDKIDAALIAACTAAVKVEKIHPAPDPRLSPFAERLTMIDQIGEDVARLKNRLETCRNPRLRTLWKEDISRLSKRKRTELKAVVAAIRRHPDLAARLDLIESVSGAGLPTAVAILVRMPEIGQLPREQAAALAGLAPYDDDSGDQVGVRHIEGGRERLRRALYAAALAASFRWNPQLIALYKRLIAAGKGHKRALIACARKLLIFINTVVARGTPWQDKPPVVAASPSAV

SEQ ID NO: 202311 - protein, 409 aa, unidentified
MLKIVYPNCCGIDVHKTFVVAVIAITNNQGITEYHRKRFSTFTNGLTQLRDWLEYYSCFDVCMESTGKYWIPGFNILEEQTNVCLAHPKYVKAIRGKKTDKKDAQWIADLFKHDLVASSFIPQLKIRQLRDLFRYRMKLTQLQVGEKNRYQNCLTWSNLQIASVVSDVFGKSAQAIIKSILDNPQDKPSIEQLVHKRMKNKVQDFEIAMEGALTPEQAEKIRVIKAHYDALAICKEDLEQMIRELGQDYQHQVKLIQTVPGFKEDLSALRIISEIDCDMTVFDSAAKLCSWAGLVPANNESAGKKFSTRISKGGKYLKPFLVQVANAVVKSDKHPELRNKYLKLKKRRGHRKAIIAICRRLLVSVYQVLRKKEDYNPVLQGLTQIRNPDKTMSVQDAVRFAQQHGFNVA

SEQ ID NO: 202312 - protein, 444 aa, unidentified
MTSNIIRFVGLDVHKRVVEACLVDAAGKVVRRERFALNRQVLQRFATRILRPTDRVALEATTNCWAVADALRPHVAGVLVSNPMATKAIAQAKVKTDKVDAYVLAQLLRCDFLPEVWQPDEATRRLRELTGRRSTLVGQRTAMRNRIHSVLAMRLVDAPLRLFTPAGLKWLAGVEVDPQGRRLIDSDLRQLDFLQGEIDAIDEELARRGHDSDAVKLLMTLPGVDVATSEAMVAAWGDPRRFPDGDHAASYLGLVPSTKQSATQCYHGPITKRGNSQARWMLIQAAQHLDKHPGPLGHFFRRLARKKNRNVAVVACARKLAAIGWQMLVTGEPYRYAVPRSTEAKLSRLRVKATGKRRKSGPPKGTKAMAKLPGGSRTIRALAEVCHSEGLPQPRPLSAGERRTVEQTDSQTLVARIATAQVVPRSTGAGKVNQGANDVAKRSS

SEQ ID NO: 202313 - protein, 427 aa, unidentified
MSVTQNEKIRQVTDTTMVIGVDIASEFHWARAFDWRGLELGKAVKFENSAEGFNFFLRWVSELTVEQKKDSVMVGLEPTGHYWFTLAAHLQGGDFKLVLVNPYHVKRSKELDDGHPSKSDKKDPKTIAKLVLEGRYVYPYIPQGLYAELRVAMNCRWRIRKELASIQNQIQRWLKIYFPEHSKVFGRFTGAGSMALLHSAPFPSDLISLGVEGISGIWKQMKLRGIGRKRAQRIYEAAQTSVGCTTGMEAARMELQILLEDYDAKLQQYERVMQVVENLCSQIPAVAELLKIQGLGLVTVAGLFAEIGDIRRFESPRQIQKLAGLAITENSSGKHKGPTEISRRGRSRLRAILFRAAIPLLAKNREFQLLHRYYTTRQNNPLQKIQSVIAICCKLLRVFYALATKDCAYSPEKMLADIQRNQPLKAA

SEQ ID NO: 202314 - protein, 404 aa, unidentified
MINEHGKPLADREFLAVGSGYRKIIDFITSYGTVVAVGVEGTGSYGAELARTLRGEGLTVLEVNRPNRAARRLKGKSDPLDAYQAAKSVLEGRTKAIPKAKDGPVECLRIVRSGRASAIKARTAAINQIKALLVSAPDKIRAKYRALATSALIPALQRTRPSGHMADPEYVTLLTLKALAARCQALGTEIAAADAALKEILDGYAPMLCDLPGVGTEVASQLLITVGDNPDRLGNEAQFASLVGVAPVPASSGKTTRHRLSRGGDRSANNALHQVVLVRMGSCQRTKEYVAKRTSEGKSKREIMRCLKRYAAREIYRQITNPRPAPDNSDLRRRRTDLGMTLTTVAGELGQWVSIISRLERGHIRNDALAGAYRKWLIDQAEMPRRTPPTTAAARTNALPGAVS

SEQ ID NO: 202315 - protein, 351 aa, unidentified
MPRKSSVCTVTAIGIDMGKTTLHMVGLDSYGAIVLREKVSRGRIASRFANLPPCLIGIEAGMATHYVARELAALGHDVKQVPPAYAKPFRQGHKNDFRDALAVAEAVQRPTTRFVPPKSNEQLDLQALHRVRSRLVSQRTAVINQIRGFLLERGIIVRQGLRFLRQLLPDILAKRTDVLSPRMVRIVSDLAGDWRQLDDRIEIVTDEIETLAKADDSCRRVMTVPGIGPIISSAMVAAIGNGSAFSRGRDYSAWLGLVPKQMSTGDRTILGRISKRGNSYLRMLFIQAARVILLRPANWPKHGFGAWLVRAIQRLHPNVLAAALANKLARIAWTVLAQERSYEARVTKAEA

SEQ ID NO: 202316 - protein, 345 aa, unidentified
MEKVYHIGIDLHKKFSVIVFVDAAGKVIDRKRVINDKGFIAESLSGVSRDSCITYEATYNWYWLYDFLIELGFKVKMAHPKKVRIIAESTIKTDNIDAEVLAQLERTNFLPESYVPPKEIREVKELLRYRLSLVNHRRELKNRIHAVLGKCGIISELTDLFGKSGREFLDRITLAQIFRTEIDGYLSIIDSINERIAESEKRIKKMATENKEAQILMTAPGISYFSSMLLLSEIGTIDRFPAAKKLFAYAGVVSSTKESADKVRHGHIIRDSNKYIRWILIEAIDWAIKKDERLAKFYRKISVKRGKQIARIATARKLLESIYYMLKNKQEYIYKSSSKLCIDKY

SEQ ID NO: 202317 - protein, 399 aa, unidentified
MLAVGIDISKSKSVAAILNQDGSMHTSPFEFHHTQPELDAFIKYILNSNQSATILMENTGHYHYPVLKAFREAGLPVCMVNAYQIKKFGDMDLRKAKTDKKDAVRIARYALEKSYSLVPYTSMEQKYEDLRFLARQYNQRMLTLKTNKVFLLNLLDETMPGITNILPLTTRTPETSLSVLFINRFKSYDRIKKMGKSRFLDAFEKIARKSRNRQTKTYGLAIYEAALRNITTRGENEYTLAAQDQCLELVCESQKAADSIILKMKTLAETLPEYAVLRSMAGVGNRLGPLILAEIGDIRRFHSGKALNAYAGNDAPPYQSGTFESHNRHISKRGNAALRKYCFEVMQALKLTRPQNDPVYLFLLKKEQEGKPYNVAKMAGVNKFLRIYYARAMETLKQQ

SEQ ID NO: 202318 - protein, 342 aa, unidentified
MEHTTIAVDLAKSVFQVAVSHRAGRVDAERRLSRDRFLAYFAQQPPATVLLEACGSSHHWARQLEQFGHVVRLLPAHDVHRYVRRNKTDRTDAKALLEAARNEEIHPVPVKTVEHHAITSLHRLRSTWVATRTARLNTLRGLLREFGIFIPVGAQHVVPRVRELLGHPTGALPVAVRSTLANACAEIDVLETNRRDVERQLAAIARQLPDVALLQTVPGVGLMTATALIAFVGDIGRFGSGRHFASFLGLTPKEDASASRRRLGAISKQGDVYLRMLLIHGARAVLWRAKKTAAPDRLRAWALQLERHHGHNKAAVALANKLARIAWAVWREGRDFTAAPAA

SEQ ID NO: 202319 - protein, 504 aa, unidentified
MAPPEDIQRLRDLTRLQQALRHDRTRWAQRLHAILLHEGWPCSRSQLLTPNGRRWLEALALDRHVRRIVDAHREMINVSGQQIAAIDRELRQLARNDARLLALQTIYGVGPVRPRRRARRSRDRVGRKPPPRQALQAGSPHLRWISWMGPPTAAIGSRPRQVRIDEGGPEEMVDAAIDIHTRVFQAAVLDAESGQLAQERLPATREALDDWATRSAGKLEAVALEATTGWRWVARELQARGFDVRLCDPGEARALGGSKRRPKTDRLDAAWLARLLAKEMLPEAWLPPAEIQYLRDRTRLRHALAQDRNRWAQRLHALLTHEGWPCGRGRLLTVSGQKWASALALPEPARASVEAMLTIIHALDEQIELLDTELRRLARSDPRLQALCAIFGVGPVLAAHILAELGAASRFRRARQVVRLSGLDPVVSESANVRRRGRLSKQGSPELRWALAEAAHHACRRRSPDHALYTSAKQRRGTQRATLTVARKIARRAYHVLADLEQAA

SEQ ID NO: 202320 - protein, 423 aa, unidentified
MIPAVIERCAGIDVGKKFLAVCVMTGPANETAAAEVRKFGTVRQQLELLRKWLQSEGCTHVVMESTGVYWKPVLNVLEDDPEYRLKIILANPQQVKAVTGHKTDPHDAKWLAHLLRHGMIRPSFIPPRPIRELRDFTRRRKQMIGIAADERNRVQKILEDANVKIGDVLSDVFGLSGQLMLEALVKGLDGKGEPSAFDVAQLARGHARKKLDQLTAALEGHQMRDSHRTLIRHAMRHMAFLAEEIEALDRAIAALIGDANLTGAYELLQTIPGIRSQSAATILAESGPDMKQFPTGANFSSWSGLAPGNNESAGKRKRAPAMKGNPHIKTAVVEAAWSASHTKQSEFEDRYQRLKPRIGHKRAIVASAHALALRIYEVLDSGTPYQPHGANLTPRSARRLVRHHTRRLNCLNRWLFKEKTGER

SEQ ID NO: 202321 - protein, 421 aa, unidentified
MAFPQLFRQQVGEGALVAVPGQVDVWIGLDVGKQAHFADVLDNDGERLFAQAVANGQGDLEALLDRAAGHGTPGLVIDQPGSIAQLALAVAAGRGVPVAYVPGLVMRRAADLYPGEAKTDRRDAYVLADTGRTRRKQVHWLDAGSDELLASLRVLNGFDIDLAADQTRLANRLRDALTATSPALERALGERLHQPGVRDLLARYPTLTALRAASQSRIERTIKARSPRIAGKVTIAIAAVLAAQDVTVPAEATTGRVIAELAAELDRVCSRREALAAEIEETFLAHPSGELLASLPGIGPRTGARILAEIGDGSAYANGSKLAAYAGLAPVTRQSGTTLNAETRSRRGNHRLKNAMFLAAFASLRDPASKAFYDRKRAEGKRHNAALICLARRRCDVILAMLRTHQPYQPTRPASGLADAA

SEQ ID NO: 202322 - protein, 432 aa, unidentified
MQNRKTAKQNEETIAAYIGLDWADSEHEVTMLVVETGEVESRKIKQESQALAEWVQSLQDRFGGRKVAIAVEQRKGALIYALMCYDFLILYPVNPKTLARFREAFNTSGAKSDPCDSDLLLDLIRLHRDKLRAWVPEDADTRLLQMLVEERRALVDDVTALTNRLKDTLKQYFPQALEWAGKLDSKQGMDFLTRWPTLQSIRKAGAAAVEKFYRQHGVRNKDKIEQRVKAIKESRALTNDRAVVEGSKMKALAVVRQLQAIAKSIAEMEARIEELFEQHPDHEVFSSFPCAKKVLGPRLLAAFGGDRSRYESALELQSFSGIAPVTRSSGKSKTIHKRLACPKFLRQSFHEYAAQSIKKAGWARVYYKEHRNKGVKHHAAVRALAYKWIRIMFRCWQEQEPYNEAKYIASLKRRSSPLVPALPPAPSSPVEV

SEQ ID NO: 202323 - protein, 478 aa, unidentified
MKADRRWHTRKEKKEWARRLQSNDPGLDVIHPQAAGIDVGNASHYVAVRPDRDEEPVRQFECFTADLHRLADWLKSCGVRTVAMQSTGVYWIPLYDILEERGFEVYLVNARHTKNLPGRKSDVQECQWLLKLHTYGLLNNSFQPASQIRVLRTYWRQRAEHVQAAASCIQRMQKALTQMNVQLANVISDLGGLTGQLIVRAIVRGERDPQKLAALRDRRIQASPEEVAKSLEGNWRPELLFLVKQEVDTYDTYQKRIAECDEQLQQQLASLASVAPGVATPPVTQLQGDEQPKKSKAKRRKLAKNAPQFNLQQELQRVAGVDLTRIDGIDVMVAQTILAEVGLDMGRWETEGNFVSWLGLCPDNRITGNKVVGRGTRHVVNRAATSLRMAANALLRSQTYLGAQYRRLRTKLGAPKAITAMAHRIARLVYRMLKYGQRYVDKGAEYYEQRFRNQQLQFLRKKAAQLGFQLTEHEARTA

SEQ ID NO: 202324 - protein, 380 aa, unidentified
MSAETTTNQYTAIQPHLYMAFELSQTKWMLGFTIGFGQRPRLRTIAARDLAGLQNEIHLARERFGLGAEVPVISCYEAGRDGFWLHRYLVSIGVSNLVVDSASIEVNRRAKQAKTDKLDLDKLLTMLMRYQAGEKKVWHVVHVPSAEVEDHRHLHRELTDLKEQRTQHINRIKGYLSNQGICLEVKDDFPEIVEHQRLWNGESLPAGLRARLLCEYQRFQLVQEQIKALEAERRESLRHSTQPDIEQVRQLLRLRGIGINCAWLYVMEFFSWRAFRNRREVGALAGLTPMPHRSGDEDHELGISKVGNRHIRAMAIEIAWIWLRYQPNSELSRWYQRRFSKGSKRLHKIGIVALARKLLIAIWRYLEFGTLPPGAVLKST

SEQ ID NO: 202325 - protein, 375 aa, unidentified
MKNKVRFLGLDVHAETISVAVAEPDGSVRSLGTIANRADSIRKLVKNLGPVEQLKACYEAGPTGYVLYWQLAELGVQCAVIAPTLMPVKAGDRVKTDRRDAERLARSFRSADLTAVWVPDAASEALRDLVRAREAAKQDQLRARHRLSKFLLRSGQRPAAGLKAWTQLYMAWVRQLRFEQVAQESTRLDYLHEVEHMAERIVRLEKVIAEAVKLASPAIQEVVKDLQALRGIAQISAVTIAAGLGNITRFESARQLMGYSGAVPREDFSGKRTQRGSITKTGNAHLRRIVVESAWSYRLRPGVGPALRKRQEGVPEELKEIAWKAQHRLHKRYSRLAAAGKDQRKIITAVGRELLGFIWAIGVKAEATAKQPMAA

SEQ ID NO: 202326 - protein, 449 aa, unidentified
MSSRKGSAAGLPVIHDRAAGIDVGSRFHVVAVGTDLCDEPVRTFQAFTGDLQRMADWLVAMGIKTVAMESTGVYWVPVYEVLEGREIEVIVANAREARAVPGRKSDVNDAQWLQRLHACGLLRASFRPGRDIAALRVYLRLRERHLDYAAAHIQHMQKALTFMNLQLHHVVADVTGVTGMKIIRSIVDGQRDPHVLAQMRDVRCKASLETVRAALVGNYQPEHVFALGQAVALYDFYQSRVDECDAQIQAVLTMLTAEKASPSTPLPKARHRTVQPNAVSFDVRPVLYQLAGVDVTQIHGIGPYLALRMIAECGTDLSRWRSAKHFTSWLTLSPGCKISGGKVLSAHTRKTANRVAAHLRLAAVTVGRTNTALGAFYRRLAARIGKAKAVTATARKIAVLFYNAMRFGIDYQDPGATHYEQKYRERVIKQLHRRAAEFGFTLQEVVNVS

SEQ ID NO: 202327 - protein, 367 aa, unidentified
MDYFAGLDVSVKETSVCIVDDTGRILREVKVASEPEALLQVLSNPTYRFKRIGLEAGPLSQWLFSALAEADLPVICVETRHMQAVLKAQINKTDRNDARGIAQMMRVGLYRPVHVKTLRSQKLRMLLTHRKLLQSKAIAIENDLRGTLRNFGLKVGMVRTVKFEARIKELIANLPDLAELVEPLLIARQVIREQFGILHRRLLAIVRDDAVCRRLMTVPGVGPVVALTYRATVDVAARFRNSKAVGAVLGLTPSKYQSGEINRTGAISRCGDEMMRMMLYEAAQVMLLRSAKWSWLKAWAMKIARHRGMKKAIVALARRLAVIMHRIYGPAARCKGIRTEWSLWSALIYPASRGSSCSGPSWLSAHT

SEQ ID NO: 202328 - protein, 434 aa, unidentified
MPAAAFRFGETWLGVLMANVMIGVDPHKGSHTAVAIGAGEEPLGELRVDACPSQAEQLRAWAVAWPQRAWAIEGAAGLGNLLAQQLVAAGERVLDVPPKLAARVRLLQAGDTNKNDPNDAYSVAVAALRSKLARPVLAEGHAAVLKVWATRHRDLARLRNQACCRLHAVLCDLVPGGVRREISAGRAARLLEQVRPADAVTTARCELAGEFLADIRRLDAQLRECHNKLAAAVRASGTSLTGLFGVGPVIAGTVIGDVRHVFRFPRRDHFASWNGTAPVEVSSGDRRKVYRLSLRGNRRVNHAIHMAAISQIRHKHSDGRAFYEKKLAEGKTHKEALRALKRRISDAIYAALAADARRAASACSKSPGGQPGDHSASRAAGSHPAHRHFGQATPGPAPTIRPGANSSRAPTQPNRARRRAAHSPASSKKPPATT

SEQ ID NO: 202329 - protein, 406 aa, unidentified
MAVMIGIDPHKGSHTAVAVTATEEPLGKVRVRACPAQAEQLVAWAAAWPERTWAVEGAPGLGRLLAQQLVAAGERVLDVQPKLAARVRLLQTENTGKSDPNDALSVAVAALRSKGQRPVLADDHATVLKVWAKRHRDLSRAHNQVACRLHAVLCDLVPGGVADEITAGHAAKILGQITPADPAAEARKELAAELLADIRHLDAQRREIKKKLATAVKASGTSTTQIFGVGPVIAATVIGDVVTVARFPRRDHFAAYNGTAPVEVFSGEKKIYRLSLRGNRRLNHAIHMVAITQIRYKHSDGRGYYERKIAEGKTHKEALRCLKRRVSDALYARLRADARNAAAASTRDPGGQPGNDSVSSAAGSHPEHRLFGSATPGPAPSLRSATALPQAMRPSEPSAKKTRRDP

SEQ ID NO: 202330 - protein, 356 aa, unidentified
MGRTVPPWVESAAGELGLFILRVCPEQMMGSKSRMQGKVSPEQIASPVYVGIDVCKARLDVYLHPMGRKLQVPNCPQGLKLLKRELKPLSVVRIVMEATGKYHRQAHRTLAANGFEVAIVNPLRSRRFAQAVGELAKTDSIDARLLAILAESLAPKSTPPASQTLEELQELVHARNAVTAEAAALANRCGTAHTAFLKAELKRRQKAVATHIAKLEAEILRRIENDVVLARKYELLRSIPGIGVVAAITLLVDLAELGYCSAKAVALLAGLAPLADDSGHRVGERYIQGGRFHVRTALYMAAVTASRVNPDLAAFYKRLRAKGKKAKVALTAVMRKLVILANTLITENRTWLPTAP

SEQ ID NO: 202331 - protein, 371 aa, unidentified
MTSMTVEPAEQVASRQIIVGVDTHKYAHVAVAVDHLGARLAAQHVAANREGYAQLEAWAASLAGNGRVLAYGVEGTGSYGIGLASFLRRTGHRVIEVNRGDRRSRRSNGKSDTLDAEAAARAVLGGQAKAVPKSADGTAEMIRQIKIARDTARKAKTSAIVTLKALIVTAPADLREHLAGTSDKVLIDRCASLRPGAVTSPTASAKHSLRTLAKRYQALDNEIREHDTILDDLTRSHAPTLREGLGIGADTAAEVLIVFGDNPDRVHSEAAFAKLCGTSPVPASSGMTNRHRLSRAGHREANAALYRAVIVRMRFHQPTINYVTRRTAEGLSKRDIIRCLKRYLAREIYQAVMTDHRARQPTTPEAVPTDS

SEQ ID NO: 202332 - protein, 347 aa, unidentified
MLIIGCDFHPGFQQVAIFDNLTGEIQEKRLQHRAEAEQFYRGQAGQEVRVGMEACGHYPWFERLLAELGFELWFGDAAKVRASVVRKQKTDRRDAEHLLDLLRENRFPRIWVPSLEVRDVRQLLVHRHKQVQARTRTKNQLQAMALSQGVQKKYKLWTKAGREEMEQLPLLPYAAQRRKQLLQSLDGLEAEISELDRRVADEARQRPEAVRLMTHPGVGPVTALALVLTLGPADRFESAKQVGSYFGLIPSEDSSGGKQRLGRISKQGSSFLRFLLVEAGQTAARLDPQLKRFYRRLAARKNRSVAKVAVARKLATRLYLMLREDWTYTQLCQAVMQVSPSHSVAGP

SEQ ID NO: 202333 - protein, 343 aa, unidentified
MRYFAGLDVSLEETAICVVDEVGGIVREARVASDPDALVAFFDALGMTTERVGLEACSLTAWLHQGLSDAGIPVVCIEARQAKAAMSAMPNKTDRNDARGIAQIIRTGWYRAVHVKSPSCRTWRALLTARRMVLNKRRDVENAVRALLREAGLKVGTPSRKDFPARVRELAAGDAVLTGLVESLLSVISVMTDEVATLTKRVLDEVRVEPTCRHLMTVPGVGPLTALAFRATVDRPDRFRRSRDVGAHLGLTPRRYQSGETDVQGRISRCGDELARTALYEAAHSLLIRSTKWSSLRAWGMQVAKRRGMARARVAVARKLAVILHRMWVDNSEFRWGKQAVAA

SEQ ID NO: 202334 - protein, 339 aa, unidentified
MKLYCGIDLHSSNSFLATVDAAGKRVFKEKSPNDMATILRALEPYCKRLAGIVVESTYNWYWLVDGLMAEGYAVHLANPSAIQKYTGLKHADDKHDAFWLAEMLRLDILPTGYIYPKDERPIRDLLRKRSHLVSLRSSLMISLQNIITRNCGMKMKTNDIRRLRENRVHPLLADNEDLALAGKVSKDSIDFLTRQIRAIETFIEKKLELADAYKNLLTMPGIGKILGLTIMLETGPVTRFKKVGNYASYCRAVSSQWTSNGKSKGQGNKKNGNKYLSWAFSEAAEFARRYDDKARAYYNRKLRKTNFMVAHAALAHKLARAAYYIMRDQAVFIPEKIFI

SEQ ID NO: 202335 - protein, 343 aa, unidentified
MTLDVYFRQCVGIDISKDKFTACLYMYDRASDVGCCTKSIDFANTKSGFNQMVRWSRKEAVKSHPLTYLMEPTGVYYERLAYHLHKIGQTVYVVLPNKARKFCESEGIKTKTDAMDARCLALMGCVSRKLKPWSPPAAIYRELRQMTRFHADLCQVRASVANRMEALDHMEGTAKSVHKNCEKLLQKIDTLMEKNGKAIMKKVAEDKELEAKVKRIATVKGLREPTIVCVIAETEGFHYIENRKQLVGYAGLDVKAEQSGNEDPKHRISKKGNANIRTALYMPALVAVRYNRQIKAAYGRICQKHPNEKMIGVTAAMRRLLLLIYTLWKNGEEYDETRGTMPL

SEQ ID NO: 202336 - protein, 356 aa, unidentified
MKDYTNKTIYIGIDVHKKTYVVTTICDCIVVKKDTMAAYPEKLVSYIKKYFKGAKVNTVYEAGFSGFYLHRYLLAQGINSIVTHPASIKVSARDRVKTDKRDSLKMAKELSKGELTGVNVPSEKRELLRMLTRTRRQLVDTKKRIGNQIKSLLFTQGLIDPNDDTTIGKIWIKKVQKLEMAEELKYSMNLIIQLWLDLDIKIADILKKLSEQAKADPIDVVYRSVPGIGALSARILANELEDMKQFSNEKGLFSYTGLTPSEYSSGEHKYLGSISRQGKSLLRMVLIQIAWSSIKKDQHLLKVFERISKKQGKKRAIVAVARKIIGCIRSCFVNKTTWCTNAPDSKGYLTTTVEAC

SEQ ID NO: 202337 - protein, 403 aa, unidentified
MNSVGIDISKGRSTVAVMRPFGEVVISPFEVRHTDSELSELARQLKSLDGETRVVMEATGNYHAPVAKLLHDAGLYVSVVNAKLVHGYGNNDLRRVKTDRKDAVKLANYGLDRWLTLPRYVPEEDTRLLLKNCYRQYRQYSKVQTVLKNNLISLLDTVFPNANRLFSSPARADGSEKWVDFVAEFWHCGCICERSEKAFVSKYQKWCKKHGYNFGEEKACAIYAEASGHIGVMPKSETTKLLVEQAVAQLRATSAALTTLKQEMQSLASKLPEYPVVMDMFGVGPTLGPQLIAEIGDVRRFYAKKALVAYAGIDAPPNDSGDVTGRHRSMSKIGASSLRRTLFLVMSVYLQTAPLDEPVYQFMNRKRAEGKPYRVYMMASANKFLRIYYATVKAYLESLEHTA

SEQ ID NO: 202338 - protein, 416 aa, unidentified
MEQIFMIKENYMYVGIDLHKETHTAVIIDCYNQKLGEITFPNRPADFPKLVAKVKKCNTAGKEVVYGLENAYGYGRALAVWLIDKGYFVKDVNTAISHRQAKHRGAMYRKSDSDDAKAIALATLNMLDKLPDACPNDAYWSLGQLVHRRDNIMKQRTRLVNQLHEQLCIAYPSYKQFFNDISRPTALYFWENYPSRKYLKGKSVEDLRAELVPVSHNKCSTKTCEKILDAVASDKVKNNNFQDARDMVTLSIVSDLQHYDSQLAEVDKMLEQMYKMLGCTLTTIPGVNVITAVKILAEIGDIKRFGNANKLAQFAGIAPLHLSSSGKGKDVATKQGNRRLQATIYFLAIQMVQVSSKGTPRNPVVRAYYEKRKAEGKTSQQALICISRRLISIIYGMLKNGTEYRMPEVENAGENM

SEQ ID NO: 202339 - protein, 331 aa, unidentified
MFPVGIDVSKNTLDLCMLYDGIKGRIKTRNIQNNRHSVENILRWLRLQHCGPEDVHVVMEATGVYHERLATELHDAGFRISLANPHRSREFARGMGIMTKTDKVDAYMLACYAFLKKPHRWEPPAPEIRYLGALLRRRDVLLGDALREENRLEKYLSTDTPADIISSCRRMAQLLREEVSNIERQIKAHIKASPALRRDYTLLTSIKSVGPQLGMHMLVVLRSHNFVSAEQAAAFLGVVPIEKRSGTSVRSRPRMSKIGPPQLRAKLYMSALCGKIYNKRMRNIYDEMCLRGKPKMVAIGALMRKLVHWCYGVLKTRTVFNDEDLKPVLST

SEQ ID NO: 202340 - protein, 349 aa, unidentified
MVVVGADVHKRTHTFVAVDQAGRELGHKTFDADSAGHLKAVAWARERFGADLVWAIEDCRHLSARLERDLLTAGQSVVRVPPKMMAEQRRIARTRGKSDPIDAAAVARAALREPDLPVASHDETSRELKLLVDRRDDLVKHRTATINRLLWRVHELEPAWAPKPRSLDVAKHQRILADRLAGVSGIVAELAREELSDVVELTGRINELERRIAGLVAQAAPTLLAMPGVGALTAAKLVGEAAGITRFKSEAAFARHAGIAPIPVWSGNTRGRVRLTRSGNRQLNAAIHRIAVTQLRLDGLGKSYYDKKKAEGMSTPEALRCLKRRLARVVFNHLTTDHAASATGLAAAA

SEQ ID NO: 202341 - protein, 423 aa, unidentified
MDVLCARWCGLDIHQGTVVACLVVPGPTGTPVKQLRRVGTMTDDLVHLADWLAATGVTHMAMESTGVSWKPVGNLLAGQVALILVNAHHVKAVPGRKTDAKDCEWLADLLHHGLLRGSFVPDRPQRELRELTRYRTCLVQERSAEVNRRHETLEGANITLGDVATDIMGVSGRRMLRALIAGATEAAAVAELAQGKLRAKRPALAAALHGQIGAHQRFLLAQQLSHIEQLEASIAAVSAEIAARLGPFAGELDQLQTIPGVGLRTAQVLVAEVGTDMRRFPSAEHLARWAGMCPDNDERAGKRRSGRTRKGKPWLRAALIAAAHAAARSTGTYLAAQYRRLAARRGGKRAAVAVGHSILVSVYHLLRDQEQYHDLGANDFDERDRLAVERRLIRRLEALGHQVTLEPAACSRTCFHTTHITNN

SEQ ID NO: 202342 - protein, 452 aa, unidentified
MRKPKSTSAPSLTTLQPNAAGADIGAREIYVAVPPDRSPSPVRCFGTFTDQLRSLVEWLRECRITTVAMEATSVYWMPLAELLEEAKIEVCLVNPRHVKNVPGRKTDVQDCQWLQYLHTVGLLRAAFRTPLEVRPLRVLWRHRDALVRQSSWQVQHIHKALDQMNVQIHHVLADITGATGTAIVEAILAGRRDPAHLASLRDKRVKADEATLARALTGDYREEHLFCLRQASDSYKFVRQQIAAVETEVHRMQAALCPPERPPAAVPAETPKRRREGGKNLPAFPVADLLRRICGVDLGTIPGLSTATLQGLWAELGSSLAAFPTAKHFASWLSLCPDNKISGGKKLKVATRASANRVAGILRLAAQGVGHAHNELGDFHRRMRARLGGAAAITATAHKLARIFYACLRDKKAYEPSRHDLNTPLRRSKTLAKLRAKAQNLGFQLVELQTSN

SEQ ID NO: 202343 - protein, 424 aa, unidentified
MASHEFAAFVGIDWGDQKHAVCLRTEGVEVEHELSQKADEIDAWATELRTRFGGRPVAVCLEQSRGPLIYALLKYEFLVLFPLNPLQATRYREALYPSGSKDDPLDARLLCLFVETHHGQLRAWKPDDEATRLLRLLAEDRRRFVDQRTAHKNQLRQRLKEFFPLALELLRSGDLEDEWFLQLLVKFPSHAELRRASPRTLERMLPKHHRLPDDESLDPRVARIRAAVPLVTDGAVVKAARLQVMELARLLLRLNTTIAEYDHELSAELARHPEAELFRSFPGAGAALLPRLAAAFGTDRERYADAQDLQQLSGIAPVQIRSGKSCSVRRRRACPKFLRQTFHEYADHSRKRSLWAKAYYRMLRGRGLRHNAAVRALAFKWLRILFRCWQTRTPYDEHRHLKQLRLKQSPLLQYLDLPDPVEQT

SEQ ID NO: 202344 - protein, 391 aa, unidentified
MIFVGIDVAKDTHYAAVSDNSGAVLVKPFAFQNNAEGFCLLLKKLSEFDRSKLLIGLESTGIYSENLICFLYESGFRLAVINPIQTATLRKTAIRKTKTDKVDTMLIIKSLMVNSYRLYSQRDADSLKLRTLCRFRQNLKKSKARMKIQLAEYVNLVFPEFGKFFKSGIHIAASYALLKKYSSPKEIAALRTSTLCTLLSKASHGRFGKDTAEALKSLALSSVGVKNPYISIQIAQTIAQIELLEQQIKDLNSAIEEAMESINSVLMTVPGIGAVNAACILGEIGDIKRFSKPCKLLAYAGLDPTVRQSGQFTAKSTRMSKRGSALLRFALINSAWQLTLNDTTFKAYYDLKRSQGLNHYGALGHVAHKLTRVIFKLLTSDTPFNPAKLVA

SEQ ID NO: 202345 - protein, 369 aa, unidentified
MVWMPHPETGIKVCHNGDVESTKLEEASMNEVTMIGVDLAKSVFQAHGATAAGEPVFRKKLSRGQFLKFLSEQPPCVVAMEACASSHYWGREIMKLGHEVRLIPPIYVKPFVKRQKNDANDAEAIAEAAVRPTMRFVPVKSAEQQSRSMVFKTRDLFVRQRNSIINALRGHLMEYGIIAPPGRNFVKKLAEQIDRPDCDLPSIVIELSRVHLDQLSVLTDKVVAIERRLKDEAKSDPETIRLQTAPGIGPVSAMAIKAFAPPLEGFKRGRDFAAWLGLVPVQKSTGGRQILGRTSKMGQRDIRRLLIIGAMTRIRWAIKNGPPKGSWLEQMLERKPRMLVAIALANKTARTIWAMMTKHENYRDPTAAA

SEQ ID NO: 202346 - protein, 410 aa, unidentified
MSKLFVGIDVSLKGNSVRCLDANGDTVRKFSVPNTVDGASVLVDNLVELAAQYSMQQVVLGLEATSNYGYHLTAFCQNSEKLAPFSPQIHVLNPRTVNNFKKSYNDLPKNDDIDAWVIADKLRFGRLPEEVFMDERFLALQRLTRTRFHLAQTIAREKTYFLNNLFLKFSSLRQEKIFSDPFGATAMAVVEEFYSPDEIAAMPLEELVSFLQEKSKNRLVDAEGVAKALQKAARSSYRLSKSLADPVNACLATSISVIRALQSELKRLDKLIAQHLEAFPQTLTSIKGVGPVYAAGILAEIGDISRFKNQKALAKYAGLVWNEHQSGQWKAQDTPRVRSGNKYLRYYLVEAANLVRVHDQEYREFYQAKYNEARTHKHKRALVLTARKLVRLVFALLRSNQLYTPRKRGD

SEQ ID NO: 202347 - protein, 400 aa, unidentified
MKGFFTYEIIGIDIGKNKHFFCVMDQQTGEIISQPVSFSNDKEGFDFLVQKIKSYPKDSILIGMEDTGHYHFALLKYLLDLQYTVALINPKTTDFNRKMQGGITKNDKLDTINICDVLDTPERKKQYRITKVNSFDLYEQKQLTRHHHNLKEEENVYKNRLQKCIDIVFPEFNKLFNSKYGIVYMNILKMFGSAENIANTDIRTIRKCFEIDGRDNRISLTPERLKECARSSIGISSSAEVIQIKHLTAQIELIEEQLTEIDKKIEEFSIQNNSPILSIPGISHFSGTSILAELGDISNYSKPSQIIKFAGVAPLHYESSQFNAQHTAITKKGSKYLRKTLYQIILPVIRHNPVFNKYYQLKISQGKGHRCAQGHCVRKLLRIIYHLLKTNQQFDPQLLR

SEQ ID NO: 202348 - protein, 320 aa, unidentified
MRNAVGLDISKLTFDASAMVGNAEYSAKFDNDSKGLDQFSDRLKSLGCQNLHICMEATGNYYEEVADYFAQYYSVYVVNPLKISKYAESRFKRTKTGKQDAKLIAQYCRSAKESELVKRQKPTDEQYRLSRMIAAYAQIKSECAAMKNRYHAAKDEEAAKAYAEIIKAMNEQLEVLKEKIKEQTEKPNCKEGVKRLETIPAIGRMTAAVLFHHLTSSKFETSNKFAAFAGLSPQQKESGTSVRGKGKLTKFGNRKLRAVLFMPAMVAYRIRAFPDFIKRLEEKKKPKKVIIAALMRKLAVIAYHVHKKGGDYDPSRYKSA

SEQ ID NO: 202349 - protein, 420 aa, unidentified
MRNAGIHANSLLEVRRMYNAVGIDVSKSKSTVAVLQPGGTVIRKPFDISHTSQNLNELADYLSSLDGTTKIVMECTGRYHEPMVKALSEAGLFVSIVNPHLIKNFGNNSLRKVKSDPADARKIARYTLDNWTELRQYSGMDNTRTQLKTLNSQFSFFMKQKVAAKANLIALLDNTYPGVNKLFESPTREDGSEKWVDYAYSFWHADCVRKIGLKAFTERYMSFCKKHHYIFQQDKPEKLFNASKELVAVFPKEKTYKLLIQQSIQQLNLASEHVERLRREMNELASTLPEYSTVMGIYGVGKTYGPQLIAEIGDVSRFTHREALTAFAGVDPGVDESGQHKSKSNRASKVGSARLRKTLFQIMTTLLQNAPEADPVYRFLDKKRSQGKPYYVYMTAGANKFLRIYYGKVKECLRNLEQTE

SEQ ID NO: 202350 - protein, 395 aa, unidentified
MSSQNVYGMVSAGGMDVHYKFSQVTMRDEQGRVVRRERLDHPDRQAIRERLAQWPKGVPFVMEASFGWGWVADLMSELGLNPLLSNCLKVEQMRKARGEPKNNKKDADLLSLLPLEKSDWWKVWLAPPEVRDQREWMRYRSSLVKIGTQTRNRIHAIFHRHGIFHGLSDLFGSKGRTFLIDLCKEGRTPDVQLSPGALASLRGQVRLLGHVRGQLAEVAKKLRGRLKRSDLAKRLDGIPGFGLILSHTLIAEIGRIERFRNHRKLASYCLLAPIDNDTGENDPGRPPVGRRIGKRGNHTLKWAFIEAAHGAVRSGGKWRKIFDRYTDGGKKNRNRGYIKVARELVKVVDVIWRKAVEYTDNPPPRPSRREQAKRFLSSTRSGTGQPCPAMTAAQS

SEQ ID NO: 202351 - protein, 414 aa, unidentified
MIDERRWYAGVDWASESHRVFLTDENGRRIGEKIFRHSGEGLAEMAVWLSSTSGGVPAQIHIAIEVPHGPVVETLIERGFKVHAINPKQMDRFRDRFTLAGAKDDSRDAEVMASALRTDLRCFRPLAVADPVVIELREWSRIADDLGAERNRLTNRMREQLWRYFPAMLDLESDLGAEWLLDLWEIAPTPHKAIRVREATVAKVLKRNRIRRFDAAHVLDVLRKPPVQVAAGTTEAAAAHIKTLTARIRLVNHQLGEAHRQLDALTARLIPSEENGPGQRKQHDVEILASLPGVGRIVLATLLAEAFDALQRRDYAALRSLTGVAPVTKRSGKSCIVVRRQACHDRLANAMYHWARVAVQRDPRSRSKYAALRSRGHSHGRALRSIADRLLNVACAMLKTGTTFNPSLAAEKTP

SEQ ID NO: 202352 - protein, 315 aa, unidentified
MIDVTTSATRRFIGCDVGKSNIAVFDSAENRGFALPNEREALEAFAASLDATCFVVCEATGGHEAALLDALAHAARAVHRADARKVKAFIRSLGTLGKSDAIDARALARYAEERHDRLALWQPREAVRDALHVMVTTRRDLVAERVACANRLAAPGSAPVAARLKRLHAAIEAEIAGLETDMAALIAANAPLQRAAKTLQSIAGIGATTAIALLALMPELGTLDRRKAAALAGLAPHPRQSGKTDAYRRTRGGRPDVKRLLFMAALSVRRHNKTLKPFYERLIANGKKPLVALTALMRKLVVIANARLQNSAQPI

SEQ ID NO: 202353 - protein, 338 aa, unidentified
MKTYAGIDLHSSNNFIGIINENDKRLYSKRHENRVDVVLKVLKPFKRNLQGIVVESTYNWYWLVDGLKENGYKVHLANPSAIKQYEGLKHTDDQWDSFWLAHMLRLNILPEGYIYPKEKRALRDLLRRRLRFVRHRTSTALSLQSMIARNRGFTMPASSIKTFTEQFVEDMFDSPHLVFAAKSDVAEIQLLNKVIKNIEKEVKTHIQLRKSFQMLLTIPGIGEILAMTIMLEVGDIKRFDKVGNYCSYCRCVKSQRLSNGKKKGQGNRKNGNRYLAWAYVEAAHFAARYCSGARKLYQRKKAKANGAVATKALANKLARASYYIMRDQVPFDEKKLFG

SEQ ID NO: 202354 - protein, 388 aa, unidentified
MLPISRQPTQTAPRHQSHGATLYVSLELSHSTWVVTSLSAGSEKISKYSSAAGDGKALLGLLARLRAKAEEVTGRSVAIAVIQEAGLDGFWVHRLLEANGIESHVVDPASIAVPRRHRRAKTDAIDGETLLRSLLAWKRGEPRVCSMVVPPSSEQEDRRRISRERAVLLQERVRHVNRIKGLLSGQGITDYEPLQRDRRARLDALTTGDGRQLPARLKAELLREIEVIELLMRQISEVEAERDAATEPGAESQESPIALLARLKAIGPQIAAVLYLEGLYRNFRNRREVAAYAGLVPTPWRSGKIDREQGISKAGNRRLRTIMIELSWLWVRHQPGSALSCWFRARVGTERGRVRRIAIVALARKLLIALWRYLTHGEVPEGAVLKTA

SEQ ID NO: 202355 - protein, 387 aa, unidentified
MQTETPATTVETTARDHSNTLFASLELSKAKWLVTANSPGEEKFSTYVVAGGDGASLLVLLARLKAKAEQRHGVAVKVVVIQEAGLDGFWIHRLLVQSGIESYVVEAASIAVARRHRRAKTDAIDGVSLLRTLMAWARGERRVCSMVRPPSPEEEDQRRLSRERGTLLKERIQHTNRIKGLLSGQGIRGYDPLKPDRLDRLDALQTGDGRPLPERLKAEIRRELARIDVVASQLATVERARDALVRTQTTEPTNPSALLIKLKGVGIEFASLVWLEGLFRSFTNRRQVAAYAGLAPSPWQSGGTNRDQGISKAGNHRLRRVMIELAWFWLRHQPDSALSRWFHNRVGTAKGRVRRIAIVALARKLLVALWRYVTQGIVPEGATLKAA

SEQ ID NO: 202356 - protein, 414 aa, unidentified
MDVLHDRCAGLDIGKKDLKACVRTPSPTRRSRRQEIRTFATTTNALLELREWLVDQKVTLVVLEATGDYWRGVYYLLEDTLNVMLVNAAHAKGLPGRKTDVSDSAWLAQLGECGLLKASFVPPEPIRHLRDLTRYRATLTVERTREAQRLEKELEDAGIKISSVATDILGVSGRAMLAALIDGQDDAQVMAEMARGRMRTKIPALVQALTGNFGEHHSFLCRLHLTRIDELSATIEELSARIETEMRPFAPQIERLVTIPGVKQTTAEVIIAETGGDMTRFRTPANLASWAGVCPGHHESAGIRRSGKRRHGNRWLGGALGTAAMAAGRTRERTYLGARYARLVPRLGKQKTIVALEHSILIAVWHMLTDTVDYQDLGGDYFTKQDPERALRRIIRQANALGLTVRFDPIPDVA

SEQ ID NO: 202357 - protein, 372 aa, unidentified
MLYAGVDVSKDKVSMAVLTSGGTKLTSGEFDITTEGLKLLELTLKQLRDEISMAIEQTGTYSMPVILYLMERVEGLRIYLVDGLNFNRFIKLEGRKKQDKTDAVSLAEYLRRGLPARLITDKDIKAYGLKVLISQREHLLKVKNQVENRLRQLVETIFPDSKTLSKSVFWSEIRKGRAIPDWKRLTDKAEVLSTILRERKIWLEIVHSLEETEREINAFLRAHYPKDVEILKSFGFSETTIAYFISVYVDIGRFKDVKAFKSYMGLGLRIYQSGKKEKNVVNSYTNKYIRKLLYMYVIQAVREKSNHRRIKEYYLRQVEKSGSKKKAIIKTAGKVIEWVYYCLKHREPFKWEANYETQQEDLSQAYSGQAED

SEQ ID NO: 202358 - protein, 428 aa, unidentified
MMSEVESVRQEPQFAAFMSIDWADKKHVWCLQVAGSQQRESGELEHTPEAVEAWVGQLCQRFAQGLIAVALEQSRGALVFMLTKYEFLHLFPVPSTMSASMRKALYPSGSKDDPRDADLLLDLLLQHRDKLHRLSPDTEATRRLQNLVEERRKLVDEKTEQTNRLTSHLKIYFPQMLDWFERLDTELVCALLERWPTLEELQKVPPAKLRTFFRKRHCRDQELVERRIIAIRQAIPAIRDRAVIEAKSMVVKVIVQLVRSLIEGIADLDEKIGEAAAAHPDFFIFESLPGAGAVMAPRLLAAFGSERERYGSAQEVQSYTGIAPVTEKSGKKQWVHFRFAAPKFLRQSFHEWAGHSVAQSGWARSYYQQLRSQGKGHHAAVRALAFKWIRVVFRCWKDRVTYDESKYLATLARRGSPLAAVVAAGKTL

SEQ ID NO: 202359 - protein, 344 aa, unidentified
MNISMIGLDTAKSVFQVHAVDPSGKVAMKRKLQRGELIPFFEKHEACTVVLEACGAAHHWARVLTGLGHDVKLIAPEAVRPFVKKGRKNDAADAAAICEAASRPSVKFVSAKSLEQQSVLTLHSARCLLVKQQTMLANALRGLATEFGLTVPKGIGKLEELAALVNADEAFPETARHVLTGLFDHCRATAASIETVEAEIVVQARQDETARRLATIPGIGPITASLIAATVGDIGMFKSARHFAAWLGLVPRQYSTGGRNRLGRITKTGNREIRRLLVLGATSMVYRAPQWKSAAGLWTRAVLERRSVRLVTVALANKMARIAWALMTRKEVYHAKGRAAAAAA

SEQ ID NO: 202360 - protein, 379 aa, unidentified
MDPTSSTPSLTTPFPVMLFVALELSRSTWLAALHSPTADKVSQHRLDGGDTEGLLGLIMRKRKLAEEKLGQPIRVACCFEAGYDGFWLHRWLCDRGIENRVLDAASLLVDRRARRTKTDRLDAAGLLRTLMALERGETQVCRVVRVPSPEQEDARRRSRERARLVVERGQHTSRIKGLLMTQGIRDFEPTRSDWQKRLETLHTPDGQPLPPCLRAELLRECRRLRQVMEMVAEVETEQKAVAEAEDGTPARLARLRGIGSTFAAVLGNEVFFRDFRNRREVGGYFGLTPSPWQSGGIRRDQGIAKSGNPRARRTAIELAWLWLRHQPGSALVRWFHDRVGDAKGRMRRIMLVAMARKLIVSLWRYVTEGLVPEGATLKT

SEQ ID NO: 202361 - protein, 339 aa, unidentified
MNNASTIGLDLAKKVFQVHGVDQAGEVLVRRTLRRSQVLAYFGKLAPCLVGMEACATAHYWARELSKLGHTVRLIPPAYAKAYVRRNKNDPADAAAICEAVGRPAMRFVTIKTAEQQAAAGVHKVRELLMKQRTMLMNSLRGLMAEFGIVVAEGPRHIGELVAILVDPGDRRIPAPLHGGLVRIAEALRHLERQIEVVDKQILDWGRGNKTCRHLITIPGFGPILSTAMAAIVVNPATFRSGRDFSASLGLVPRQDGTGGKVKLGPISKRGNGYLRRLLVSGAMTVLSGKRAKQDSWLVKLLATKERKVAAVALANKMARIAWAMMMRQEDFRAVPTAA

SEQ ID NO: 202362 - protein, 349 aa, unidentified
MSRSHSVDAAVFGIDLGKTRFDVMAADASGKPIRRVKLTRYTILPFFEQAPRALIGMETCPGAQWLARKLAAMGHTVRIIPAQFVKPFVKSNKNDARDAEAIAEAVVRPTMRFVEIRQEAQIDLQALHRIRDRISANRIQLICQMRAFCLEYGIAMRPGAGVFKLDMARILADETNDLTPMMRTMLRELWDEFVVVDARLATVSRQVEAIADRVDAARRLMSIPGIGPLGATALLAAIGDGRQFRKARDLAAWLGLVPRQNSTGGRTTLLGISKRGNPYLRRLIIHGARSCIAHLNRERDRMGEWIGRLEQRMHRNKVVVAFANKIARMAWAVLTRPGNLYERVDPAQA

SEQ ID NO: 202363 - protein, 323 aa, unidentified
MAVVVGVDIAKRSFDLAVLQSNGKYRTKGKLSNDQAGFAVFADWLQQHAEPGAWIVMEATGIYHESLAEHFHALGYRIAVLNPVQIFRYAQSQLQRSKTDKLDAKLIATYGQRHEDSLRAWHPEPVSIRTLRALTRRLEDLQSLRQMELNRLEISPEKVQDSIRAVLQRLDEQIAWTLEQIKRHIDDDPDLRGKRDLLVSIDGIADKTAALILAELGDIDRFADARAVTAFAGLNPRLQESGLARGHTCISRMGSVRLRSALYLPAVVALTYNPAIKAQAERLKARGKKGKQTVCAAMRKLLTIAYGVLKSGKPFDPALAIAH

SEQ ID NO: 202364 - protein, 367 aa, unidentified
MKKVITVAAKQNRNNSPQKLTVGLDLGDRNSWYCMVDEAGQIQLEQRVRTHGTALQEVFGSMPHSRIALEIGTHSPWVSRLLSELGHEVIVANARKVRLIGESRKKDDRLDAQTLARLARIDPELLYPVKHRSAQAQADLMMIRARAGLVRARTGLVNTARGLAKSYGERLRGCNVRHMNPEKAEGLSPELQRALEPLLAGIEAVSERILEYNQRIEQLAQQSYPQTALLKQVKGVGTLIALTYMLTLEDPRRFGKSRDVGCYLGLQPGRRNSGRSEPQLHISKEGDPYLRTLLVQGAQHILGPFGIDCDLRRWGLKLAERGGKSGKKRAIVATARKLAVLLHHLWVSGEAYEPLHNSRRTTVAAAA

SEQ ID NO: 202365 - protein, 360 aa, unidentified
MQNYYLGSDVSKGYADFVILDAHKQIVEPNFQLDDTFDGHCKLYEILSRFLQKHPDGMLFAAVESTGGYENNWLHTLMRFQALLNMKAARLNPFGVNANSKASLRRVITDKISARDVAEYMISHPERVSYQQEDYWESLRKLWGFFNMLTKQKTQLLNQLESLLYSANPELMAYCKKKVSLWLLEVLRCYPTAQKLSEATPESLARIPYVSAFRAQELIDKAKRSVASASDGITEELIVDTVEQIIQLKAVIQAQEKKMSALCSLPEVALLMTFQGIGIVSAIGLMIEIQALERFASVKKLASFFGLHPVFKTSGDNIGGYHMSKQGRKKPRRILFMITMAAISKNPHIRGIYEEHTKKV

SEQ ID NO: 202366 - protein, 317 aa, unidentified
MHIASIGIDLGKTTFHLVALGERNKVLLRKKFSRPQLLAYTANLPASLVGLEACAGAHFLGTALREQGHQVRLIPAQFVKPYRKSNKNDFLDAEAIAEAVTKQNMRFAQIKTQEQLDWQAMHRVRDRLVRRRTALINEIRGFLLERGITFAAQPIHLRKNLPTVIEDAGQNLSPRLRWLLDHMWQEWKQTETEIQAITDEIERISNEDARCRQLRQIPGFGPLVSTATVAAIGNGSAFRRGRDFAAWVGVVPRQYSTGGKQKLYGISKRGNVYLRRMLIHGARSVLFRVKYDTGGFGQWVRRLAQRAPHNKVVSGDR

SEQ ID NO: 202367 - protein, 420 aa, unidentified
MKVVYSTCCGVDVHKTFLVATIIKTTKGVQPSYQKKRFSTFNSDIRHFKQWLLDNSCFDVCMESTGKYWIPVFNLLEDKINVTIANPKWVKAVKGNKDDTKDSKWIGDLFRLGLVPGSFIPCKDIRILREYTRYRFKLTCCKRSEKNRFQNAFTVCNVALDAVVTDMFGKSASSITDYLITSDEFDPETCKSFLQKSLKKKADSIIESIEGYQMTSSQKERMLMVRSHLDFVQQSIDSLDSKLDELIAPYENAVSLLCTIPGVDRTSAITIISEIGTDMSQFNSSKRLCCWAGLTPGNNESAGKKKSTKITRAGVYLKPALVQCAHAAVKSSTSPYYKNKYEHISKRRGKKRAIIAIARMILTAIYQMLSNGETWNPCDLYKIDMPQEMQDKQKTKAIKQALKLLVSEGVISPESASVAI

SEQ ID NO: 202368 - protein, 387 aa, unidentified
MPQPNDLSRSLVALDQDSTIITVVEMSQSSWLVAGMLPGIERQPCKKLEPSPERLLALLHRWRDEAVKAGRKITRIALAFEAGRDGFWLARWLQAREVEAHVIHPSSVAVSREHRRAKTDRLDTELLKRGFLGWLRGERGHCTMARVPTIAEEDAKRPNRERECLVGERTRIANRMKATLARLGIRNFKPTLRKAAERLATLHTAEGVPLPPNVSAQLQRDMARLGFVTSQIRDIEEARQKRLEQEPDTGQHAMVRHLARVIGIGIETADMLVSEVLSRPMRDRKAVARYAGLTGSPDESGARRREQGLAKAGNARVRRGMIQLAWRFLRFQKQSSLAQWYRSRTADSRLSTRKTMIVALARKLLIALWRFVTTGETLEGVILRPAG

SEQ ID NO: 202369 - protein, 418 aa, unidentified
MAMKIVRFNCCGMDVHKNLVVATIGITDRKTNVTEYFQRSFSTLNSDLYRLKDWLRSHHCSDVCMESTGKYWIPIFNILEDEINVHLTHPKYVKAIKGKKTDKKDSKWICDLFKHDLIKFSFIPPKEIRELREIARYRYKLVCMRSSERNRYQNCMTVSNVGLASVVSDPFGKTASNIMKEVMKSNVIDDDKILKLVHKNCKNKDKILDSLHGYRIESDQRFKMEKSLDHMEYLDQLIDSCEVELIKRAYPFRRSFQHITQIKGISVLSAILIISEIGIDMSQFGSDKQLVSWAGLSPANNESAGKKKSVRISKAGQYLKPLLVQCALSAIKDKASYFGRKYSNIKKRRGHKKAIIAIARMMLVSIYHMILTGEEFQPCDYESFMDPKPNANPSLTVEKALNFLKQSGIDISSIPINL

SEQ ID NO: 202370 - protein, 396 aa, unidentified
MNATDERVVIGMDPHKRSVTIEVMAADEEVLGGGRFGTDAAGFQSMLEYVTRWPDRVWAIEGCNGIGRHVAMRLIAEGHEVVDVPPKLSARARVFATGQGRKTDATDAHSVALVGTRMAGLRPVVHDEQLAVLRLLVDRRSSLGDDHTRMISQLHQLLLELIPGGAKKDLSAAQAKALLAKVRPRDTVGKARRRVAAELIADLERVYARKKAADKELKELLAATGTTLMDLHGIGPSGAARLLVEVGDITRFPNREHFASWNGTAPIDASSGDQVRHRLSRAGNRQINRTLHIMATVQLRNDTEGRAYFDRRKRDGKTSMEAMRALKRRLSNIVYRTMLDDAVRASAASEVTGPGGQRGSDSDSSATGSQPQHRLFGQATPGPVTTQPRTPLPRVS

SEQ ID NO: 202371 - protein, 347 aa, unidentified
MRFYTQQHKYYCGIDLHARSLYLCILDQAGKPLVHRKLACDRNELIKTLRPYRKDLCVAVECLFCWYWVADLCEEQGFAFVLGHALYMKAIHGGKAKNDRLDSYKIAALLRGGNLPYAYVYPRKMRPTRDLLRRRLFFARKRGELLAHIQNTNTQYNLPPLEERPDKTKDRGAVIEHFEDNTLQMTVAVDVTLLDSYDQVIRDLELYLIHEVRQDHNRDFFLLRSIPGIGEILSLTLVYEIHDISRFPRVQDFLSYARLVKGKHESAGKTKKLTGAKMGNVHLKWAFSEAAALFLRGNAAGQKYFARLEKKHGKGKALSILAAKLGRAVYYMLLRSRPFELQRFVTV

SEQ ID NO: 202372 - protein, 351 aa, unidentified
MKVTTIGIDLAKNVFQIHGVNEHGKATLRKQLKRDQMASFFATLAPCLIGMEACGSAHHWARKLQGFGHTVRLMAPQFVKPYVKTNKNDVADAEAICEAVARPNMRFVPIKNAEQQAVLSLHRARQGFVTARTAQANQIRGLLAEFGLVVPQGIGNIARQVPELIEDATNPLPGAFRLLIQRLLEHLKELDRQADEIGAQIEAWHRDNDLSRKLAKVPGIGPLTASALVATVGDARSFASGRQLAAWLGLVPRQNSSGGKNVLLGISKRGDVYLRTLLIHGARAVIYRSKLKSAMSSWLQTLRGRRNVNVAAVALANKNARIVWALLTQQRDFDPEHVPTAAGNVPGVVEG

SEQ ID NO: 202373 - protein, 355 aa, unidentified
MENVIRQCIGIDCGMKEHVASFSRMYADLRVECLSTLAIPNGPGGFVKLSKWIRKLIDPSMPCQIVLEATGVYHETLACFLTEKGWPVSVVLPNRAKYFSKTLTVKTVNDKVSSQTLAAMGLEKKLDVWSPPDPIYNQLRQLTRERDQLKAESTQIKCQLHAEESGAWPNKSSIKRMNQRLSLIERQVEEVETSIREVVAESPEIDQAVRRMTSIVGVGMLTAVTVLAETNGFNLVRNKKQLVSYAGLDVVERTSGISVRGRSRISHRGNRYLRKCLYFPAMTAARHSNDHKALYNRLISKHGIAMKAAVAVQRKLLVMMYAIWKNGTIYDPNYELKKQQNELGQTRRPALTELA

SEQ ID NO: 202374 - protein, 320 aa, unidentified
MRNTVGLDISKLTFDATAIVGNAEYSAKFDNDSKGLNQFSDRLKSLGCQNLHICMEATGSYYEEVADYFAQYYSVYVVNPLKISKYAESRFKRTKTGKQDAKLIAQYCRSAKESELVKRQKPTDEQYRLLRMIAAYAQIKSECAAMKNRHHAAKDEEAAKAYAQIIKAMNEQLEVLKEKIKEQTEKPNCKEGVKRLETIPAIGRMTAAVLFHHLTSSKFETSNKFAAFAGLSPQQKESGTSVRGKGKLTKFGNRKLRAVLFMPAMVAYRIRAFPDFIKRLEEKKKPKKVIIAALMRKLAVIAYHVHKKGGDYDPSRYKSA

SEQ ID NO: 202375 - protein, 374 aa, unidentified
MKKFSTFIGMDVHKETISVAVVGEEGVPRYYGEIMNTPEAIAKLVKKVADKKDRTAFCYEAGPCGYGIYRQLKGMGYRCDVVAPSLIPKKAGDRVKTDRRDAVMLTRLYRAGELTAVWVPELEQEAIRDLTRAREDIKGMERHARQRLGGFLLRHDKKYSGKSKWTPGHFRWLEAVSFESPIQQIVFQEYVDMVKELQERVTSIEEEMRKAVDGWSLGRVVEALMALRGVNLVTAMMVVAEIGDMSRFESPRQLMAHLGLVPSEHSSGGSQKRGGITKTGNGHARRVLTESSWSYRLPARKTAHLQRKAEKTSEQVQAIAWKAQTRLCKRYWYLIHKGKLPVQACTAVARELLGFIWAIAREVMGKNNVCRAEA

SEQ ID NO: 202376 - protein, 457 aa, unidentified
MQANGFLGIDVSKGYADFLLLDQRKQVMEESFQLQDNKAGRGQLGELIAKWVSVGLETLYCGVESTGGYENNWYYYLKALSQNLNIKVARLNAKAVKAVSDASLKRTITDEVSSENIAAYLISFPEKIDYRSGQVEESGKTFREGRRHFTYVRMLQKQKVQLTNQLEKLLYQYFGEMLVYCRHGIPMWLLKLLSHYPDAIAVIKAGEKRLSAIKGISAAKAKALIEKATKCEQSVSKQIQHVIAVTSKEILHKEQLLQSEKDFLTAIHRETEEVKLASTIPCIGEESAVALILEIEDIHRFESAKKLTAYFGVHPTYKQSGDGTWTVGMSKKGRGELRAVLYMAALSGIRHNPILKQIYARFRAKGMKHYQAMGVVMHKLLRMIYGVLKNKTKFDAAIDQKNTEQAKEKQEQQKKQFKEVEKIKGQKKYRYQAATTEAPISRIAAQKRKKQAASQAS

SEQ ID NO: 202377 - protein, 430 aa, unidentified
MTRQNLTPNHGVLVAIDIAKARNEVLVQIPGSQRRRRLTILNQRADHDRLIAQLAALDQPVICGFEATGNYHRPLGWRLLEAGFDVRLISSMALARTREALHNGWDKNDPKDAQVILHMLSIGACQRYYDPLAQGISDIQELSKTYEAISKAKTEVLHRLQTHYLPLYFPEIDRFRQSSRSDWLLAFLDRFPTPASIVALSKDAFIEAAWTIVGRKVAKAQLLGDIYETAATSIGLPIPADAIAVRMFRMVIAEARSLVQQRAEIEQVADTVLHQHPDYQLLRKIPGIGPINAMAIIAEAGDIRRFGHHRQFLKFCGLDLATQQSGTFRGQTKLSKYGNARLRRILWIASQVAIQQRENSFRDKFERYIAKDRDNKDLRRKALTAIAAKMARVVHAVIKTGSDYRPFFEGTVPGGRTPLCKGREGAIATL

SEQ ID NO: 202378 - protein, 275 aa, unidentified
MIMLGIDAHKRTHTAVTVDELGRQLGVRTTTATSRADHLELMRWSDQFGPDRTWAVEDCRHLSRQLERDMLAAANDWSGGPKMRAHAREGARTYGKSDPIDALAVARAALREPNLPTAYLDESAREVRLLVDHREDLIGERTRHINRLRWREVHGVAAVSAAKLIGEVAGVGRFRSRHAFARHNGTAPTPVWSGNTERHRLSRAGNRQLNAAIHRVALTQARSHPQARVYLDQRLQAGATRKEAIRSLKRRLSDVVYRAMLADAATQERPQAVAA

SEQ ID NO: 202379 - protein, 349 aa, unidentified
MYKKLNSAATLIQRTTTEAPHGHMYYIGLDVHKKTISYCVKDASGRICQEGKVGATRWELDVWIKTLPQPWTVAMEATIFTGWIYDHLKPHAADVKVAHPLMLRAIAAAKKKNDSIDASKIADCLRCDFLPECYMAATEIRERRRTLRYRHLLVRQMVQMKNRVSGLLMETGVSHNKQRLHKVGYFPELLANADAVSTSIRPLLQLSRESITRLQRTEGAIIRSLQRDPLLAERVRRLQTIPAVGKVTALSWALEMGDISRFRSIRQAISYCGLCGDEKRSADKVARTPISKQRNKHIQRVLVEAAKLAPRRNPDLALVYENARQKGNANCATLAVARKLVAYLMAVEL

SEQ ID NO: 202380 - protein, 502 aa, unidentified
MELVYRRCAGLDVHQKSISACVRIRESGKQEVKIYETTFGTFTRDLERLRQWLKEHRVKQVAMESTGVFWVPVWNILEPVDWRFELKLVNPATVRALRGCKTDRIDARRISEFLQHGLLHGSFVPPRPVRELRDTTRSRVQIQGERNRVINRIGRLLETVNIKLGSVASNIVGKSGRAMLQAIVDGKSKPEELAELALGHLRAKIPDLVLALRGRPSEHFRWLLRSLLAELNWLDARLTELDARITEQMEPHQDVVKRLCTIPGVDRITAWILIAELGLDMSQFPDAAHAASWAGLCPGNAESGGKRFSGKTRKGNRYLRRILVQSAWAAAHSKDSFLAAVFHRVAHRRGMKKAAVAVAHRILILAYHIIRDGGEYRELGGDYFDRLHPERTATRLVRRLSKIGYDVTLTPRETPAGEPSGGASPRRRGRPCKCAERGVPCTHPHRSLQPTQTPPQPRDTNEPNRQCSKCARWGIPCIHLKPRISRSNSGVTFPAAAPESTA

SEQ ID NO: 202381 - protein, 339 aa, unidentified
MKHTVVGVDSAKRVFQLYWVERETGEIVNLSLKREKFLEHFANRAPCLIGMEAGGGSQHWARQLKALGHEVRLLPGKRVKPFVGGNKNDVADARAIWTAVQQPGMKSVAVKSEAQQAVLALHRMRHQLVKFRTAQINGLRGLLAEYGEVMPQGKRGIRKGISKALQCLADRLPAVLIDTLREQFARIGQLDAQVAEIERRLRHWHKEDPASQRIAEIPGVGLLSATAAVATMGDARVFRSGREFAAWLGLVPRQSGTGGRVKLLGISKRGDTYLRTLLIHGARSVLAHSKEPPQWATNLAKRRPHNVVVVALANKMGRTIWALLAHERAYQKGYVSQPA

SEQ ID NO: 202382 - protein, 378 aa, unidentified
MSRSIITLGMDVHKDSITLAVLPDGTPAPTRLDRLPNDLAKLHRYCDRLAEHGELRACYEASGAGYVLHRAMREWGYTCDVIAPSLIPTKPGVQRKHDKHDAVQLARLHRAGELTAVRIPSEAEERVRDVVRCRETFQHETLKSRHYILKFLARRGFVYRDGENWSLKHLAWLRALAAVSSPLAREDALVFREYLSLFDYKIGRRDELDREIVTLALLPAFATAVAWLQCFRGFQLHAAMVLATEIVDWRRFERPTQLMAYLGLVSRENSSGPRERKGSITKAGNSHCRHVLVQAAWSYRHRPQVGTHLKARQHGQPAAVITHAWKAQHRLHKLYNHLAYRKQPQIAAVAVARELVGFLWAVMRELPAAQIPSTSSMN

SEQ ID NO: 202383 - protein, 373 aa, unidentified
MNNNTVYVGMDVHKDSFFLCCYTNEKEKAEFPQKADAHYSKVINYIEAMRFHYGDDALFICGYEAGCLGFTLYHQLTDHKVKCVILAPNTMLQQKGRKKIKTDKRDAALIARCLAHHDYSPVHIPTDQDEQTKEYIRMRNDHKTALKKIKQQILSFCLRHNYRFDGTKKHWTQAHLKWLRSLKPEGLYEEILKEYLLTYDNLTDKLERLDKRIEELSADEAYHVNVKKLSCFIGVKTVTALSILTEVGDFRRFSSARHFASYIGLTPGEDSSGDDKKRLGITKAGNRHVRSLLVEAAQHYGRGEIGYKSRVLKARQEGNAPEVIAYADKANERLRRRYYRMVLKNNKKSNVAKAAVARELACFIWGMLTSNEG

SEQ ID NO: 202384 - protein, 449 aa, unidentified
MSRPQVIDDQEHERVHDRVAAIDVAKDTGMVCTRTPHPSRPGARRAAVWTVKARMNAIGALGRQLHKDGIEIVTLESTSDYWRIWFFVLEACGLAVQLVHAAQAKNLPGRPKTDKLDAQWLARLTEMGLLRASFVPPKAIRDLRDYTRARARLVQERTRCFQRLEKLLEGALVKVSSVASKLTTVSAQDMIKAMIAGQRDPHELAALARGRMKAKHDDLVEALTGMFDDHHGELAALLLDQIAFLDTRIAQLTERAAELTAAMPGAWGVNADGTTGPDAGTGPDDPVLPAVARLAQIPGISQDLARAIIAETGLDMSRFPTAGHLVSWAGLCPSARQSGSRTRAGKKGQGDTWLRGSLGQAAIGAARTATFLGERYGRIARRRGKAKAQVAVARSILVIIWHLLRNPEARYTDLGPGYYQARTDVDRKIRNHIRQIQALGFAVTLTRAA

SEQ ID NO: 202385 - protein, 347 aa, unidentified
MNKKWFIGIDVSKKTLDASIFVAGEVINRFPHIQVRNEKQGFKELLRWAKKQDVNTKDTLFGLEFTGYYSDALEQFLTGKKLCYTMLPTTVVKHYQRGTRDKNDKTDSAKIADYLFRFNGTECIKLRVLPSKAMQELKALKSERKFYVQQRVACENRQKVAKSKQEQKHLQKAIDLFNEQIEQIERQMADVVISDEEIYLTYMRLLTIPGIGPVNAINTIANTQNFTAFETARQYAKYVGVAPSEHSSGTSVRWRGRPSPHADLQAKADLSMAALRAVEFNFDMSQCYERKLGNRKDDKDVQRKALNAIKFKLIRQMFSVANQHKNFVVMQQRLVQNEKHSTEKRVN

SEQ ID NO: 202386 - protein, 409 aa, unidentified
MNKLFVGIDVGSRINAVYIMLPDGSKHSSFTVQNNLGGAQSLSKRVVAALKDFNISTVILGMEATSVYGDNLACFLREDGALGRFEKRIHVLNPKQVKKFKDAYPDLPKNDAIDAFVIADNLRFGRITAAIYSDDYRYKALQTLTRTRFSVVQNLTREKQRFMNYLFMKCSGLAQEKVFSNTYGSTALALIEEFETPDDIANMDVDQLVEFLVEKGKNRFPNPSEVAKAVQAAARGSYRLPKTVNDSVNQVLSISISSMRAMQEQIKALDKEIERQFENIPNTLTSIPGIGKVLSAGIIAEIGDINRFPNHAAVAKYAGLAWTQHQSGTFEAQNTRQIKSGNRFLKYYLCEAAFSIVRCDTEYRRFYDLKYKEVNRYQHKRALALTARKLVRLVFRLLKDNRLYKPSVA

SEQ ID NO: 202387 - protein, 337 aa, unidentified
MEYFAGLDVSMAETQICVMGRNGAVIHKAKVPSTPADIAAELAQLPTCRRIVFETGRMAPMLYHGLRQLGLPVICVESRQAYQALKLLATHKTDHNDARGLAHLARTGFFKPVHVKSLPAHAVRSLIIARKKLVGQRVTLENQIRGLAVVFGVRLPRALSSTFIRQALQASEGIPGLSAALQGLVAARTAVLAAIVAIDGDIRRMVRASDACRRLMSIPGVGQLTALAFTAAVDNPGRFRRSRDIGAYLGLVPRRHQSGEIDYSGSISKCGDRRLRTLLYEAANVMLTRYKGALKLKEWAFAVAKRSTMRKARIALARRLAIIMHAMLRHGTEFKAA

SEQ ID NO: 202388 - protein, 338 aa, unidentified
MPLYGGIDLHANNSVIVLLDDQDQVVYQKRLPNDLPSLLQQLSPYQASLQGVVVESTYNWYWLVDGLMERGYVVHLANTAAIQQYAGLKYTDDHSDARWLAHLLRLGVLPEGYIYPKEGRAVRDLLRKRSQLVQHKTTHLLSIQNLLTRNTGRAMSGNRIKQLTAADVDGLLPEPELALAVKSNLAVMRCLETQIATIAQTVTQRVKLQAEFNDLLTVSGIGQILALTIMLETGDIRRFPAVGNFASYCRCVGSQKLSNGKRKGSGNTKKGNKYLAWAFVEAAHFAVRYNPCIKRFYQRKQAKTNTVVATKAVAHKLARACFYILRDQVPFDVSKAFQ

SEQ ID NO: 202389 - protein, 413 aa, unidentified
MEVVYQRCAGLDVGKDEVVACTRVPAGAVGGGRRQEVRTYKTFSASLAALADWLGDQGVTQVVMEATGQYWKPVWYVLEERGFELLLVNARHVKILPGRKTDVGDAAWLCELLEHGLLRGSFVPPPAIRELRDLTRYRKRLIQTHTAETQRIHKTLEDASIRLGSVASDVLGVSGRAMLRALLAGERDPATLADLARGRLRNKLPELREALRGRFDAHHALLLRLALEHVEQLERSIAALDAEVDRVIAPFATARDHLDTITGVGKRAAECIIAEIGVDMGVFPTAGHLASWAGRCPGNNVTGGKRRSGKPTKGNRWLGEILVECAWAAAHSRDTYLAAQFWRLARRIGKKKAAGAVGHSILVIAWHLLDGDCDYAELGGDFFVQRDTDRARQRAVAQLQALGYHVTLKQAAA

SEQ ID NO: 202390 - protein, 369 aa, unidentified
MDAALSPTASQCAKLVMLKSREKERASVKEVSIIGVDLAKNVFQLHGAAADGTVVFRKKLSRPQFGRFMRDHPACEVAMEACPSAHHWARELTHDGHHVRLIAPHYVKPFLKRQKNDAADAEAIVEAALRPTMRFVEPKTADQQARAVAFRTREQLVKQRTEAVNALRSHLYEFGYIAPVGIGFVPRLLRVVDDPEADIPDLARDICRMLLEQIAQLTDRINALKTRIATISNEVEMPRRLQTLPGVGPITALAVETFAPPMEKFRRGRDFAAWLGLVPRQHSTGGKQKLGKTSKMGQRDIRRLLVIGATAVIRWASRRRAPKGSWLARMLKRKPIPVVAVALANKMARGIWAMLSRDEDYRGPVVIGA

SEQ ID NO: 202391 - protein, 387 aa, unidentified
MVFVGIDVSKDSHSCHILSSKGKTLVDNLVISNDLEGFNTLDDSLSLVGEDIRVALESTGHYSINIESFLRNKGYSVMLLNPLMVDKFKKSQTLRKTKTDKSDAKLIATLLFSKIQEATADVPIEIRELKSLTRNRSRLVKEKSKLKVQISRLLVILFPELKTIFSSQHRKSAYAILKVYPNIKELAKANIDEITKILKSTSRGRYSSGKASEIIELAKKSIGSSSKALSFELQQTIRLIEVFNQEIKVIEVEIKSMLDATKSPITTIPGVASTLGSIIISEIGNINRFGNPSKLLAFSGLEPTIYQSGQYSATRSRMVKRGSSYLRWALMQAARTVCLSDKTFKDYLTKKRAEGKHYLVALSHVAKKLIRVIFYLLKANKDFIPQN

SEQ ID NO: 202392 - protein, 373 aa, unidentified
MVDDSVGYVAFDTAKLHHAVAIAEEGRTGEVRFLGEIENSDAAAIKLVKKLSQRYGRVTFCYEAGPTGYDLHRLIAGLGHECMVVAPSLIPKKPGDRVKTNRRDALSLARLLRAGELTAIWVPDARHEAMRDLTRSREAAVADLVSKRQQVLSLLLRLGRHYEGKRHWTRLHMTWLLSQKLEYAEQRIALEEMLLAVREAQGRVARLEQAIRTALPDWSLAPMVTALMAMRGFDLVSASAFMAEIGDLSRFATARELMGYLGLVPSEQSTGETVRRAGITKAGNRRARRILVECSWSYRHPPRLGKEKLAKVEAAPRAVREIAWKAQHRLTGRYRALTRNGKKPTVVVTAIARELSGFIWAIDRAARVAPMTR

SEQ ID NO: 202393 - protein, 457 aa, unidentified
MNSKRSKRRSQKVVSLESLKQLNLNAAGLDIGDDEIWACVPEGRAAQSVRVFETFTVNLYALADWLAACEVDTVALESTGVYWIPVYEVLEARGFEVCLVNARHVKKMGGRKTDVLDCQWLQQLHTYGLLKGSFRPDEDIVALRAIARQRDTLIRYRAMHIQHMQKALTQMNLKLMNVVSDITGVTGLAIVRAMVQGERDPQRLAALRHPRCVHTEEDIAKALQGNWRSEHLFALQQALEFFDYYTQQMAACDDQLAQRYAAFEPQVDVHIKPLAKPKRARRKPERNAPAFDLRTYLYQLTGVDLTRIDGIDALTAHNVICEIGLDMSRWPTVKHFTSWLRLAPYEDKSGGKTLRRGVPKTQNRANLALRRAAQSLYHSQSALGAFYRRIQRRHGPATAVSATAHKLARIIYHLLKSGEEYRDPGQDYFDVKYRDRAVSNLKRRAKQLGFEVAPVSD

SEQ ID NO: 202394 - protein, 316 aa, unidentified
MNTKTQVEINIGIDTSQSQLDIYVRPTGDYFSVDNSLAGAKSAVRKLRKYQPTRVLIEATGRLEMDFVCAAHEAGLPVVVCNAGQVRQFARSTGRLAKTDKLDAQDIAHFGEALQPQLTLLKPDKLRDISDLITVRRQCLDMSTMQKNRLMRMPKSVQPPIQRILKLIQKEIERIDQKLDKLVDSIPQWRDQRDLLMSAKGVGKVVAYTLMSELPELGKLNRKEIAALVGVAPMNRDSGSYRGKRRVSGGRSKVRTVLYISMWSSIQYDPKMKAKYERLVAAGKPKKVALVACMRKQLTILNTMMKNGTHWNEKYA

SEQ ID NO: 202395 - protein, 345 aa, unidentified
MELRTLGIDLGKATFYAVGLNERGAVALRKKFSRVQLLRFTANLKVALIGMEACGGAHFLGRILRKQGHEVRLIPAQYVKPFVKTNKNDFIDAEAIAEAVGRPTMRFVPIKSDEQLDLQSLHRVRERWVMRRTAVVNQIRGLLLERGVTLRKGRKYVDQQLPEILEDAEVKLTGALRTLLAELHLELQQLAERIAAMDHIIRELVDKHEGGRHLLSVPGVGPVTATAIIAAIGNGNTFAKGRDFAAWVGLTPAEYSTGGKQHLLGISKRGNPYLRRLFVQGARAVLQVRDKQDPALKKWLNGMAERKHNNVAVIALANKLARISWAVLAKEQAYQPRESLTAAAA

SEQ ID NO: 202396 - protein, 337 aa, unidentified
MSILHVGIDVSRKNLDVATGHGEAQPVYLGKFTNDQAGFEQLAQALQSAMQNLGTTPIHLTIEPTGGYEQLLARFAIAQGWRVSLPNPLLVRDWARAEGRRSKTDRQDALLLARYGARAHPPEWCPLPASVEQLEALLLRREDLQAMLRQEQNRQLALQARDAYQGPVAQSLDASIATITAALSQIEQAINNQLDQHPDLKQQTKWLRQVPGIGKKNVLFVLVLLHRWGTLTQMTGSSKGLTAYVGLDPVAFTSGTSVYKRSGISRKGNKTVRHFLYLGALGGVRGHNALCVFYQRLLARGKAKKLALVAAARKILVWAWAVFRNQTPFDHALSYAR

SEQ ID NO: 202397 - protein, 400 aa, unidentified
MRAVFGIDVSKTSSEVAILVNGEKVHGYTILNDAIGFNRLLGDLKTVHNPEIIFEATGVYSRRLQAFLEEYSYAYTRLNPLEAKKQLDSLRVRKTDKIDAEKLAKSQLVHNRKPTYVQEEVYQHLRDLSRFYQNMTEDLVRTKNRLHKVLQVTFPELETLLSTPTGEQYWNLVMAFPCKEFVLSLSQSNLCEIVRQSTSKRISEKRITYLTDKLIKLAKQSFCAVKNTSPMLEEVRYYAQELLRLSERRQVVLNDMVALAQPLPEYDILRSIPGIAETTATSIIGELGDIRRFQSSNQINAFIGIDLRHYESGNFLAKEHITKRGNPYARKILFKCIHNIASASHTNPCHIADFYEKRKRQSTIASTKPHTIASIHRLIRTMYYLITHNKLYDYTSIQNR

SEQ ID NO: 202398 - protein, 404 aa, unidentified
METAIAGIDWASEEHRLCLVDETGQRLLDRRISHSEEGIAALCRLLREQGVARVALERPDGVLVERLLEAGILVVAIHPNQVKAARERYQVARGKSDGFDAYVLAELCRTDMHRLRAIEPDSDQTKALRILVRSREDLVQTRVSLANQLRAQLERSWPGAARLFADVDSPIALAFLERYPSPQDARNLGEKRLAAFLARNRYSGRRQPSELLERLRSAPRGNTGELEAEAARTAVLALVATLQPLVTQIRLLTSEIAGALHAHPDGKLYRSLFIDPKTVVTAASLLTEIGDSRNRYPTSDALAADAGMSPVAVESGKRKNACFRRACDKRLRNALATLADTSRHQNPWAHDIYQRARDRGCDHPHALRILGRAWTRILWRMWTNHQPYDPTRHGNLQQLLTNQG

SEQ ID NO: 202399 - protein, 402 aa, unidentified
MNCVGIDISKGKSMIAVMRPFGEVVVSPFEVLHTDSELSKLARLLKSLDGETRVVMEATGNYHAPVAWLLHDAGLYVSVVNAMLVHDYGNNSLRRGKTDKKDAVKLANYGLDHWLTLPRYVPEEDTRLMLKSCYRQYQQYSKVRTMLKNNLISLLDTAFPDANRLFTSPPRADGSEKWVDFVAAFWHCECVCGLSEKAFTAKYQKWCKKHGYNFSEDKALDIYASACGHFGVMPKTDTAKLLVEQAISQLRATSAALAALKQEMQSLAASLPEYPVVMEMFGVGPALGPQLIAEIGDVRRFHSKKALVAFAGIDAPPYQSGQIDVRSRSISKRGSASLRRTLFLVMGVLLQCAPMDEPVYQFMNKKRSEGKPYRVYMMASANKFLRIYYASVKAYLDSLEHD

SEQ ID NO: 202400 - protein, 373 aa, unidentified
MNTIYIGVDFHARQQTICYLTTETGELVTTALKHEPKTAVRTFYEQFSGQVIVGLEASGYSPWFERLLEELGHQVWLGDATEIRRRARWRQKNDRRDAELILDLMLHDEFPRLHQPSLQSREVMRMLRYRQKLIKMRTMSKNSLQSLALQSGIARRSRLFTREGKAELDAAEMSPAMEWQRAHWWQLLESLNQQALEAMTWLKGAGQNDVSITRLRTHPGIGLLTSLCLVHTLQPVARFRNTRKVAAYVGFDPMERSSAERKHFLGISKAGSRVLRYLLVEAANVAVRKDEELKRFYQRLAQRRGRPKAKVAAARKLLIRAYIMMRDEIDYAEFRRRAVAARLARLRQGPPIPAALIGQPASTERQEPPPREK

SEQ ID NO: 202401 - protein, 345 aa, unidentified
MIVIGADTHKSSHTLVAVDSVTGRRVGVCTVASTTAGALDALSWARRVCGGADRVWAVEDCRHVSGRLERLLISAGEAVVRVAPRLMAGARSSGRERGKSDPIDAAAVARAAIREGVEQLPVARLEGAELDVRLLLDHHDDLVKARSQSQQRLRWHLHDLYDDLSIPAGALDRTVWLDRVLGRLRRSPQTTRVRIARDLVCEIRGLTRRIRELEQEIRLLVCELCPQLVAMPGCGPLTAAKLLAEVAGADRFKSDAKLARAAGVAPVPASSGRQDRHRLDRGGNRQLNCALHRIAVTQGRVHAPARAYLERKQAEGKSRREAIRCLKRQLARTVYSTLKTEPALT

SEQ ID NO: 202402 - protein, 354 aa, unidentified
MKDEPIHYLGLDVHQSTTVACVRDEQGSVRMRATVPTEEKAIVQLVASAGRRVHVAFEEGTQAQWLHDVLVERVERVVVFNARGRGARDNKDDRIDAEAAAERLRTGALKPVFHGAPEMLTLRELVRNYENLVQDATRVMLRIKAMFRGRGIATPGVSVYRPSQRKAWLAKLGGGARIRATTLLTQLDTLSELRAKSKTAMIAAARRLPAWKVLSSMPFFGPVRVAQVMAIIRTPFRFRTKRNLWPYAGLAVVRRSSADQEFTNGKLQRSSKQPMTRGLNRNHHPTLKAVFKGAANDAVSRPGPLRDCYEASVRRGVDKELAKVTLARKIAAVMLHLWKRGELFDPTKLTNQAT

SEQ ID NO: 202403 - protein, 328 aa, unidentified
MFYLGIDVAKAKLDCCLLLDPDKAKRKSKSVANTKAGLANLLEWLRTKKVSPNNLHVVMEGTGVYHEQAALVLVETGVTVSIVNPAQVKNFGRGLAVRTKTDGVDSFVLARYGALLKPAAWQPPTLEARVLRALLARREAVALDLQRELNRLEKANVTEIPIFIRQSIDDSIEFLRTQLAKLQQEIDDHIDHHPDLRRDMELLTSIPAVGPQTGSNLLAIVHSYRFDSAEQLAAYLGLVPVERQSGSSIQGRARLSKAGPARIRAVLYMAAVVATKYNPHVKAVYDRLLAKGKAKMAAIGAAMRKLVHLCFGVLKTRTHYQADYAKIS

SEQ ID NO: 202404 - protein, 392 aa, unidentified
MPKIVCPVCCGIDVHKSFVVACVATTDEKLVTTYKRKRFSTFTGDLRRLSDWLGQNNCQDVCMESTGKYWIPVYNILEPTCRIVLAHPKYARAIKGKKTDKRDAKWIADIFKHDLLHGSFIPPADIRQLRDLVRYHFKLTSYTTGEKNRAKDCLTVSNIKLDDVFSDLFGKTASAITERILENNEPFDVRPYLTKGIKASPEEIQAAVDGAMCVNQAEKLRIIRSHMDNLALCKANLQSEILSIAEKFLPQVNLISTVPGFQSFSAIAIISEIGVNMSVFPTSRHLCSWAGLTPQNDQSAGKKKTTRISRAGAYIKPLLVQCALCAIRSKKNPEVAGRYHAIKKRRGHKKAIIAIARMLLTAIYNILKNDEPYNAELYRQSDKPPVQREVTV

SEQ ID NO: 202405 - protein, 367 aa, unidentified
MKKVSTRAAAQSRNISQQKLTVGLDLGDRNSWYCVLDESGQIQLEQRVRTNAKGLREVFGEMPSSRVTLEIGTHSPWISRLLRELGHEVIVANARQVRLIGESRKKDDRLDAQTLARLARIDPELLYPVKHRSAQAQADLMMIRARAGLVRARTGLVNTARGLAKSYGERLRGCNVRNMNPEKAESLSPELQRALEPLLSAIEELSERICEYNDQIEALAQQSYPQVALLKQIKGVGTLIGLTFLLTLEDPHRFRKSRDVGCYLGLQPGRRNSGQSEPQMHISKQGDPYLRTLLVQGAQHILGPFGVDCDLRRWGLKLAERGGRTGKKRAIVATARKLAVLLHHLWVSGEVYEPLHNRCGTTLATAA

SEQ ID NO: 202406 - protein, 407 aa, unidentified
MPRDYIGVDWADTEHAVWVEDESGTQVAALTVPHTAAGLSEFGRWLYERQAQGIECWAAIERPEGRVVDFLLDHGVVVYPVNPKALDRARDRFRMSGTKSDPFDARVLAAFLRTDHPHLRPLRPSSELAQELKLLTRDAQRLIRQQTRLLNQLTATLKEYYPRPLEVLGELTTPLARAFLTAYPSPDALAALSRAQWRRFARTHRLSEARTMALWTALQPPQLPVPAHVVRAKARLVRVLVDELSATVRAVEEYRQAVDNFFATLPAAEWARSLPGGKSGTTVPTLWAELGDAPDRWQSFAHVQAQAGAVPVTARSGKSQHVRFRFACNTHLRAATHTLAFLSLRQSEWARGYYKQYRARGHRHHEALRALGAKWLKIIFVMWMHHTPYDEQYHLANMARQHLRQAA

SEQ ID NO: 202407 - protein, 344 aa, unidentified
MNHYAGIDVSLKSSAVCIVDGAGKIIREAAVESEPAALIGWFKRLGVELERIGLEAGPLSQWLYAAMQEAGLRVELLETRHVRDAFRAMSVKSDRNDARGIAQLMRLGWFRPVHCKSIEAQEMRAVLTARKLLQSKLHDIENCLRGVLRGFGLKARKTTERTFATRIEALAAGHSGLTLVVQALLAAHTVLLREFKKLDKQVQQLAKAHPQAKLLMTTPAVGPIVALTYVFAIDDPKRFRSSKATGAHFGLTPRRYQSGETDHSGRITKIGDASVREALYQAAHIMLTKPVKNCSQLKSWAMRIARRAGPRKAKVALARKLAVILHRMLADNMPFNPAAKAAAT

SEQ ID NO: 202408 - protein, 417 aa, unidentified
MKKHNNCPKKSEPTSKRAKSRGPVQRDPKEVLAELVGKLREKLDPRVVAASAGEEDSRGKVRPNLDRLTVGVDLGDQWSHYCILGLEGERLAEGQLRTTPRDITEFFEALNAARVVVEVGTHSAWVREVICSYGHEVLVANPRLMEGSKRRKRKNDRIEANKLARLGRVDPQSLHPMQHRSREVRQDLVVLRARDALVAARTELINATRGLVKSMGSRLSKCSSPSFAQKVEETVPVELRDALLPLVRMAAALSDCIQGYDEKIEKLGREKYEHTALLRQVKGVGPITSLAYVLTLENPDRFVKSRDVGPYLGLVPKQEDSGESQPQLGISKAGDTMMRRLLVGSAQYILGPFGPDTDLRRYGLRLCERGGKNAKKRAAVAVARKLAVLLHCLWVSGEVYEPLRQGMSATMTPAAAA

SEQ ID NO: 202409 - protein, 345 aa, unidentified
MKEVYAGMDIGSKECAVVAIESGGSQIDSVVFKTSERNMVAFFSRHPNSKVLIEECEMAAWVRATIKPHVASVIVCDPKRNAWVAKGTNKNDRVDAAKLAELNRLGSFSEVWHPDDEDVAGFKVLVKHYDDTSKRLAEVKCQIKARLRKQGVVTRGEAVYGPRRDEALSRVDNTFARIAIEQDYELLDYLEGAKKAARSSVVAASGRFPVIALLKEIPGVGPILAARFVAYVADPHRFNKRTLASYSCLAVVKRSSDGSPLGREHLSRAGNSALKDLSRTAFERAMATRSPNGIKEFYAGSLTRTGDKTKARLNTQRKILALMLAIWRDKTEYRDELVTRAFTGA

SEQ ID NO: 202410 - protein, 458 aa, unidentified
MARASRKADAAPRTRRVVHPDAAGIDVGATHLYAALPADRSPEPVGVFETFTEDLHRLARWLQAHRIATVAMESTGVFWIPVFQILESYGIQVFLVNARHVKNVPGRKTDVRDCQWLQYLHEVGLLRGSFRPGEDVCAVRTLMRHRSELVRQGASFIQHMQKALTQMNLQVHHVLSDLSGVSGLAIVDALLQGERDPAQLAKLCDRRVRASEETVRKALVGDWRAEHLFTLRQARASYAHVKQQLRECDAEIEQHLARLGSAVDPEATPPPPASPSHRPRKGEVALPDTDLRTECYRILGVDATEIPGLGPSSVCALLTELGPDLKAAFPRSRHFCSGQGLCPNPQISGGRVLKRGTRDVKHRVATLFRLAAQALARSEGVLGGFYRRMRAKLGPAAAITATAHKLARIYYHGVTTKERYEERVFARIEEQHQKRRLSRLRREAEACGMQLVALAAAG

SEQ ID NO: 202411 - protein, 397 aa, unidentified
MDSLDRTRLEQFRQFKREIRGSERYLIVGLDIAKDSHHAFFGTATGHTLWKRWLFDNSKEGFQELLLQTEALQVRHGLPQVVFGLEPTANYHKPLGEHLIRHGHQVVLVSGVAVKRNRELLDGRWDKHDTKDAANVADLISQGKCLYYEHPDPRIRDLRILLSLKKRWKRQEQGLRVRIRNGLLAQYFPELDRTFPRLIAPGKESDLLSAIREPSSPIGCEVHPAVAFVAQLMVKQLQQIREVLRAVQGKIQALCSQFPEYPYLLSIPGFGPEISSQVLAAIGDPFRFGNGSQVLKMAGLDLSAERSGKTSERARPVISKKGKANLRYALYQAAFIASTRNAAFTAYYTLRLKARRQEPGIQAKRRVKLAAKLLIIAWTLMKRKEAFDPERLIPSVL

SEQ ID NO: 202412 - protein, 357 aa, unidentified
MEKLYLGVDLHKRSCWVTVLDADGHLIESRKLGTERWELLDYFGKVRKPAALAVEATFNWYYFLNLVEPLGLELHLVHPWKTRAIASARIKHDRLDSRVLAELLRTGFLAEAWIAPRAVRERRQLLRYRVHTVQWATRAKNCIHAILNRNGIRSPLRSPFGPRGRQFLEGAELASPDRWEVDGQLARLDLLAGQLQELDREIRKRTKASPVAQALEQIPGVGPFIAWLLIAEIGDIRRFPTPKHLASYTGLVPSLYASGEHRWGGAITKQGSTVLRWGLVQAAHRAALSPRFQDYYQRQRERHGAGKATVALARKLAVIAYYRWWQAMNAAASPKVEEVRERSCAGAWSEDRPYRSD

SEQ ID NO: 202413 - protein, 406 aa, unidentified
MNQDSPGDGNRFWCGIDWGGRSHYLCVLDDRGGQLLSRKIAHTVDGLIALVEVIASLAGSVRIAIERAEGLLVEHLQQQCDAEIYCVSPKISARARERYRMAAAKSDEFDAYVLADTLRHQYAQWRPLAVASPVLAELIAVSRDRQRILDMQVDTENRLRSILEAYHPAPLHLFSSLDRDITLAFIRTFPTPAQASRITTTRMGGFTGRHGYSGRQKPETLIARMQPHLLSASEGTAAGKALAAKAFTEQLTLLNTHLRAHDKRLGELLDAHPDAPIFTSFPGIGPVIAGVLISEMGEERSRFPSAPSLLAETGLAPVTKASGRTRQVRFRYAANRRMRHAIDWWMFVAVREDSWSAAIYEHARAAGQPHHRALRGLGARWCRILWRCWHDHTPYDPAIHHRTTAA

SEQ ID NO: 202414 - protein, 337 aa, unidentified
MKYSGIDLHSNNSVVVVSDEADRVMYSKRLPNELAKVLEALEPYRDELAGVVVESTYNWYWLVDGLQAAGHQVHLANTAAMKRYEGLKRSDDETDAAHLAHLLRLGILPTGYIYPREQRALRDLARRRMQLVRQRSMHVLAVENVQARETGTRMTGDRIKRLSVQAVGELGYVPEVALGISANVAVIGALNEQIRKLEKHLAQQVRLTPQYTVLATAPGIAKILATVIMLESGPIERFAAVGNYSSYARCVDSVRLSNGKKKGEGNRRNGNKYLAWAFIEAANMAKRWCPEAKRFHDRKRAKTNPIVATKALAHKLARACYHMLKTGEPFDMQRCFG

SEQ ID NO: 202415 - protein, 371 aa, unidentified
MYIVGIDIGKNHHEASIVSPEGKQIGRSLRFATTHKGADSLMSFIFKNIGNSPCVFGMEATGHYWYPIYSFLKAKGYTIYVINPIQSDSLRKMYIRQTKNESIESFLIAEVIRFGQFGTTSMADENILAMRQLCRYRDSVISSRTEIKLRIGTIMEQIFPEYEKQFSSLWVSTSMGILEKYLTPENIENAPIDELFEIKKDKSHNRLTKAKAISIKEAAADTFGIKIAQDAFSFQLKQLIDRMNFLDKQIEALDIEIMKYYEQFDCYLHTIPGIGIIGAATILAEIGDISRFKNSSALVTFAGIDPTVRQSGEFNSTHNHMSKRGSPYLRHAIFLAATTCSFHNSPLNAYYKKKRDQGKHHLTATGAVARL

SEQ ID NO: 202416 - protein, 358 aa, unidentified
MKIESTKIDFSGQNVYAGIDVHLKSWNVTIMVNNREHKTYSQDPSAELLWNYLRKNFPGAIYYSAYEAGFCGFSAHRELASFGIRNIVVNPADIPTTDKEKRQKEDKRDSRKIAKSLKNGELTGIYVPGKDMEELRGLIRYRKTLVKEISRHKNRIKSFLYFNGIKIPLELEGPSKHWSGRFTQWLKEVELSTVHGKMVLEDTLDTAETLRKKLLKVNRHLRQINKEGIYAAKLSLLQSIPGIGLITAITLLAEMEDILRFKNLDQLCSFVGLVPSTNSSGEKENVGRITRRSNRFLREVIIESAWMASRLDPSLAYSYGQLCTRMKSNEAIIRIAKKLLNRIRYVMKNETEYVHSVI

SEQ ID NO: 202417 - protein, 405 aa, unidentified
MNMNAVGIDVSKGKSMVAILRPYGEIVSTPFEVKHTVSGIRSLIEHIQAIDGESRIVMEHTGRYYEPIVRELSQADLFVSAVNPKLIKDFGDNSLRKVKSDKADALKIARYTLDSWTELRQYSFMDEIRNQLKIMNRQFDFYMKHKTAMKNNLIGILDQTYPGANTYFDSPAREDGSQKWVDFATTYWHVDCVRKLSLNAFVDHYQKWCKRRKYNFSQSKAVEIYEASKEIVSVLPKDDLTKLIVKQAVEQLNMASQTVEQLRAMMNEAASKLPEYPIVMAMKGVGRSLGPQLMAEIGDVSRFTHKGAITAFAGVDPGVNESGSYEQKSVPASKRGSGTLRKTLFQVMDALIKTKPQDDPVYLFMDKKRSQGKPYYVYMTAGANKFLRIYYGKVKECLRNLEQES

SEQ ID NO: 202418 - protein, 357 aa, unidentified
MKKSINTRATTLSVIGLDLADDKSDWVGLDEAGRIVRRERVRTTETELRRVFGAVAATKIAIEVGTHSAWVKRVLSSVGHDVVVANARRVALIGSNKRKNNRVDAELLARLARADKQLLFPIEHRPLQTQADLAVLRSRDLLVRCRTQLINHVRGVCKSFGVRLPKCSAAAFVVRASGRVPTELHDAMALILDQVAELTARIRTFDKSVSSMMKRHAGARIVAQISGVGELTALAYVLTVEDPHRIARSRSAGAYFGLVPGSNDSGEKHEPRRITKEGDRFCRRLLVSAAQYILGPFGIDSDLRRHGQAIATRGGKNAKKRAVVAVARKLAVLMHRLWINNDHYVPLFNAAKMTAAA

SEQ ID NO: 202419 - protein, 330 aa, unidentified
MKNWNVILGVDVSKLSLDICCAERRLHIKIENCSKGFKQFIQWCRLNGITLNEVLVLLEYTGGYEYRFLQFCESINIAYCRIPGLEIKKSMGMVRGKNDKVDAYRIGQYGEEKSKRLVPSRPLNNSILDLRQLMSYRKRVVREKAGQLSTLKERIHMYGQRKADPIIKLLKMQIKNNSLVLAMVEGQIKELIGADDAMSKNYRILKSIKGIGPINAQMSIAYTENFCSFTDGRKYAVYVGVIPFEHSSGTSIRGRRRVSHMANKELKQELNQAAKSAMQHDPEIKSYAERKLKKKPYNLVLNNIKFKLIMRMFSLVRREEMYVENYKISA

SEQ ID NO: 202420 - protein, 401 aa, unidentified
MATLRDNATRVKQFRELKATLRTDRTRLLVGIDVAQAEHVVHLRHAHTRVVVPTLTIPNTTRGFTQLWAAITRAQRTTGCHEVVCGLEPTGTYHHAVATFLDAQGADVVFLSSSVAYWNRRTQDGTWDKHDRKDAANCADLLEQGKVLFYSRPDGPLAELRHLVRCLRRARTELASCKARWRTTLRPALAPMGDALPQRLWVELPAVLQAWERAAPGRPAMPKGRLPLGLATACADLGAQVTAVQTRIAVLEAACTPVAERLPAYALLRSIPGVGPTVGAILLAEIGDIGWYTKFSQLRKLAGLDIVRVQSGQYAGQARISKTGRSLLRWALYHAAIGAARTLAGRARLAALKAKRHGDRFAGFKAIVELAAKQLRVIWGVWRSGTPYDPTRTGGLCRQPR

SEQ ID NO: 202421 - protein, 317 aa, unidentified
MKENGPYIGIDVAKAYLDVTAHLSGEPWRVANDEAGISTIVTHLREGGPTLVVLEPTGGLEMPLTAALATAGLPLAVVNPRQVRDFAKATGRLAKTDRLDARVLAHFAHAVRPTPRPLPDAQTLELAALLARRHQLVQMLTAEKNRLAATRPPVRQRVQVHIRWLKQELADSDGLLSNTIQESPLWRVKDDLLQGVEGIGRVVSITLLAELPELGILDRRQIASLMGLAPFNRDSGMLRGKRRIWGGRARVRAALYMATLTATRFNPVIRAFYRRLLAAGKMKKVALTACMHKLLTILNAMVKHNRPWNPQLNLRNP

SEQ ID NO: 202422 - protein, 275 aa, unidentified
MTITTIGLDLAKYVFQVHGVDAEGNVIEKRRLRRSQVIPYFASIPPCLVGMEACATAHFWGRELRKLGHEVRLMPPQYVKAYLKRGKNDAADAAAICEAVGRPSMRFVPIKTEEQQAVLVMHRARDLLVRQRTQLINALRGHAAEFGIIGAQGRWNVARLLVAIGESRAVPELARAIVEMLAFQLDAISKRIDEVDARINAWHKASPVSQRLATIPGIGPLIGTAIAATVADPAAFRSAREFAAWVGLTPRQKSTGGKQRLGGSAGKVTNTSGGC

SEQ ID NO: 202423 - protein, 315 aa, unidentified
MAMPVSVSKPIVGVDVAKKELVIYHAELDLLEEIPNNKTSINKWLKDLPGSVAIAVEATNIYHLEFADLAFEAGCVIYMVGGYELKHYREGVKVRAKTDALDAKLLARYLKNEHEELHPWTPPTPLYRQLLSLFRRRAALVQARVGLVQSWSNEPLLKAAFSEQIKSMQQLETLIEKTINDQLKEAGLLGQLKRCLKVEGVGFLTGARLLTAFHRGDFRNADAFIAFLGMDLRVSKSGQKDGRRSLTKRGDPEARRLLHNAAMSASRTEAWKGFYQEQRNRGFSTTQALVMLARKLARIVFALLKGQSEYQPKTS

SEQ ID NO: 202424 - protein, 353 aa, unidentified
MTQDPSVRVTIGVDTHRDVHVAVALDHLGRRLGEFAVPTKRAGYADLLSWAEGWGDIEAFGIEGTGSYGSGLSQWLQDRDFAVIEVSRPNRQARRRRGKSDPADAEAAARAVLSGEASAKPKSADDKVEMIRMFRVARSGAHKARTAAINALRGLVVTAPVELAEELKGLPIDDLVGRATRFRPGSLVSTTAGAKAAMASLARRIKALDDEIAALTQALEPLVAAACPALVALYGVGTDSAGALLVSAGDNSGRLSSERAAAKLWGVAPMEASSGMVTRHRLNRGGDRQANAALYRIVFVRMRHHQPTRDYVQRRIKEGKSKREIMRCLKRYVVREVFAALTATEERSPELVA

SEQ ID NO: 202425 - protein, 276 aa, unidentified
MKPELSVVGIDLAKNIFHLVGMDERGKIILRKRLARGEVLPFMAQLPRVLVGMEACGGAHYWARQLREQGHEVKLMAPQYVKPYVKTNKNDLRDAEAIAEAVTRPSMRFVPIKNVEQQDLQALHRVRERLMGARTALVNEMRGLLAEYGIVLPTGVNAFRNALAAKLEAEQAKLTPLSQELFGKLREEFKKVEAEVVYYDEKLQAMATTHPESQRLLTIPGIGPITATALIAAVGDVGGFTNGRQFAAWLGLVPKQHSTGGQTRLLGIRTVYTHCT

SEQ ID NO: 202426 - protein, 520 aa, unidentified
MISAESDVRRHCFSSFQPALSETAFEACSLAHMAHSAYTEVASPAVAPAKNADWMNAHYARFQSPYVAQDKPSLKTSQIQIRKERDNMIKINYMSTLFVGIDVSSKSNVVCAMDFDENQYISSSFKNNQPGADELAKMILECMKTHSNLNTIVVALESTSVYSIHIANFLSTCEVLMPYKPYVFCLNPKATANYRKSYIAMEKSDPMDAYLIADFARCGRTKKCEPWRGGQFLALKRLTRHRLHLAECITREKTYMVSNLYLKFSELQLLDDDKQPFSNIYGATSSAVLTEFMSLQEIIDASEEDLLQFLAQKSRNRINDISKTSELLKKAARDSYRLDKCMYEPLNVSLASSFNCIQTYQKEMKLIDQAIEKCINGMNPNAFTILKSIPGIGPVWAAGILSEIGDINAFHSSDALAKYAGLIWLKNDSGDFVSEDNRVSKAGNTYLRYYLGEAANSVRRHIPEYKEFYSKKYAEVTKHQHKRALALTSRKFVRLVFGLLVKNQLYTGKKSDAEFNNVPN

SEQ ID NO: 202427 - protein, 420 aa, unidentified
MKSASNTLTSTLPEYPPNDVTAGIDWARDDHAVAIVDDRGREIHRWAVEHTAAGLRQLVDVLGKHGVGEVAIERPDGPVIDALLGAGLTVVVISPNQVKNLRGRYGSAGNKDDRFDAYVLADTLRTDRARLRPLVPDREATVALRRACRARKDLVKHRVAAANQLRAHLRNVLPAVVGLFKDLDSAISLAFLTRFDTQDKIDWLTAKRLGDWLAKQGYSGRVDPAVMHQRILDAPPGATGAHGTAQAPITITYVALLRTLTEQIKTLEKQIDAQLTTHADAHIFTSLPRAGRVRAARLLAEIGDCRARFPTPESLTCLAGAAPSTRQSGKLRAVGFRWSCDKQLRDAVTDFAADSRHANPWAADLYQRARARGHDHPHAVRILARAWLHVIWHCWQDNTAYNPTQHRALQRVLATQTHAA

SEQ ID NO: 202428 - protein, 340 aa, unidentified
MARYLGVDLHRNNFTVCTIAENGRRYFREYDMHSLKYFAGRLRSTDRVAVEVSTTTRLFYDAVAPHVEHVAVVNSSQFDVIRKSVKKTDRNDAETLALFLSKGLLPEVRMKDKLHAELASLTQTRDTLVKQRTALKNKINNIMAARGLSPRREQLSSEKGLRAVEALPLGPVVLAEVRALVAQIRSMNQTISELEKTIKTEGEKLPGHKNLKSIKGIGDISATILLSIIGDIEDFESEGKLASYFGIVPRVRNSNETEHSGRITKRGTKLGRTTLVQCSLVALHYSEYLQRFYHRIAESRGRGKAIIALAKKFLGIIFKTLKNGWVFEDFPKFVLADQSA

SEQ ID NO: 202429 - protein, 315 aa, unidentified
MENTIGIDVSKAVLDVHVRKYKRDLQFENSTEGIEKCLMMCLEVKPELIVMEATGGYEYLAAATLSSKGLAVAVVNPRKTRSFAKALGITAKTDNIDAKAIAEYAARCEPMAQDAIDENSRRLKALTARRQQLLGMRTAEKNRKEHAVDKEVRGSIETVIKTINKEIEKVDKQISDRIDSMPELKEKAKTLSSADGIGDTTASMLVSELPELGRLNRRQIAALVGVAPINRDSGTLRGKRMTGGGRRDVRNRLFMPTLVAIRYNPVIREYYNRLVDEQGKRKMVAVIASMRKLLCILNAMLKKNQKWQPRMLQKA

SEQ ID NO: 202430 - protein, 421 aa, unidentified
MLTRTHDEQIIERVAALDIGKAELMCCVRVPDEDHPGKRLQEVASYSAMTRSLLGMSDRLACLGVTRVVMEATADYWKPVFYLLEAAGFDTWLVNAKDVKHLPGRPKTDKLDCIWLCKVAERQMLRPSFVPPPPIRRLRDLTRYRADLVAARTAEKQRAEKLLEDACIKLSAVITDIFGVSGRDMLAALVAGERNPKVLAQLARRSMRAKITVLEEAFTGHFTDHHAFLLGAMLARVDAITADIATLDAAIAAQAAPLADLVARLDEIPGISLAAAHVILAEIGTDMTRFPTAGHLVSWARLAPGIKESAGKKKGKGSTGHGNAYLAAILGNAAAGAAKTDTFLGERYRRIARRRGSKRAIVAIGRSILVITWHLLSDPAARFHDLGPGYYAARIDPERRKRNHIRQLEALGYTVTLKPAA

SEQ ID NO: 202431 - protein, 344 aa, unidentified
MKVTIVGIDLAKNVFQIHGVDAHGKAVLKKQIRRDQLMLFFTNLPACLIGMEACASAHYWARRLQECGHTVRLMAPQFVKPYVKTNKNDAADAEAICETVARPNMRFVPIKTESQQAVLTLHRVRQSFVKARTAHANQIRGLLAEFGLVIPQGIAHIAQRVPEPLDSDTCALPGPFRLLVQRLMEHLKLLDQHVRELETQIQIWQRDDPASRKLAEIPGVGPITASALVASIGDAKNFENSRQLAAWLGLVPRQHSSGGKSTLLGMSKRGDSYLRTLLIHGARSAILAAQRKPDTHSWLGRLLGRRHPNIAAVALASKNARVIWALLAHNRQFRSGYATAAAAA

SEQ ID NO: 202432 - protein, 418 aa, unidentified
MQALQSGGFAGIDVHKKILVITALVEKSDGSVGKQMLECTTMTDDLRDCGKKLVELGVRHVVMESTGIYWKPVWRVFRQAGLLVTLGNAQHIKNVPGRKTDASDSEWLAWLHKNGLIRPSYVPEEEFQQLRALTRHRTHLVSDITRIKNRVQRVLEDGNMKLASVISNVFGVSGLTILRSIAQGSTDTATLAALVKTNVRAQPEEIRKGLCHCLTEVHCLEVREYLSRYDALNESLDRIQQVIDDRMNRYADIVERLDEIPGIDKLSAQVILAEATADMGAFKDDRCFAAWAGLAPGNHESAGKRRKVRVRQGNPNLKRVLVQAARSASQKNGSYYQAKHRRLVMQTGSRLKASVAIANRICRAIYHLIRKPNERYRDLGWTRVDNTDRAIRRKIGQLRAMGLCVTYDGGNQVNIAAA

SEQ ID NO: 202433 - protein, 396 aa, unidentified
MPETWAGLDIGKTHHHCVVINADGTRLLSRRISNDEAELLQLIGDVLEISRDVLWAVDLNHGGAALLIGLLVNHGQPVAYLTGLAVHHASGTYRGEGKTDAKDAFVIADQARVRRDLGLLRPGDEIAVDLRTLTTRRLDMVFDRTRHINRLRAQLVEIFPALERALDLTNKGPITLLTGYQTPAAIRRAGARRLENWLKNRKVHGAAALAKTVVEAAQAQYTALPGETLAAAMVLRLAKGVMALDEEIAELDALIEARFREHPHAAVIRSLPGMGPRLGAEFIAATGGEMDAFGTADRLAGFAGLAPRPRDSGRVSGNLHRPRRYHRGLLRAMYLSAMVSLKCCPASKAYYDRKRNEGKSHKQALLALARRRVNVLWATIRDGECYQPAQPAAAAA

SEQ ID NO: 202434 - protein, 349 aa, unidentified
MTDQRRAYVGQHVYVGIDVHKDTYTVTCVHHKRIVKTATVPADPAGLAASLPRWFPGATLWTAYEAGFSAFVLHRALTQAGITNIVVNPASIAVAANDKVKTDRRDAKKLAFDLADGRLCGIYIPTEQEELGRLLPRTRAQIVEHRARVARQIKAKLHQFGLIAPGNRRLITHRYLREIETWSLPVELRMSLSWLAEQWRFATRQLIDIRRLLRDQAQSQPRLEGVYRSVPGVGEVAARILATELGDLTRFANERALFSYTGLTPSEYSSGTAVRRDPISRQGSSRVRHVLIEIAWRAVSRDAARHEIFERIAATRGKKRAIVAIARRLVGRIRACFRQGTRYAVGTYA

SEQ ID NO: 202435 - protein, 397 aa, unidentified
MYIVGIDIAKRKHEAAVIDGEGTVIIKPFSFTNNCSGYNRLLAMLTRAKLPLDEVSFAMEATGHYWLALFTRLQKEGFRVQVINPVQTNSIRSFYIRQAKTDPRDALLIAEVIRFGHFSESTLHPENIYELRELCRGRHAIVSMQADVKRKVVALLDQVFPEYETAFTNMFGDTSMAILQTCPTPKELSEMPLEELCHLIEVSSHKRFRMAKAQELQELARNSFGFAMAGDVFSTMIRLYAKHLDFLKQQVREMDRKIAEIMETLDTPITTITGIGPTLGAYILSEIGDISRFSSAAKLAAYAGIDPTMRQSGEYNGVRNRMSKRGSPYLRHAIWLAASSAVLHDPALKLYFQKKRDEGKPYMASVGHACRKMVSIIYAVMRDNKAYTPCIPNEISA

SEQ ID NO: 202436 - protein, 528 aa, unidentified
MVTKTKTRKKSTGSKKKRFIGKPTGQIQARVQTVGPEHFGIVAVDCAKRRSKWMLCNFYGKVIIEPTGVDHTSGGLRAMTQLVAVACKAEGLTDSIVAVEMTGIYHKPVQRAFRKAGFDTRIVHPFASSHFRTPLHSDQKTDDNDLEAIFHAAVKGYGLTSFPVGEVYQSLQALSRHRQKLVKQRSRLKVQIRQLLHQTMPGFADLFDKHKLFEKSIALPVALTFSSTGAIHRAGVEGIAKHLKETKVRFQARTIERIVAWAPTAAEPSELAEMRTRQWQELNDVRQLLDEKIVAAEREMAHFLVKTPYILLLSVIGINVVSAARLAGEAGPIEHYASPGALNGRAGLYPSRYQSDEVDYADGPLVRQCNRKLRGAAMLVAENLIKCHAYYRGLSELLKKQKVDPRDCRCRIANRAMRMVYQIVGGRQVWRGKGVDREYLLAKLQAFHRDHKTPLEHAIQDLNEAFAWLPKSTYATEAKPLAELARKKRRGVQRIGDLLMPLLIRLGVAIEEEEQNVKSNTSEARSSD

SEQ ID NO: 202437 - protein, 346 aa, unidentified
MEQSIRCGVDIAKLVFQIHGVNANTGETVMVKKLARHEMLRYFANKPAMLIGIEACGGAHYWARELTKLGHTVKLMTPQYVAPYRRGGKNDANDAEAICEALARPNMRFVAVKSESQQAVLVMHRMRDQWVRERTSLMNQIRSYLHEFGIVINQGRAALAKTLPLVAEQEALPLLFRQSIADLADRLTDLEMRIDTLNKRIESWSKQDSSAQALLALCGVGSITASAAVATAGDVSVFKNGRQFAAWLGLVPKQNSSGGKTQLGAITKRGDRYLRTLLVQGARTVMLAASRAQKSTQTNPMFEWIYKLQERRPNNVVAVAIAAKQARMLWAIMAKQQRQEASSLAA

SEQ ID NO: 202438 - protein, 343 aa, unidentified
MSEVTTIGLDIAKNVFHAHGADANGRALFSRKIGRTKLLEFFARQPQCLVALEACGGAHHWARELTLLGHQVKLIPPAYVKPFVKRNKNDAVDAEAICEAAQRPTMRFVAIKSEEQQASALVFRTRDLLVRQRTQLINAIRGHLTEYGWVAPKGPSHVTVLGDLLEGKMGSSLPDAARPMFRTMLDLLDQLNAKISDLDKEIARRAREDTIARRLMTIPGVGPITATAIAALAPPAETFSKGRDFAAWLGLVPRQLSSGGKQKLGSISKMGERTLRRLLIIGASAVVLQASKRGAPAGSWLEQMMARKPRMLVTVALANKTARIVWALLMKQEEYKAPVAAAA

SEQ ID NO: 202439 - protein, 413 aa, unidentified
MNLFVGIDVSSKKLDACFLDTDGVIFNQLSLNNDIFGAKSIKDEVLNLNYKHSFRKIIIGMESTSIYSHHPATALDEDTDIKSLGNVSVVVLNPRPVSQYANIFDEDKTDVKDALNIADFLRNGRFKTPIIREEKYVALQRLTRSRFQLVSQLTECKMHFLENLYFKCNTLVKELKVDGNTSVFGATLMDIFTDSLSLDEIALMDLEDLAALLQKKGRGRFANPEKLAKTIKKAIRGAYRLGDMMQESVDVVLAMYVDMIRTIKKQIQVLDKSITRLAAAIPEIQCLLSIPGIGPVYAAGIVAEIGQIERFSDETKIAKYAGFHWKRKQSGDYDSVRTPLSRSANRYLRYYFVEAANSVRLREPVYKDYYYKKRAEVPKHQHKRALVLTARKLVRLVDVLLRNHQLYTPERSG

SEQ ID NO: 202440 - protein, 343 aa, unidentified
MTQYVGLDVSMRETKLHVLDDAGKRVWRGRCPTEPAAIAAAVRQYAPSAVRIGLETGPLTTWLWTALTAEGLPMVCLDARHAKKALDMKVNKTDANDAEGLAHLVRAGWYREVRVKSRSAMLTKALLGARRQLLGISLALENQIRGVLKTFGRIVPKGGGGLFEKNVGALIMDDGEIAAVIMPLLQARQMARSKCAALDHRLVRLVQGDASCRMLMTMPGIGPITAVAYVAALERPDTFKRSRAVAAWLGLTPRRFQSGEVDYDGHISRRGDSQLRALLYEAASVLLTRVRMESGLRRWGLILWKRLGFKRAATALARKMAVVLHAMWKSGTAFDSKLGVAAA

SEQ ID NO: 202441 - protein, 412 aa, unidentified
MEVLYPHCAGLDVHKDTVVACVRHMVNGTVSREVRTFKTTTKELLALSEWLATEGCTHIAMEATGVYWKPVWHILSDGDFALVLANAAHVKNVPGRKTDVNDATWLADLLAHGLIRGSFVPDQQTQEMRDLLRTRKQLVREASRHIQRLQKTLEDANIKLDSVISDVMGLSGRRMIEALIAGQSDPEELAQLAHRRIKASPEELREALRGRVTRHHRFLLSLHLQQIDAVDAAIGAIDQEVDAQIEPFRTTVHLLTTIPGVDELSACVILAEIGRDMSRFPTAGHLISWAGLCPRNDESAGKRRSTRMRKGAAWLKTTLVQCAAAAARKKASYLQALFHRLRARRGAKKALGGVAASILTAAYEMLKSGALYEDLGCDHFEKRGKARQINRLVSRLQNLGFAVQITPVPAAA

SEQ ID NO: 202442 - protein, 341 aa, unidentified
MSNANTYIGVDLHKKSCYVTVMNGDGQIKKQTEISTDSDKVSRFFKKYTAGQVAVESTMNWIPFYENLESLGCHVVLSNPLATKAIAAARIKNDKVDSKILADLLRTNLLPTAYIQPREIRDLKELVRQRVSYVQWRTMLKNKIHSVLFKSNVAQGFSNLYGIAGMKWLRNLELRGIYRQELDRYLKTLDLLNGQIEELSQTIMDTAKTDYDCKLLMTIPGISYFSALVIKSEIGDISRFPNSNKLCAYAGLIPSTYASADKVRFGRITKRGSKWLRKSLIDAVTSGSRHPSRLCFFYRKLKKNKGTGKAKVATARKLCTIIFAMLADKQPFREFTPIKQR

SEQ ID NO: 202443 - protein, 385 aa, unidentified
MTEQTSHATTAFDYDSTLALALELSGKSWEVGAVLPGVSRRPRRSLAPRDMIGLLKQIERWKAEALRAGCSVQRTVLTYEAGRDGFWIARYLLAHGLEVQIMHPASIPVERRGRRAKTDRIDLDMLLRTLLAWLRGEPRVCTMVRIPSEAEEDMRRPERERERLVSERIALENRIENLLCLHGVVGFQPRLKKAAERLDELRSYTSAPLPPRLSEELKRLMTRHRLLSEQIKEIEAAREQTAMAVAPDRAAQKIQMLARLVGLGLATASGLTRELFCRSFADRRALAGFVGLTGTPFNSGGSEREQGISKNGNPRMRRILMQLAWRWLRFQPDSALSCWFVERTGGAKGRIRKIMVVALARKLLVALWRYVETGELPTGARLVAA

SEQ ID NO: 202444 - protein, 368 aa, unidentified
MSEITTAFVGLDVHKESIAIAVAEPGRAAPRFIGTTRSVLAEVEKALSHLGSPADLLIVYEAGPCGYVLARQLAARGYRCEVVAPTMIPRKPGDRIKTDRRDALALAHFARAGDLTPVLIPQEPDEAIRDLSRAREDAVRARLKARQQLKAMLLRHGQRYTGKSSWTAAHERFLATVRFAHPAQNIAFVEYRMAVNEAHARVERLTTALREQVAEWRLQPVVAALMTLRGVDLVAGVTLIAELGDLRRFAHPKQLMAFLGLVPSECSTGESRSLGSITKAGNSHARRILIESAWTYRYPARIGRELQVRQEGQPRTVREIAWRAQLRLCQRYRRLSLRGVHQNKICIAIARELAGFMWDLARQVAPHA

SEQ ID NO: 202445 - protein, 422 aa, unidentified
MLEETADREEIIERVAALDIGKAELVCCVRVPREGRRGRRLQEVETYSTMTGSLLRLSDRLRCLGVTRVVMEATSDYWKPVFYVLEAHGFETWLVNAKDVKHLPGRPKTDKLDAVWLCKVAERQMIRPSFVPPLEIRRLRDVTRYRVDLVGVRAAEKNRVEKLLEDAQIKLSVVASDIFGKSGRAMMGALVAGERNPKALAQLARSSMRRKISVLEEAFTGHFTEHHAFLLARMLARIDAIDADIAELDARIEEMIAPFAAAAGRLDEIPGIGRIAAAIIIAEVGTDMTRFPTAAHLASWAKFAPGVKESAGKKKGRGSTGHGDPYLARILGEAAVGASKTDSFLGERYRRIARRRGSKKAIVAVGRSLLVIIWHLLSDPGARYADLGSDFYHQRINPERRKRAHVHQLEALGYKVTLKPAA

SEQ ID NO: 202446 - protein, 361 aa, unidentified
MGDGSKDQPQLTAGLDLGDKYSYLCLIDTVSGEIMEEGRLRTTPEALGRRFSSEQPPMRIAIEAGTHSPWVSRVLEECGHEVLVANARKLRLIYSNKRKTDEIDAENLARLARLDPKLLYPLKHRGEDSQAHMALIRSREALVSCRTQLVNHVRGTVKSFGHRLPKCPARTFHKKAPSHIPEALRPALEPILEQIASLTERICEYDRLLETISKEHYPETELLRQVEGVGTLSALTFVLTVEDPYRFEKSRSVGAYLGLVPAQDQSGDRNPQKHISKEGDEMLRRLLVSSAHYILGPFGSDSDLRRHGEKIASRGGNNAKKRAVVAVARKLAVLLHSLWMSGEIYEPLRNAHRSGGRQEAA

SEQ ID NO: 202447 - protein, 344 aa, unidentified
MKIAVLGIDLGKNVCSVVGLDPSGAVVLRRRVRRDTLIDLVAKLPSCIVGMEACCGAHHLGRLFAAQGHDIRLMSPEYVRPYVKAQKNDDRDAEGIAEAATRPTMRFVEMKTEDQLDMQTLHRSRERLVGERTALINQLRAILLDRGIVVPQGKRKLEQYLVILMNEHNGEGLSARMRMLVADIRAQWQELDRRIGEFDAEFVRWAKENEDARRLVTIPGVGVTTSTALIAAVGKAETFEHGRDLAAWLGLVPRQSTTGGKPRLMGISKRGNKYLRKLLIHGARAALPYVAEKDTALGRWAKSLLSRVHQNVAVVAFANKLARICWAVLRSGQRFAAQEAPLVV

SEQ ID NO: 202448 - protein, 424 aa, unidentified
MRITYQTCCGVDVHKSFLVATIVKTTGGIEPSYQKKRFSTFNNSILQFKKWLLDHECRDVCMESTGKYWVPVFNLLEDEINVVIANPKWVKAVKGNKDDTKDSKWIGDLFRLGLVRGSYIPCKKVRILREYTRYRYKLVSCRSSEKNRYQNALTVCNIALDSVVSDIFGKSSTSIIDYLLEQSGTSINHEEIASKLLRSLKSKEDAVIESVEGYQMTDAQKYRMRLVRAHMDYITAEINDVDKMIENMISSDPDYKNAVQLLCTIPGVKHDSAVTIISEIGIDMSQFCNSKRLCCWAGLTPGSNESGGKKKSVRITRAGIYLKPALVQCAHAAVKSDKSPYYKKKYESLVKRRGKKRAIIAIARMLLTAIYQMLSTGEEWNPSDLYKIDMPESLAKRQKDKAIKQAMKLLQKEGLLPLNEPLAS

SEQ ID NO: 202449 - protein, 274 aa, unidentified
MTITKYIGMDVHKESISIAVMNSAGKFVMECVIETKGSMLLQFIDGLRGDVRITFEEGTWAAWLYDLLKPHVSEVVVCNPRKNALLKDGSKSDRIDARKLAELLRGNHLKPVYHGEQGLRTLKELARSYLNISKDVTRVMNRLKALYRSWGIACVGTKVYARRHRSEWLGRISEAGVRRRAEHCYQQLDALRLLHQQVRRDLLLESKKHQAWRLLGLIPGIGPIRAALLIALIQTPHRFRTKRQLWTYSGLGLETHDSAHYRVVEGQLHALRNR

SEQ ID NO: 202450 - protein, 402 aa, unidentified
MNAVGIDVSKGVSTVAVVRPYGEIVKKPFEVVHTVKGLDELVKFILSLDGESRVVLENTGKYSQPVVSALTKAGIFVCPVNAKLVHDHGGDTIRRVKTDKTDSLKIAGYCLDKWFKLKRHIPDDERRTLLKTYNRQLGEYTKLAAMLKNNLVSLLDQVFPGANGFFTSPARDSDGHVKWIDFIAQFWHCECVSAQSKQSFTANYEKWCRKNGYQFSSAKADEIYNRASDSYSVLAKDDFTKTLVSQAVAQLNNLCETVAKLKTEMNKIAAELPEYETVLAMHGVGKTLAPQLIAEIGDILRYPKRSSLACFAGIEPPENQSGSYNQQSRRISKQGSPPLRKALFQVMCCVLQNSNFAEPTFRFLDRKRSEGKPYKVYMIAGANKFLRIYYARVKEHLNKTAV

SEQ ID NO: 202451 - protein, 368 aa, unidentified
MIERVHGIDRHKQFSTISVLNSQGEEVHFAGACREFGKYVEGLGPTDAVVLEASTGSFWWADQIEAKGAKCFVVDPRKFRIIKDSWNKTDKQDARNLAKALWVHVVTGEFGIPTVYKPTGVVRDLRKLFAQYCLLNRQIATHKNNAQAIFVDNGIDLKKELKCRLFAAKSGLELLKEMNVSAASRVCLELTLQVLWKVEEAKERLAGEILLAGEALKSQVELLISIKGITPLIALAFLADVADIRRFRTLRKMNAYLGLVPRASNSGGKSRPGHITRESRKLTRTILTQCVHHVAASSESLERYYRELREKRGTGRARIAVIRKLCGMMRRMLLSGEQYRWIDRGLYEKKLRQYERVLKRVKEERPAA

SEQ ID NO: 202452 - protein, 314 aa, unidentified
MSTEYFVGIDVSKDTLDVCVYPTQDTYRVPNSPDSLDELIKRLKPIEPRLIVFEATGGYETLAVSSLAAAGLPVVVVNPRQIRDFAKSIGRLAKTDVIDAGVIARFASAVRPELRPMKDSPSQELTGLVTRRRQIVEMIVAETNRLTAATRRNRRDIQTHIRWLQKRQAQIDDEIKRDIQNGPLWRTTDQILQSTPGVGPATSAMLISCVPELGQLNRKKIACLIGVAPLNRDSGRYKGRRTIWGGRAQVRSVLYMSALSAIQFNPIIRQFYQRLREAGKCFKVAIVACMRKLLIILNAMVRNQTKWRHCEINR

SEQ ID NO: 202453 - protein, 345 aa, unidentified
MDVHQAMTVVVVLDADGKVVMETMVPTEAAAIIRLVQSLSGPLRVTFEETTQAAWLHEVIRAYVTEVIVCDPRRNKLLEDGSKADKVDARKLAELLRAGLLRSVYHGHEATRNLKELVRAYETLSIDTQRTMARIKAIYRARGIRTPGRGVYQPKQRQRWLELLTEAGIRQRVAWLYEQLDQLKPLRREAKQAMLAESRRHRAVSLLRTIPQMGPIRCAFIVATVDTPHRFRTKRQFWSYVGLAVVTHMSSEYEMTAGRVVRRRKPVATRGLNHNCNRRLKEVFISAATGGSLHEPYKPFLEKLKENGMRAEMARLTLARKIAAIALIVWKKGVAFDSTKLNCTT

SEQ ID NO: 202454 - protein, 315 aa, unidentified
MTSERRYVGIDVAKATLDVCTSDGEAWQVPNADGDMDALCTRLRGLQPELIVLEATGSYELRAAAALGAAGLQVAVVNPRQVRSYARSIGQLAKTDRIDARVLARFAEAARPEGRPLPDDETRALEALVVRRRQLIGMLAAEDARLKTAPAVTRKLIKAHIGWLRRQLAQLDGDIDGTVRRSPLFRAKDDLLQSVPCVGDATSRTLLALLPELGTLDEKQIAALVGVAPFNQDSGTLRGRRRVWGGRARVRTALYMAALVGSRHNPTLKALYGRLCGAGKPPKVALVACMRKLIIILNAIMRDGRPWDPTRTAIA

SEQ ID NO: 202455 - protein, 356 aa, unidentified
MLKDRKYIGMDVHKESISIAVRNSAGKIVMECVIETKASMILQFINGLRGDLHVTFEEGTSAAWLYDLLKPHVTKLVVCDPRKNASMREGNQNDKIDARRLAELLRLDHLSPVYHGEHGLRSLKELVRSYLTITKDLGRVMSRVKAIYRSWAIPCTGKQVYAPRHRAEWLGKITELGVRRRAEFYYQQLDALRSLRREVRRELLEESKKHQAWKQLCQIPSIGPIRAAVLLGVLQTPHRFRTKRQLWTYSGFGIETQSSADHRSVDGQLERVKKASSIRGLNRNCNHDLKNLFKGAAIVASSKPGPFQEFYTALLTKGLRPEMARLTLARKIATIALIVWKRGVSFDAQHLKPQTA

SEQ ID NO: 202456 - protein, 464 aa, unidentified
MTKQAKTGTKKTAATTLTSLSTMQPLVAGIDIGSSEHWVCGPARGNDGKPVIRKFGTTTADLQELAEWLIAQGTKSAAMESTSVYWIPLYELLESRGIEPVLVNARQLHNVPGRKTDVSDCQWLQVLHSCGLLRGSFRPSEAISRLRALQRQMANLVAERSRCVQWMQKSLDQMNVQVHRAVTDLTGKTGMAIVRAIVAGERDPARLALHRDGRCRKSSDEIAKYLTGHWREDHLFNLASALRLHDVLEAEIAAYDARLMQEIQTLQPPERQDQPVPPHPNRGKETAIKARGEQPNRTTLWRFAGVDLTRIDGISAGAAQIVLTEVGSSVASFPSEDHFASWLRLCPRTPISGGKPLKKRRNGLGANRIAGALRMAAASLQRSKTALGAAFRRIARHKGGAVAVFAIARKLSHIIYRMLRYGQDYVDIGEKAYEAQFEARRLASLKESARSLGYTLVEESLAAG

SEQ ID NO: 202457 - protein, 361 aa, unidentified
MNKSNTVTRSENEILKQKKLTIGMDLGDRSTRYCILDEAGEVILERSVPTTKKGMGQVFSAIPGSRVALETGAHSPWVSRQLTQLGHEVIVAHARNVRLIGESSRKDDRLDARTLARLARIDPQLLSPVRHRSAEAQVHLTVIRARAALVGARTALVNAARGLAKSYGERLRKCGTQQVRRDLAAGLSVELRAALEPLLEEIESLSQRIATYDRQIEQIAQKNYPEVSLLQQVKGVGTLIALTYVLTLEDPHRFRRSRDVGCYLGLRPGRRNSGSSQPQLHISKEGDRYLRTLMVQGAHYILGPFGEDSGGCGWPSAEERMPRNERSLLWRESWPCCCTSCGSTARSMNHYAIIRRLRWML

SEQ ID NO: 202458 - protein, 309 aa, unidentified
MATRSYVGIDVSKDRLDIAVLGEERVWQEDNTQEGIARLVQQLAEMQPKLIVVEATGGYQRSVVDALFWAGLAVAVVNPARVRQFARACGLLAKTDKLDAQLLAVFGQRVQPKRYEGKSEAEKQLSALLVRRKQLEEMLKAEQNRLRTISPSLRGSVERMIAILKEEKKRLEEQIEQFLKGQKAWQEQREILSSAPGVGKVTSATLLADLPELGKMDRKKIAALVGVAPMNYDSGRKRGYRKTKGGRTEVRSVLYMSTLVATRYNPVIQAQYQQLLKRGKLKKVALTACMRKFLTILNAMMRDQQSFRM

SEQ ID NO: 202459 - protein, 385 aa, unidentified
MRNNAFVPSDYDVLSGLDVDKRSISVTFVNQQGHIRSLRMPYSVEHLVNHVRKHFPDQKVAFAYEAGPTGYGLYDGLVAQDYPCLIASPSMIPKAPGQRVKTNRLDSVRLAENLRGGLLKSIHVPSPVYRELRHFTQLRDTFVSAMVGMKQRIKSLLLLEGLEFPPAPAGSQWSFLVKNKLRKLPCSSTVRFKLDQLLDSLEFNEKQVVKTTQQMRRFCQNDPELSRCMEYMMSVSGIGRIVASQLLARIGDWRELKNIRQLGGFLGLVPTEHSTGDRTDRGSITQTGDGRLRSKLIQASWSAIRKDPELREFFRSVRQTHARHLASRVAIVAVARKLSVRISVVLMKQRPYVVREKVHSAPLTQEETSPQGTTRREPEPGEPNS

SEQ ID NO: 202460 - protein, 341 aa, unidentified
MEHILGIDLHSDNGYYGIIEPDGKRVFKKRLPNDLQTVLTALEPYKGTITSIVVESTYNWYWLVDGLMENGYNNRVRLANPAGFSPYKGLKHADDKTDAFFLTELERLGILPVGHIYPKEERPVRDLLRRRMMLVQQKTSHILSFQSLITRQTGTSMSSNNIKKFEEDYVKEILDEEYLILAGETNISIIRFLTKKIQLLERAVLKRIKLKLEYEKLLTVPGIGKILGLVIMLETGDIRRRFASAGNYTSYCRCVKSKRISNSKKKGEGNRKNGNKYLEWAYVEAANFAKRFSPEAKKYYQRKMAKTNRIVAIKSLASKISKACYFIIRDQEVFKTEKIFG

SEQ ID NO: 202461 - protein, 377 aa, unidentified
MKRIKFVGLDVHAETISVAVAEQDGEIRSLGMIANREESIRKLVKKLGPAEELRFCYEAGPTGYALYWQLTRMGAKCEVVAPTLVPVKAGDRVKTDRRDALKLARNYRAGELTAVWVPDAAHEALRDLVRAREAAKQDELRARHRLSKFLLRHGRRSPMGVKAWTLKYLEWVKREVHFEQMAQEATLLDYLHEVEHGAARIARLDSAITEAVKSAPPQMRAVIEALQALRGIAQVSAVTVVAELGELSRFARARQLMAYGGIVPTEDSSGERTRRGTITKTGNAHLRRVVVEAAWAYRHRPSVGAKLRKRQAHVSEEVKEISWKAQQRLHQRYRKLLAKGKNKGVVMTAVGRELLGFIWAIGIKAETAQKEPLRWVA

SEQ ID NO: 202462 - protein, 438 aa, unidentified
MSNLSKICLNSAGIDIGSEKVFVAIEDQPVKNFRTFTAAYRELGLYLKEHKITHIAMEATGIYWITLYDILEEMGFDVTLVNPADSKNLPGRKTDVQDCQWIQQLFSYGLLKKSFVPQDIVRKLRVYTRMREDKLQMASSHIQHMQKALIQMNIRLPEVLSQTHGASGIAMIQQILAGERDAAKLLSYCTSSLKKRKGADILLALEGNYKEEYLFELQQAYDGYMFYLEQVRKCDTEAGKILQEFNNKAAKNYKDDSPIKPIRHNKPNINHLHELLLGIQGANPTVLPGVNDYSFMRLTAELGNDISQWPSEKNFVSWLGLAPGKNQSGKINKRSKKRAVTRAGQIFKQAAQSLLISKQPGLGAFARKIKARRGAAIAIKATARKLAGLYYKIFSHGLQYVEQGVKMYEEKVKQQQIQFIIRKANELNLQIIDNHSHA

SEQ ID NO: 202463 - protein, 356 aa, unidentified
MTIVAHSHSFVVGVDTHAKSHTYAVIDAANGELLGCQLFPTTAKGMARAIAWAGRLSSGEATTLWSIECIATYGAKLARAVSDAGYEVVEAPRISTKSRRGIGKSDPIDAQAIATATRSLDDDQLRRPRADDGIRQALRVLVAAREQMAQEKTMNTNTLTALLRVNDLGIDARKPLTLTQIGEISRWRSREEPIARVVARDEAIRLARQILAFQETLTTNQKRMIELIAQSPAAPLLEEPGVGAYTAAILITAWSHPGRVRNEAAFAALAGVSPIPASSGNTIRHRLNRGGDRRLNRALHVIAMSRMQHHDNTKTYVEKRLTEGRSKREIRRCLKRYLGRHFYRTLNALHSAGSTT

SEQ ID NO: 202464 - protein, 385 aa, unidentified
MTQAPGTGTVIDYERTLILAIELSNTSWVLAAQIPGLPGVKAKRSIDPTPEALMAAIENYRARAEKAGRNVDRVIAVYEAGWSGFWLVRWLAKHGVEEAHVIQPSSVPVDRRARRAKSDGIDAELLLRTLLAWLRGEPRVCSMVPIPAEADEDARRRVRERAELISERVGLVNRIGAVLATLGAGEYNPLRRDRRQRLDELQTALGDSLPTNAHAKIARMLDRLELLLIQITELEQSRDAVLEDESPDRASSMIQQLAKLRGIGVQSATVLVREGFVREFANGKALGSYAGLTATPYSSGGIEREQGIGKAGNARLRTVMVELAWLWQRYQPGSAQVRWFRERGGTGRRVRKVMVVALARKLLIALWRFATQGVVPEGAVMKPAS

SEQ ID NO: 202465 - protein, 405 aa, unidentified
MPYILALDVSMGHSYSVLYKDDTCLFEDEIEHTQRGLHALLEEIQHLPERPLIVFEATGIYSRPVEKFFQDYHFSYCLLNPLEAKKQMEESTLRSWKTDKSDAHRLAQTHLRNQRQPKEVQSNFYLEMRDLARFYQEIEKKITRLRMDLHNCLQLTFPELEQFFSNRLTPYALTLIRLFPHPDFVLASTRTKIKNKLINETRKKISANRAEQKADQIIHYAQCAYPAVEKDSIHCQKTIYYAELLQDLLEQKEALATQMIKKAEGSPCFLLYKTFPGIGALTAALLLGELGDITRFKTHKQLNAFVGIDIRRYQSGKYTGQDRINKRGNPKARKIIFFTIRNMIRQQRTAPNHIVDYYYKLKKQPIPKKDKVATVACMNKLLKCMHAMVRAHTEYDYAYAVSVDH

SEQ ID NO: 202466 - protein, 319 aa, unidentified
MAMKIQPIHIGIDVSKSPLVIADEDDSISEIPNESRSIRGWLKTLPGPARIGVEATGIFHVELIERAHQAGHAVYVIDGYKLNRYRESVGGRAKTDASDARLLRRYLAKELDQLRPWSPPPKGYRALQNLLLRRAKLVQCRTRIDQSLRGLTELGPSRRALLRQIDHLDRMIQRRILKVLRSQNWFVEARTVQDIEGIGVMTTAALVMVFRRGRFRTSDAFIAFLGLDVRVRDSGTMKGRRKLTKKGPPELRRLLYMAAMTASRSATWAPIYQRYLDRGLATTEALIILARKLARVAFALLKNGTQYQPKSVQGACMGT

SEQ ID NO: 202467 - protein, 351 aa, unidentified
MLIIGVDYHPSDQYIAFTDTETGECGERRLSHGDQEAEKFYRELALRGVSVRVGMEATGYSRWFERLLAELGIEIWIGNAAEIKTKRVRKQKTDPNDARLLLKLLLENNFPRIWVPSPENRDLRQLLWHRHRMVQMRTRIMNQLQALAMNEGQRRKKKLWSEAGRAQLKELPLAPWASRRRQDLLELLDRMNPTIEALTTAVEREAEKWPEVQRLMTHPGVGPLTALAFVLIIGTPERFQCGKQIGSYVGLIPSEDSSAGKQRLGRISKQGSSLLRFLLGEAAQAAARGDADWRRRYVHLAMRRQKNIAKVAMARRLAVRLYWMWRNGWEYRQWAAFGSHAGQLVTGHGVN

SEQ ID NO: 202468 - protein, 342 aa, unidentified
MKKASIIGLDLAKRSFQAHGALADGSVAFRKKLTREKVLGFLAEQPRCVVAMEACGSAHHWGRAIRDAGHEVRLIPPAYVKPFVKRQKNDAADAEAIAEAASRPTMRFVAVKTAEQQARAMLFRTRDLLVRQRTQLINALRGQLSEHGVVAPQGPANVAILAQAIDDITPSLPLLVVELARVYLDQIEGLSEKVAGLEKAIACEAKRGAMTRRLQTMPGVGPITAMAIETFAPPIEVFRRGRDFAAWLGLVPVQHSTGGKQVFGKTSKMGQRDIRRLLITGAMVIVRWACRKGAQEGTWLHRMLGRKPRMLVAIALANKMARSIWAMLTKGEDYRGPVATTL

SEQ ID NO: 202469 - protein, 343 aa, unidentified
MERYYYIGLDIHKKIIAYCIKAIDGCLIDQGKIGADRQSLEAWVKGLPGPWIGAMEATIFTGWVYDFLKPHAIALKVAHPAMLKAITAAKKKNDRADAEKIADLLRVDLLPECYMLPEEIWELRRILRYRNHIVRTAVKMQNKMSGLLMEVGATYSKKRLHGKKYFRELLERVDDIPPSVKELLQLSRSGYEMFRSFQKRLVATLRTNQLIHDRVHRLMTIPGVGEMTALTWALEIGDTERFSSIRKAVSYCGLCSAQKESAGKEQRGPISKKRNKHLQTMLIEAAKLAPHWNEQLAIVHERELKKGNRNRATLAVARKLVAYMLAVDRKGADFKLPSEIRAA

SEQ ID NO: 202470 - protein, 420 aa, unidentified
MMKQNIIFGIDVSSKSSTVCVVIDRIKQGETFKITNDSFGYQDLLDRLNQYLITPLAVFEATGVYSLSLQAFLEDYHIKYLKLNPLKAKKLMDNNLRHNKTDKVDAYRLALIQFNAPQKLRAPQPKEYHELQNASRYYEELTQALIINKNQLHRNLQSAFPQIESILSTSSGRVYWTIVSLFPHAQYVLNHNENQVFQSLLAISGIGRQRAHYLTTRLYALARQAYPYDNESSITIRAIQRNIANLLSLSAERDNVINYMEKLAMQANARSLNIYESIPGIAKTTAVRLVAELGDLRRFDTSAQIDAFVGIDPGRYQSGEKDSHLGITKHGNHLARKILYRTITQMETVKATQPCHITDYKATQPCHITDYYDKKKRSSNSRGYKKIAIASVHKLIRTMFALIKHDQLYDYNVATHNQRL

SEQ ID NO: 202471 - protein, 333 aa, unidentified
MSNHSEAFVAFDSSKLRNAVAIADSGRTGEIRFLGEIENSTTATAKLVRKLAGKYERLTFCYEAGPTGYELYRQIKSLGQECIVVAPSLIPKKPGDRVKTNRRDALSLAKLLRAGELTAVWVPDRHHEAMRDLTRARDTAVDDLRSKRQQISAFLLRKGLHYCAGKKTWSQAHLNWLMSQKFEYPEHRLVFEEMMMAMRQAQERLERLEQAIRAAVADWSLADLVTALMAMRGIDLISAATFLAEIGDLSRFQSPCELMAYLGLVPSEDSTGDCVKRGPITKAGNRRARRTLVECAWSYQHPPRVGKDKQECALASLLGIGLSPVMCCCECGL

SEQ ID NO: 202472 - protein, 430 aa, unidentified
MKSNTQNAKIEAITEKTLVLGIDVGSETHYARAFDYRGIEYSKKPFKFSNTEAGFVTFKEWILDIKERHEKDKVVLGMEPTGHYWFNLGKFLQDNEMKPVLVNPHHVKKSKELDDNNPTKNDRKDPKVIAGLVREGRYMIPYLPDGVYADLRTASNIRFQLQAELTRIQNRISRWFNIYFPEYRMVYGKPDAKSGMLLLKAAPLPEDILTLGIDGVNQIWRDAKLRAVGKARAKTLIEAAEHSVGSKEGAVAARMEIRMLLEDYESRSIRLQEVMTLIEGLVKQIPMAEKLLEIKGVGIRTVSGFLAEVGDISRFNNPKELQKLAGLALVENSSGKHKGETTISRRGRKRLRYLLFEVAMSLVTKNPEFRELHNYYTTRRLNPLKKMQSLMAIAAKLIRVFYVMLTKGVNYDPKKMVNDIKRPAVYLQTA

SEQ ID NO: 202473 - protein, 342 aa, unidentified
MNETIKKTVIGVDTAKRVFQLYWIDVETGEILNRKLTRAKFVVHFANLSPCVIGMEACGGSQHWSRELQKLGHDVRLLPAKMVRPFVTGNKSDAHDARAIWRAVQQPDIKYVAAKSEAQQAILALHRMRQQLVKFRTAQVNGLRGLLTEYGEVMPQGRAGLRNGIAAALERISERLPTMVIETLREQWARIITLDEQVSGIEHRLTLWHRKDEASQRIAEIPGVGLLSATAAMAMMGDPTAFKSGREFAAWLGLVPRHTGTGGRIRMHGISKRGDSYLRTLLIHGARSVLTNSTAPPAWALRLAERRPRNVVTVALANKMARKIWALLAYKRTYRDFVSQPV

SEQ ID NO: 202474 - protein, 409 aa, unidentified
MRVIGLDIHRAFAEAVAWDDGKLNRLGRVDMRRHLLEAFAKKLSKEDVIVIEATGNAASVAAVIAPHVKKVVIANPKQVRVIAHAKIKTDTIDASVLAQLYVSGFLPEVWVPGEPTQALRRQVTRRNQIVRQRSRLKNIIQSILHSHLIPSCPHADLCGASGRAWLFHQVLPEDERLAVERHLREFDRLAEDLKVIERDLARSALKDEGVKRLMTIPGVDMVVALAIVAAIGEVGRFDRPEKLVSYLGLNPSVRQSGPGPAYHGQITKQGRGHARGMLVEAAWAAARAPGPLRAFFLRVRSRRGQHVAAVATARKLAVIIWHLLRKGESYAWARPALHARKLRDLELKAGHKPERGQKGPAHAYNIKSQRDQERRWVEQAEKAYARFVAGWNPRGPKRARTGAANEVRQ

SEQ ID NO: 202475 - protein, 441 aa, unidentified
MFTFPSLAGKVVFCLKKADLLSALFVGIDIGSRSHVVALLDFVSQKPLLRFEVTNNQPGAVELAQRLNEFLQSRKDLSRLVIALESTSFYGIHIANYLSSCEVLAPFHTLVYCLNPKVIRNYKKSFIDLGKNDAIDAFVIADFARANRITTQPWRGSQFLALQRLTRHRLHLAKALTREKAYMLSNIFLKFSEFAMLEPDEQPFSNSFGATASSVLTDFLSTEEIIEMPMEDLIHYICEKGHHHFPAPADTASLLKQAARNSYRLDKCLYEPLTVSIASSFTVISTYKAEIKAVNKAIEKTLRGLDPNAYQCLLSIPGIGPVMAAGILSEIGYIDAFHSQEALAKYAGLVWRENQSSRFTGEDTPLSKAGNAYLRYYLLEATSHVKNHCSEFAAFYQKKYAEVKTHQHKRALALTARKLVRLIFGLLAKHQLYSSNRVGQA

SEQ ID NO: 202476 - protein, 383 aa, unidentified
MKARCSETIMSPRGRRWDATKFININLFLGASGMKTILAIDLGKRNSVFCRLSTSSLKSEYFTAKTDPQRFHDIFIDLDIKSSIILFEVGTQAGWLSDMLRAMQLEFKIANVNHPAWKWTNNANKSDRTDAHRLAMMYHHGFFPEVYIPVKSVRQKRSLIYYRQKIVNRMTQVKNGIRALMTTVAIDLPIGKNCWTKKYRKQLQEQALPFDSIDDPCDLWRGQLYTELQQFDALQISLDKTTAKLDELNKQKQSVAMLETIPGIGPRTAEAIVAVIDDPHRFKSCRQVSNYAGFTPRRYQSGQMERSGRISKRGNPLLRALLVQASWAALRFDWAQHIYKRVCRGSAKRRKIAIIAVARHLLMRCWAMMRDNKPWQYKTQTAA

SEQ ID NO: 202477 - protein, 345 aa, unidentified
MELHTIGIDLGKTVFHLVGLNLRGEVVVRKKFSRTQLLRFTANVHVKLIGMEACGGAHFLGRALREQGHEVRLIPAQYVKPYVKTNKSDYIDAEAIAEAVARPTMRFVPIKTDDQLDLQSLHRVRERWVMRRTAVINQIRGLLLERGITLRKGRCYVGAALPGILEDADAKLSGALRMLLAQLKLELDHLDLRIDEADALIKKTVRENEACQRLVAIPGIGPVTATALIAAIGNGAAFHKGREFAAWMGVVPREHSTGGQQKLLGISKRGNSYLRRLFVQGARAVLQQRTKQSSGLSAWLAQLTSRTHRNVAAVALANKLARIAWAVLAKNEPYRPSVVADVAAA

SEQ ID NO: 202478 - protein, 353 aa, unidentified
MDMVSQEQIIGIDVSRDCLDVHCLPDGSRLRIANTAQGHEQLAEIAHDRRALVCFEATGGQEWRLWAALDAAGIEARQLPPAQIKAFATSRGTRAKTDRIDALALCQRLDRYVRGNRKAFSVVRVPSEEEERERAFSRQRQQLVRERQRLQAMGRSLLAMQGIHVRGKWWKGQTWAAICREAPAWVVERLEVFMKLIEPVEVEERKLTEGIQKVGRKSRIPKGVGPLSFEVLRREVGDWSRFNNRREVSSYTGLCPREHSSGGKRRGGSVNKSGNPRVRAMLVEMVWRMMRWQPGYHALRKWMAVLGDASRSAAVRKKAIVAVARQLAVDLWRLFTGQTTAEKLGLIYLPEAS

SEQ ID NO: 202479 - protein, 344 aa, unidentified
MINVGMDVHSGKTVFDLFDPAVEPKRQHRTVTVPTTAEGIESVLRPLNGRCRLTFEVGTQAQWVARIVRPLAAEVQVANPSRIPWLFRDGRKNDRLDARKLATLLYLNQLPTVHLPSADVSAWRALINHRRTLIRRRTMIKNQIRTIVRTFGYRCPHRTCWTRVGQAWLRSLIFDDARHLMMDCLLSELAFVSDQVCRTEAQLDAIAKTQPNVALLRTIPGIGPRSAEAIIAFADGVHRFGQRKQFASYFGMTPTQDSSGRIDHHGHISKRGPSVVRWLLVEAVHRVVLYCPAMRAHFERIRRGKKDRYKRAIVATGRKLLTIMYAMLRDQTGFDSKLVVPSAA

SEQ ID NO: 202480 - protein, 399 aa, unidentified
MNAVGIDVSKGKSMVCAMRPFGEVAVSPFEVAHTVSELGELARSLKSLNGETKVIMECTGSYHLPIARALHAAGFFVSAVNPQLIHGFGNNTIRKRHNDKADSVKIANYGLSSWLTLPKYAPEEEVRQSLKSFSRQYNQYNKIKTMLTNNLISLLDQTFPGLKDLFTSPARESDGHEKWLDFAARFWHCECVGGMSRGAFTEIYRKWCKRSGYYSVGADEIHAVSRQCAAVMPKNEATKVLITYAVAQVNAVAESLASLAKEMKRLAETLPEYSVVLAFRGVGEVLGPQLMAEIGDVRRFPKKSSLVCFAGLEPTDNQSGKFQGDEKISKKGSPHLRKTLFQVMSCLLQHSPIGDPVYQLLDRKRAENKHYYSYMNAGAAKFLRIYYARVTAFLGTSEA

SEQ ID NO: 202481 - protein, 304 aa, unidentified
MFGIGIDVSKATLDVAVHGEQFRQFSNDKRGFVRLIRWLKTWPIKQVVLEASGGYERAALDVLHAAGLPMVRINPARARRFAQGTGRAAKTDRLDATVLAQMAHLLPLTRYVPPAPWQQRLADFAQCRRQLVQMRVSEMQRLRRLVDPDLIAMKQRHIAQLSDDLKQLDKAIAEQLEGQPGWKNIGALKGVGPILISTLACELPELGSLGSKAIASLVGLAPMNRESGTWQGQRRISGGRAVVREALYMAALTAIRYEPRLRAFYAGLKAKGKASKVALVAVMRKMLVILNARKRDAEVALGCP

SEQ ID NO: 202482 - protein, 344 aa, unidentified
MDHFAGLDVSVKETSICIVDDTGKIVREVKVASEPEALLAVLANPAYHFKRIGLEAGPLSQWLFSALAEAELPVVCVETRHMRAALKAQINKTDRNDARGIAQMMRVGLYRPVHVKTLRSQKLRMLLTHRKLLQSKAIAIENDLRGTLRNFGLKVGMVGKVKFEARIKELVENVPDLAALIEPLLIVRRVLREQIIILHRRLLAIVRDDDVCRRLMTVPGVGPVVSLTYRATVDVPARFRKSKAVGAVFGLTCSKYQSGEIDRSGRISRCGDEMMRVMLYEAAQSMLCSKKWSWLKAWAMQIARRRGMKKAIVALARRLAVIMHRIWVDGTEFRWTREQAAAAA

SEQ ID NO: 202483 - protein, 383 aa, unidentified
MHVVADRSETLTAIRTDLGAISVSLELSRSTWLITSLSPGGGEKLSKHSVPSGDLSALFRRFDSVREKARARMGRDFPIVTIQEAGLDGFWIHRVLSKAGIESYVVDPASIAVSRRSRRAKTDKIDGETLVRSLLAFKRGEPRICAMVKEPTPEQEDRRRICRERKVLTTERVCHVNRIKGLLFAQGITDYEPLNRDRRDRLEELVTGDGRSLPPHLKAQISRELDRLELLLAQVKEIEIERDKLLHAEKQVTHSPAKLLIDIKGIGPEFAAVLCHEGLFRHFDNRRQVAAYAGLAPTPWQSGQVDREQGVSKAGNPRLRTTMVQLAWLWIRHQPGSNLTLWFQSRLRRNGGRLKKTTIVALARKLLIALWNTRHPASSSRAP

SEQ ID NO: 202484 - protein, 422 aa, unidentified
MLEETQDREELIERVAALDIGKAELVCCVRVPSARGSGKRLQEVGTYATMTRSLLVLSDRLGELGVTRVVMEATSDYWKPVFYLLEAQGFEVWLVNARDVKHLPGRPKTDRLDAVWLCKVAERQMLRPSFVPPPPIRRLRDLTRYRADLVAVRTAEKNRVEKLLEDAQIKLSVVASDIFGVSGRAMMAALIGGERDPKVLAQLARRRLRAKLGLLEEAFVGHFSDHHGFLLATMLARIDQASADIATLEAKIEAEIAPFAAAADQLDEITGVGRTAAWVIIAEIGVDMGRFPTPGHLTSWARYAPGVKQSAGKSKGTGATGHGNPYLARVLGEAAVAAGRTNTFLGERYRRIARRRGTKRAIVAVGRSILVIVWHLLADPDARFHDLGADFYDTRINADRTKRNHIRQLEALGYKVTLEPAA

SEQ ID NO: 202485 - protein, 342 aa, unidentified
MDHYAGIDVSLECSSVCVVDGSGKIVREGKVASEPAALIDWFGSLGLRVERIGLEAGPLSQWLYAGLQQAGLAVELIETRHVRKALETMPVKTDRNDARGIAQLMRVGWFKPVHCKSLAAQETRAMLTARKLLQAKLHDVEMSLRGILRGFGLKVGKTTARSFAARIEELAVGHPNLETIARALLAVRAVLLREFNGFEKSVRIMARSDARARLLMTTPAVGPIVALTYACAIDDPGRFKSSKAAGAHFGLTPRKYQSGETDITGRISKIGDAGVREALYQAAHVMLTKAVKGCSQLKSWAMRIARRAGMSKAKVALARKLAVILHRMLANGTPFNAAAAAA

SEQ ID NO: 202486 - protein, 367 aa, unidentified
MEKSSKVFVGMDVHKESIDITLAERGGEVRRLGQIGGDRGSLLKMVRKQQSKGGERVFVYEAGPCGFWIYRELAALGERCMVVSPALVPKRAGDHVKTDRRDSERLASLARAGELKAIHVPDIRDEAIRDLVRGRDDAVIAQRRVRQQLKALLLRNDIRYVGKTSWTGAHRRWLSELKLPEPAQQIAFEEYVDAIAVATGRIERLTRAIETEVLTWRFAPVVGSLQAMRGIQFVHAVTLVAELGDLTRFGSARALMGYLGLVPREDSSGEHRRQGSITKAGNSYARRALIEAAWAYRHPARVTRIIATRQAGIPKAVCDIAWRAQLRLSTKYRRLAARHLHHNKIVVALARELSGFVWAIGHSVKPQ

SEQ ID NO: 202487 - protein, 345 aa, unidentified
MTIVEARAVTGGVDTHLDTHVAAALDPIGGLLGVKTFDTDALGCRALLGWLGGFGTVARVGVEGTGSYGAGLARVLRQAGVEVVEVDRPNRQARRRQGKSDPIDAVEAARAVLSGRCRGEAKTRDGAVEAMRALVVARRSTRSVRTKTLNQMRHLGFTAPPELGERLRGLSPVALAEECASLRPRPGGDLVVYATKLALRTLGRRALELGEDYIALTSYLGELVRATSPSLLEVHGIGVDTAAILLVAAGDNPERLRSEAAWAHLCGVAPIEASSGKVTRRRLNRGGDRQANHALWRIALVRMRSDPRTRAYVERRLEEGRSKLEIIRILKRYIAREVYRHLPRG

SEQ ID NO: 202488 - protein, 497 aa, unidentified
MVPVKGLTIEQDFLSGEAATSLHLPETGDHSSTLTLQLPNWGLQVRFLPGLFLCGEHSSMLGHKRDSAKPGGVSFSRSLGSAVGGGVSSHNRTTGSDSQSVGYVASRRLATQSHMRKEPVMSKLRYVGLDVHAETIAVAVAEPTGEVRSVGQIPNRPEAVRRLVKKLGAPEQLRACYEAGPTGSGLYWQLTALGVACEVVAPTLVPVKAGDRVKTDRRDAEKLARCYRAGDLTAVWVPDPAHEALRDLVRAREAAQQDQLRARHRLGKFFLRHGQRPPLPMKAWTQKYLGWVKTAVHFAQPAQEATLLDYVHEVDHAAGRVERLEQAIDAVVRTTPAPLGTVIGALQALRGIAQVAAVTIACEVGTFTRFRKATQLMGYAGVVACEASSGARTWRGGITKTGNAHLRRIVVEAAWAYRHRPALGSALKQRQVGVSAAVQEMAWKAQHRLHDRYRKLLGRGKAKQLAVTAVGRELLGFIWAIGVHVEQQARASQPRAA

SEQ ID NO: 202489 - protein, 419 aa, unidentified
MSFKILKNNCCGLDVHKTWIYACIGITDSNGRTEYKQARFSSFTKGLQELCDWLVKYNCNDVCMESTGKYWIPVFNILEKNNLWVTLSHPKYTKPQKGNKTDRKDAKWICDLYMCGMVKPSFIPPADIRELRDLVRYRFKLTCMITGEKNRAQNCLTVSNLKLDDVFSDVFGKSSRSITEHILQHPGEKFDIAPFVDSRCKTPITEIQAAVDGAISMEQAVKLRQCLNHIDELEKHQAEIEREIFRLSDKYESILNLIRTVPGFDKNPLTAIQVLSEIGGDMSVFPTAKNLISWAGCCPRNDQSNHKIKSTRISRAGSYFKPVLVQVANALIKSKKHPEFTTRYRRIKARRGHKKAIIAICRMILTAIWHILTDLKPYTPEGFLESRPVNASKVLTTSQALNLLKQRGYVIKDDTVSVT

SEQ ID NO: 202490 - protein, 525 aa, unidentified
MMAPAVRHHERETPSASGRHNDRVTDPIHGLEWVDSGPQRLPVEPACVLDPKGGGCAVSWQDVHAKSTVWCLLDAQGQVVSEGRVATSAPALRALVRELSSTEEVVAGQEVGTLTYLMHDTVTAAGSAMLSFNAHQLRMIAASRKKTDRRDAYWIAKALQSGMYPHPVYIPTGEIRDLRALLSRRRLLQAEYNRWRYRARAYLRAAGCPAARGVAALRTAVARAGRAEEGSVPLLGEALALCERQAAALRQELQQLDAQLAARTRTIAPIARLTTLPGVGVLVAATMYAWVGDGRRFPNAKALAAYAGLVPSVRQSEWGRGALRGDHAAGREGAARHAGASGARAPESLSRGGGGAAAGDRDPHSHEPRAAEDCDCRGGAASAARGVLPAARRDDLRPAAGARGGGPGPGAGSLTARARDHVRPASTAAATSGFRSDQAAETLGSRGGSRPIDWSVRCPVRQPVPGHVRELEHVWKDGDTWRPGQDAETRTARRFDATEAGMGVLTIGVAGLRAIMEESSYPTSP

SEQ ID NO: 202491 - protein, 394 aa, unidentified
MKLIGIDIGKNKHFFCVMDQQTGEIISQPVSFSNDKEGFDFLVQKIKSYPKDSILIGMEDTGHYHFALLKYLLDLQYTVALINPKTTDFNRKMQGGITKNDKLDTINICDVLDTPERKKQYRITKVNSFDLYEQKQLTRHHHNLKEEENVYKNRLQKCIDIVFPEFNKLFNSKYGIVYMNILKMFGSAENIANTDIRTIRKCFEIEGRGNRISLTPERLKECAISSIGISSLAEVSQIKHLTAQIELIEEQLTEIDKKIEEFSLQNNSPILSIPGISHFSGTSILAELGDISNYSKPSQIIKFAGVAPLHYESSQFNAQHTAITKKGSKYLRKTLYQIILPVIRHNPVFNKYYQLKISQGKGHRCAQGHCVRKLLRIIYHLLKTNQQFDPQLLR

SEQ ID NO: 202492 - protein, 402 aa, unidentified
MFFVGIDIGKRNHEAAIIDEQGQPIGKPIRFSNTKAGSEKLLQFINDHDLLPDNSLIGLEATGHYWLSVFSFLTALEFKVVPFNPIQSDSLRNFYIRKTKTDTIDAVLIAQVVRMDLPDQTYLPSEDIVRLKQLSRFRYSLVDQTSDLKRKVIASLDQVFPEYETLFSDMFGKSSTQLLLQSPLPEDLLEIDAQKLIDLLNEASNGRLTIEKSTEKVHQLRELAQDSFGIRVATDVYKLQIQLLLQQILLLEEQLKTIEDEMAELVAAQDQYLTTITGIGPVTAAVILSEVGDIHRFERPNQLLAFAGLDASVHQSGDFTGTRNKLSKRGSPYLRRAIWQSAFIASNRDPALSLYYQNLRKRGKHHGTAVGAVCRKLVNIIFAVWTKEKPYEVHINPDLELD

SEQ ID NO: 202493 - protein, 317 aa, unidentified
MTNISMAVAGIDTAKDKLDVAVHGQASRWRVENTLHGWKRLHSELIRVGVSRVGIEASGGYERGVVKHLQAAGFIVLVLQPIQVRAYARVHLRRAKNDALDAALIAACTAAIEGPRIAPDVRLAELADHLTFVEQIEEDIARLKTRLEHIDERRIRKIVMADVARLKARRNAELARILGRLREHDDLARRLDLVLSVPGIGERTALALIVRMPELGRISREQVAALAGLAPFDDDSGKHKGQRHIAGGRGRLRRSLYAAALPAAFRWNKALIELYSRLTTRGKAHNAALVACARKLLIYANTVVARGSPWVERPAAI

SEQ ID NO: 202494 - protein, 370 aa, unidentified
METLTTYVGLDVHKETISVAVAESGDRGQARYFGKIANSAQALSKLAAKLSRKGRTLRFCYEAGPCGYGVHRHLTGLGHDCAVVAPSLIPRRPGDRVKTDRRDCLGLSKLDRAGELTAVWVPDAEHEAMRDLVRARGAAVRALRRARQQLSGFLLRHGRVRKGKNWTLAHRRWLATLGFEQPAQQIVLEDYIQAVEDAQARRDRLTAQIEALVPSWSMAPVAQALQAMRGVALITAVTVLAEVGDLTRFDSPRQLMAHLGLVPWEDSSADKIRRGGLTKAGNAEARRVMVEAAWCYRLPARVSRCLLDRLAGLPKDVRDIAWKGQVRLCARYRHLRAQGKDAPLVTAAIAREMLGFIWAIAQVVAPRKAV

SEQ ID NO: 202495 - protein, 331 aa, unidentified
MKILDTVGIDISKLSFDVRVHGSQSYRQFENTKKGFSQLLKWSYENSTFFKENILFVFEHTGLYSHQLSTFLTQKEVPFSLVPGLEIKRSLGIARGKDDKVDATKIALYGFRLRDEIKPYQMPTEQVSSLKHLLTLRERLVRQRAGFKASYKEQKRVLVEKDNKTIFCVQEKTIKYLTKQIQAIEKEMELLIKSDDKLSEQFKLITSIKGVGEQTSLYIIAYTHGFTKFDTWRKFASYCGTAPFPNVSGTSVRGKSKVSHLANKKIKSLLDLCAKTAIQHNPEMRLYYERRLEKGKNKMSTINIIRNKLLSRIFAVIQRQEPYVDLMKYAA

SEQ ID NO: 202496 - protein, 400 aa, unidentified
MEVAKLAHTVPAVWIGIDAGKEFHWAHALDDSGTQLLSRRVENDEADLSGLIDEALSLAEEVVWAVDQPGGGAALLLGLLWERGQRVLYIPGLTVDRSRDTYRGESKTDARDAHVIADQARMRPDLGELAPSENDLAELELLLARRRDLVVDKSRSVTRLRETLLSLFPALERALDLNRSGPLTLLIHYQRPEQIRRAGHKRVATYLRNRGVKGANGLAQKALHAANSQSVSLPAEDVASSIVAELAGEVLALKERIGALDEELRERFFAREEAPIITSLPGMGMVLGAEFLISVGDLCAFESADKLAAYAGLVPAAHDSGKRTGNDHRMRGGNKLLKRAFYQSAFASLRSSPESRAFYDRKRREGKRHTQALIALARRRVNVLWAMLRDGTTFNAPSST

SEQ ID NO: 202497 - protein, 392 aa, unidentified
MNEVTPRVVIGMDPHKRSVTIEIMTSDEAIVGRGRFGTDREGHDAMRRHVKTWPDRVWAIEGCQGIGRHVANRLLAEGETVVDVPPKLSARARVFATGQGRKTDATDAHSVALVGTRMSGLRPVIDDEQLAVLRILVERRRSLGDEHTRKMSQVHHLLLELIPGGAKKDLSAAQAKALLATVRPRDIAGKTRRRVAAELIADLERIYQRKKAANKELKALVAATGTGLMELNGIGPSGAARLLVEGGDVTRFPDNNHFGSWTGTAPIDASSGDNVRHRLSRGGNRQINRVLHIMAVVQLRNPTEGRAYFDRTKTRGKTSNESMRLLKRRLSDIVYRTMVNDAARNMATGPGGHQGNDSDSSAAGSQPHTNSSDKPLPGPAKHKATIPLPAAS

SEQ ID NO: 202498 - protein, 420 aa, unidentified
MKVVYQTCCGVDVHKSFLVATIIKTTSGVEPSYQKKRFSTFNNSILQFKEWLVKNQCRDVCMESTGKYWVPVFNLLEDEINVTIANPKWVKAVKGNKDDTKDSKWIGDLFRLGLVPGSYIPCKPIRILREFTRYRYKLTSCRTSEKNRYQNALTVCNVALDSVVSDIFGKSATSVIDYLIEQPDNSINHEEIASRLLRSLKKKSDSVIESIEGYQMTDSQKYRMRLVRAHLDYITSTINDIDTMLDSLIAPYENAVQLLCTIPGVDRNSAITVISEIGTDMTPFSNSKRLCCWAGLTPGNNESAGKKKSVRITRAGVYLKPALVQVAHAAVKSDKSPYYKQKYECIMKRRGKKRAIIAIARMILTAIYQMLSTGEAWNPTDLFKVDMPEPMKEKQKEKAIKQAVKLLIREGEISESQLAS

SEQ ID NO: 202499 - protein, 353 aa, unidentified
MKLVGIDVGKNSHHFCVMDKETGEFNVTPSSFSNNKEGFDFLINSLKPYSKKSILLGMEDTGHYHVALLKFLLSNGYTVALINPKTTDLTRKMEGGITKNDKLDTITICDVLDTPERKKQYRITKVDRFDLYEQRQLTRHHHNLKEELNIYCNRLQKSIDLVFPEFNTLFGSKYGVVYMNLLKTFGSAEAIASTDIRTIRKCFEIKGRGGRISLTAEKLKECAKNSIGISSEVETIQIKHLVSQIMLIKEQIAEIDKKIEEFSIKNNSPILSIPGISHFSGTSILAELGDIGNYSKPSRIIKFAGVAPYHYESSQYNAQHTAITKKGSKYLRKTLYQVILPVINNNPVFKKYY

SEQ ID NO: 202500 - protein, 461 aa, unidentified
MAQSRTRQRPPRPSAAGSLPQLNANAAGIDVGAASHFVAVPADRDAESVREFATFTGDLHRLADWLRGCGVETVAMESTGVYWIPLFQVLEERGFAVKLVDARQLKRVPGRKSDVLDCQWLQQLHTFGLLAGAFRPDDQVCVLRSYMRQRAMLVAYAGQHVQHMQKALVQMNLQLQVVLEDITGATGMKIIRAVLAGERDPHRLAALRHGKCKHDAATIAAALRGDWREEHLFALEQAVALVDAYQAKIAACDARIRAHLARFADRGTGDPPPPGPPRRADRHDLGFDATAELYRLTGVDLTAIPGLGAHTALKVLSETGLDMTRWPSAKHFGSWLGLAPNNRVSGGRILSRRTMPTANRAATALRVAAQALHRSKSALGAFLRRKAAHLGMPKAITATAYKLARRIYALLSTGDAYVDPGQDYYERTYTARVVRNLSRRADELGYDLVKRDPAQPIATPA

SEQ ID NO: 202501 - protein, 359 aa, unidentified
MSDGSKGQPRMTAGLDMGDKYSYLCLIDTQSGEVVEEGRLRTTPETLRRRFASERPLRIAIEAGTHSPWVSRVLEECGHEVLVANARKLRLIYANKRKTDEVDAENLARLARLDPKLLYPVRHRGEGSQAHMALIRSRQALVGCRTQLVNHVRGTVKSFGGRLPKCPARSFHNKVPEHIPEALTPALEPILEQIGSLTERIREYERKLEAVSEEHYPETKLLRQVEGIGPLTALTFVLTLEDPHRFKKSRSVGAYLGLVPATDRSGDSDPQKRISKEGDQMLRKLLVSSAHYILGPFGSDSDLRRHGEKIARGGGKNAKKRAAVAVARKLSVLLHRLWATGEIYDPLYNTHQRQEQEAA

SEQ ID NO: 202502 - protein, 381 aa, unidentified
MPTARGGSTEVCPTRSRGVLHAEAAGGHLEKEVKGIMEVLIGIDPHKATNAVAAVDEGGKLIELVTFTTNRAGLRLLERWGKRFEKRRWAVEGSGGLGRPVAQHLVSAGERVVDVPPKLSARLRLLSAGNERKNDTLDAVYTALAALRGERLAEVLEEDQASVLRMLSERREDLLRERTRTLNRLHQLLCDLLPGGASGKLSADRAARMLRRVRPRSAPGRTRRQLASDLLRDVRSLDRRVSELDHRIQATLKDSPTNLTEIYGVGPVLAAKIIGRLTTIARFPTKAHFASYTGTAPVEVSSGGIVRHRLSRGGDRQLNHALHMIAICQITRDTEGRAYYRRKLAEGKSERGALRSLKRRISDAVFKKLSADLDEVVPAVA

SEQ ID NO: 202503 - protein, 377 aa, unidentified
MSIVMGIDQHRAQITAEWIDLVTGEVSRARVRPADRAGVRRFLARFDCTQLEVALEATTGWRFVVEELRAAGAEVHLAEPAETAALRGNKRRAKSDRADARHLRELLLSGRLPESWIATDHILDLRSQVRLRHTLIEQHTEWQQRIQAVLYHHGCPHRRGLMVADGRDWLAAQPLPEAAREQITVALAMLDALELQLAPLSRQLRVYARAQTGCKALSDAYYGIGELCAVTILAELGDCRRFANSRDAVRYGGMDITVYQSDRHRAPGHLSRQGPPALRWALYEAAQVARRPSSPDRAYYEQAAERLGGNRACLALARKLLKRCYHTLRELGDDALAPPAEQTRAPAGSAAARRASSGSPLKTDRPATRKRADVLAA

SEQ ID NO: 202504 - protein, 380 aa, unidentified
MFVDCRWDSARRHHSRRRPRCFLQRSSVGLDVHARSVVACGLDTVTGQLYRQRLTPSSEDINRWLGTLSGPVAVAYEAGPTGYGLARFLNNAGVRCVVVAPSKLPRPQGDRVKTDARDAAHLARLLRMDQITAVRVPSPDEEAARDLVRAREDVRSDLMRSRHRVSKLLLRQGIIWSGGSSWTGKHERWLRQQHFDRSGLQLALDVEFEAVLMAAARRDRLDKAIEKMAGDSEYTPVVRRLCCLRGVSTLTGFALAVEVGDWYRFSGSTIGAYLGLVPTERSSGQTRSQGSITKTGSTHARRLLVEAAWHRGKPYRTPGLTMQARWAAATPAAQARGHLGNQRLKARWEVYTDRKKKPVIANVAIARELAGWCWPLATLE

SEQ ID NO: 202505 - protein, 372 aa, unidentified
MSDFNKYIGLDVHKATIAVSIADGEGGDVRFFGEIENNPIAIAKLIKQLSKADEKLSLCYEAGGCGYVIFRQLRELNQDCIVVAPSLIPRKAGDRVKTDRRDSLNLARLHRAGELTPVWVPDELHEALRDLTRGREDIKNMEKRSKQVLLAFLLRHGRTFTEKSTWTKAHFSWLETVKFTHPAQQIMFQEYVDIIKMHKTKLESMDKQILTYAHASTSWPVIEALMSLRGINLLAATTIVAEIGDLRRFATAPQMMSFLGLVPSEKSSGGSIKKGNITKTGNSHVRRLLVEASWTYRHNARKTAHIQRKAKHTTDEVQEISWSAQKRLCQRYRELGDRGKLKVQVCTAIARELTGYIWAIGQVMYPRLPLIN

SEQ ID NO: 202506 - protein, 358 aa, unidentified
MNATAHIEKIQSCGGVVVGVDIAKTVFQLCVADTKWRRLDKHRLSRSQFERWFDNREVALVVMEACGMAQHWSRWFAKRGVEAIMLPAHYVRAYRKRNKTDAADAAALLEAARCADIEPVRVKTVEQQALQALHRARSLWMGWRTGQINALRGACREFGLDISLGAKKGLEQMSKLMADEGSALPGLLRETMRAMLKQVKELEEKIAQVEKQLSRLMKDSRPCQLLMSVPGVGLMTTTALAAATGGDVTHIKGGRSLACWLGITPKENSSGNKRRLGRISKQGDAYLRMLLIHGARSVLRAAAVAQGQGKPLDALKRWALQLQARVGHNKAACALANKLARICYACLRDQVPYEPKRA

SEQ ID NO: 202507 - protein, 372 aa, unidentified
MKKNTTSPARSKKARQTTTAKAAAKLTVGIDLGDQNSAYCVLDAEGDVLSEGTLRTSEKGFAQQFESMSPCRIALETGTHSPWVSRLLQKYGHDVIVANARQVRVIYESDRKSDSVDARTLARLARIDKDLLHPIRHRSEKAQADLAMLRARDALVQVRTKLMNCVRGMVKSVGGRLPGASGECFAKRVREHVPTAIKDALTPLLDQIEQLATQLREYDKQIEKMAKTEYDQTQLMRQIPGVGVITSMAFTLTIEDPHRFGKSRDIAAYLGLLPRQSDSGESKPQLPITKAGDHMVRRLLVGCAHYILGHWGPDSDLRRWGLSLMVRGGKNAKKRAVVAVARKLAVLMHKLWVTGEVYEPLREANRVKEAAA

SEQ ID NO: 202508 - protein, 316 aa, unidentified
MEVIPIFVGIDVSKAQLDVAIRPTGERESVANDKAAIKALVKRLGKIQPAWIVLEATGGLERPLTHALAGAELPVVVVNPRQVRDFAKATGQLAKTDSIDADVLAHFAEAVRPALRPLPDAVTLEFRALTARRRQITEMIVAERNRLATASKAVTKRIHAHIRWLESELDQVDKDLDRSIRHSPIWKENEDLLRSVPSIGPVTSRVLLAELPELGKLNGKQISALVGVAPFNRDSGALKGRRSIWGGRAPVRSALYMATWVATRRNSAIRNFYTRLLAAGKQRMVAMVACMRKLLTILNSMIKHKTRWSESFLQTT

SEQ ID NO: 202509 - protein, 387 aa, unidentified
MTQPERPAPRCTAPDYDTTIIGALEMSEKKWVLAVQLPGVKRHTRHVSGASGEELATLIERLKARCAASGHPIARVISTHEAGREGFWLARFLTRRGVEVHVMQPSSLPVDRRARRAKTDVIDVEMLLRTLMAWLRDEPRVCSMVPIPDEADEEARRAHREREDLVRERRSILNKIDAILATLGVKGYRGLRSDRREQLALLRQPDGDPVPQAARVRIERLLDRLELILRQIKEVEAARDAVLKKPAPADEAERMIRSLVDMRAIGPQLATLLVREAFSRPIANRRALGSYVGLVGTPFSSGGSEREQGIGKDGNRRVRAAMVELAWLWLRWQPDSTLSAWFHERVGKAGGRIKKIMIVALARKLLIALWRYAKDGVIPEGAKMKTA

SEQ ID NO: 202510 - protein, 375 aa, unidentified
MQSIQNIQPGDKAKGDFSLYSTLNKIGMRIMKQVLGIDVAQKELVVCLGRMNDNWTPELYSHKTFANTAKGFESMLLWVKKQTVETITVRYVMEATGIYHESLAYFLEGKGYEVSIVLPNKISNYIRTLDVKTVTDKTASEAIAQFGLERVLENWKRPKEIFRNLKQLTRERGQIVEHRTMAKNQLHAEETEAYPNKKSVARIKEQIKLFNKQVAEIKTEIASLVKHEKEVDKSIEIICSIPGIGLLTAVTVLAETNGFELIRNKRQLTSYAGLDIKEKQSGTSVQGKPTISKRGNKHVRKAMHLPALTAIRVEERFKSIFIRLVSKHGIKMKAVVAVQRKLLELIYTLYKTNTVFNKQYLKLNELDLDRQASMA

SEQ ID NO: 202511 - protein, 413 aa, unidentified
MEVLVDRCAGLDVHKKTVVACVRTPGTGRQKRVSEVRTFGAFEHQLVELRAWLAECGVTSVAMEATGVYWKPVWHVLDEGQPFELLVVNPAHIKNVPGRKTDVNDATWIAQLLECGLLRGSFVPPTEIQQLREVTRYRRQLTEERARETQRLQKVLEDANVKLSSVASDVLGVSGRMILDALCAGERDPEVLAEMAQRRLRAKIGDLRHCVPGRFNDHHAGMVTEIVAHVDYLSAAITRLDARVEEMMAPFRAARELLETIPGIAQRTAEIIVAEIGVDMTRFATPGHLASWAGVCPGNNESAGKHRSTHTRSGDPWLQSALVEAAWSAIRSKNCYLAVRFWRIAKRRGQQRALIAVAHTILIIAWHVLSEGTVYTELGVDYLAGNDNPDRRRRHLINQLEHLGYHVELTPAA

SEQ ID NO: 202512 - protein, 394 aa, unidentified
MILVGIDIGKNKHTFSIIDKNSGEILLSPSDFSNNLKGFLFLIPKLSSYTKSELLIGMEDTGHYHFALLKYLLDRRYTVALINPTTTDLTRKLQGGITKNDPLDSLTICDVISSNHRNKPYRVTTLNRFDLYEQKQLTRHHHNLKEELNTYKNRLQKCIDIVFPEFNSLFHSKYGIVYMNILKAFSSAKAIANADIRSIRICFEFKGQGKRISLSAEQLKLTAKSSIGIPSVAEEIQIRHLVSQIELLEKQLSEIDKRIEEFSLKNNSPILTIPGISHFSGTSIISELGDICNYTKASQIIKFAGVAPYHYESSQFTAHHTAITKKGSKYLRKTLYQIILPVISNNEVFYAYYTKKLNEGKGHRCAQGHCIRKLLRVIYHLLSTRQPFNPKLLV

SEQ ID NO: 202513 - protein, 325 aa, unidentified
MQYHPTKLGIDISKRTFDVCLLNGAKPKFEKFSNDLDGFKKLESWLKKVRSAELHIGMEATGNYWKALARFLIANGHQVSVINPLKIKRYAGYRLHSNKTDKTDAMMIANYCLQEGENLLLWQDVDEETRHLRDLIQYRDKILEMLGQIKNRIGSIIEDETVLRWQSADKAYLEQRLELVDKEIGAALKESEEMKKKQALLLAIPGIGPVIASYFMALIPDVSAFKTSGQVVAYFGLDPMIQESGTSVKKQSRISKKGNAAFRGKLYLPAIVAVKVNPVIRNLSERMTASGHLKKEIYVAAMRKLVILMYGVLKSGKPFDPNYAN

SEQ ID NO: 202514 - protein, 340 aa, unidentified
MKHTVVGIDIAKNVFQLHWVELEAGEIVSRQIKRAGLLEHFANRTPCLIGLEACGGAQHWARRLTVMGHQVKLLPGKAVKAFVSGNKNDAGDARAIWTAVQQPGVRAVAVKTEEQQAVLALHRMRQQLVKFRTMQGNGLRGLLMEYGEVMAVGRSGLNRAMTDALARLSERLPAMLIDTLRQQWEMVGKLDEQIAQIEQRLQAWMKQDKACKAIAAIPGVGLLTATAAVATMGDAKVFRCGREFAAWLGLVPRQTGTGGGVKLPGISKRGDTYLRTLLIHGARSVLARAKECDAWIEQLGKRRPPNVVTVALANKMARTIWALLAHDRQFEKTHVSSRPA

SEQ ID NO: 202515 - protein, 317 aa, unidentified
MESDSICFDRVVAVGCGLDVHKDSVVATVGGIGVQEETRSFGTFTESLKQLDGWLQQVGVTHVAMESTSVYWKPVYNILEEHFEILLVNAQHVKNVPGRKTDKADSRWLTKLLLSGLLKGSFIPPRDIREMRDLFRYRKKLTAQIVAEKNRFQKILEDANIKLGSVVSDVFGASGTAITNAIIEGQTDATQLVKLAHSSIRAPKETLRQALHGKITAHHRFMLTTIRKSISNTESLMEDIDRSIEEHVELYSVEMTFLQTVPGVGQRSAAAILSEIGTNMEAFPSAQHLASWAGIRPGNNESAGKKKVDEPPKATPT

SEQ ID NO: 202516 - protein, 350 aa, unidentified
MYFAGLDAHLKYVTVAVLDRLGTIVLETTVSTREPERLLAVLAPFRPLEVVVETCPFWPWLYDLLVPAGIGFHLAHAKRLRAIATAPQKNDRVDARLLARMLLSGLIPEAYPRPGDQRELLRLLRHRTTLVRFRTRLAGRIHSQLHQQRLLLPREQLLRQATRTWLRETAWPRLTTEQQAIVTTHLALIDQLTPLIQALERRIDTAAGANPTAALLATIPGIASYRSLLLAAELSPLSRFPRVEHLASYAGLAPVTRSSGGHTRHGSIPQGANRWVRGALVSAIPSHVRWAPTSPVTRAYEQLTARLGWRVARVAAARKLLRIVYIMLRRGEPWRGAGRVEADVRDEVHA

SEQ ID NO: 202517 - protein, 376 aa, unidentified
MITCFIGIDAHTTNYTLSTAIDAEDKPFNTCKYAPKLTYILKYANALCKKYNLKKEDILLGYEAGCLGFKLQRDLNENGFNCVVMAPSTIPGTAINRRKKTKNDIRDAEAIAKALRNDDYSSVATPDEEDEAIREFIRAREDIRMELKRCKQHIMAFCNRHGQHYEETGWTQKHMKWLNNLAFSQPVLKETLNSLLLEYEYLTEKLEEKDRRIEEFAQMDKYRESVHKLTCFKGIKTLTALAVIVEIGDFARFMKPKNFVAYLGLSVGEQSSGNDHNQTGITKQGNRFIRKLLTEAAQCFSRATSKKSKELKKRQEGNVEEVIAYADKANERLRKRYHHLVIHNMKSPNKAKCAITRELACFIWGMMTDNIHTVLV

SEQ ID NO: 202518 - protein, 387 aa, unidentified
MPQPNDLSRSLAALDQDSTLIAVVEMSQTSWLIGAIVPGVERHPLKKIVPDENELLRLLYRWRDEAIKAGRRITRITVAYEAGRDGFWLARWLRARGVEAYVIHASSVAVSREHRRAKTDRLDTELLKRTFLGWLRGERDHCKMAAIPTLAEEDAKRPSREREALVRERTRLTNRMKSALARLGIRNFKPQLRKAAERLAAVRTPEGEPLPPHTLAELHRDIARLQLVKGQIEQIERARLERLRQPPTDAPHAMLVQLAQVYGLGIETADMLVHEVMVRDLRDRRAVARYGGLTGAPDESGARRREKGLARAGNARVRRGMLQLAWRFLRFQKQSALVKWFEARTADGRMATRKTMILALARKLLIALWRLATVGEIPPGVKLRPAA

SEQ ID NO: 202519 - protein, 416 aa, unidentified
MLKIVYPICCGIDVHKTFVVACIAITDNKGITTYKRHRFSTFTQGLRELLQWLELFSCFDVCMESTGKYWIPVYNILEPSVNITLAHPKYVKAIRGKKTDTKDAQWIAELFKHDLVAGSFMPPLAIRELRDLMRYRFKLTNFASSEKNRFQNSLTVSNIQIASVVSDTFGKSALKIIERILEDPEQSMLTAEELESLIHGRLIKKLPELELAVDGFITPEQKIKLKIIKEHFDALTLCKKHLEETILELAQPYQNEIQLIQTSPGFKNELSVVALISEIGVDMSEFHSSKHLCSWAGLAPTNNESAGKKKSVRISKAGCYLKPLLVQIANAVVKSTKYPEIRNKYLNIKKRRGHKKAIIAIARKLLTAIYHMLKNQEVYQAQLFSDMIDIPTSREITTEQALKLIKRQGYKITSVI

SEQ ID NO: 202520 - protein, 315 aa, unidentified
MAEVIYAGVDVSKETLDVALHPSGEYWQEKNDEAGRTRLIARLENVSPELVVLEATGGFERSAAIALTVAALPVVVINPRQVREFARATGELSKTDRIDARILALFGERIRPEVRAMPDEAALELEAFIVRRRQLINMQTAEKNRLSRVQSPVLKKSIETHIRWLDKELKGVDDEMDKRIKENPLWRAKEQLLISVPGVGPVTSRTLIAELPELGTLGRREIAKLVGVAPLARDSGRMHGRRSVWGGRAQVRTALYMAAISASRSNPEIRRFYLRLREAGKPAKVALVACMRKLLTILNAMLRSGQRWNPQPMVS

SEQ ID NO: 202521 - protein, 395 aa, unidentified
MEAKYYIGVDISKVTFDVSVFSSVLVAYKKKYEMTKEGFTSFLSYLNEFEGSVFIFMEPTGEYYLNLANYLSNLDYPVYLVNQFKLKNYICANSLRKNKNDKKDSSWIARFGSDSFNNLVLYTSSDSTKLSQLMRSKEFLLQDMTILKNRIRSKLNISFPELEGNYDIFGDFFSLIISEYPSAFSFSKMDIDFMKEKYKTRRGFKVNFLEEVYTLSCNSCSTVFDFLDSTISRYYSILFKYQEEFELLEKEILSVSSEYQVFNENITILESIRGVGFDSAVRLMSFSNIYNNYVYQVFSNYKKWLAFSGTDPTTFSSGSSVRGVSRISRRGSRSLRSLGFTISLSLIQYNPTFKAYYLKKKGDSKKGKKYVFAVWNKFLRVAYHLLSTRQMYKEM

SEQ ID NO: 202522 - protein, 458 aa, unidentified
MDKRRSEVGRDARPMGSRADSIERQYRVDEASRWVGAEKGVLMTEQAEAFLRFVGVDWGSEAHQVCVIDRSRKIVLEKAFAHSGKGLSELVAAVLAAGGVDPEQVAVAIEVPRGAIVDTLLERGLAVFAINPKQLDRFRDRHSVAGAKDDRRDALVLADSLRTDEPAFRRVRAGDPTLIELRELGRIHEELKAERIALGNRLREQMQRYFPQVLTIGNVYEDRWLWELLEKAPTPELAKRVSLAKIGSLLKRYRIRSLTPEAVREAVSAEALHVAPGVLEACRRHVALLLPRLRLVHEQKSAVEREIEALLEKLSEPLEGKAEHRDARLLQSLPGLGKLVCATMLTEATEPLENRDYRSLRTLCGVAPVTKRSGKQHAVSMRTSCSRRLRTALFYWADNATKREARWKERYAALRAAGHSHGRALRGLADRLLALLVAVLKSGTPYDPARRGRPTLAT

SEQ ID NO: 202523 - protein, 340 aa, unidentified
MNNLNTIAIDLAKNVFQVGVFSPQRIMTSNKQFSRQKLTSFMAKQEKAIVVMEACYSSHYWARLFMKMGHIVHLLPAQHVKPFVRGNKNDRNDSIAIAEASWRPNIKFVPLKSIEQQDIQALHRIRDKLISRRTSIINQTRGLLSEYGVVMPQGLKSFTQHISALIDPKDERITVRMKQQLRGVKEEYDQLSRRSKTIETELKQYAQQNTLCQRLMTLPGVGVLNATALYAAIGNGSQFENPRALSVWLGVTPKQYASGEKSFYGGITKRGNHYLRKQLIHGARSVMHRIKAKDDKLSVWVKQLVERRGKNKAAVALANRLARLAWILLHRDENYHSVVS

SEQ ID NO: 202524 - protein, 340 aa, unidentified
MPLYGGIDLHANNSVIVLLNEQDEVIYRKRLPNALPTILEQLAPYHTEMEGLVVESTYNWYWLVDGLMEADYRVHLANPAAIQQYSGLKYTDDHSDARWLAHLLRLGVLPEGYIYPKAARAVRDLLRKRAHLVRQHTANVLSVQNIMARNTGARFSVKRIQELTKQELTTLLAEETQVLAVTSSLVVLDCLRQQIKMLEQSVHKRLHHTPSYEQLLTVQGIGTILAQTITLETGAISRFPTVGNSASYCRCVDSTKISNGKRKGTGNVKNGHPYLAWAYMEAAQFAMRFQPEAQRFYQRKLAQSRNNTVLARKAVAHKLSRACYYIMRDLVPFEAIKAFG

SEQ ID NO: 202525 - protein, 420 aa, unidentified
MLAESHDEEQIIARVAALDIGKAELVCCVRVPGTAARRLQEVSTHSTMTRSLTELANHLVELAVERVVMEATSDYWKPVFYLLEAHGLQPWLVNARDVKHLPGRPKTDVLDAVWLCKVAERQMLRPSFVPPRPIRRLRDLTRYRIDLVGVRTAEKNRVEKLLEDACIKLSVVASDIFGVSGRAMMAALIAGERDPKVLAQLARSRMRTKIGRLEEAFNGHFDDHHRFLLARMLDRIDGIDADIAAVDEQIEAHLAPFAAAAARLDEIPGVGPVAAAVIIAEVGVDMSRFPTAGHLCSWAKFSPGIRASAGKTKGNGSTGHGNRYLARILGEAAAGAARTDSFLGERYRRIARRRGKKRALVAVGRSILIIVWHLLADEDTRFTDLGADHFTRHVNPDTKKRNHIRQLEALGYTVTLTPAA

SEQ ID NO: 202526 - protein, 313 aa, unidentified
MSKDIYVGIDVSKDHMDVHIVPQNTAFRSKRDDKGIESLVKSMMRYSPKLIVMEATGGYESVIAIKLWSAGLSVSVVNPYRIRSFARADGTFAKTDKMDAHIIAKFAKSMKPKPTEFPSDHQRVIRELIARRNQLVKMRTAEKNHLSRACMPNVRASIEMVIHSLNEQIERIDNDFDNFIDLDPDFKEKDSLLQSVPGVGQNTSRMFIGNLPELGQLNRQQIAALVGVAPMNKDSGHSQGKRFIMGGRAPVRSMLYMATLSALRFNPTIKIFYDRLVQAGKAKKVAITACMRKLLIILNAIVRTKTPFKDVCS

SEQ ID NO: 202527 - protein, 342 aa, unidentified
MQITTIGLDIAKNVFQVHGIDTAEEVVVRKQLRRGQVLAFFKALSPCLIGMEACATAHYWAREFTKLGHDVRLMPPKDVKAYVKRNKNDAADAAAICEAVRRPTMRFVQVKSSEQQGRLMLHRTRDLLMRQRTQVINALRAHLAELGIVAAQGREGIKELLKIIASEEDARLPVDAHTSLVVLAAELQAMQTLIGSIEKRIIAQHRSSEASKRLESIPGIGVIGATAITATVADPKVFRSGRDFAAWIGLVPREDSTGGKHKLGPISKRGDRYLRRILVVGAHAVLRLARQKPEKYPWLTQLLARKPFRVVAVALANKMARMAWALLAKGGTYRTPALAAAA

SEQ ID NO: 202528 - protein, 482 aa, unidentified
MKKKNIYVNQSQELLSMFEEAGNNEKIMCVPIDYAKKDHIVMFCNGYGHILRKPFSIKNSPEGIAYLTEQVTRSCSHRCIDPKHVFFGGEDVGSYAENFANTLRSGGWIVAGVNAHDAKEQRANIQASTDRLDLMGIATMLLNRRANCSPAQSGIYRNLRTLVRHRRKLVSMSTEEKNRIHTVVDRLFPGFLDEKNSGIPPFSESSLYLMENRFSPLQIRRRKRHKLIEVLHRYGTSKPEDTSARLQEYAACVLNTPDEYIFTLQLSLVQHVKHFRCLQDSINQLENEIALWLAQTQGAFLTTVRGIGIVLAAGVSAETGDPYKQKPLNNLVSYSGIIPRVKQTGGSEGKTRTGKVVKRCNRILKDYLVQSALHMGLHGPEDLMADYKRREAAGQHADFGIGRRYLRMAMCLMRTSQIYMPQQLRITKVKPEERAGYYLMTWPYLRNKWNKAGALEAAFKNDRPLGQWRNMVQELYEIKLKL

SEQ ID NO: 202529 - protein, 340 aa, unidentified
MGELTTIGLDLAKHVFQVHGVDAEGATVLRKQLRRAQVLAFFSRLPPCLVGLEACATAHYWARELRALGHEVRLMPAQYVKAYIKRNKHDAADAEAICEAVQRPTMRFVPVKTADQQAAVLLHRGRERLVRQRTGLVNALRGHLAEFGVIAPQGLRNVGKLIAIVRDEGDARLPDLARQVLQVLAAQIEQLEAAVAAIEKQLMAWHKSNPVSQRLASVPGIGPIIATAIAATVVEPSGFRSGREFAAWLGLVPRQNSTGGKHRLGGISKRGNQYLRRLLINGASANLLRSKATNADPWVIGLRQRRPSLVVAVALANKTARIAWAVMHRHENYQRVAAAA

SEQ ID NO: 202530 - protein, 399 aa, unidentified
MRFYTGHRGFYCGIDLHARWMYVCVLSQDGEIVYHKNLPAGPEAFLKAVAPYRHDLVVGVECVFTWYWLADLCREEGIEFVLGHALYMKAIHGAKVKNDKVDSQKIAGLLRGGMFPTAYVYPPEMRPTRDLLRRRTYFVRRRADLLAHIQNTNSQYNLPEFGKKIARRMHREGIAELFPHPAVQQSVAIDSQLIDEYDRIIEGMKDTILRTARNHDAQALSLLRSVPGIGQTLSLVLLYEIHNIDRFERVQDFCSYSRLVKCAHESAGKRSGKSWRKIGNVHLKWAFSEAAVLFLRANPEGMKYKKRLERKHGKAKALSILSHRLGRTVYGIGNRITTSRSRAPADGGWRRPRCGRWGTWRPARPRIAVPDVRAARAASTSASALIRMDPLVLSRMDPF

SEQ ID NO: 202531 - protein, 428 aa, unidentified
MASETDPIAPRTWVAIDIAKGVNVVLVEHSDGRQQRFRFVHQRDDYDRLVAFLKGCASPCRIALEPTADYHRTVAYRLVSEGFDLVLVSSVAGARLREAIFNSWDKNDPKDAQVIMRLLKQGMTQRYCDPVITQTHDLQELSKTFLHISRARTRLQHVLLTHYLTLYFPEFERFWTTQRNEWFIQLLMLFPTPASITAVGLSGFREAIWTPMGRRVHKEAKIAEIYALAERSIALPMSAGSPAVTTFRVQLERYLQLSEAKTAMERQADELLAGRADFQCLKTIPGIGSVIALVILAEAGDLRRFPHHRQFLKFCGLDLAKSQSGNFRGKDKLSKRGNARLRCALWMAAMSAARMRENAFRDKYTRYTAGAADDTDLKRKARTAITAKMARVVYALVKHGQPYRQRFDVDLPSGSIPLRRAVEAFGTS

SEQ ID NO: 202532 - protein, 353 aa, unidentified
MKRDKYIGMDVHQATTVVAVLDANGKVIWEKIIPTQAGPILELLESLSGPLHVTFEETTQADWIYEMVRARVAEVIACDPRRNKLLSEGSKADKVDARRLAELLRVGMLRSVYHGNDGARQLKQLAKGYQTLLSDMQRTMARIKAMYRGRGIQTPGRGVYQAKQREHWLSLLTDLGVRQRTAWLYEQLDQLGPLRRQAKLVMLAESRKHRAVALRRTIPQLGPIRSALIVAILDTPHRFRTRRQLWSYSGLAVVTHMSSEYEIKEGRVVRSRKPIATRGLNRNCNRVLKDVFIGAATGGGQREPYRQYLQGLQDRGMRKEMARLTLARKISSIALTIWKKGEAFDPKKLNWAT

SEQ ID NO: 202533 - protein, 309 aa, unidentified
MKLTPFVVGCDVSKAKIDFFDASNSKHTIVANQTGALNRFLAPYAGCDVRFAYEATGFYGNELRAALVRYQCAGVQINPLHGRRFAQSLGRLAKTDRIDATQLAAMAERLELPQTYVWNEDVEQLKALITRRDQLVAMRANERKRLQQTQREPVRESHIKLITMLSGEIASLDEQINQTITANDEMHRNCQLLQSIPGIGPTIASVLIAMLPETGTMNRSTIAALAGVAPIARDSGTFTAKRSIAGGRARIRKALYQAAMGTLAGTSRFKQKYLTMIQKGKPPKVALIAIARKILTTANAVLKTQKQYI

SEQ ID NO: 202534 - protein, 477 aa, unidentified
MPKQKRTRNARTLPVARVLEPNAAGIDIAATEVYVAVPAGRDPQPVRRFSTFTDDLHRLADWLQACRVQSVAMESTGVFWIPLFQILEDHGFRVCLVNARHVKNVPGRKTDVSDCQWLQYLHSVGLLRASHRPTQTICAVRSIWRHRESLVQMAAVHIQHMQKALDQMNLQLHHVISDITGTTGLAIISAVLGGERNTENLATLRDPRIVASRETIARALVGDYRAEHLFTLRQSLQAYRRYQQWIAACDSEIERQLQVLPGNLPDDPKALSKPRDHHKPRRNEPRFDLRSQLYRVFGVDLTAVPGVSSLTAHTLLTEVGPDLRRFPNAAAFASWLGLCPDNRISGGRVLSVVTRKVKNRLTIALRMAAQSLHRSQSYLGQYFRRMRIRLGTPPAITAAAHKLARVLYHLITTRQPYEESTFAAMEERARQRQLLRLTKQAARFGFQLVPGRSVHSRQQIRGLRAPETGIADVSGHA

SEQ ID NO: 202535 - protein, 344 aa, unidentified
MRIAVLGVDLGKNVCSLVGLDASGAVVLRRRAKRETVIALAAKLSPCIVGMEACCGAHHLGRVFAAYGHDVRLMSPEYVRPYVKAQKNDDRDAEGIAEAVTRPTMRFVELKSQDQLDMQTLHRSRDRLVGERTALINQLRAILLERGIVAPQGKRKLEQFLVELMDEQGGPGLSPRMIMLVTDARAQWAELDRRIAAFDAEFVRWTRENEDARRLATVPGVGATIASALIAAIGKGETFERGRDLAAWLGLVPRQLTTGGKPKLLGISKRGNKYLRKLLIHGARAALPYVAERDMPLGRWAKSLLSRAHPNVVVVAFANKLARIAWAVLRRGERFAAKGTPLAA

SEQ ID NO: 202536 - protein, 409 aa, unidentified
MERQIERGCGLDVHRDTVAACVRVPGQGRPRDQHVRTFGTTAAALLQLRDWLGEHGVTHVAMESTGVYWKPVFYVLEEAVTCLLVNAAHIKQVPGRKTDVADCVWIAQLLEHGLLRGSFVPPAPIRELRDLTRHRKVLIQERQRVVNRVHKLLQDAGIKLASVATDILGQSGRAMLEALAQGTTDPAVLAELARGRLRAKLPALREALAGRFRPHHAFLVSQLLAHIDYLEESIATMSGEVDRVLAPFAAQVAQVDTIPGINKRTAEVLIAEIGVDVSRFPSEHHLASWAGLCPGNNESAGKHKAGTTRKGDRWLRLALVEAALAAIRTKDSALGARYRRVMRHRGHKKAVVAVAHAMLRAAYHVLAEGTTYRDPGPDYYDRRRARQATRRALELLERQGYRVTLEPAA

SEQ ID NO: 202537 - protein, 319 aa, unidentified
MNTTSKIQKKHTQRHVGIDVGKSTLDIYIFEKDEYFQVENNPSGITQLTKKLKRYKLTRVLVEATGGYERAVAEACVEQALPIIIITPIRIRQFARAQGIIAKTDKIDARLIAHFGVVMQPEVRELPTKKVRKVKDLNARKRQLMESRTQELNRQHKAQPYMQSTHRRMIKVLDKEIEWINQQLAKEVDKIDEWKRTQDILLSAPGIGCGVAHTLLGELPELGQLSHRKIAALCGLAPFNHESGSIAKKRRIRGGRAPIRTVLYMAMMSAIQHNPIMKTFFNKLVAQGKHKKVALTACMRKMITILNAMVRNNQEWNMA

SEQ ID NO: 202538 - protein, 346 aa, unidentified
MSKTRRVGEVDRVLAVKVFCGVDVSAARLDVAVQQEGVEGFRRRQFANTAAGHRQLLVWLRKLGWGVRVALEASGVYSLDVALALDEAAGFEVAVLNPRKASDFARSLNRSKTDKADAEALSEHSRRMEFVRWRRPCRAALELRALGRHMATLTEEHSRLSNRLHAAEGSRTAPRCVREDLKRSMAGIRKRLLRLQREARAMIEREAEMKRKLLRLMAMPGIGEISAMQILAELAGLDEQMTVRQWVAHSGLDPAHQSSGTSVHKRSRISRQGNRHLRKALFMPALTAARFDPYLRAFYLELLDRHKTKLQALTAVARKLLHAIYGILKTDTDYDGAKLFPALKIA

SEQ ID NO: 202539 - protein, 348 aa, unidentified
MMLIGCDFHPSWQQVCWVDTETGETAEQKVVHAPGEAEKFYRRFAAPARIGLEATGNCQWFVEMVAALGHEVWIGDAAKIRASDVRQQKHDRRDAALLLRLLRENRFPRIWTPSSAEKDLRQLLIHRHKLVRLRAQTKNGLQHLAMNQGLQKKRRLWSKAGQEALRELALQPWASRRREDLFSVLAMLDKQIESLDLAVKQAAEENENAKLLMTQPGVGPVTSMAFVLTMGDVSRFPRGKQVASYLGLIPREYSSGGQQRLGSISKQGNGFMRMLLVEAAQVVVRCDPQMRREYLHRCHDKPKGVAKVAAARKLAIRLYWMLRTQQPYPEIVHVESSSRVPLVIRHGG

SEQ ID NO: 202540 - protein, 312 aa, unidentified
MFEGKVVHEEETANHQNAIMSLIRHLEKDYGIDGSRMLICAEHTGQYTFPLACACKAAECKLWLENPAEIKYSSGIQRGKNDKVDAKRIAVYASRFQDKVQYYERPSEDIERLKQLESERSLYVTDLAKYKGQLKDQREYMPTALYERKVKRLTALMENLEQAIQAITNEMDEVITSCPVLSRQMELLMSIDGVGRVVATNMIITTEAFTRFDDPRKFNCYAGVAPFSYSSGTSQQSKARVSHRADKVMKRLLHMAAIAVTHRNGGELKRYYDRKVAEGKNKMSVINALRAKIVARMFAVIKRNELYKPILS

SEQ ID NO: 202541 - protein, 390 aa, unidentified
MPKASAQPETPAAIQTNFTAIFVSLELSRSVWLITSLSPGLGEKMSKHSVPAGDVTALLLRFAELKRKAKVRTGKAFPIITIQEAGLDGFWLHRLLESEGMESHVVDPASIATSRRRRRAKTDRLDGEALLRALLAFKRGEPRVCAMAVPPTPEEEDRRRLSRERRVLVIERTEHINRIKGLLFSQGIADYEPIRRDRRERLEELHTGDGRPLPKNLKAAISREVDRLEVLIDQIKSVEAERDALLAEQQQQKKLSSPAGDNMLFDLKGIGREFATVLWTEGLFRHFTNRRQVASYAGLAPTPWQSGSVSHEQGVSKAGNPRIRTAMIELAWMWLRHQPDSALSLWFKERIAGGRGKKTTIVALARKLLVVLWKYVTSGIVIEGAVMKNA

SEQ ID NO: 202542 - protein, 431 aa, unidentified
MLKINPLSTLYVGIDVSSKSNYVCALDFFKNKYISSSFANNQPGAEELALKILECLKEHSDLTTVVAALESTSVYSIHIANYLSSCEELMRFKPYVFVLNPKCTANYKKSYIGLGKSDPVDAFVIADYARAGNIDSEPWRGSQFLALKRLTRHRLHLVECMTREKTYLVSNLYLKFSELQMLEGDDQPFCDIYGATSSSVLMEYLSPEEILNSSEEDLIAFLAEKSRNRIKDISKTADLLKKAARDSYRLDKALYEPLNVSIASSFNCIETFKREIKVIDNAIEKEIKGLNPNAFIILQSIDGIGPVFAGGIVAEIGDITAFHSSDALAKYAGLTWKSNQSGDFDGEDTPMIKAGNRYLRYYLGEAANSMRKHNVEYGTYYRKKYNEVPKHQHKRALALTSRKFVRLVYGLLARNQLYSGVSLDTSIKDSN

SEQ ID NO: 202543 - protein, 416 aa, unidentified
MNAVGIDVSSRKSTVAVLRPLGEVVCLPFDVSHDADGLASLAEKLKALDGETRVVMEHTGRYYEAVAKALHEAGFFVCAVNPLLIKEYGANSLRRVKTDKADAVKIARYALDNWADLRDFTPMDAIRYDLKTLNRQFQLASKQRTASANNLIALLEQSFPGIRKCFDSPVRSDGTQKWVDFAHSFWHVDCVRKQPFAAFCERYRKWCKRHAYFFKLSNAEEVYALAKRAVVLTPKSKVVKVLVQEAANQLISISRSVEVYRAEMDRLAAMLPEYPVVMAMYGVGKSYGPQLMAEIGDVRRFERKQALVAFAGIDPMPNQSGDKNVRSNKSSKRGSPYLRKTLFNVIRTYLQCAPQDEPVFQFLNRKRAEGKPFYVYMLAAANKFLRRYYAKLRDYFASLDTLQPVDPIPTILKATL

SEQ ID NO: 202544 - protein, 356 aa, unidentified
MVAGIIPGIDRHPLKKLKADEQALLRLLHRWRDEATKAGRNINRIAVAFEAGRDGFWLARWLQAHGVEAYVIHASSIAVSREHRRAKTDRLDTDHLKRAFIGWLRAEPDHCHMAAIPTLEQEDAKRPTREREKLVGERTRIINQVKSCLARFGVRGFKSKLRKAAERLEALRTPEGVALPPNTLAELRRDLLRLRVIMDQIKAIEVGRLERLKKAPKARPNAMVRLLARVIGIGIETADMLVHEILSRNLRDRRAVARYAGLTGSPDESGKRRREKGLARAGNARVRRGMIQLAWRFLKFQKDSALAQWFQSQTTNARCRTRKTMIVALARKLLIALWRLVTSGEIPIGVALRPAA

SEQ ID NO: 202545 - protein, 307 aa, unidentified
MNGIGIDVCKAMLDVAVHRGPFERFHNTPAGHRKLLSWLATQQAGQVVLEASGGYEQQILDALFDAGHQVVRADAYRCQAFAAATGLPAKTDRLDATNLACMAATLELRAYQPMEPWRRKLREFVRARQQLVDLVTSAQNQLEQGMDTSLRRLLQANITQMKKHCVRLEKHIAEQVRQQPQLEAMRSFKGVGAILQAVIASYLPELGTLDGKAIAKLVGVAPIAHDSGTTRGIRRIGGGRIEVRNVLYMACLSAIQHEPRIREFYRSLRARGKPGKVAVVAAMRKMLVILNARARDALAGQAQAIPT

SEQ ID NO: 202546 - protein, 320 aa, unidentified
MQTPSVALNIGADVGKDEIVMACAERSFAPRKIDNRRAALLAFLKGVPARSRIGLESTGSYHELLAELAHKLGFVVYVLNPKDTRHYAKAMGLRGKTDRVDAELIARMLAHEHEKLHPWIPPTPEQRQINRLLKRRAKVSRIRAALAQSFKGLKGFSGELKALRQRLDKLLARIDAEVKALIETSVERKQHYARLRKITGVGAVVGSSVLNTLERVPLGSADAFIAFTGLDPRPDDSGQHRGRRRLSKRGPSELRRLLYLAAMAAAKTKTWNPLYEHYRAKGLSTTAALVILARRIARTAWSIYTHKTDFDPKRLTKALT

SEQ ID NO: 202547 - protein, 424 aa, unidentified
MKVTYQTCCGVDVHKSFLVATIVKTTGGIEPSYQKKRFSTFNNSILEFKQWLLDNHCHDVCMESTGKYWVPVFNLLEDKINVVIANPKWVKAVKGNKDDTKDSKWIGDLFRLGLVKGSYIPCKKVRILREYTRYRYKLVSCRSSEKNRYQNALTVCNVALDSIVSDIFGKSSTSIIDYLLEQSGTSINHEEITSKLLRNLKSKEDAVIESVEGYQMTDAQKYRMRLVRAHMDYITAEINDVDKMIENMISSNPDFENAVQFLCTIPGVKRDSAITIISEIGIDMSQFCSSKRLCCWAGLTPGSNESAGKKKSVRITRAGVYLKPALVQCAHAAVKSDKSPYYKKKYESLVERRGKKRAIIAIARMILTAIYQMLSTGEQWNPSDLYKVDMPEALLEKQKQKAIKQAQKLLIREGLLPPTEPIAS

SEQ ID NO: 202548 - protein, 343 aa, unidentified
MQSISTIGLDIAKSVFQVHGVDAAGQVVVRRQLRRRHVLAFFHKLPPCLVGIEACASSHHWSRELQALGHTVRLMPPAYVKPYVKRQKNDATDAEAICEAVTRPNMRFVPTKTVEQQSCLMLHRARHLFIRQQTAIINSIRAYLAEFGIVAPVGRRGVEQLLEVVADKAEDRVPEVARMCLAALGAQLRALKAQILEFDRRIIAWHRSNTTSKRLDAIPGVGPALATALVASIADPKAFRSGRDFSAWVGLVPKQSSSGGKDKLGSISKQGDRYLRSLFTAGALAVIRYAKIHGTDHRPWLTRLLARRPTKVAAIALANKLARMAWAMMARNERYQEPAALAA

SEQ ID NO: 202549 - protein, 347 aa, unidentified
MTQAQIYIYGIDLGKNWFHLVAMDRMGHVLTKQKLTRSQLKQFISTTPPCRVAFEACPGSQYWGRLFQQAGFEPKIIPAQFVKPYLKSNKNDFNDATAIAEAGSRGTMRCVPLKSHEQLALQATHRVRQRFIVERTATVNQMRALLLEYGLTVPVGRKVFERSLPTILEDAENGLPDFIRALVLRLRERWQQLDIQIDDMSLMLGQASSTSSLCQKISTVPGIGPIVSTALIAAIGNGSQFKKARDLSAWLGLVPRQYSTGGKSSLGGISKRGNSYLRQMVIQGAKALKIHMKRDKSSLGEWVARLEVGHHHHVVLIALANKIMRICWKVLTSGRDYQPYPNTSSAV

SEQ ID NO: 202550 - protein, 410 aa, unidentified
MEVVHAHCAGLDVHKDTVVACVRHMTDGKITTTVRTFNTATAELLALSDWLSAEVVTHIAMEATGVYWKPVWNILSDGEFELVLGNAAHIKNVPGRKTDVKDAAWLADLMAHGLVSSSFVPDQTTQEMRDLLRTRKQLVRERTSHTQRIQKTLECANVKLDSVISNVVGVSGRRMLEALIAGQTDPKELAAMAHGRLQATPAELEAALRGRVTAHHRFMLRLHLDQIDSFDEAIARIDKQVSDNDQHFRAAVELLKSVPGVGSLAAEVIVSEIGIEMDRFATAGNLVSWAGLCPKNDESAGKRKSNRLKAGAPWLKTTLVQCAWGASRSKGTYLHAQYLRIRARRGNKKAICAVAASILTTAYHMLKDGTFYEDPGPDYFDKRNKDQQANKLVNRLQNLGFHVILQPVSA

SEQ ID NO: 202551 - protein, 315 aa, unidentified
MAMPVSVTKPIVGVDVAKNELVIYQSDGDLLEEIPNTKTSIKQWLKALSGTVAIAIEATNIYHLDFADLAYEAGCTIYMVGGYELKHYREGVKIRAKTDALDAKLLARYLKNEAEELRPWTPPSPLYRQLLSLFRRRAALVQARVGLVQSWSNEPLLKAAFAEQVKSMQQLETLIEKTINDQLKEAGLLGQLKRCLKVEGIGFLTGARLITAFQRGDFRNADAFIAFLGMDLRVAKSGQKDARRSLTKRGDPEARRLLHNAAMSASRTKAWKGYYEEQRTRGFSTTQALVMLARKLARVVFALLKGQSEYQPKAS

SEQ ID NO: 202552 - protein, 346 aa, unidentified
MDQIIRIGMDTSKHIFQLHGVDAAERPVLRKRLGRRQMVAFFAKLPATVIGIEACGAAHYWARVLGEFGHEVRLIAPQHVKPYVKRNKNDRRDAEGLCEATGRPTMRFVSVKTAEQQAALMLAGLREQMVARRTQLSNAIRGYAAEFGITAAKGLDKIEPLLADIAQDESVPALARGSFAVQGREYAQLQSELKAIEARLRAWHRANADSRRLAKIPGVGPIGASALVIKTPDPSAFPSGRHFAAWLGLTPKDHSTAGKTRLGKITRAGDERLRSVLVAGATAVIQQAKHGRGHPSPWLLALLKRKPPKLAAVALANKIARIAWKLMTTGESYDGARMSGASALAA

SEQ ID NO: 202553 - protein, 321 aa, unidentified
MQTNNTVVYAGVDVAKATLQLHLQGQQTEFNNTPKGLHQLCAQLQKAPTVHVVCEATGGYERALVKALHQEQIPVSVTNPARVRAAAQAQGQRAKTDPIDARMLTDYGQRYQPDPTPPTSATQDRLVALTQWLKQLVHGRALAKTQAEHHQDPFVGRQHAKLMTHLQSQIAAVEKQIEALLEQDAALKRRVDCLDEIEGVGPRTAWMVLAHLPELGRLNRQEVGALAGLAPWTRESGMMKGKSCIGGGRPEVRLALYMAALSAARCNPVLRSLYKRLRAKGKAAKVALTAVMRRLLTYMNHRIKALPSETATATAKKSKTP

SEQ ID NO: 202554 - protein, 470 aa, unidentified
MSPRTVASAPRRKGAKTSGKPPRKKKAALPPLSITYPDAAGIDIGASSHFVAVPVGRDTEPVREFAAFTADLRLLVQWLRDCRVTAVAMESTGVYWIPLYEMLEAAGFEVHLVNARHVKTVPGRKSDVLDCQWLQQLMSFGLLRGAFRPADEVCALRAVWRHRDMLLSYQSRHVQHLQKALTQMNVQLHNVISDIMGTTGQAIVRAIVAGERDAQVLARLRHHRIRADEAEIARSLEGNWRHEHLFSLKQALTLYDTYAGQIVDCDAELQRLLSTLKAHEVPDGGLVGDAPRGGPSKNAPRFDARTALFEAGGVDLTRIPGIEASSALKIISEIGTDLRRFPSVKHFTSWLGLCPGTKISGGKALSGTTKRCANRAAQALRMAAQALRKSQSALGAYHRRLCARMDRAKAITATAHKLARLVYFMLTRGQAYVDAGQQQYEERYQQRVIQSLTKRAQALGFQLIPAPQPA

SEQ ID NO: 202555 - protein, 408 aa, unidentified
MESQIIFGIDVSSKSSTVCVVNDRIKQGESFRISNDSFGYQKLYEQLNQYLITPLVVFEATGVYSLSLQAFLEDYHIKYLKLNPLKAKKLMDNNLRHNKTDKLDAYRLALIQFNAPQKLRDPQPREYHELQNASRYYEELTRSIVTTKNQLHRNLQSTFPQIEEILSHPSGRIYWALVSLFPHAGYVLEKNETQVTQMLNSISGIGQQRARYLTTRLYAFAREAYPYDSKDSIIVRAIQRNISNLFSLQQERDYVINYMEKLAKAVNARALSIYLSIPGVARITAVRLVAELGDLRRFSTSAQIDAFVGIDPGRYQSGEKDSSLGITKHGNHIARKILYRVIIQMETVKATQPCHITDYYDKKKRSSNSQGYKKIAIASVHKLIRTMFALIKHDQLYDYNIATKNKRL

SEQ ID NO: 202556 - protein, 418 aa, unidentified
MNEELIARLSRRYVALDIHKHYSIVAGVNFDGQVILEPVRVEHADLEAWLKKHIQPTDYVVIESTTNAWHIYDLLEPLAEKVLVANPIKVKQIAQARVKTDIRDTLILARLLAANMIPAIWVPPVDVRNLRYLLSQRRHLVGMHTQTVNRMHSVAHRHHLNHPKGKRFNEKNTGWQQDAELSDSEKFQLELDMGTKQHLDEQAGKITQRLARMSHEKPWAGSMLYLMQLPGFGVITGMTILAAIGDITRFEGFKKLSSYSGLTPGLEQSGTKNRGKGITKEGRKDLRWAMVEVAQRAVKSDPLWQRRFNELCRRMHRNQAIVVIAHRLLELVWFVLTRKQSYRHFSDERIAYKYLTWAWQLSEEDRDGLTRQQFARYYLMRLGIGHDLERIALNPKYPRKLASEAELLALRPELTQTE

SEQ ID NO: 202557 - protein, 392 aa, unidentified
MYIVGIDIGKNHHEASIVSPEGKQIGRSLRFATTHKGADSLMSFIFKNIGNSPCVFGMEATGHYWYPIYSFLKAKGYTIYVINPIQSDSLRKMYIRQTKNDSIDSFLIAEVIRFGQFGTTSMADENILAMRQLCRYRDSVISSRTEIKLRIGTIMEQIFPEYEKQFSSLWVSTSMGILEKYLTPENIENAPIDELFEIIKDKSHNRLTRAKAISIKEAAADTFGIKIAQDAFSFQLKQLIDRMNFLDKQIEALDCQILEYYEKFDCYLHTIPGIGIIGAATILAEIGDISRFKNSSALVAFAGIDPTVRQSGEFSSTHNHMSKRGSPYLRHAIFLAATTCSFHNSPLNAYYKKKRDQGKHHLTATGAVARKLTTVIYAVLRDSKPYEPKKFC

SEQ ID NO: 202558 - protein, 385 aa, unidentified
MKKNTLFVGLDVHKDTIAVAIAEQGREGEVRYYGTIPNTADAVRKLVKKLGPARRLKCCYEAGPCGYVLYWQLVKLGAECIVVAPSLIPKKSGNRVKTDRRDAEELARLHRSGDLTAVWVPDPAHEALRDLVRAREAAIEDQQAARNRLRSFLLRRGIKKPKGWSSWTKKHVTWVGQQKSKLEHEADRATFTDYLHEVEHAAERIVRLEKSLDEAVAQAPEQLREVVAALAALRGVAKLTAVTLVAEVGSFERFEKPSQLMGYCGLVPSEYSTGGPGKARRGKITKTGNAHLRRVLIESGWHYKMRPRRTGKLKKRQEHIGQEIREISWKAQHRLYKRYARLTLQGKPAGKAVTAVARELLGFIWDIAVRTERAYREAEPQSKAA

SEQ ID NO: 202559 - protein, 337 aa, unidentified
MKNYQMGIDISKEKLNICLKEGTHTVREEEIKNTVAAIKKCVKRIEKESGVTNNDLLVCAEFTGRYIYPLVCACDEMGLFLWMEDPTRIKNSFGVTRGKDDRVDARRIAEYAFRFSDKAVAYKMPDKTLVSLKNLLTDRDTLANDRKKYETQLRDQKGYMDAEDYRRKKRSWSAVVKTLDKQIALIDDEIQRLVESDEKIKHQAELLKTVDGVGDRIAVRMVVVTMAFTRFETSRQFNCYAGLAPFRYTSGKSIYSKSKVSQRANKQIKSLLHLAAVSVATHMKSGEYKDYYKRKTEEGKHPMCVLNVIRAKLVSRMFAVVKRDEAYQRNYMIFTPT

SEQ ID NO: 202560 - protein, 345 aa, unidentified
MDYFAGLDVSVKETSVCIVDDTGRLVREVKVASEPEALLPVVTNPLWRFKRIGLEAGPLSQWLFSALAEAGLPVICVETRHMRAVLQAQINKTDRNDARGIAQMMRAGLYRPVHVKTLRSQKLRMLLTHRKLLQSKAIAIDNDLRGTLRNFGLKVGVVGALKFEARIRELVEDLPDLAELVEPMLVVRRTLREQIGILHGRLLAIVHNDDVCRRLMTVPGVGPVVALTYRATVDVPARFRNSKAVGAVFGLTPSRYQSGETNRTGAISRCGDEMMRAMLYEAAHIMLVRLAKWCWLKAWAMKIARQRGIKKAIVALARRLAVIMHRIWVDGTEFRWTREQVVAAA

SEQ ID NO: 202561 - protein, 341 aa, unidentified
MMIIGCDFHPRMQQIAYLDQDTGECGERRLNHLQEAAEFYRRLRGRQVRIGVEATGNFRWFLRLMSELGHEVLLGDPSAIHASNPRKQKTDKRDARHLLTLLVEDRFPVVWQPSVENEDTRQLLLHRCRMVRFRARVKNQLDSMAKNEGLLSKRVWCAKRREQIEALPLAGWDAERRKDLLALLDGLDKRIEPLDQAVRKTAEGNAEARLLMTHPGVGPVVSLAYVLTIGDWRRFPRGKQVGSYLDLIPTEESSSNKRRLGQISKQGNTPVRWLLVEAATKAQRYDASWHRQYVRLSMNKHHGVAKVAIAHKLAVRLYWMLRSGQDYMQIVERGSHAGQSA

SEQ ID NO: 202562 - protein, 349 aa, unidentified
MNFYTNTHPYYCGIDLHTRLLYVCIIDNENNILVHERIDDSPDKLLALLKPYLGNIVVGVECMHCWYWVSDFCEEHNIDFILGHALYMKAIHAGKTKNDKIDALKIAKLMRGGNFPLAHAYSKEHRSIRDALRRRTHIMRMSAQLKAHVASTVSQYNLPAPETRLDLRNSPDREKMRHFFPDEAVQKSMDLNLNIIETMVSELYKIEHYVKTQAQTHCATDLHILKSFPGIGKILALTILYEVGDIKRFPSVQKFASYSRLVKCKAESAGKTHGTQGNKIGNAHLKWAFSEAAVLYLKGNDDAKRYLAKLQKRMSKAKALSALAHKIGRCTYFMLKNQQVFDEERFLNG

SEQ ID NO: 202563 - protein, 444 aa, unidentified
MIGPQVSKVKLSTQPFGDRPTMTKRSSNPTDAVLVAIDMSKHRQEVLIERPEGGRRRRMTVMATKADYDRLATDLSDIGRPIIVGFEATGNYHRTLAHRLLSAGFELRLISSVALARTREALHNGWDKNDSKDAQVILHMLRIGATQRYVDLLAAGINDLQEMSKTHEAISKAKTQTWHRILTHYLPLYFPEIERFAGYSRSDWFLALLERFPTPASMTVLGQETFSREAWDLVGRKVSKARLINDIYETACASVALPVDEDSVSIAMFRMVIAQARNLIRQRDEIERTAHAMLAENRDYQLLRMIPGIGPINALTILAEAGDLRRFSHHRQFLKFCGLDLATRQSGTFRGRTMLSKYGNARLRRTFWMAAQVAARQRNNSFRDKLGRYTAGHADDADRRRKAMTALTAKMARVAHAVIKTGTEYRPFLERSDARWKDPSLQVP

SEQ ID NO: 202564 - protein, 329 aa, unidentified
MKTQKLNSSLYCGIDVSGDTLDICYQLLDGTFEWSKHLNSITGFKEIWKLTGDQYHLVMESTGVYQLPLCFFLDEKKANYSVVNALQIKRYIQMKLERNKTDKKDAFHICMYGIENHPECYQMPSLLYFECRAINNAIETITCEITSFKNKIHALTRLNIESKVILTGYNKILKTLQLELKKLEVELYKKLTAWQPDLVKQVSSVVGIGKRATAILIVTTQGFKHTASYQQLISYAGLSPKEYSSGSSIRGRVRICKQGGALLRHTLYMCALNAKETNKACKALFDRLVAKGKNKKLAVIAVANKLLKQVFGVVRTGTLFDRNYYENLA

SEQ ID NO: 202565 - protein, 365 aa, unidentified
MKIMQWVGIDDHADKWTIAHYTGNEERPTREFELVPDSKGYRSLLSYLKGLKGEVRVVYEAGPCGFEQYRRLKAAGVNCQVAAPTLTPRKPGEKVKTNRRDAAKLGRELRSGGLTMITVPEPEQESLRDLIRARQTIQKDVGRLRKQIIQLLLRYGHRFRDGQSWTKRFWVWLKAIKLTGSYSSFVLADKIVELEHRIEQLARYDDEIERAAQKPEYQTYVAAMRTLRGVETLSAMTILSEMGDLRRFATAPQLMAAVGLVPSEASTGDKTNRYGITKTGNAHMRHIAVQAAWQYQRQATAGAKIKARRKDQLPEVVAIAEKCEARLNRRFHRLTSRHKKSTIAVVAVARELIGFIWAIGQIVHP

SEQ ID NO: 202566 - protein, 355 aa, unidentified
MNSVRYVGMDVHRDTISVAVLDESGRLMMQSVLATRAAAILDFIHGLRGTLHVTLEEGTHSAWLYDLLVRRVAKLVVCNPRKNALLKSGSKSDAIDARKLAELLRADMLSAVYHGETSALEMQHVARSYTMLTEDTTRVMGRLKAVFRGQAVSCAGKKLYGKRHREDYLGQLGTGGLRRRAECLYQELDALQQLRREARRGLLVECRKHAAAQWLQSVPFLGPIRAGLLIGRVQTPHRFRTKRQFWTYCGLALETRDSGEYRVVNGQVERKRKAALIRGLNWNHNHEMKNLFKAAATTASMREGVLREFYLGLLAKGMRPEMARLTLARKIAAITLKIWKKGEAFDAEHLKLQAA

SEQ ID NO: 202567 - protein, 302 aa, unidentified
MGVDIAKSYLDGAIGNEKRRFANERVGHRELIKWVKQLKVPVQVICESSGGYERALVQALVGAQMKVSLVQANRVRQFARAAGILAKTDRIDAKVLCNFAEAMQPGTISASQLEQQHLRELESQRRHLTHLLVMEQNRAARVSDGCVRRLNRSLLKQIKKQIEQLDLFIKEHIEASPELSAKAQKLTAINGVGARTAALLLARMPELGQLNRREVVALVGVAPFNRDSGRMRGRRAIYGGRRPVRHGLYMAALVAARHNPVLRAFYLRLRAAGKPAKLALTATMRKLLIVLNSALKPDLNYT

SEQ ID NO: 202568 - protein, 383 aa, unidentified
MQASTIDTPTAGHYGTIFVAIELSQKTWLVTLHSPDRDRISRHKLEGGDHAGLLALIESIGARAAAKLGSAPKVVSCYEAGYDGFWLHRLLTAAGITSFVFDPASIAVEQRSRRAKTDRIDGELLLRTLMAYLRGEPRVVRIVRVPSVEQEDARRASRERERLVTEQTGHTNRIKALLRLVGMAVGYPRRSDWLSWLERQRDRQGAPMPPRLLAEVAREHARLMLVRGQLAALEQAALAAEEAPATAPMAERRDLLLRLKGLGTVFAATLTNELFYKDFRNRREVAGYCGLTPSPWRSGSIDREQGISKAGNPRARLKAVELAWLWLRHQPDSTLSHWFRTRTANASKRTRRIAIIALARKLIVALWHYLTTGLVPEQAVMKA

SEQ ID NO: 202569 - protein, 339 aa, unidentified
MSEFTKKKHSIGIDISKDKLDLALVNEKSPGVFKDKIVENSFKGFDDIQNWLSKQKVKLEDCLFCMEHTGIYGLLLFAWLSQMGIDYCVEPGLQIKRSLGMTRGKNDEVDARRIADYAFTNRAKLAPFSFPSNLLIQIKQLLTYRDQLTRIKVSLKNSLKSHDQYQRVSGLQSISDGIKNQIDDCEYRIEGIEEQIKDLIKSDETMKKNFDLATSVKGVGLVIAAFMLVTTNNFTGFENGRKYACYSGIAPFDNTSGKYKGKTKVSHLANKRMKTLLSNGANSARQWDPELRAYYDRKIQEGKKHNLVINSIKCKLVNRVFAVVKRQTPYVTTYQQSFA

SEQ ID NO: 202570 - protein, 348 aa, unidentified
MKITTIGIDLAKNVFQIHGVNEHGKVAVRKKLTRAEMLPYFANLPPCLIGMEACGSAHYWARKLQSYGHTVKLMAPQFVKPYVKTNKNDMADAEAICEAVARPNMRFVPIKDIEQQAILSVHRARQGFVKARTAQANQIRGLLSEFGIVIPQGIHSVMKQIPGILEDGENDLPDTFRHLIARLTDNLKEMDSQVGELEKQINLWHRQNEASRTLADIPGIGPITASAIVATVGKAQEFKNGRQLAAWMGLVPRQRSSGGKQNLLGISKRGDTYLRTLMIHGARSVIYHAQNKAAPDSWLRKLMARRHTNIAAVGLANKNARIIWALLAHDRLFHPDYTAAAPLCNQGG

SEQ ID NO: 202571 - protein, 341 aa, unidentified
MAIIRIGVDLAKNVFALHGVDESGRVKMARMVRREQLLEVLSAVPPCVVAMEACSGAHDLARRVTALGHSARIMAAKFVSPYRMSGKRGKNDANDAAAICEAAGRPNMRFVPVKTAEQQALLAVHRVRQGFVEERTATINRLRGLLAEFGVVLPLKAATVRRQTAQHFDALPVWAQRALADLLAHLSHLDGRIQEYDTHLKLSAREDPRARRLMTLRGLGPVSASAIVATVGAAHEFKSGRQFAAWLGMVPGQFSSGGKQRLGGITKAGDGYLRALLIMGARAVLAAAPGRTDRISRWAVALQARRGYMRALVAIANKNARLAWAVLRRGEDFRMHEIATP

SEQ ID NO: 202572 - protein, 382 aa, unidentified
MPDGIRWVGLDVHARESTFAIFDQGTGELVTRRVVGRPHELLPWLRGVERPARMVYEAGPTGYGLARRALAEGIELGVCAPSKTERPPADRVKTDKRDAIRLARLLAAGELTLVTIPSVEREQLRDLVRCREDIRVDLARARHRIGGFLLRREIYWDGTGEAWTRKHRSWLTSVRFSDHASQATLADYLHAHDVLIARRDQVEADLSKLAVSAPCAHTVARLRCLRGIDTLSAVGLCAEIGEWERFDHPDQLSAYLGIVPSEHTTGQQRRLGSITKAGSTHARRLLVEAAYHYRRGPAVGEALERRQRGQAPEIINISWRAQRRLNARWRQLKDARHKPGGVVAVAIARELAAYCWEIATCPTTAPAPTPTPTTRTRLTNSR

SEQ ID NO: 202573 - protein, 318 aa, unidentified
MNNQTTTTTTQHTQTLIAIDVAKDSLEVRTDESAFSLENTPKGFKALLRKAPQKTGLLVVFEATGGYERALAEFLHERKIALCIINPRLLRSFARSEGIKAKTDPIDAKMIYRFARSKALRITPAPTAGQRELSDLLDRRSQLSEFLAREQNRIQKTLPKALLASLRRNIKALEKEITLIEKHIRALVDSSPDLKRHCQIITSVKGVGNITAWTLLAQLPEITTLSRNQLVALAGVAPFNNDSGKSSGKRSIYGGRAKIRRVLFMAARAAAQFNPVIRAYVGGLLTRGKPYKCALTAAMRKILIHVQSLLKNDEFSPC

SEQ ID NO: 202574 - protein, 353 aa, unidentified
MPGPLRRKTRGARIRKDGPPTAREERKLLDPTKTAQLFAGVDVSKDRLDVCLRWSEPERHNEEAFVVDYDDSGIDALVSRLLEERPVLVIVEATGGFERAVVGALAAAGLAVVVVNPRQVRDFAGATGKLAKTDRIDASILARFAEAVRPAPRPLPDREIRALQAIVARRRQLLGMLAAENNRLASAAKPVAKRIAAHVRWLEKELSRTERDLEAAIESSPALGENEALLRSVPGVGPVLARTLLAGVPELGTLTHKRLASLVGVAPLNRDSGTLRGRRSVWGGRAEVRGALYMGALVAARRNPVVKEFYERLLAAGKPKKVALVACMRKLLSILNAVLKHRTPWRFPHYLSS

SEQ ID NO: 202575 - protein, 342 aa, unidentified
MKDISVLGIDLAKNVFQIHGADAHGKRVFSKRVGRKELIELMGNFKPCLIGIEACTGAHYWARLFSNMGHSVKMMAPQFVKPYVMSNKNDRNDAKGIAEAVTRPEMKFVPIKTIEQQDVLLLHRARELSIKNRTSHSNQIRGLLSEYGIVINKGLSEMKKLSEVLESNKDKLTIKAIHIFQRMYEQFKIYDEQVLLYEKDIQAHVQSEAVCKEVLKIEGIGPITASALVATIGDAKVFKNGREVSAWLGLVPKQHSSGNKIRLSGISKRGDRYLRCLLIHGARSALKHVDNKTDKKSCWAFNKKATQPFNKVAVALANKNARIVWAIMATGECYRREESIVA

SEQ ID NO: 202576 - protein, 410 aa, unidentified
MEQLIDRCAGLDVHKRTIAACVRVPGHGKERVQHVQTFGTTAADLLTLRDWLRAHGVTHVALESTGVFWKPIYYTLEDGFTVVLVNAAHIQQVPGRKTDVQDSVWIAQLLEHGLVRASFVPPAPIRALRDLTRYRTVMIEERVREVNRIHKVLEEAGIKLAAVASKLLGASGRAMLDALVAGTTDPAVLADLARGVLRKKLPALRAALAAELRPHQAFLLGELLAHLDYLEQAITRVSAQIAEALAPFMTAVARLETIPGIRRRAAEVIVAEIGVDMTRFPTAGHLASWAGLCPGHHESAGRSTSGKPRKGNRWLKRTLTQTALGAIQSKPPNALGARYRRLRHHTGHKKAVVAVSHAQLVAAYHMLAAQQDYVDLGADYLDRHTADRARRRAIRTLERQGYHVTLETAA

SEQ ID NO: 202577 - protein, 431 aa, unidentified
MSERDYNKQVAKRQRIQSTTLVVGVDVGKAYNAVGFMNKEGKVLGHCAKVCNTREGFEEFMKMVEDLKARYGLKDVLIGMEPTGHYWRKVAYFAKEHGYEVRFVRTTALKHHRELDESASAKSDQRDALTIANITREGKYIDTVIEDGVLRQLRTLAKARERLLRYSVSAKNSLHAALDDYFPELHELFWSMGTRSLWAVLERCPFPEDVGSMKVSTLRDLIVQSSRNRAGAGQKAKALYEAATRSIGLRPIGSADRYRVQMCLEEVKRTVLSLKGMDQQIKSMLKEIPAAPYLLSIPGIGALSAAVFLGELGDPAHFHNARQIVKYAGYDPQESDSGSWVSRKFISKKGRWLMRKYLFFMSMRVVVLTHYFKTYYERKLETKNRVGQLPRRKEILCAVAIKLIKVIFALLRDKRRFDDTHGPVTALSQGA

SEQ ID NO: 202578 - protein, 322 aa, unidentified
MPQTESVVGIDVSKRWLDTYVLANGQARRVTNDEAGHRELAAWLRSSNVRVAVLEASGGYEQAVTKMLRSAGFAVWVVDPKRVRHYAKAMGWLAKNDRIDARLIAEFGAVVTSAARCDIADDPEAREALGALLGARQDLMAHQTALQQQVASTANGRARRALAAPLNTIARQIVRLERLIAEEIAAHPSFAALARCLDTVPGLGPVAIAAIIAWLPELGQLDRCRIAALVGVAPYDDDSGERKGQRYIRGGRAKLRNVLYMTAMAASTQHNPILKAHYAQLLARGKEPKVAIIACLRKLLTILNTMVARQQDWQPKNAPVAA

SEQ ID NO: 202579 - protein, 348 aa, unidentified
MDYYAGIDVSLECSSVCVVDAGGKIVREGKVASEPEALIGYFGALGLALLRIGLEAGPLSQWLYAAMKEAGLAVELLETRHVRDAFKAMPVKSDRNDARGIAQLMRLGWFRPVHCKSIGAQELRAVLTARKLVLSKLRDVENSLRGILRGFGRKVGHTTARTFAGRIRELVAGQANLEMIAQALLSVHAVLLREFNGFERQVRIMARGHGQAKLLMTTPAVGPIVALTYAGAIDDPARFKSSKQTGAHFGLTPKKYQSGQTDYTGRISKIGDAAVREALYQAAHVMLTKPVKGCAELKSWAMRIARRAGMRKAKVALARKLAVIMHRMLADAKPFNPAAAIKPVAAAA

SEQ ID NO: 202580 - protein, 411 aa, unidentified
MHNRQNYLYVGVDLHKEHHTAVIINCWQEKLGEIQFDNKPSAFSKFLLEVETYVSDGLSVVFGLEDVGGYGRALAKYLVDHEQVVKEVNPALSFLERKSQVMIQKNDSWDAECVARILINKLNQLPDAKPNDLFWSIQQLVSRRNALVKAQSALKNQLHIQLNHHYPSYKKFFSELDGKTALAFWQQYPSPSCLEGANIKQLTAFLLDVSNNTCSVKKASDILKLVKEDGHTMKEYQETRDFLVRSIVRDIEFKKTEMKYIERELKQLVNLLDYQLETMPGIELVTASALIAEIGDVRRFSNANKLARFAGIAPVYFGSGGKGKTHKSKQGNRALHALFYNLAVQQVQVAKGSKMPRNPVFHAYYQKKLKEGKTKGQALVCIMRRLVNIVYGMMKYKTAYELPVVEEKEVV

SEQ ID NO: 202581 - protein, 457 aa, unidentified
MSFFRYGEIYQSDEGRNNSGERPKDRPRLIVPMSLQLVIPRRVALQQSSPPLHQPSFILKEKRKFEKEKSMERRVCQFQTAPLNRGVHHSRLWFIDDRGLGRREPNMMLIGVDYHPSFQTIAFVMEETGECGEQELHHSDGQAEKFYRDLKQRGICVRVGMEATGYSRWFERLLAELGFEVWIGDPAEIKTKRVKKQKTDREDARLMRKLLLENRFPRIWVPDPENRDLRQLLWHRHRLVQMRTRIMNQLQALAMNEGYRLKKKLFSEKGRAQLEKLSLAPWASRRRQELLELLDRMNPTIEELTAAVEREARKRPAAQRLMTHPGVGPLTALAFVLIIGTWERFPRGKQIGNYVGMIPSEDSSGGKQRLGHVSKQGNSLLRFLLVEAAQAAARCNPDWRRRYIHLAMRRHKSIAKVAMGRRLAVRLYWMWRNGREYSPSLEFGSYAGQLATGHGVK

SEQ ID NO: 202582 - protein, 337 aa, unidentified
MDYFAGLDVSLEKTHICVLDREGAVIHEVAAPSSPDAIAAALTSAPPCTRVVFETGRMAPMLYHGLVELGVPVVCVESRQAYQALKTLATHKTDRNDARGLAQLARTGFFKPVHVKSLPAHAVRALIMARKKLVGQRVTLENQIRGLAVVFGVRLPRGLSPAFVDQVIAMSDGIPGLSGAMRGLVAARDAVLGAIAAIDTDMKKLVRASDACRRLMTIPGVGQLTALAFTAAIDDPGRFRRSRDLGAYLGLVPRRYQSGEIDYVGGISKVGDRRVRTLLYEAANVMLTRYKGELKLKDWAFAIARRSTMRKARIALARRLAIIMHAMLRQGTEFQPA

SEQ ID NO: 202583 - protein, 408 aa, unidentified
MNSLFVGIDVSSRNNVAYVMKPDGNKHSSFSVQNNLGGAKILSERIVSALDSVQLNDVVIGLEATSIYGDSLVYALRKDGSLGRFQRKIHVLNPKQVRKFKEAYPDLPKNDWVDAFVIADHLRFGRIAKEIYMDDYRYQALRTLTRSRFDIIQNLTREKQRFANYLFLKCSGIAQAKDIQNTSATTIALMERFETVDDLANTDLDELTAFITETGRGKFADPDATAKAVQAAARGSYRLPKTVNDTVNQAMAVSIASMRALKEQVKVLDKAIEQQFEIIPNTLTSIPGIGKVYSAGIIAEIGDIHRFDSQASIAKFAGLVWHRNQSGDFEAEHSKMIKSGNRYLRYYLLEAANSVRRCDSEFRRYYDLKFKEVNKYQHKRALALTARKLVRLVFRLLKDNRLYIPPEG

SEQ ID NO: 202584 - protein, 355 aa, unidentified
MKQYIGCDAHARYSVFVSIDETGRIEPPVRVEHQGRDLRDYLEKLEKDTPVAVEASGGWYWFMDELEAAGLDARLVDPLQAKHRMSGKNKTDKLDAKGLAILLRSGTLPEVWVPPSELRDLRGLMRTRLATRAETTVLKNRILAALRRYGVTRDETTTDWFAKKNRLALSVAIGRLPEETRRATLHEWEMLDQVESHIGEMEIRLRARVGRLGWVRLLKTMPGVAEILGATIYLEIGDVTRFPSADRLASYAGLVPRIHSSGGRFYQGPTSPAANHYLRWAFVEAANAVVMHRQKYADQHVMELYDRLKKHKCHGKAIIAVARHLAEASWWILTKREQYRPPRAHAEAMSPSRNG

SEQ ID NO: 202585 - protein, 355 aa, unidentified
MKVTTVGLDLAKNVFQVHGVDAHGKKVFNRQLRVAQAAEFFVKLEPCLVAMEACASAHHWVRRLRAMGHEVRLIAPQYVKAYVKTNKNDAADAEAICEAARQPNMRFVSPKSLEQQAVMALHALRAGAMKTRTAQANRLRGLLLEYGIAIAQGIGNVYKRVPEVLADESNELPDFLRQALRAEYDQLKLHEQHAQALEAQLQRWHRECTASRAIERVPGFGVLSASALVASMGDANEFSNGRQVSAWLGIVPKQHSSGGKQRLLGISKRGDAYLRTLLIHGARSVIAAIQKRLKAGLDPRLLSRRERWVLDLLQRRNANVAAVALANKNVRTAWAILAHGTPYEADHVSQSPVMA

SEQ ID NO: 202586 - protein, 420 aa, unidentified
MQQSTPFAALIGIDWADQKHDVCLVDTTTGSQQSSVIKHSPETLDEWARALRQRFGGRHIAVCLEQSRGPLIYALLKYDFLVLYPVNPKTLAKFREAFSPSRAKDDPTDAEYLVELLAHHRDRLRAWLPDDEQTRTLQLLVEHRRRLIGDQTRISNRLTALLKGYFPQVLAWFPDIRTTLVCDFLLRWSSLDALKGVRRQTLEKFFRDHNSHRKDTLEKRLEAIKDAVPLTTDQAVINSSVLMVKALAAQLQTTLAAVKEFDSQIAELCQAHADCELFASLPGAGAVYTSRLLAALGSRRERWTSADELLRYSGVAPVIERSGKSEWIRWRYFCPKFLRQSFVEYAGESVRHSVWAKAYYEGLRAKGKSHQAAVRALAYKWIRIIYRCWQTRTNYDEARYMKVLRNKGSQLVPAVATAEA

SEQ ID NO: 202587 - protein, 349 aa, unidentified
MLADEVDYVVGVDTHRDRHVLAVVVAGTGVVVARRSVRSSARGYAEALRFAEAAADGARVWAVEGAGHYGAGLARHLSGRGETVLEAGRGPRDRRRLQGKDDSLDAVSAARTALASETPALPRTGQQREALRLLLLARRSAVDVRRLALVQLRSVIVTCPDQLREELRGLPAGRLVERCSRLRRSPSRTPDELAATLVLRSLARRIQAATVEAAELEREILAHVRALAPQLLDEPGIGPIVAAQLIVSWSHQGRVRSEAAFARLAGVAPVPASSGQRTRHRLSRGGDRQLNRALHTVILHRRQHDPATKDYIARRVAEGKTRRDAVRLLKRYLARHLYRVLDNQGPPMT

SEQ ID NO: 202588 - protein, 328 aa, unidentified
MFFIGIDVSKAKLDCSLLVDVASGKRRAKTVANSKTGVSDLLTWCAKQHAANHELHAILEGTGVYHEQAALALVDAGVTVSIVNPAQVKDFGRSLGVRTKNDGVDSFVLARYGALLKPRAWTPPSLEARTLQALLARREAIAQDLQRERNRQEKAEATETPFSIQESLLDSIVFLEKQLAKLQQDIDDHIDKHPTLKADRELLLTIPAVGPQVGNHLLAVMHNHRFQSAEQLAAYLGLVPVERQSGTSILGRPRLSKAGPARIRAVLYMAAIVGTRHNPHIKALYQRLQQRGKSKMSALGASMRKLVHLCFGVLKTRQPYQPDYVPQR

SEQ ID NO: 202589 - protein, 370 aa, unidentified
MRKTTTLCVGLDVHKDSISVAYAEADRPDPPHFVGPIGTRQCDIDKLIRTLQSKADRLLFAYEAGPCGYVLHRHLTQKGLDCQVIAPSLIPKRPGDRVKNDRRDSVEIARLLRSGDLTPVYVPSVDHEAIRDLCRARDAARLTLKAAKLRLKSFLLRLGLNYVGRADWNDAHKRYLAKVVCPTPAQQTVFQESVRAVDEQVERLQRLEQELLDRGPQWKLWPIVEALQALRGVQWIVALTVVAELGDLTRFDNPRQLAAFVGLTPSEYSSGDKRRQGGITKTGNSRVRRVLIEGAWAYRYPAKVSAHIQKRIDKLPKVAQDIGWKAQVRLCKRFRRLHSRGKHHNVTVTAIARELVSFMWSIAKEVPITP

SEQ ID NO: 202590 - protein, 356 aa, unidentified
MQTQVTKKNDFTDQNLFVGLDVHKKSWSVTIIVDGIEHRTFTQPPDPGSLCNYLHRMFPGASYHSAYEAGFCGYGIHRELNFLGIKNIVINSADIPTTQKDKLQKRDPVDSRKIARSLEKGSLHAIHVFDRELEELRTLNRTRFYLMRDLRRSKNRIKSFLQYYGEPIPEEFDNNQWTLEFVSWLKQVKMKTISGQDAFSHLIESYEHHRGQLVDVSRLVRQRIREYDNELYSLLKSISGIGPLTSSALITELGNINRFNNIDQLSSYVGFIPRIRESGETTHTGGITFRCNTFLRTLLIEASWQAVRKDPAMMHYYHKHLVNNKGHKVIIKVARKLLNRIRYVMKNRQPYITGVA

SEQ ID NO: 202591 - protein, 317 aa, unidentified
MNVTITRVLAIDVSKAWLDLATAVDGNVERVPHDKTGIHTVIERATALDVQRITVEASGGWQTKLVAALLHAGLPVIVVNPRQVREYARATGRLAKTDRIDARVLVAFTVAVQPPLRKLKDDQAEALSALLARREQLVTMRTAEKNRLTLGATGLVRKNLKAHIEWLDRHLRTTDRELKQLIESSPAWQARQDLLTSAPGIGDTTARVLIGQLPELGRLNHKQIAALAGLAPFNRDSGTLRGQRMIWGGRHTVRTALYMATVSAIRANPPIRSFYQRLKAKGKPSKVAITACMRKLLVMLNAMLRDQQPWREVSLST

SEQ ID NO: 202592 - protein, 313 aa, unidentified
MDTAIYVGIDVAKAQLDIAVRPSAARWVAAYDEEGLSALVARLRELRPTLVVLEATGGREGPLAAALATAGLAVAVVNPRQVRDFARAIGQLAKTDALDAQMLARFAEVVRPTPRPLPAAQAQELSALLARRRQLISMSTAERQRLDTALPSGRGHIQRHIAWLEQELGDLDRHLRDAIAASPPWREQEDLLRSVPGIGPATALTLLAEVPELGQLARKAIAALVGVAPLNCESGTLRGRRVVWGGRARVRAALYKAALVATKHNPTIRAFYQRLCAAGKPKKVALTACMHKLLLIANAILRQRTPWCAPAVP

SEQ ID NO: 202593 - protein, 357 aa, unidentified
MNETPLRTDILVGVDTHKLTHAAVAINALGARLGSLTIPASSKGYQALQTWAQSLGPIRAFGVEGTGSYGAGLSRFLCEHGHPVFEVNRPNRQLRHQKGKDDALDAESAARSVLAGQATALPKSGTSTVEMVRHLKVARDTAVKGRSQAMQTLKAIIVSVPSALREQLDSISGKMTLLRHLAALRPGPLTSTTASAKTSLRAIARRWLALNEEIKTHDTHLEQLTGQLAPKLVQAHGMGAGTAAEMLLLVGDNRERIRSEAAMAKLCGVCPIPASSGKTSRHRLNRGGNRQANAALYRVVIVRMRAHQPTLDYVKRRTAEGKSKSEIIRCLKRFVAREIFGYLCRPADTQHTVISGA

SEQ ID NO: 202594 - protein, 387 aa, unidentified
MAQVNDLSRSLTAFDPISTLVVVVEMSKASWLVSGVVPGVERQPLKKLEPDATALLRLIERWRNEAVRAGRPISRIALAYEAGRDGFWLARWLIARGIEAHVIHSASVAVSRERKRAKTDRLDAAMLMRVFLGWLRGERGHCGMVAIPTMEEEDARRPSRERESLVDERSRITNRMKSALARLGIRGFKPHLRKAPERLADLRTAEGTGLPANIIEEFRRDMARLALVREQISSIEKTRAERLERAPDTGPHAMVRLLARVIGIGIETADMLVREILSRKLRDRRAVARYAGLTGSPDESGLKRREKGLAKAGNARVRRGLIQLAWRFLMFQKDSALAQWYRTRTEGPSGARKTTMIVALARKLLIALWRLVTTGEVPDGVELRPAA

SEQ ID NO: 202595 - protein, 366 aa, unidentified
MKKTSTVRVNGNMIFKGHKLTIGLDLGDRWSNYCVLDEAGEVLLEQKLATTPEAMKQTFERIPRSLMALETGTHSPWLSRLLRELGHEVLVAHPQKVGLISKSNRKDDRHDARTLARLARINPELLGPVRHRSAKAQIHLTVIRARAELVSARTALVNAARGLVKSYGERLPKCGTEQVSRELAAELSAELREVLEPLLKEIESLNERIKEYDARMEKIARESYPQVALLKQVKGVGTQIALTYVLTLGDSHRSAKSREVGCFLGLRPGRRESGQSQPQMHISKEGDPYLRTMLVQGAHYILGPFGEDRDLRRWGLRLAERGGKNAKKRAVVAVARKLAVLLHRLWVSGEVYEPLRNSRKAMRAAA

SEQ ID NO: 202596 - protein, 450 aa, unidentified
MESQIKQEFAARVGLDWGDRKHAWVLEDCSSQKRERGELEQRPEAIEAWAMSLAGRYPGQRVAVGLEQQRGAVVYALQKYAHLVLFPIHPTTSAQFRKALYPSGATDDGRDAEALLEFVKHHGERLRRLEPDTEATRKLQALVEGRRRLVEEQTAHTNQLQARLKLYYPQLLEWFDDLTAPLVAAFVEQWPTLPQLQQASAEQVRQFLKKKGCSAKRIEQRLAAIPQAMALTTDAAVVEPAVLMVRSLLRMIAVLRESITEMERQIEPVLQAHPDYAIVASLPGAGEALEPRLLAALGSRRERWQSAEELQCYSGIAPVVERSGNSEQVHFRWACPKFVRQTFHEYALHSIRHSDWAREFYQRKRAHGMDRQAAIRMLAYKWIRIVYRCWKDNIPYDETRYRGALQQRTPLPASTAPTPARQPAAALAAPTVNLMFKPVAGFWKFLGVTP

SEQ ID NO: 202597 - protein, 369 aa, unidentified
MSTSVVYVGLDVHKDSIVIAFAREGRQAAENWKTIPNDGVRLRKALKMLVADGESLKVCYEAGPTGFGLCRRLREAGVDCMVVAPSLVPGKPGDRVKTDRRDARKLAHFLRSGDLTEVYVPDEAVEAIRDLERARDDAKCAERVARHQLSKFLLRHDRRWEGTTWTLKHRDWIRAQRFAYPAQQRVLDDYLKTVEDLAERVERLTAHVAELVQETALAPLVRALQAFRGISVVSAVTIAAETGDLRRFATAGQFMSYVGLVPSEDSTGKRRRQGAITRCGNGHLRRILVEAAWHYRHLPSMSKELRRRNQGIAVGVQRIAWEAQKRLNKRLYHLIHAGKSVQKAITALARELAGFLWAVGQEDTLLEAP

SEQ ID NO: 202598 - protein, 340 aa, unidentified
MRMFAGLDVGFKRTAVCVVDEAGRIVWRGMVDTHPEALSRALQHWGEKLAKIGLESGSMTPWLARELAKVGFPVVCMDARAAADAVRSRRVKSDKADAHALAEMLRTGWYRTVYVKSEDSHRLKAMLGARDQLVRAKRALGNQVRGVLRPFGIRLPSRQGTKKFAEAAHQAVRRDNMLHASVTALLEALAAIEGQIARLDEQLKELARRSPVCWRLMSVPGVGPIVALAFMAAIEDINRFRRMRSVGAYLGLTTRRYQSSETDVVLGISRQGDAMARHYLYEAANVLLTTVRRPSALKSWGLKLMKRRGPKRARVAVARRLAILLGRIWKDRTHFDAVPA

SEQ ID NO: 202599 - protein, 355 aa, unidentified
MKSSKYIGMDVHTATISVAVRDAAGKLIMESVIETKASTILQFIRGLRGDLHVTFEEGTWAAWLYDLLKPYVTNVVVCNPRRNALLKEGSRCDRIDARKLAELLRTNLLRPVYHGEKGLRTLKELARAYLTISKDLARVMNRVKAIYRGWGIPCGGKSVYHPRHREEWLSKITQASVRRRAELFYKQLDALVLLRKQARQELLAEGKKHQAWKWLRSIPSLGPIRVAVLMAIVQTPHRFRSKRPLSKYSGFGVVTHSSADHRYVQGQLERSKKPVSVRGLDPDHNHDLKDLFKGAATHASTRKGPFLEFYEALVAKGMRPEMARLTLAWKIAVITLTVWKKGVAFDAKYLKPQTA

SEQ ID NO: 202600 - protein, 344 aa, unidentified
MPCFAALDVSQETTAICVVDDNGTIIAETTIATCPDVITSYLRDRAPNLSRVGLETGPLAVWLWNELAARQLPVLCIDARHANAALKMRPVKTDRNDAAGLAQIMRVGWFKQVRIKSHNCYQVRSLLTARETLVRIRVKIENELRGLLRTFGVLFGKRVGGFTGRAHEIICGELEASPEMRIIAETLMKARASVCDQIKVLDTRLAAIARANPTVKLFMTTPGVGIITALSVVSAFDDASRFKRSSSVGAYLGLTPRRYESGETSRNGRISKQGDKMVRKHLYEAATTLLTRNLRSSPLKAWGMKLAKVSGFKKARIAVARKLAVVLHAMWKTNTPFRWTQSAA

SEQ ID NO: 202601 - protein, 349 aa, unidentified
MRFYTSQHQFYCGIDLHARSMYLCIMDRAGEVLLHRNYRAEPDALLRAITPYRQDLVVAVECIFTWYWIADLCSREGIAFVLGHALYMKAIHGGKTKNDKIDSQKIAALLRSGMLPMAYVYPQGMRSTRDLLRRRLYLARQHAELQRHIQNTNTQYNLPYFEKRIDRRSNRAGIGMRFTDPVIRTSVEVDAALMDAIHEQILTIERQISAQVPEHDPVAVHLLRSIPGVGKTLARVILYEIHDINRFPAGGNFISYARLVKCTHESGGKRKTGPNNKIGNVHLKWAFSEAACLFLRRNEQGKLYHQRLVSKFGKAKALSIIAQKLGRTVYTMLKRRTPYDARRFFETLT

SEQ ID NO: 202602 - protein, 337 aa, unidentified
MIVMAFDQHREQITFDALDTASGEVSRGRIRPADRLGFRDWLERWEGQELEVAVEATTGWRFLVEELQRVGARVHLAEPAETSARRGPKKRAKTDREDARRLRELLQAGRVPESWIPPAWLLELRSKVRLRHTLIEERGEWQQRIQAQLYHHGVPRRRQLLTAERRGWLEQLELPDAARRQLEVALAMIDAVDGQLRPLDRELRAFARRQSGCRALMGHYGIGEITSVAIVAELGDCRRFSSSRRAVRYAGLDITVSASDRRRSPGHLSRQGPPTLRWALYEAAQVARRAGSPDRSYYEQAADRLGGNRACLAIARKLLKRSFHTLRELGEEALQPA

SEQ ID NO: 202603 - protein, 408 aa, unidentified
MNPLFVGIDVSSKNNVAYLMKPDGSKHSSFSVQNNLGGAKLLSERIVSALGSMQLSDVVIGLEATSIYGDSLVYALREDGSLGRFQRKIHVLNPKQVRKFKEAYSDLPKNDWVDAFVIADHLRFGRINREVYMDDYRYKALQTLTRARFDVIQNLTREKQRFANYLFLKCSGMAQDKDIQNTSATTIALMEHFETVDDLANADLDELTAFIAETGRGRFADPNAVAKVIQTAARGSYRLPKTVNDTVNQAMSVSIASMRALKEQAKVLDKAIEQQFEIIPNTLTSIPGIGKVYSAGIIAEIGDIHRFDSQASVAKFAGLVWTQHQSGEFEAEHSRMIKSGNRYLRYYLLEAANSVRRCDSEFRRYYDLKFKEVNKYQHKRALALTARKLVRLVFRLLKDNRLYIPPEG

SEQ ID NO: 202604 - protein, 314 aa, unidentified
MSQATFVGIDVSKKSLEVHVLPSGEHLSVNYDKAGLTALIKKLKPLKQLQVVLMEATGGYEKLLAAELCAAGLNKVCISNPRLIRDFARSTGQLAKTDTIDAAMIALFAQMFNLEPKPIPSQAEEQLKALVSRRQQLIKIRTAENNRLEKATTSRVISSLHKIIEILNRELQEIDQEIEKTIRLNPVWCAKEKILRKVKGVGPVTACQLLATLPELGQLNRREIASLAGLAPINRDSGQFRGKRMICGGRSAVRKALYMATLVATIYNPTIRNFYNRLLATGKPKKLALTACMRKLLIILNSTLKNEPIICIQS

SEQ ID NO: 202605 - protein, 370 aa, unidentified
MLWTAPPPASRCANIAVFWRSAKEEPSMEQIITIGLDIAKNVFQVHGVDETGKIAVRRQLKRRRVLAFFAKLPSCLVGMEACATSHYWAREIEKLGHEVRMMPPRYVKPYVKRNKNDAADAEAICEAVTRPTMRFVPIKTPEQQSVLMLHRTRQLFVHQRTTLINAIRAHMAEYGIVAGVGRNGVEVLLELIAKGEDERIPPAARECLMALAVQLQLIKRQILEADRRVLAWHRTSKVSKRLEAIPGVGPLVASALVASIPDPSVFRSGRDMSAWIGLVPKQNSTGGKEKLGSISKAGNRYLRKLLVVGALSVIKRAKILGYTRHPWLVRLMERRSTKIAAIALANKIARMAWAMMVRDEKYRTPLPQAA

SEQ ID NO: 202606 - protein, 316 aa, unidentified
MTTHHSIVLGIDISKNSLDAHILPDGRSWHVKTDPHSLAKWVKQLPDGISLAVMEATGGLQNIPAAALARANIPVAIVNPQRVRGFAKAIGQRAKTDPIDARIIAQFALKMQPTPRQLPDETQALLAELVARRCQLVDNRAAEKCRLTTATAKPIRRNIEASIRWLDRQISKIDKQINEQIRNSPMWLVNEKLLMSVPGIGPVNAHVLTAQLAELGTTSGAQIAALVGVAPFARESGKWRGKRSIRGGRAHVRAALYMAALSASKCNPVLRAFYQRLLAKGKPKKVALTAVMRRLIVILNAIIRDQKPWQGCTINP

SEQ ID NO: 202607 - protein, 336 aa, unidentified
MKYSGIDLHSNNSVVTVTDEEDRVVAEKRLPNDLAKILGLLMPWREEMAGVVVESTFNWYWLVDGLQAAGFKVHLANTTAIKKYAGLKHSGDETDARYLAHLLRLGILPTGTILPPAQRAVRDLARKRMQLVRSRTTHILAVENITARQQGARISSNQVKRLTAETVDQMALPEDVALAIKTNVAVITTLSAQIDLLEKRLQERIGERAEYGLLTSVPGIGQVLATTILLETGPIERFAAAGNFASYARCVDSVRTSNGKKKGEGNTRNGNKYLAWAFVEAANFALRYSEAKRFYERKRAKTNNVVAIKALAHKLARACFHILNERKPFDVTRCFA

SEQ ID NO: 202608 - protein, 387 aa, unidentified
MGKTMSLASPADAVDYDATLIMAVETSNKSWVVAAHVPGLGHIKAKQTIGPTAEALATSIEGYRRRAAASGRAIDRVIVVYEAGYGGFWLARWLTARGIDVHVVQPSSVPVERRKRRAKSDNIDADLLLRTLLAWLRGEPRVCTMVAIPEEAEEDARRPSREREELIRERIMLTNRIGAILATLGIDDYNPLRRDRRVRLEALRTARDHPLPEHARAKIVRIIERLELVLSQIAALESQRDAVLEDEAPEEAKRMIKALVLLRSIGAQSATVLVYEAFIRRFANGKALGCYAGLTGTPFNSGGSEREQGISKAGNRRLRAAMGELAWLWLRYQPESALAKWFRERLAGAKGRLKKVLLVALARKLLIALWRYATDGVIPEGAVLKPA

SEQ ID NO: 202609 - protein, 320 aa, unidentified
MMYIGIDVSKDSFVAAYPGKNGYTTKSFKNDTKGVRCFITSLPEECHCVMEATGNYSMLLLYLLQQAGIPTSMENPQKIKHFSRAMMTVTKTDEIDAKLIAMYGEKMTPEPYKIPVESILLLKQKRTVLRQLKKHLVATKNLQQSLAVLPKQDLASKHAVEKTIKFLSRQIAELEDEITNLSNKEYKRQMDLLTSIKGIGKTLASALIVATGGFTYFSNAKQISRYLGLCPTYQQSGTSVNVKGHINRNGDTHLRSQLFLVACKCTQCNAACKETYDRLRANGKSGKAAVVAVANKLIRQAFAVVTKNQPYVDGFVSSIA

SEQ ID NO: 202610 - protein, 342 aa, unidentified
MDRVTIIGVDLAKRSFQVHGSSADGSVLFRKKLSRAQVVPFFAQQPVCIVAMEACATAHDWGREIGALGHEVKLIPPIYVKPFVKRHKNDAADAEAIAEAASRPTMRTVAVKTHDQQSRAVLFRTRDLLLRQRTQLINALRAHLAEFGKVAPKAATNIKRLKEVLEDPENGLPQIVTDTGSVYLEQIATLTEQISKLEKQVRTEATKDDAARRLQTMPGIGPITAMAVSAFAPPMEIFRRGRDFAAWVGLVPKQHSTGGKQKLGRTSKMGQRDIRRLLVIGAMSVVKAAVHKGAPEGSWLQRMLERKPRMVVAVALANKMARRLWAMLVKNEDYRDPAITAA

SEQ ID NO: 202611 - protein, 347 aa, unidentified
MLHAGLDLSRKKLDVCLLSDSGEHLDQLAVPPDPESLRMLARRIEEVHREPVAAVIESMTGARIVHDTLEAEGWSVEIADAQKVKGLAPLACKTDRIDSLVLATLSHRDLVPAIWLPDPRIREERELARFRLHLIKHRSMLKHRIHSSLINFGRPCPVTDLFGVEGRRLLERLEIPEPWRGNVSASVVLIDDLERQVDAINRRLREGHAEHPYIPLLMSAPGIGWVLAFTIAGEIGEIERFSSPQKLTGYTGLCPRVNQSGDSDRRGPLSKHGPRYLRWALLEATMHALKHPAYSERYQRNKKRLGKQRGAKVAQIDIARRLAHAIWHMLSRQEKFAPRGAALRLAA

SEQ ID NO: 202612 - protein, 323 aa, unidentified
MSEHITICAGIDTGKYKLDVAIDRCVDQLQVDNTADGHAALSAWLKWRRVKRIGIEASGGYEQGVVAHLRRDGFVVVVFQPAQVRAYARFLLQRAKNDKIDAALIAACTAAIKKIHAPPDTRLAPFAARMTLIEQLTEQVACCKNYREGHRDPQIRELWQKEIARFNKQLRAELKSLAAAIRQHRDLAERLDLIESVDGVGLKTAVAILVRMPEIGRLTREQAAALAGLAPYDDDSATHLGIRHIAGGRERLRGSLYKAALAAAFHWNWQLIALYRRLTKAGKSHKVALVACARKLLIFVNTVVERGTPWVSARPLSVTSNRV

SEQ ID NO: 202613 - protein, 419 aa, unidentified
MERSRSKVCGIDVHKRFLVATILERNGQKKTGKFLNSLEQLLKLKEWVITEQCQAVAFESTGEYWISLYEVLQGYVEIIVANSYHIKGIPGKKTDTIDSEWIAELALNDLISPSRILSKEKRDTRALTRLREKLVNERTDHKNRVHKVLDSACIRLSAHFTDLFGKAGLTILKCILSGIPPDEIVRKLPKRLRTRSDAILDAIRTQLSVHQLIQLQTSVTMIELLTGKIKELERTILNDLQKDRRKLQILMSVPGIGTIGATTLLAEIGDVNDFSTPDKLAKWVGITPRVYQSANKLHTGSITKQGSKHIRWILVEVAHSCIRTKNTALRDFFDRIFNRSGYKKAIVALARKILKLVWHLLINDELYQEKNSPLTKSARMPKHSQNDSFSVSAAIELLVKAGFQVIDGDDNTDKRVLGT

SEQ ID NO: 202614 - protein, 388 aa, unidentified
MIYVGIDIAKLNHFASAISSDGEILIEPFKFTNDNDGFQLLLSKLDPLDKDSIIIGLESTAHYGDNLVRYLVACNYKVCVLNPIKTSTMRKNNIRKTKTDKVDTYIICKTLMMQESLRFVTFYDLDLMDLKALGRFRQKTIKQRTRLKIQLTSYVDEIFPELQYFFKSGLHQKSVYALLKEAPTPEAIASMHMTHLAHLLKVNSHGHFDKEMAQQLRVLAQKSVGANDSALSIQVTHSIQQIELLDSQLERVEAEMTDIMKFNDSVIMTIPGIGYINGGMILGEIGDIHRFSNPNKLLAYAGLDPSVYQSGNYQAKKTRMSKRGSKVLRYALVNAAHNVVKNNATFKAYYDAKMAEGRTHYNALGHCAGKLVRVIWKMLTDEVEFNLE

SEQ ID NO: 202615 - protein, 412 aa, unidentified
MEVLYPCCCGLDVHKKLVVACLLSTDALGKLHKEIRTFSTMTADLLALADWLTANGCTHVAMESTGVYWKPIFNLLEGQFELLVVNAQHIKAVPGRKTDVRDAEWIATLLQHGLLKGSFIPDAPQRELRDLTRHRMTLVNERARSVNRLQKALEDANLKLASVATDVLGVSARAMLEALLAGETDPAVVADLAQGKLRKKLPQLQQALSGHLKAHHRFLLTELLAQIDYLDEAIARVGDEIATRLEPAEEAIALLDTIPGVNQRTAEIFLAEVGQDMDRFPSAGHLASWAGMCPGNHQSAGKRKSGKTRKGSPWLRQALIEAAHGAARSKKTYLGAQYRRLVVRLGKKKAIVAVAHSLLVIAYHVLTRREPYRDLGPNYFDEHDRQGVEERLIKRLKRLGYDVELKPLDKAA

SEQ ID NO: 202616 - protein, 402 aa, unidentified
MHIFGIDISKASAVVAHYEDETFVKELDLFYDSKNLLQFYTYLKCFEDKLLIFEATGVYSTIIRQFCIDHNIKHVCINPLEAHFKMNSLRRYKTDKVDAHKLAHLGFTLDEKYIIHTPSDEDVERKSYTRLIMHIEDDLTKLKARLKERLSQVFPSLQDLVKHNYNIPNLKLINLFAHPQFILNMTKQQLKKLIKQHNNCTKTYLEELTIKLIEWAQNTYIIVHENHPLVEEIKDITEDLIRLIGRKKNYVAKLKKLCADQKLYHVLLSINGVGEQNAALLTGELGNIDRFETNKQLNAFVGIDIVRYESGTIYKKDRINRRGSSVARKILYQMVELFIMNQHRQQNNICDYYYKLKKPPYNKHHKVAMIACVNKLIKVMHYLNATNSRYDYERATSHLKAN

SEQ ID NO: 202617 - protein, 343 aa, unidentified
MAVIIGVDPHKATHTAVAIDHTEAELSRARVRATRKQVSQLLRWAEPLGERTWAIESAGGLGYLLAQQLVAAGETVLDVPATLASRVRVLGTGRSDKNDLNDALSVAIAALRARSLREVAPADHAQVLRLLAKRNIDIGKHRTRVVCRLHNLLMELSPGGIAKELNASDAVALLERVRPATPVEGARHDLAAELLADVQRLDEQLKDSHRRIRTAVATSQTSLTELFGIGPIIACYLIGFTGDIGRFVSRDAYAAYNGSAPVERSSGGRIVHRVSQRGNRRLNHALHLTAICQIRQPHSEGRAYFERKLAEGKTKKDAVRSLKRHISNAVYRHLVIDAARSRR

SEQ ID NO: 202618 - protein, 352 aa, unidentified
MSKVKELDFSGETIYCGIDSHKTNWKLSTRTDDFELSNFSQNPDPELLSRYFKKNYPGAKVKAVYEAGFCGFGIQRSLSALGIECMVVNAADVPSSDKERRRKDDRIDARKLSRQLAEGNLKGIYIPGIEMEHARVLVRQRWRLVQDQTRCKNRIKHMLMCHSIKVDGKENWSGQYVKALEGISCSVALRAALDLAIGEYKQIRRLLREATVAIRQMAMQPPFVPVQKYLQSIDGIALINAMVIQTEIQDIKRFKVLDSLCDYAGLVPDIRSSDERMVVKGVTKRCNQFLRDAIIESSWVLIRKDPAMLMKYRIYCSRMNKNKAIIRIGKHLLSRIRYVWENQKEYERGIVG

SEQ ID NO: 202619 - protein, 334 aa, unidentified
MTNVTTCGIDLAKAVFSVHAVDGAGSVVLRKTVGRSRLMALIAELPPCLIGMEACSGAHEWARRFREHGHTVKLMAPKFVAPYRKSGKNDGNDAEAICEAVSRPSMRFVPVKTVEQQALLTLHRVRLGYVEERTATINRIRGLLAEFGVVLAQRAIEVRRGAAAVLEALPILAARAVRDLLAHVSVLDERIEEYERELKAHARQDERARRLQQLSGVGPIGASAIVASVAEGHEFKNGRQFAAWLGLTPKQHSSGGKTRLGRITAHGDPYLRTLLIMGARAMLQTALRRTDRLARWALAVRERRGYHRACVAVAAKHARIIWAMLAKHTELKLR

SEQ ID NO: 202620 - protein, 384 aa, unidentified
MTTEWYGRLPSSAAALVHMSASCCAAARVSVRAPFSQDGGSEMNAVHTVVGVDVAKNVFQAYWVVAETGEIRNMQIKRAKFLEHFAGRPRCLIGMEACGGAHHWARELSKHGHDVVLLPAKAVGAFVAGNKSDAIDARAIWTAAQQGGIKRVAVKSEAQQAVLALHRMRQQLVKVRTAQSNALRGLLMEYGEVFRQGRASLARGIAAALERIEQRLPRVVVESLMELWQRVGQIDGQVKQIERRLKSLLTEDRNAQRILQIPGVGMLTATAVSATMGQASAFKSGREFAAWLGLVPAHTGTGGKTRMLGISKRGDSYVRTLLIHGARSVFSSTKHPGPWLQKISQRRPLNVAVVALANKMARTIWALLAHGRTYQPDYVSRAST

SEQ ID NO: 202621 - protein, 479 aa, unidentified
MIYSVGIDLHQGRHRARCLDDRAQSCDGFSFETTPEGLALLEERVFRDGANPIIVLEPAGLPWKMVAVYLRSHHPDCRLVKAKTQKVAALRRYLRGPVKSDRLDALTLAKMPFIDPEKLVDIYLPPAEIHALQRLTRQRKRIESAISGRKIRISAIVDGYLPGVRRTFSDAWSLPVRAFLRSQLNPYAVVREGEEALHAYLSKACPRSKWSRAETHLVFLACHSVAGVCELSRSAGTVDEEFFTDLQDEIARELRLMESEEAESESLAHRIAELYRKLHRSDNLTSIPGVGEHTAPIFLSAVGDPARFPSQSAFANWEGVVPGARQSSDVEVKGLRMTKAGPSIMRMGLYQAGDISRRWDPQLAAVYYREMVYHGKNHRQAMGAVMSHLGARVFTVLREDRPYELKDTDGNTISKGDARRLILDKYKVPEEIRRERRRRNPKASNTVGVPRQDREMATYRMHEAAKAPQPVQVKAISHQ

SEQ ID NO: 202622 - protein, 482 aa, unidentified
MVVPNEEPKTPTKPKTPAKPKTPTKPRKSRERSVPVPVPASATALNIINPDAAGIDVHSNMHMVCVPADRDANPVRRFGANTADLQELAAWLKKCRIKTIALESTGVYWIPLFELLESQGFEVNLVEPGQLSRCGARPKTDVLDAQWIQRLHSYGLLRASFRPPDSVLALRAYWRQRQMQVRYAASHAQHMQKAMEQINVKLTQVVSDITGVTGMLIIGAILEGERDPVKLAQLRDERCQHSEQQIALALQGTWRPEHLFELRQAYELYQFHHRQITECDQQVEAELANLPNRAGEKTHSVKPRKRGRKSNDVRFEATGPLFQALGVDLTLIDGIEVGTALVILGEIGVDVSRFPTEKHFASWLRLCPPQNQSNKTNRSRRHRKGTSRVTIGLRMAAQSVGRTMTPLGLFYRRIRSRIGGLGAVKATAHKLACLVYRMLKYGQEYVTQSMEEYEAKVRANILKSLKRKAAALGFQLSPLPTQ

SEQ ID NO: 202623 - protein, 356 aa, unidentified
MSRNLDSAIAVVGIDIGKNSFHAVGQDKRGAILLRQKWSRGQVEARLANLSPCLIGMEACVGAHHLSRKLRALGHDARLMPAKYVRPYSKGQKNDFRDAEAIAEAVQRPTMRFVATKTTDQLDLQALHRVRERLVGQRTSIINQIRAFLLERGIAVRQGLRFLRAELPGILAARSDVLSPRMLRIVEDLAGDWRRLDERIEGVSSEITALADQDAACKRLMTVPGVGPIISSAMVAAIGTGDAFAKGRDFGAWLGLVPKQISTGDRTILGSISRRGNRYLRALFVQAAWVVLVKVGPKHWQRYGLKSWIEAAKKRLHHNVLAIALANKLARIAWAVLHKGRAFECVKTDAMASRPA

SEQ ID NO: 202624 - protein, 374 aa, unidentified
MTPPSDTVYVAIELSNTLWLVGTRLPGADKPKMHRLSAGDVTGLVTLLADLRARTIAKLGREAAIACCFEAGRDGFWLHRVLSAHGVDTHVVEPTSILVNRRAKRAKTDRLDAEGMLRVLAAYLSGDRQVCSMVSVPSPEAEDAKRPHREREHLVQERTRYENRILALLATQGIRERPSLRTWERDLATLQTGDGRALPKLLSAEIDRLRRRLVLTMELIRELDAERTAALNAAPDDAACQKITALRRIRGIGENFAAVLVREVLYRPFANRKQLASYVGLTPMPYQSGSMDRDRRIGRAGNTRARTTLVQLAWLWLRYQPDSALAAWFRERVGTLAGRTRRIAIVAMARKLLIALWRYAETGQVPDGVVLSAA

SEQ ID NO: 202625 - protein, 331 aa, unidentified
MYVGVDYHKRFSVATQMDEKGKILRQARLSNDPETLTRFVSHLPIGSKIALEATGSWYYFYELLENKCREIYLAHPLKTRAIAEARIKTDKIDSTILAHLLRADLLPTSYIPPREIRDIREILRYRASLVALRTSLKNKIHAILSKNGIQMECSDLFGKKALQSLRGLKLRSCYQVGIQGYLRLAETLALLIEEISQTIEGMVEENPQAKLLTTIPGISYYSALLIVSEIGEVGRFPNARKLCSYAGLVPSVHSSGGITRHGSITKQGSKWLRWILIELSPHFVKGSDRLHKMYTRISSKHGRNVAKVAIAREMLKIIYCMLRENRAFVRT

SEQ ID NO: 202626 - protein, 429 aa, unidentified
MNLVPVAGIDVGKRFSEMAILSPSNKVYARVRINHDSYTNFDRAFELLKKTEKEFAARPVIVMESTGHYHKILFHSLTKIGYEVHVINPIQFDSIKNIKVRKVKNDKVDARKIALLYRFEQLETNNIPDENTDCLQNLCRHYYKLSDQLTVYKNRLLGTIDQLFLSFTDVFKDATSATALSILEKYPTPEDILKADRNEVISLIQQTSKKGFKWTDSKYELLYSKAFNFSPLSINSIANVTMLKTNISMIKTLMVSLADALEAIHKLLEQDSKKDMPVLSLAIDLLCSIPGIGILTAATIVAEVGDFSAFSKPDKLVAYFGIDPTVNKSGQFEGTKNKMSKRGSRLLRRVLFTTALANVRKKRNGEKQNPILYDYYRKKCLSKPKKVALGAVMHKLVRIIFAVIRDKKPFVLKSPEDHAKMLIAKNLAA

SEQ ID NO: 202627 - protein, 367 aa, unidentified
MASVAATARSDRAQVVIGVDTHKDVHVAAALSALGVLLEVFEFPSTRAGTAAVRVWAAGLGEVLTWGVEGTGSWGAGLARGLRAADEHVVEVNQVQRHTRRMLGGKSDPRDAEAAARAVLAGFATATPKSGDGPVEQIRIIRAARSSAVKARTAAMNQLKALIVTAPETLREELTGLTPAALISRCAGLRPAGSDLTSTLKRALRALARRHKDLSAEIKAHTTELTELITLVAPALLSEHGVGPDCAAALLITAGDNPHRLRNEAAFAALCGTSPIPASSGQRHRHRLNRGGDRQANAALHRVVISRLANHPPTRAYMSAHVAPNGANKMHTIRCLKRYLARHLYPLILAATTNPAESSPQPALITP

SEQ ID NO: 202628 - protein, 317 aa, unidentified
MSTWIGIDVSMETFDFSWSQNGETFHRKEANSDTGFQRLLEQVPSDANFIMEATGPYSFNLALFLFQAKRHVAVVNPISTKSHLRSELSRTKSDKTDALSLARYGKEKEPAAWQPHDREISEMRQMLGLDAKLTHLAGQLKNMNHAYGKIKHYSPHALLRIRRLLKLLEHEQDENMKELEAMAEKVMPREVAILETIPGIGKASAIRVAVSVGDFRLFETSRKLNCYVGLSPTTKQSGKSIRSRGQINRMGGASIRRQLFMCALSAKQHNPQCRAMWERMKESNKHSKVVLVAIMSKLIRQMHSMVVNDQVYNPCFR

SEQ ID NO: 202629 - protein, 350 aa, unidentified
MDKELYIGVDVSKQTLDLAYYDGESIDWKKAHIKVSNNNAGFKKIGSWVAKVSKGFDIVLFCMEYTGLYTQNFRLWLEEKHYIYRMVEPRKMHRFEPDLDDGLRSLDRIKTDELDSFRIAIYCEQNHRKILRNPSKLPSPVYFKLKRLLAERKQTVKQSVLYKQQLHDICAYDTDLSVERKNGQLKTLNDALKGIDNEIDMYIKEDADISKNFSLLTPIPGIGRVVALETIVLTENFMAIDNPRKYACYIGVAPFKKESGTSVRKGSSVSKKGFKQAKADLSIACLVCMQHIPNIRDYWERKRKEKCSGIVFNAIKFKMILRMFAVIKRGTPYVETDNYRNGKNKQPGVN

SEQ ID NO: 202630 - protein, 391 aa, unidentified
MTKPKTKTVNDFSRCLDPLDMDATVIAVIEMSQSSWLVAGIVPGVERQPLKKLAIDEHALLNLLNRWRAEAEKQGHRITRIAVAFEAGHDGFWLARWLAAQGVEAHVIHASSVAVTREHRRAKTDRLDTELLKRAFLGWLRGERGHCKMVAVPTLAEEDAKRPSRERETLVGEASRIITRVKSAFVRLGIRGFNPKLKAAATRLETLRTPEDEPIPPNTLAALKRDLERHQIVKKQIREIEQTRLDVLKQAPEKGPHAMVLLLARVIGVGVETADMLVQEVLSRTMRDRRAVGRYAGLTGSPDESGAKRRDKGLARSGNARVRHGMIQLAWRFLLFQKDSALAQWYRQRTADAPSTRKTLIVALARKLLIALWRLARDGVVPEGVRMRPAA

SEQ ID NO: 202631 - protein, 355 aa, unidentified
MSQEKYIGLEVHQASISAAVMDPSGNVLMECLLETKAATILEFIQGLRGTLSLTFEEGTAAAWLHDLLKPHVSRRVVCDPRKAALLKAGNKNDRVDACKLAELLRTNQLKAVYHGEHGIRTLKELGRSYLTVSKEITRTMNRIKSLYRSWAIPCSGTTVYAPRDRREGLAKIMEPGVGVRAQHLYQQLDNLQPLRLEARRELLLESHKHAAVTLLRQIPSMGPIRAALLVALLQTPHRFRSKRQLWAYSGFAVETHDRGEYRWVRGKLQRNREPITVRGLNDNHNHDLKNLFKGAAISARARPGPLQDFYLARVTQGMRPTMARLTLARKIATITLTMWKKGANFDPQQLHRQAV

SEQ ID NO: 202632 - protein, 364 aa, unidentified
MKHHVTPTVAFFAGLDAHQEYVVIAVVDKTGTLVHEGRVRSGDAAQLRAALLPFHSVTHPLAVVVETCPFWPWLYDAVVPFGIRFQLAHAQELEAIARSARKSDQRDARLLARMLAGDLIPPAYPTSPAQRDTACLLRHRAALVRTRTMTANRLHSQLHAVGLGLPREQLLRKASRVWLVETAWPRLSPEQQHLVQAHWGLLRHFTKMIAALNARIAQLAAADPAACLLATIPGIGPFRSLMLATELLPMSRDASVHKFVGYAGLAPITRRSADTVRRGPLPRAANRWVRGALVSAIPTHLRLAPGSRLSQYYARQKPRLGWPVARVAAARQLARIMYVMLATGECWREEGIVDGVSAERRMES

SEQ ID NO: 202633 - protein, 338 aa, unidentified
MKHTVIGMDIAKHIFQLHCVDPSTGEIKRFKLKREQVLDFFAKQSPVLVAMEGCGGAHYWGRELSKLGHTVRLLPAKLVRPFVLRNKTDAGDARAIWVAAQQSDIKSITIKTEHQQSILALHRIRSQLIKMRIMQTNALRGLLMEFGETLPEGYLALRKALPVSLAALETKLPGMLLQTLREQWTRSQGLDQDIAAIELRLKHALAQSSACKAIAEIPGIGLLTATAAVATMGDPASFKNGREFAAWLGLVPRQTGTGGRIQQLGISKRGDAYLRTLLMHGARSLVNRNKQSVWITGLLARRPYSVAVAAVANKLARILWSVLATGRPYEPATLSAAV

SEQ ID NO: 202634 - protein, 311 aa, unidentified
MKSSEVFVGIDVSKEILDVAIRPSGEGRSFTHDEEGLSQMAEWIQAASPQLIVLEATGGLEVEPIRALIARGLLPVRMNPRQIRDFAKATGTLAKTDKIDAQIIARFAEAVRPEVRPLPTPEAQELEALNTRRRQLVEMLTAEKNRLGMAPPAIRKEIQAHILWLEKNLEKANKALSDRIQANPIWRTKDEILRSAVGVGPKTSTTLLSDLPELGTVNGKKISALVGLAPLNRDSGKFRGRRMIWGGRAVVRSALYMSALAAKRFNPVIRDFYERLRAAGKPFKVALTACMRKLLIILNTMLKNRTPWQTA

SEQ ID NO: 202635 - protein, 417 aa, unidentified
MKEEFTFYVGVDWGVEFHQACILDAHGEKICQRRIEHSGPGMLEFCDFLQALTNGEASALAVAIEVPRGPIVEALLEHNYAVFSINPKQLDRFRDRHTVAGAKDDRRDALVAADSLRTDQHCFRRVRPEHPDVIRLRELSRTEETLGIDLRRCVNQLSQLLLRYFPQLLRLCSTPDEPWLWALLELAPTPQQAAKLTEKRLKQLLAKYRIRRWTAEKVGEILTAPPLPLAAGSAEAISEHALLLLPQLRLLHLQRKQVADRTQQLLDQMATSTNDFPRSQEHRDIPVLLSLPGVGRIITATMLAEGSHILSLRDYHALRAHAGIAPVTKQSGKSRQVLMRYRCNQRLRNAFYHWARASIQHDPRSKHHYARLRQVGHDHGRALRGVADRLLAMLIAMLKSGQTYDPNRRSTANRTAA

SEQ ID NO: 202636 - protein, 326 aa, unidentified
MKKGYFVGADVSKEKIDFCFLTSSEDTKPKFVSLPNEINTIKAYFQSFVKDDIYVVFEHTNNYHLPLQSALSDLEVRYSALSPSKTSYFLKHLTLQKSDITDAYGLALYCRIFKSDLNPNVYNREYSLIKSYNSTILLLSKIQTQLKNFKKSQDFVTDTELSEIIRSLTLQVQKTQAKIKLIAFEILKSFVPNCEEIIRNNKGFGIDLALNLFPQLHFNRAKSEKQFISFLGLSPRIYESGSSVHKSPKINKRGSSAIRRILFLNAFSCVRFNDKFKKRYDHLISKGKSKKVALVAVMCAIVRYLKSLFPLSESYLNENLYNAHTS

SEQ ID NO: 202637 - protein, 373 aa, unidentified
MKKISRLGVEKSKKKEERASKGYTIGLDLGDKKSQYCVLDGAGEIVAEGSVSTTRTALEQQFKSYAGSVVALEAGTHSGWVSRVVKQIGLEAVVANPRKVRLIAESTQKSDPEDARMLARLARVDRKLLFEIHHRSEAAQLDLTVIRARAGLVEARTKLVNSLRGLTKTLGSRLRKCDAEAITVEVLEGLPEAVKGALTPLVVQIQALTVGIEEYDHRVAAMGEQYCEIERLKQVRGVGDLIALTYVLTLGDKARFERSRDVGCYLGMVSKRRNSSESQPELSISKEGDTYLRSLLVQGAHYILSRRGPDTDLKRWGVRLAQRGDQKSKGKKAKRRAVVAVARKLGVLLHRLWVSGEKYEPLRQARRQERQAA

SEQ ID NO: 202638 - protein, 293 aa, unidentified
MKNSQLDFTGQTLYIGIDVHKKSWQVTILLNGMKVKVFSMNPNPKELNNYLTNHYPNANYHSVYEAGFSGFWANRQLQALGIKNIVVNPADVPTKSKERRKKTDKIDSSKLARELSVGNLDGVYIPSTKAEALRTLIRLRRQIVNDQTRQKNRIKSLLLFLGYSVPEDVETKHWSQRYIKALRNLDIEHEESKATLNELLNNLNFIRSQLVQILEQIKGFIAKDQQADKTVRLLKTIPGIGPILAVILYSEIIDIYRFKKLDELANYVGLSPAIYSSADKEINLELTKKKINI

SEQ ID NO: 202639 - protein, 346 aa, unidentified
MNYCGIDVAMKSSYLYITDGQGHLRGKGELPTTAEDFQRVLRRFVPEGLKVAIEAGNQTAWIHDLLVGLGAEVTVVNPAKVKLIAESRRKTDKIDAKILCELLRLDGLPIPVHVPPRETRELRGLLVARRQLVRARAKLCNVVRGMLRQEGVCLPSRWLTTFVGWQRLMEREFTHGHLPAVLEAYYGSFVSLTRSIQAMDKQLAVREKQDDRAARLQTIPRVGRIASLTFLAAVGDVHRFASSRKLVSYAGLCPTVRSSGERTEYGSISREGRSELRAVWVQIAHLVVRDTSRSTARLRRWYNKVASHRGKKTAMVALARKLLMIAYRLLYDQTDYRCSRVSRQVA

SEQ ID NO: 202640 - protein, 340 aa, unidentified
MDLFVGLDVSVRTTSVCIMDATGRILKESKVETEPDAIGALLHSISDHYKRVGLEAGPLSQWLYSGLAAAGYPVICVETRHMKAALSAQINKTDRNDARGIAQMMRVGLYKPVHVKTIRSQEIRMLLTARRFVQTKMVDAENNLRGLLRNFGLKVGIVSRLKFDQRILELLEQSPHLRLTIEPLLEVRRVLREQYQRLHKAMEQLAEADEVCQLLMTAPGVGAMVALSFRAGVDEPARFGRSRSVPAHFGLTPTRYQSGEIDQGRGISKCGDPGIRWALVEAAGVLLRITKKSSPLREWGLEVAKRRGMPKAIVAVARRLAAILHRMWVDNVPYRWQAPA

SEQ ID NO: 202641 - protein, 343 aa, unidentified
MTVYVGMDVHRKRSQVAIVDAAGVQQRNRNLANDPVKLVPVLGALPPGTPVAFEAAYGWGWLVDLLEELELEPHLVHPSRCKAIASARLKNDKVDAAILAQLLRADLLPEAWIAPQATRDLRAVLRHRASLVRMGTACKNRVHAVLADRGIPDHSSLWTGPGRAWLADLELPATPRGIIQDCCGLLDALATPIARLEREIAGLAKPDPRVQALMVLPGVGRLTAMTLVAEIGDIARFPTARKLCAWTGLTPQVRNSDRKVRHGHITKQGSPWVRGILQEAAQTAKRHPMFASTYAQLARRRGTHIATTAVARRLLARSFHILTQLETPPAPEKASTGRARVSA

SEQ ID NO: 202642 - protein, 443 aa, unidentified
MSRKRRTHLRGNRGQAFADQIRGIPLDRVLCVSLDIHKYFHVVMLHNALGEIVTPTFEIDIFQTGFDQLCQAIDEASVRIKAQVVLTGMEPTSHYFENLARHLRQRPQPVTLINSYAVKKNRDQQMMHHEKDDEIDTASIGDLLRRGEGTPFKPASGVYLQLQHLDRVRLSKIKIRTMLQNQVLGHLDRIFPGLVIIAEEAKTRHMPLFATDFWKCQAMQHLIRVCPDPRRLAAMSPQDLIDAFHAHHYAMGPITAAKIIAYAQKVLLPDAELIAIRRELLAHDLALLEEVEGHIAQLEDRLRTLLAETPYQIWVKLKGLSDIQVASLAAAIGDPANYSYAAQVFRRSGLVSGRNDSGIRQRKGKGKRVTKVGDVYLRRALMNALATLILHQPVLQQYFNKLKKSKPAGVARVATARRATGVLWATLRDQQAKTLILKKGAAM

SEQ ID NO: 202643 - protein, 307 aa, unidentified
MSEKIYFGVDVCKESLAFCAVGIAGQVPNNAPGQRRLLARLPKGAHLIIEASGGYERELVRVAQQSAVQLSVVNPRQVRDFARGVGRLAKTDPIDAEMLARFGAEVNPSPDAVPTAAELALQELVSARQQLVEQRTVLLQQQAQHLSSIVRRLDRARLKLLQRQIAQLELAIGSILEEQSALNQKVERLQQVKGIGFITAVTCVALCPELGSLSKRQTAALVGVAPYDDDSGARKGWRHIAGGRPKLRRALYMAALSAIRSNPILRRFYQQLRQRNKPPKVALVATIRKLAILLNHLLRNPSFLPAV

SEQ ID NO: 202644 - protein, 351 aa, unidentified
MPQKTDAVVASTIGIDTGKNTLHLVGLDDQGTIVLREKLSRSRIASRLANVPRCLIGIEAGMATHYVARELIALGHDVRQVPPAYARPFRQAHKNDFRDAYAIAEAVQRPSTRLVPVKTDDQLDLQALHRVRSRLISERTAVINQIRGFLLEHGIPVRQGLRFLRQQLPEILAKRIDVLSPRMIRIIEDLSGEWRHLDERIEHVTKEIEVLAYGTESCRQLMTVPGIGPIIASAMVAAIGNGVAFAKGRDFAAWLGLVPKQMSTGDRTILGRISKRGNRYLRMLFMQGARVILLRPANWTKHSFGPWLTAAAKRLHPNVLATALANKLARIAWTILAQRRSYEARIVADAA

SEQ ID NO: 202645 - protein, 348 aa, unidentified
MTITMIGLDTAKTVHQVHGIDESGRTELKRTLRRHELVAFFEQQPRCTVFLEACGAGHHWARLLSGLGHEVRLIAPEAVKPFVKKGRKNDAADAAALCVAGSRPETKFVPIKTVEQQAVLALHAARSLLVKQRTMLANAVRGLAAEFGLVAPKGLPKLEELMALVGAEEGLAAAGRQAMEELHAHGQAVTERVAALEERIVRHARQDATARRLATIPGIGPITASLLAATVGDHIGAFKSARHFAAWLGLVPRQHSTGGKVRLGRITKAGNAEIRRLLVIGATAMVRRAGSWNSQTGRWVQGVLARRPVRLATVALANKMARIAWALMTRQEVYRAQGPAPAAAEATA

SEQ ID NO: 202646 - protein, 387 aa, unidentified
MYYVGIDIAKLNHFASVVSADGEVLVKPFKFTNDNDGFCRLLSALASYDRRSLIIGLESTAHYADNLVEFLVSKRYQVCVINPIQTSTMRKNNIRKTKTDKVDTLVIARTLITQPHRFFSQEDIDLMHLKNLGRFRQKNTKERTRLKIQLTAYVDRVFPELQYFFKSGLHQKAVYALLKEAPTPELIASMHLTHLVHLLEVASHGHFNKEQAKELRILAQKSVGSSDRALSLQVTQSVEQIELLDRQIKDIESQMTEIMLGLDSVIMTIPGIGYVNGGMILGEIGDIHRFQKPCQLLAFAGLDPSVYQSGNFNASHTRMSKRGSRVLRYALINAAHNVVRNNSTFKAYYDAKIAEGRMHYNALGHCAGKLVRVIFKMLTDDVAFNLE

SEQ ID NO: 202647 - protein, 312 aa, unidentified
MEAKFVGIDVSKATLDVDCLPVSTARQFSNDAGGIAALVEWLLGSGVERIVVEATGGYEIAVASALAAAGLPVVVVNPKRVRDFAKAQGVLAKSDRLDARVLALFGERIAPPVRALPQAAQRDLTELLDRRHQLVSMRAQEQARLATVLPVARGDVEQHIAWLDQRIRKHETVLLKRLRANEIWDAKVKLLDSVPGIGPVNLFTLVGRLPELGTLNRQQIAALVGVAPFNDDSGKRRGQRYIRGGRAEVRCALYMATLTAKRCNPVIAQMFERLIAKGKPFKVAMTACMRKLLTILNAILKSTQPWENRLAT

SEQ ID NO: 202648 - protein, 338 aa, unidentified
MEETSVCVVDEKGAIIREGKVSTDPEAIGNFLSGASVVLERVGLEAGSLTPWLWHELNEAGFAAICIETRHAKAAMQAQNVKTDRNDARGIAHMMRTGWFRAVHVKSPQSQKLRVLLGNRRCLLDKRLDIESRIRGTLKAFGLKTGKVTTATYEARIRALTADDAELALYVEPLLETRRHLLEQFRKLEKLLLDIVKRDEVSCRLMTIPGVGPLTALAFRTSIDRPERFGKSRNVGVAMGLTPRKYASGQIDYDGRITKCGDALARSHLYEAAKVLMSRVTKPSALKTWGMKIARRSSMKNACVAVARKLAVIMHRMWIDGTDFRWGNRSETATGTVA

SEQ ID NO: 202649 - protein, 342 aa, unidentified
MHSTTIAVDLAKSVFEVAVSQRPGKVRERRRLSRGQFSRFLAEQAPATVVMEACGTAHFWGREAGARGHRVVLIPPHAVRPYVQRNKTDGADAKGLLEALRNDDVRPVPVKSVDQHVLASLHRLRSAWMATRTARLNLLRGLLRELGFPIPVGARQVLPQVGALVSDADSGLPSALRPVLAEAAREIRELETRVREVERALEAMSRGSDLLVRLRTIPGVGLLSATALVAFVGDVRRFPSGRHFASYLGLTPREHSSGLRRRLGAISKRGDPYLRMLLIHGARAVLLHAKKPTVQKDRLRAWALGREQARGHNKATVALANKLARIVWAVWRSARVYGAEHA

SEQ ID NO: 202650 - protein, 401 aa, unidentified
MPFHGGLDWGVASHAACVVDGAGRIVARVEARHDAGGLAELLARLRAVAPPAELPVAIERPSGLIVDALVAAGHPVVPIHPNVVKACRPRYRAAGGKSDPGDAYMLADVLRTDGHRFRPLTPVSDEIKALRALVRARDDLVTQRVALANQLRSLLEGFWPGAAAIFAAIDSPIALAFVGRYPTPESAGRLGEKRLAGFMAQHGYCGRRSAAELLARLRAAPTGLAGEAEAEAKGEIARALAGLLERLVAEIAKLSSRTERAVADLPDGRIIMSFPRAGRLCAAQILAEIGDVRERFPTEDQLAAEAGVCPVTHASGKSRGVVFRWACNKNLRRAITCFADNSRHASAWAAAVYGKARARGCQHAHAVRVLARAWIRVLWRAWQSRSPYDPQRHAGATKIAT

SEQ ID NO: 202651 - protein, 342 aa, unidentified
MDRLSPVTRIRKVGFTMENELHFIGIDVAKAKLDVDILRPDGRHRCKKFDNTPSGHEALVRWLRGHDVNRARVCMESTSTYMEDAAAHLSDAGYTVSVINPALSKAFAQSEGLRSKTDKVDARMLAHFCREKRPPAWEAPHPTERALKALVLRHQALTEMQTQEKNRRETAPEVQLTSIDILLRCLSAELARIEKQIKDLTDNDPDMKQRRKLLNSIPGIGEKTAAVLLAYTGLKLKFGTGRQFAAYAGLTPVQHESGSSVMRASRMSKAGPVHLRKALYMPALSALYHTAWGKAFRKRLEGNGKRAKVIIGAMMRKLAQVAYGVLKSGKAFDASQHELLIA

SEQ ID NO: 202652 - protein, 365 aa, unidentified
MQKISTMRTSGKNIFQGQLTIGLDLGDRSSAYCVLNETGEIVLEHKLATTLEAMKQVFGSMPRCRIAMETGTHSPWVSRSLTALGHEVIVAHAQKVRLITKSRRKDDRLDARSLARLARIDPGLLSPVKHRSAQAQLHLTEIRARAVLVSTRTAMVNAARGLAKSYGERLRKCGTEQFRRETTSGLSAGLREALEPLLREVESLNERIQEYDRRIEKMAKQTYPETALLKQLKGVGDLIATTYVLTIEDPHRFRKSRDAGCFVGLQPGRRNSGESEPQMRISKEGDEYLRTLLVQGAHYILGPFGEDSDLRRWGRKLSGRGGKNAKKRAVVAVARKLAVLLHRLWVSGEVYEPLRNSQKMINEAA

SEQ ID NO: 202653 - protein, 341 aa, unidentified
MQKSLFIGIDFSKKTFDVSVIHPNNLQTVDYQQFENSKEGCISLIKWIKTITDYPREQWLFCGEHTGLYSICLSEYLVKQDLYLWLENPLQIKQSSGIKRDKSDKVDSREIAFYAYRFQDRARVYQLPDKSLKSLELLLSYRERLLINKHSLLVSSSELRQVLQRNPTARFIYERSQKDVERIKKEIKEIERRMLEEIKSDEDLQETYELVSSVKGIALINTVAILVATHNFTRFDNSRQFACYSGMAPFGRQSGTSVNSKPRVSNLANKKIKFLLTQAARCAINYDPNIRQYYERKRSEGKDNWLIINNIRNKMIHRIFAIVKNKQLYQVEYRNHLEKVA

SEQ ID NO: 202654 - protein, 345 aa, unidentified
MNPISRIGMDTAKNVFQLHGVDNVEEPVLRRQFRRREMIKFFENMPPTLIAIEACGSSHYWGRLLTSLGHSVRLIPPQYVKPYVKRGKNDAADAEALCEAVSRPSMRFVPIKSEEQQAACMLMSVRERMVGIKTQLSNAIRSYAAEFGIIGPPGRQNVNALIERILEDDTLPHLAKELFSLQAKEYHAVEARLEEVEAKLMKWHRNDDVSRRIATIPGIGPIGSTMLSVKAPPAESFPSGRHFAAWLGLTPKDHSTGGRARLGGITKAGDPLIRSTLIVGATALLRHIRKGRTKPSRWLAAMLERKPPKLVAVALANRLARIAWRLMVSGGIYERPDDPELSPVS

SEQ ID NO: 202655 - protein, 429 aa, unidentified
MNKNEANPTEEYAALIGLDWASEKHDVWLWDVATGKSRHRVIEHTPEALADWLSELQSQYPGQRVAVCLEQSRGALIYALMGHAFLDLYPVNPVTLAKYREAFAPSRAKDDPGDAKLLAEILRLHRDKLAVWKPADDQTRLLGFLNEERRKAVNLRTKLVLRLQAALKLYFPQAIQWAGTDLGAPMACDWLLKWPTLEALQRAKPQTIRAFYYAHNVRRPDLVEGLLATIASAKPLTQDAPVIGAHRLTVQMLAKQLRTLHSSIAGYDKQIAQLFKEHPDALLFESLPGAGAILAPRLLTAFGPDRTRHPDAKGMQTYCGVAPVIERSGKSRWTHWRWNCPKFLRQTFHEYAKSSIPYSAWARAFYDQQKQRGKGHNAAIRSLAFKWIRVIHRCWQTHTPYDEARYLQALELRGSPLCRLIAAPDREAS

SEQ ID NO: 202656 - protein, 409 aa, unidentified
MEHNSEAFIGIDTSKLKNAIAIAEGGRDGEVRYLGEIETTDAATRKLVKKLATKYRKVTFCYEAGPTGYGLYRLITSLGHECSVVAPSLVPKKPGDRVKTNRRDAVGLAKNLRAGELTAVWVPDTRHEAMRDLSRARETAVDDLKSKRQQISSLLLRLGLHYPGEKTWGKSHRNWLASLKLDQREQRIVLEELFGAERQAQERVDRLVGAILDAVPEWSLAKIVTALMAVRGIDLVAAVTIMAELGDLSRFASPRELMAFLGLVPSESSTGDSVKRGGITKAGNRRARRILVESAWSYRYPPRISRDKLAKVAAAPEPVRAIAWKAQTRLSSRYRALIKRGKRPTIVATAIARELCGSSFLDNVGGSVPRDARSCRRARGRQGRFAPLKRWPEGGPSWTAAARASISRV

SEQ ID NO: 202657 - protein, 355 aa, unidentified
MESVKYLGFDVHQSTISVAVVNADGKLVMQSVIATHAATILDFIHELRGTLYLTFEEGTHSAWLYDLLARRVARVVVCNPRQNALLKAGNKSDTSDARKLAELLRAGLLAPVYHGEGSTRTLQELVRSYAALTEDTTRVMGRVKALYRSQAIACAGKKPYGRRHRREWLSKLSEAGLHRRAERLYEELDALQGLRRAAKRELVLESRKHAAAKLLRTVPLLGAIRAALLIGRVQTPHRFRSKRQFWAYCGLALETRSSADYRFEDGQLVRAKKPVFIRGLNRNHNHDLKNLFKSAATTASVIHGPFREFYEGLLAKGMQPAMARLTLARKIAAITLSVWKKGESFDAEQLKPQAA

SEQ ID NO: 202658 - protein, 362 aa, unidentified
MPNGMRWVGLDVHAHASAVAVFDDGTGEVTTRRVVGRPPEVLDVLRGLPRPARAVYEAGPTGYGLVRRARAEGIEMAVCSPGNIERRPGDRIKTDKRDAIRLARLFAAGDLRLVWIPSEEQEKLRDLVRCREDLRADLMRARHRLATFLLRRERYYPGPGERWTLRHRHWLSQQRFDDAASRVTYADYLHGHDVLLARRELVARELEQIAPSCVWSQTIARLRCLRGISTLTALGLCAEIGDWRRFEHPDSLACYVGLVPSEHSSGQTRRLGKITKAGSTHARRLLVEAALHYRLTPAVGGKLAIRQRGQDPALIDHAWRVQRRLNARWELLRNGRGKPAGVVTIAIARELVGACWEIATAP

SEQ ID NO: 202659 - protein, 337 aa, unidentified
MKYCGIDLHSNNSVVIVSDEEDRIVFSKRLPNDLGQIGAVLWPHRGELAGVVVESTYNWYWLVDGLVDAGYRLHLAHPSAIKKYEGLKYSGDFADARYLAQLLRLGLLAEGYIYPREERGARDLARKRMQLVRCRTAQILSIENSMTRQSGTTLKGEAVKRLTAEQVDAFGFAPDVALAMEANRAVSQALGQQIEAIEKRLKESVGLRPDYHLLKTAPGIGRILATTIMLETGSIGRFAQVGNFSSYCRCVDSLRESNGKKKGEGNTRNGNKYLAWAFVEAANFAIRYCPEARSFYERKKRKANRVLAIKALAHKLARASYHMLRDQKPFDVGRCFG

SEQ ID NO: 202660 - protein, 359 aa, unidentified
MQKRLTKKDYFFNNINLTVDDDVYVGIDVHKINCHIAIWLNNGIALTFVTPSDNVAIAQMLHKLTPGLKQIVYEAGPTGFSLAWTLKAASLPVAVIAPSKTLRPAAQESKSDRLDCRKLAEFAAKGLLVEVAIPDKQQEADRQVVRLRNQLGDKRIRIKQQIKSLLLQHNIKEPEGLARWTKRSIVGLKQLELCPQIRFTLDTMLDELNYLQTQIKRVDFQLKSIFSKDRHSRQIEILQSHPGVGPITARQFRAEVFSHDRFGKSTQLTRYLGLCPRVSQSGQKRIEGRLMKTGQIKLRANLVEAAWVWIRQDPAAKETFRRLVRNTGEPNKAITAMARRLAVHLWKMLCDDQMYRKTA

SEQ ID NO: 202661 - protein, 412 aa, unidentified
MQVVHRVCCGIDVHAKMLVACLILANGEKQKRTFSTMTAELLQLRDWLVAVQCTQVAIESTGVYWKPVFNILEDALTVILINPEHAQALRGRKTDVKDAEWLADLLRHGLLQPSFIPPPVIRELRELTRYRDSVVREQSSVANRIQKLLESGNLKLGQVASDALGVSGRMILKALAKGESDPRKLAALARGKLKEKSLSLEQALQGRLTVNQRFVLGELLSRWEQLEAADARVTGEIDKYVQANPKLARAREQLDTIPGIGPRVAEVIMAEIGIEMAAVFADAAHLASWAGICPGNKATGGKRLSGRTRKGNTYLRSALVQAAWGASLKKHCYLSSQFQRLVKRLGRKKALVAVGHSLLVIIFHVLQNDQTYTELGGDYFDRRHVEQQRDYYVRRLQMLGLKVTLEELPQAA

SEQ ID NO: 202662 - protein, 270 aa, unidentified
MVILGIGISKKQFDVALLKEGKLQNKIFTNCFQGFNQLDVWVKKYGDIKILACMEATGFYGKSLAEFLYSRGYNVSIVNPFRIKAYTQSKLARHKTDKKDSSIIAEYASCQNLQLLNIQKQIKDIEKSIIDLISRSDSLQQDYHNLQTIPGISKTTAIAIIAEIPNYSSFKNARQLAAFAGLTPKQRISGTSVRGKSKLSKIGSSTLRRALYFPAIVTKKYNPIIRNFCSSLAEKGKHSMVIIGAAMRKLLHIIYGILKKKVPFNVSKIS

SEQ ID NO: 202663 - protein, 349 aa, unidentified
MTKSISGLSEVTVVGLDLAKHVFQVHGIDACGHVIVAKPIKRGKLLEFFAALRPCLVGLEACGSAHHWAREIGKLGHDARLMPPAYVKPYVRRQKNDAADAAAICEAVTRPSMRFVPVRSVENQGVLMHHKVRELLVSQRTQMLNAVRGHLAEIGIIAAQGPNKTRELAELIAAGDEAIPSLVRAALMPLVRQLERLDAEIDRTDHTIMVLAQADPVARRLTSIPGIGPVTASAIAASVQDIAGFAGPREFAAWLGLTPRQNSSGGKERLGRVSKMGNRYLRKLLVVGAHAVLYHRKCHADALRLWACKLMQTKPFKLVAVALANKLARIAFALMRSQSLYARTQPNPA

SEQ ID NO: 202664 - protein, 349 aa, unidentified
MSKHNTFIGIDMGDRHHHFCILDTSGEEVGSGRCASTRAGLRKTFGDVSSALIAIEAGTHSAWTQRELEAMGHTVLVGNPRKLRMIYQDDRKSDRRDAAMLARIARMDPSLLHPVHHRGARAQADLAILRARDTAVRMRAQLIHTVRGLVKNTGCRLPASSTAYFHTKVKHDIPRELRPAITPLLETIEKLTKAVKDYDKKIATRCAKRYPETELLKSVPGVGPVTALAYALTLEDPARFAKSRDAGAYLGLVPRRDQSGCCDKQLPISKAGDRYLRRLLVGSAQYLLGPFGPDCKLRRHGLTLAQRGGGSGKKRAVVALARKLAVLLHRLWADGALFDPEYDPKAATA

SEQ ID NO: 202665 - protein, 342 aa, unidentified
MTVLYAGLDVSLELKNVCIVDEHGRLVRESRVGSDPELIAAELQRIGDSFVRVGFEAGPLSQWMFFGLKEAGLPAVCIEARHAKAAMVAMNRNKNDRNDARSIAHLIRSGWFKAVHVKSVVSQELRSLLVAREFFVNKLRDHENEIRGLLRPFGLKVGRVSASGFDARVRDLVDGNPQLGLCIGALLDGRAAMMARLSVLHRELLRVTANDELCRRFMTIPGVGPVTALAFKTAIDDPARFRRSSDVGAHLGLTPRQYQSGETDVRGRISRSGDAFTRTALFTAAHVMLTRSCQWTSIKAWGVRIAKRSSLKKAKIAVARKLAVVMHRMWRDATPFRWGAPA

SEQ ID NO: 202666 - protein, 354 aa, unidentified
MSDMKIATIGIDLGKNTFHVVGMDAAGGVVLRQKRSRKKLKQSLANTVPCLIGMEACAGAHHVGRELEKLGHQVKLLPAQYVKPYLKGHKNDYRDAEAIAEAVQRPTMRFVPLKAPEQLDLQALHRVRSRLVTQRTAVINQIRGFLLERGLAVRQGATALRLALPELLSMTPESLSPQVVRLIQGLAEDWRYLDSRVAAITKEIDDLVDQDEHCRRLMTAPGVGPIISSAIVAAIGTGDAFSRGRDFAAWLGLIPRQISTGDRTILGRISKRGNSYLRTLLIQGARAVLLRRRTWSKHSFGGWLEATSKRLHPNVLVVALAAKLARIAWSVLARGRAYEVNYLARNVMPAILNA

SEQ ID NO: 202667 - protein, 437 aa, unidentified
MRIWYRRCAGLDVHKSSVVACVLAVKEPNRVEEEVQRFGTMTEDLKELAAWLKGQAVERVAMESTGEYWKPVWNILEAAELDLLLANAQQVKALPGRKTDQKDSQWLADLLMHGLLKPSFVPSRVIRDLRDLTRSRARLAQWHGTIANRIQKVLEDANIKLSSVASDVLGVSGRLMLQAITQGKADTSELADLSKGRLREKIPQLRKALEGHITGHHRLLLSRYWEQFQFLEKQIVKTDAEIARRMKYTPEELVQVKAALPPGTPFPRCPRQAALEYWMELPGISMVSGSSIVAEIGADMTQYPSAAHLASWATLCPGHDESAGKRRSGRTRKGNKWLRRTMSEAAWAASHTKNTYFAAQFRRIAARRGKKRANIAVAHSLLVTGYTMLTNRSHYKEVGASFFDSLNRDKVKKTAVKRLEALGYEVALKTKPVQSGN

SEQ ID NO: 202668 - protein, 311 aa, unidentified
MDITVLGIDLGKTVCSLAGLDASGAVIFRKRIQRFRLLDFLAELPACIVAMEACGGAHHIGRFCLQHGHEPRLMSPLYVRPYVKVHKNDDRDAEAIAEAATRPTMSFVAIKSEEQLDLQALHRARERLVSDRTRLINQGRGFLMERGIRVGTGRHVFQKELTRLAAGGTVDLSHRIVLMLSDMATELADINRRVAAIDAEIKELAKTNADMRRLMEIPGVGPTIASALVAAVGTGSSFGKGRDLAAWLGLVPRQITTAGKAKLIGISKHGNRYLRKLFIHGARTVLHLVRDRTSPITRWADGLKDMARQSG

SEQ ID NO: 202669 - protein, 411 aa, unidentified
MNPVYGVVAGIDVHKRMLAVVVAVLGEQEIEYRRRKFGTTYGELDQLVEWLRQQQVSEIAMESTAQYWRPAWIALEGSFRLHLAQPRSTLAPRGRKSDFADATRIVRRLLAEDLTLSYVPDREQRQWRTMTRMRVRMSTQQVRLRNQMEGLLEEGRIKLSSVISDLLGVSGRSILWAMVHGTSDPAQLAALANHRLTVPADQLQEALRGQLDPSQRLLLKMLLEQWEQLAAHIERLEIQMTQALQGWEPAASRLREIPGISHVAAQQIIAEVGPEATAFLAPEKLSSWVGVCPGTQQSAEVSYSSRSAKGNPMMRRLLTQCAWAAVKVKGSLFEQKFRTLLPRLGARAAIWAIAHRLLRVIWKLLHDKVRYIERGILDNAAVERRRKRYVRQLRKLGFAVSLTPIAAEPPL

SEQ ID NO: 202670 - protein, 369 aa, unidentified
MKQPITYVGLDVHKDTIAVAVAEAGKRGEAREHGKIANTAAALRVLAVKLARGGGDLRFCYEAGPCGYGIQRQLSAAGHECVVVAPSLIPRKPGDRIKTDRRDAINLAKLHRAGELTSVWVPDQAHEAIRDLVRARLAAVRTLRQARQQLSGFLLRHGHHYNRPAWTLMHRRWLAGLRFEQPVHHIVLEDCIAAVEAATARRDRLEGHIEVALPEWSLAPVVHALQALRGMALVAAATVVAELGDIARFANPRQLMAYLGLVPSEHSSGDTRRQGRITKAGNGAARRILIEAAWSYRFPARISREQLLRQEGLAEPIRDAAWKAQERLCRRYRKLARAGKPPTVVTAAIARELSGFVWAIAQLARPMNG

SEQ ID NO: 202671 - protein, 403 aa, unidentified
MNNVAGIDVSKGKSMVSVLRPFGEVVAKPFSIGHTGSELKELADYLKSLDGETRVVMEHTGRYYKPVARFLHDEGVFVSAVNPKLIKDYGNNTLRKVKTDKADSRKIARYGIDNWAELRQHTPMDTIRMQLKTLNRQQSLYTKTKTMMKNNLIALLDQTYPGVNALFDSPVREDGSQKWVDFATTFWHVDCVRNMSLTAFAERYRKWCKRHGYNFSQSKAVEVHAGAQDLIAMLPRDALTKTMVRQAIDALNAISASMERLKAEMQALAAQLPEYPVVMAMHGVGDSLGPQLMAELGDVTRFTHRNAITAFAGVDPGADQSGTHEAKSTRVSKSGAPELRRALFLVMDCLLKTQPQDDPVYRFMDKKRAEGKPYLVYMTAGANKFLRIYYGRVKEYLASLEGN

SEQ ID NO: 202672 - protein, 344 aa, unidentified
MKYFAGLDVSLQETAICIVDEDGIVAREGKAVSAPEDLVRWLAATGLTLARLGLEAGPLSPWLHTGLQAAGLPAVCIETRRMKGATAAMAVKTDRNDARAIAHAMRVGWFTIVHVKSAESQELRFLLSNRRTLLEKRVAIDNEIRGTLKAFGLKVGAVGVAGFIARVIELLGDRPRLLPMVQPMLQAREALRQQSAALTKMVIEAVRASSVCRRLLSVPGVGPVVALTYATGIDDPARFTHSRDIGPHFGLIPRKYASGEIDRNGSITKAGDGAVREALVQAALTLLTRNRRWCTLKAWGMAVAKRRGLQRAIVAVARKLAIILHRIWIDGTTFIWSRETAASA

SEQ ID NO: 202673 - protein, 340 aa, unidentified
MGEVSTVGIDLAKSVFQAHGEDASGGVVFRKKLRRDQVLPFFSTLPRCVVAMEANASAHYWARELAALGHDTKLIPPAYVKPFVKRQKNDMADAEAICEAAQRPTMRFVQGKSAEAQASAVVFRTRDLLVRQRTQLINALRGHLTEFGYIVRQGVGHVGKLVEIVADPASDLPAEARPVLAVIAQGLQALQEQIALLDREIASRAKANPVAKRLMTIPGVGPVTATALVALAPAASTFRRGRDFAAWLGLVPRQHSSGGKERLGRTTKMGERSLRRLLILGASSATKVAARKPDKASAWLAGMLARKPRMLVTVAFANKMARIVWALMAHGGTYRAPAAA

SEQ ID NO: 202674 - protein, 375 aa, unidentified
MDQHSRAFVGIDTSKLRNAVAVAEDGRGGDVRYLGEIDTTEAATRKLVTKLAAKYRQLTFCYEAGPTGYGLYRLIRKLGHDCIVAAPSLIPKKPGDRVKTNRRDAVGLAKLSRAGELTAVWVPDERHEAMRDLSRAREAARKDLKGKRQQVSSFMLRLGRHYPGKKTWGPAHMNWLMLQKLEHREQRIALEELLGAVRQESERVERLEQAIRDAVPEWSLAELVTALQAMRGIDLVAAVTVLAEIGDLSRFQNPRELMGYLGLVPSESSTGDTVNRGGITKAGNGRARRILVEAAWSYRHPPRVSREKQIKVAAAPRAVREIAWKAQMRLCGRFRSLTRKGKRPTVVATAIARELSAFIWAINREVVGSHATANQ

SEQ ID NO: 202675 - protein, 343 aa, unidentified
MKLHVLGIDLGKTVFHAVGLDVTGKVVIRKKCSRRQLLAFTANLEVQLIGMESCSGSHFLGRALREQGHDVRLMPAQYVKPYVQTNKSDFLDAEAIAEAVQRPRMRFVPIKTEEQLDLQALHRVRERWVMRRTAVVNQIRSLLLERGLTLPKGRRYVEEQLPGILEDAELRLSGSFRVLLAQLKIELGQLTARIEEMDRVIQKTAKDNEDCQRLTEIPGVGPVTATALIAAVGNASAFQKGRNLAAWMGIVPREYSTGGKQKLLGISKRGNKYLRTLFIQGARSVVQQRHKQAPGLSHWLEQLLGRTHQNVVVVALANKLVRMAWAVLCKNERYRAPVLAATP

SEQ ID NO: 202676 - protein, 387 aa, unidentified
MIYVGIDIAKRTHYASVMNSDGEILAEPFPFTNDLAGFQKLLSCIGSFPKEQLLIGMESTAHYAENLTCFLFSRDFQVCIINPIQTASLRKSNIRKTKTDSVDTFLIIKALSLHDYRRFSKRDYDSLQLKNLCRFRQKLMKARTKVKIQLVSYVDLIFPELQYLFKSGIHTKSCYALLKTESNPDRIAKMHLTRLSNLLKKTSKGHYTKNHAIALKELASQSVGIKDDTLSLQILQSIEQIEMYTQQISKVEASICEIMDHMDSVIKTIPGIGNLNGAMIIGEIGDISRFEKPCQLLAYAGLDPSVYQSGKFTAARTRMSKRGSKLLRYALINAAWQLTLHNETFKAYYDLKVSQGRRHYNALGHVAHKLVRVIHKMMTDNLVFDLD

SEQ ID NO: 202677 - protein, 331 aa, unidentified
MVDVKRYVGIDVAKAQLDVAIGPNGERLAVDNDERGISTLLKRLEPADLVIIEATGGLEVPVASALATAGIGVAVVNPRQVRDFARATGQLAKTDALDAQVLVRFGAAVKPQVRALPDAQAQALEALVNRRRQLVEMLTAEKNRRANSPKVIHKSIDEHIRWLEKRLAGFDDELAGLVRATPIWRARDELLRSVPGVGPVLATTLLAHLPELGALNRKQIAALAGLAPFNRDSGKLRGSRCIWGGRAQVRRVLYMAVVSAVRSNPVIKNFYTQLRARGKYPKSALTACMRKLLVILNAMLHNNTHWQTPALTASTSALSPLLGAVSEHGCC

SEQ ID NO: 202678 - protein, 310 aa, unidentified
MSMCCVLMVVVIAPKKFANTTKGHDELVSWLKGHKIDHAHICIEATGTYMEPVAECLYDAGYIVSVINPALGKAFAQSEGLRNKTDTVDARMLAEFCRQKRPAAWEAPHPLERALRATVVRHRALTDMHTQELNRTETAREVQRPSIDAHLLWLEAELKRLEKQIKDLTDDDPDMKHRRKLLESIPGIGEKTSAVLLAYIGLKDRFAHARQFAAFAGLTPRRYESGSSVRGASRMSKAGHVSLRRALYMPAMVATSKTEWGRAFRDRLAANGKKGKVILGAMMRKLAQVAYGVLKSGVPFDASRHNPVAA

SEQ ID NO: 202679 - protein, 345 aa, unidentified
MKKVVAGMDLHSNNVVIGIMDLDGKRVASRKVPCELKEVVKFLAPFKKRLEQVAVESTYNWYWLVDGLEALKYPVVLANPAGMEQYNGIKHADDTNDAFFVAELLRLKILPTGHIYDAQLRPVRDLLRRRLTLVHHRTALMLSFKSLYTRTTGQEMSLSRLKELEIKEAQQLYDHPANQLIAGMQIKHIEQLSESIRKIEKGVLGSARELPFYPKLLSLPGVGKILGMTITMEVGEIKRFVDPGNFASYCRTVEAKRTSNDKKKGANNSKCGNKYLAWAFVEAANFAKRYDEQCRKWYDRKAAKTSNVLATKALACKLAKAAWYLMAEGTNYDPARMFGQPAKTK

SEQ ID NO: 202680 - protein, 469 aa, unidentified
MTTMTQPGCCVTGGVDTHKDVHVAAALDALGRLLGTESFPTTRAGYRQLLGWLRAFGEVDAVGVEGTGAWGAGLHRFLTANGVRVVEVMRPNRQRRRRYGKSDVADAISAARAVQAGEAVGTPKTATGTVEAIRLLRIARRSAMKARTQAGNQIHAVIDTSPEDLRHRYHGHSSAQVVAAAARFHRRFPSTPLDAAKLTLRVLARRWQHLDAELAELDARLDELTATVAPTLRAMNGVGPQVATALLAAAGDNPDRLRSASSFAALCGASPVDASSGRQQHHRLNRGGDRQGNWALHVIIISRLRWHQPTKAYMAKRRAQGRSEKRSSAASNATSPAKSTAPSPPTSANNTIQRDHRESPLDIQRSFGRPALPNDAGPGSVRDRPSRRGPADAAGVEQARPRRRPQNDAPVLSRCGRGVDRTEIGHSWFEGRLLVGHGPRGWCGVAVDASFVEQPACRRWPIRGGQAVT

SEQ ID NO: 202681 - protein, 374 aa, unidentified
MRNFSTFIGMDVHKETIAVAIAGEEGGPRYYGDIMNTPEALAKLIKKVAGKKEQTAFCYEAGPCGYGVYRQITGLGYRCDVVAPSLIPKKAGDRVKTDRRDAVMLTRLYRAGELTSVWVPGLEQEAIRDLTRAREDIKGMERHARQRLNGFLLRHGKRYHGKSKWTPGYFRWLATVSFESSVQQIVFQEYVDMVKQLQKRVASIEEEMRKALTGWSLRVVVEALMALRGVNLVTAMTVVAEIGDMSRFESPRQLMAHLGLVPSEHSSGSRQKRGGITKTGNGHVRRVLTEASWSYRLPARKTSHLQRKAEKTTEAVQAIAWKAQKRLCKRYWYLIHKGKLTVQTCTAIARELVGFIWAIACEVMGKNIVCGVAA

SEQ ID NO: 202682 - protein, 466 aa, unidentified
MEKHYEIFVGIDVSKGKADAAILKVSNLRSIKPKFLRKKLSFKFTESDVTSFLSTIRETYDDNCTHVTFGLEVTGTYSTNLYEFIKSQLSDLECIRYLNTDFVNKWRKAHNIAKSDPLDAQTISSIIGTDTDVQYVSDDVFENKNGYQDLKALVHRYYQVKKTYTQEMNRLIASCDVFFPELQYVFETNSAAFLAILSRYPTSKDIINTPRCEVFDHVYEATKHRVKIDKIDILYEYCNDSLVRTEITDINRMVILNHVDSIINLKYQIRLLEKEIKSIVSSHKEFELLVTLTGCGPITAATIIAETGNIHRFSSADKFVSYAGASPKIDRSGKSVEIVGKISKKGSKYLRHALYMIAEFARRHNPVLKNQFEKVKNGNKKRHKLAVVAVANKIARYIYSIMKHKSSFVITHQSLMRLPEETRNTFFQNITLEIPKNTRKQIYQYSDINGEVHQFVYISKSNLQLV

SEQ ID NO: 202683 - protein, 334 aa, unidentified
MAYLGIDVHKSTSTVAWFDPATGELGERRLATHPAEFAKLLAPLSRPWIVAIEATRQAPATCAGLRALDCEIHLVEPQKLSLLARLQNAKTDLKDAKLMLHALLHDYLPEAYLAPPAVTEKRDLYFAHQNLRQTATKYRNLLRSLLNKAGLDLTVADLLGARARPQVEEQLARMAPDRAAAARAYWQQLVETEAQLAQVDRRIGAAVKAEPLGRELIKLPGVGPILAFGWIALLGDIERFAGYPQLWSYAGLAPRSARSDEFHADGHLPQRCNKAVRQVTMLAVQSAIRAQASSRARDTYRRLVEHKPPKTAKVAAGRELLRDVFVIWKRLAAA

SEQ ID NO: 202684 - protein, 410 aa, unidentified
MRIIALDVHRSFAQTAILENGKLRDAGKIDLEYSRLLRFARKLKPDDEIVIEATGNTSAIVRVLLPFVGRVVIANPILVRAIAWAKVKTDKIDAAVLAKLHASGFLPEVWMPDEETETRRRVVAERTQLVSQLTRLKNRIQSVLHANLIPPYKGVLFSQRGRAWLQAQPLAEDQRRVIVRHAGELDRLGAELAEVDKSLAQAALEEPRVKRLMTITGVNSTVAMSVLAAIGDIHRFSSPEKLVSYFGLNPRVRQSGDKPAYHGRITKQGRAHARSMLVEAAWVISGAPGPLRAFFIRIRDKRGKHVAAVATARKLAVIIWHILSKDEDYTWNRLALLQWKLRKLELKAGHPSRRGGRQKGSAAAYSNKSVRDSERETIANAEDEYRRFVATWKQQSPKGRSGATNEVRRS

SEQ ID NO: 202685 - protein, 341 aa, unidentified
MQTTKYFIGFDISADDFSASCITSPDNLVFLTQKFQNNFDGFNEFLSLLSEHHVRQAEVIICMEATGVYSENLSYFLASKEFTVCIESPHKIKNKTKVSPRKNDLIDAQAVAEYAYRYTDKLSVWKPKDEILEQIQVLLSIREHLTVQLIANVNALKSLKYKYYQTPLANQIYEQTINKLKEHIKQIDKEIKNLIDKDDSFKSKISLAKSVPGVGLLLAANLLVVTRGFTEHVNYKHMAAYSGICPYEKISGTSLHKPSRSRMCGPAKLRKLLYLAALSVRTHNKNFRKYFLRKVAEGKNKRLVLNNIENKLLKIIFAVINSGVAFTENYKSVNPVLLKTA

SEQ ID NO: 202686 - protein, 330 aa, unidentified
MKVAGIDVAHKTLGVVLRSEEKAGKAQEFANTASGHLALVKVLKAARVERVCLEATGSYHLDLALALDTAGLALMVVNPKAAKRFTEALLTRTKTDAVDAAVLAQFALRMPFEPWKRPDAQALALRACARRLAALNRAKTEAKNQLHALIQTQTTPEVVLADVRLSIRQCEDQIEDLRTWAEGLIQTDAGLKEVFDLLISVKGIAAASAIQLMGEILVLPADMRAKQWVALAGLDPRQSISGTSVHKKPRLSKAGNRYLRLALFMPALSAVRHDRHVNGYYRHLVETRGLKKIQAVCAVMRKLLHAIHGMLKSRQPFDGRRFYTLAATPT

SEQ ID NO: 202687 - protein, 395 aa, unidentified
MILVGIDIGKYSHHFALVQKEDGEVLREPSEINNDLEGFDQLISSFRKYQKKDILIGMEDTGHYHFAILKHLLDKQYTVALINPITTDLTRKMNGSITKTDDLDSLTICDVLSSNKKDKKPYRITKINRFDMYEQRCLTRHHHNLKEELNVYSNRLQKCIDVVFPEYNSLFKSKYGIVYMNVLKKYGSADNIAKADIRSLRKCFETNRRGKRISLTAEKLKETAKNSIGISSSSEVIQIRHLIGQIELIHEQLKEIDKKIEEFSRQINSPILSIPGISHFSGTSILSELGDISNFTNPRQVIKFSGTAPLTYESSQFKAQHTKITKKGSKYLRKTLYQIILAVIQHNKVFGDYYALKLSQGKSHRCAQGHCVRKLLRVIYHLLKTGQQFDPALLS

SEQ ID NO: 202688 - protein, 380 aa, unidentified
MKKFITHIGMDTDSRGFDIAIAEGFGSNNSEVRSWGRIPATLAAVDKLIKQLRKQGYQELRFIYEAGPCGYGIYRHLQGKEGIVCVVVAPSKIPRQPGERVKTNRRDALKLARLDRAGDLEAIYVPSEEDEAMRDLSRGRAAAVEAATRVKQQLKSLLLRHGIKYPGKGESWSGDYRKWLRGLQLPHEAQAYVLAEGLVALDEAEARVTRLTERIRELLPGWRRQPVVAAMQALRGVALVTAVELVAEVGDLTRFSNPREVMGYLGLVPMEDSTGDKRRQGSITKTGNGHARRSLVESAWAYARPPRVTRALKQRQQGLSREVIEISWRAQVRLCCRYRRLSVRGKNKKKIIVAIARELCAFMWAIAVTTSGQQLPARAA

SEQ ID NO: 202689 - protein, 343 aa, unidentified
MQAVTTIGLDIAKSVFQVHGVDAEGKVLIRRKLKRRYVLAFFQKLPPCLVGIEACATSHHWSRELKALGHTVRLMPPAYVKPYVKRQKNDAADAEAICEAVTRANMRFVETKTPEQQSCLMLHRTRHLFIRQQTSVINAIRAHMAEFGIVAPVGRQGVEALLEVAADGGDNRVPEVARSCLAALGAQLRALKAQILELDRRITAWHRSNETSRRLDAIPGVGPALATALVASVADPKAFRSGRNFSAWIGLVPKQHSSGGKDRLGSISKQGDRYLRSLFTAGALAVIRYAKIHGTKHRPWLTALLARRPTKVAAIALANKIARMAWAMMARGERYKEPVALAA

SEQ ID NO: 202690 - protein, 325 aa, unidentified
MEQLTTVGIDLGKDVIATCVLDVHGAVIERRVLRRGAFERWAEQLPSCTVAMEACGSAHHWGRWFAARGHTARLIAGEFVVPFRKGGKNDTADAEAIAIAARQPTMRFVPIKTVDQQAILVWHSVREGWKEERTALLNRVRGLLAEFGIVIGRSSDRLLMALPELTEDPRLPDAMRAMLLQAREQFVALHARLARCDAQIAAHAGNSPAAQRASELLGVGPITASALAATVPDAKVFKSGRQFGAWLGLTPRQHSSGGRTRLGRISLRGNVYLRTLLIQGARSTLQAAINTEPARASRHRLHSSARCSRDNPGRPIVAMRAPPHP

SEQ ID NO: 202691 - protein, 327 aa, unidentified
MRYLGMDVAKAKLDCLLLSEDGDKGKSKSVANNRSGIADFLAWIGKQHISPNELHVVMDATGVYHEQAALALADAGVTVSIVNPAQVKDFGRGLAVRTKTDGMDSYVLARYGALLKPVAWIPPAPEARILQALLARRDAVAQDLRRERNRQEKAEATDTPALIRQSLSDSIEFLSRQLTQLQQDIDQHIDRHPGLKDDLALLQSIPAVGPQVGNNMLSVIRSHDFGSAEQLAAYLGLVPVERQSGSSVMGRAKLSKAGPARIRAVLYMAAVVAIRCNPHVKAVYDRLLTRGKSKMSALGAAMRKLVHLCFGVLKTRQPYRRDYAKNS

SEQ ID NO: 202692 - protein, 329 aa, unidentified
MVHLGIDVSKAKLDCTLLLDAQSQRARSKSVANTPEGVAALLHWVQRQSGCTPDQIRAALEATGAYHEAATAALHQAGVCVFVVNPAQLRDFAKGHAVRTKTDAKDSLVLALCAAQVKLVPWQPAPVEIRELRALMSRLEAVEEQLRAELNRQQKAQLAQDPSLVQQSIEASIAFWQSELGRLQQAIDQHIDGHPGLREERERLLSIPAVGDKTANRMLCLLYAGHFHSACQLAAYLGLIPVQHQSGSSVRGRPRLSKNGNTRMRASLYMAAVTATRYNPDVQALYTRLLARGKAKLSALCAAMRKLVHICFGVFKNKQTYRPFVCATA

SEQ ID NO: 202693 - protein, 376 aa, unidentified
MAQTDVQYPTIHLAIELSRSAWLVAARLPGVEKPSLHRIEGGDTAALLALAAALRARAAARLGTPVRVACCFEAGRDGFWLHRLLTAEGVAAYVLEPTSILVNRRARRAKTDRLDALGMLRVLAAYLGGDRQACSMVRVPTPEEEDAKRPHREREELVRERVRLENRIAGLLATQGVRERPSLRSWERDLAALRTGDGRPLPPHLRAELDRLRRRLVLTLGLIRELEAERDAALAAGPRDAAGRKIAALCRLRGVGANFAAVLTREVFYRAFDNRRQLAGYVGLAPVPHQSGEADRDRRISRAGNARARTTLIQLAWLWLRYQPDSAPARWFRDRVGALRGRTRRIAIVAMARKLLVALWRYVETGLVPEGVEVAA

SEQ ID NO: 202694 - protein, 349 aa, unidentified
MEAYDGPQIVGMDLHRRRSVLVRMTEDGRKLGTSRISNSPARLAAEIARAGQRPRVVLEACYGWYWAADALAAAGAEVHLAHPLGVKRFSHRRVKNDELDAGDLADLLRMGRLPEAWIAPPEIRELREITRYRCKLVRIRASCKDQVHGVLAKLGVEVTCSDIFGAWGSAWLDELALPQPYAGKVASLRSLTGALSAEITVLEQVTGELLCSHDGYRAIQALPGIGPVLAAIIVAEIGDITRFSDPARLCCWAGLTPRHYESDTKVVRGRITKQGSRVLRWALVEAIQRAPAGTPMREVKDAIIARRGTQARNIAKVAAARKLLTCVFYAMRDGQARCLAASAAAKQAA

SEQ ID NO: 202695 - protein, 411 aa, unidentified
MQDKFQWYVGIDWATEKYDVCVLDASGREIAKRVIEHSGSGIAELLDWLTELAGRKPEAVAIAIETPRGAMVEGLVERNFAVFAINPKQLDRFRDRYTVAGAKDDSLDAFVLGDSLRTDQPCFHRVQLDDAQRIRLRELSRIEDDFQSQSNRLSNQLWEQLHRYYPQMLSLSSAANEAWMWDLLELAPQPSEVGSLKLAVVKRLLRSYRIRRLSAEQVLSILQRPALRLAPGAAEAAGEHALLLLPLLRSVHEQQQQVSRRIRRLLEQLSRPATEHSDAAILLSLPGVGQSVGATMLAEASQPLAERDYHALRCYTGIAPVTRKSGKRKVVLMRYGCNQRLRNALYYWSLASIQNDPWARAYYAELRARGHSHGTALRMLGDRWLAVLVAMLKTRTLYDPGRRLQAQAQAS

SEQ ID NO: 202696 - protein, 409 aa, unidentified
MDVVYSHVCGLDVHKKTVVACILTPNEKEIRTFSTMTDDLLQMVDWIKRKGCTHAAMESTGSYWKPVYNLLETEEIQTLVVNAQHIKHVPGRKTDVKDAEWIASLLRHGLLRGSFIPPRDQRELRELIRYRRSLIDERAREVNRIQKVLEGANIKLSSVASDVLGKSARSMLEALIAGNEDPEALSELALRRMKNKKHDLQRALKGLIGPHQRLMLWTQLQHIYELDALIQQLDEEIKRRMLPFEEDLERLDTIPGVARRTAEQIVAETGTDMSRYPSAAYLCSWAGLAPGNNESAGKRKSGRTTKGNPKLRRALVEAARAAARTKNTYLSSLYHRIAARRGANRAAVAVAHRILVIVYHLLKNKQNYHELGPQYYEERRREQIAKQALRKLQSLGYNVVTIEPVNQTA

SEQ ID NO: 202697 - protein, 332 aa, unidentified
MQGRALKEEKLMEKEKVYVGIDVAKASMDMAVHQSKQRWSFTNDDEGISQAVSCLQELAPVLIVLEATGGIELPLTAALAAAGLPVAVVNPRQIRDFARATGKLAKTDAIDAQVIAHFAAAVKLTPRPLPDAQAQEFSALLARRRQVVEMITAERNRLRSTYSKVVRGFIKDHIARLERELAKLDNNLRRSIRGSSVWREKDDLLQSVPGVGPVLSATLLADLPELGTLDRKQIAALVGVAPLNRDSGNFRGKRTVWGGRAKVRATLYMATLAATRHNAVIRAFYQRLCAAGKDNKVALTACMRKLLTILNAMLKHRTPWRYGNSYIIGPCS

SEQ ID NO: 202698 - protein, 349 aa, unidentified
MRTKPKPNATAYGIDIGKKVFHVVSLDADGRPLQRAKFSRETLMNFFEAADSALIGMEACAGSQWLARKLAAFGHDAKIIPAKFVKPYAKSNKSDTIDAEAIAEAVTRPTMRFVQVRSEAQVDLQALHRIRDRLIRNRTGLMNQARAFCIEYGLAMRTGAGGFHADIRRHLADSENDLTGTMRALLSDLLDDLAHIEKRVAELTKEIEAIAHSNETVRRLLTIPGIGALGATALVAAAGDGRQFRKARDMAAWLGLVPAEHSSGGKQTLLGISKRGNGYVRRLIIHGARSCFLHLHRETHALGRWLSALEERTHRNKAVVALANKLTRIAWAILTRPGENYLRTKGAAA

SEQ ID NO: 202699 - protein, 412 aa, unidentified
MNPVVGLDVSKGESQVQAFLDKGKPYRKSFSIKHTLDGLDRLLEFLREIEKLADGKQPSVILESTGQYHMPVIQFLEEQQYVYIIVNPLISHRARSTNLRKVKTDAIDAYQLCELYYKEELEPYKKRGIHLLNLRNLTRQQETVSSTAVQTKLQLQSILDQIFPEYRGVFGDLYSKISLQILSIFPTSKEVLSVSESDLTNKIAELCTTRSEKWAKEKAIKLREAALRNPFQNNLYQSHIFNLRMFINIVLQYQEHLSKLAAEIDALAKEIEEYEIIQSIPGVGEKIAATIISEIGEIERFNHPKKLVAFAGIDPSVYSSGRFTASINRITKRGSSRLRQALFMAVQCGIRDARKQKTSEEIIPRNKKLRKFYDKKREEGKPFRVAIIACANKLLHWIYALLKRKEAFQNAV

SEQ ID NO: 202700 - protein, 364 aa, unidentified
MKKLTTAATNWMGKQQGLTIGLDLGDRSSHYCVLDESGRIVVESKTATSPKAMEAVFGGMTRSRIALETGMHSPWVSRLLSRLGHEVIVAHARNVRLIGESRKKDDRLDAQTLARLARIDPELLCPVKHRSAKAQADLSLIRARAGLVRARTALVNTARGLAKSYGQRLRGCNVRNMNPEKAEALSPELQAALQPLLAGIEAVSETIVEYNERIEKLALQNYPEVTLLKQVKGVGTLIALTFLLTLEDPHRFGKSRDVGCYLGLQPGRRNSGQSEPQMHISKEGDPYLRTLLVQGAQHILGPFGPDCDLRRWGLKLAERGGRNGKKRAIIATARKLAVLLHHLWVSGEVYEPLHNNRTAIAVAA

SEQ ID NO: 202701 - protein, 341 aa, unidentified
MKNKSFIGIDISKNVIDVSIFCEETPIKDFSHDVFNNSRKGFGEMCTWLKKNHVVLSNCLFGMEFTGSYSMELEKFLNARNYQFCMLSTHVVKHYPMGPKDKSDKIDSAKIADFLYRYDGTECVKPYKMPDKTMQRFKALMNERKFLVEQRTCFMNRRQLCITKEDAQLYDGYIKKFSRDIENIELEEQKLLATDDSLLSTYKNLLTIPGIGFVNAINVIVITRNFTAFETARQYASYVGVAPHFRTSGTSVKWRPRPSARCDGQAKADLSMAATVVVQYDAELQSFYNRKLGGKQDSDTKRKALNAVKFKLVLRMFAIGKQNRKWEPLDSKSSNEKLAIS

SEQ ID NO: 202702 - protein, 334 aa, unidentified
MLYIGLDIHKKFTQACVLDSNGRFVCNERIRTDVTDIGHWFERIETITNDELVVAMEATGFYFWIYDCIAARGHEVKVVHPTKVKPLMRARTKNDKNDAYMLADLLRSRCLEGIYVPSKEVREMRELTRHRESLVGKKGDLKREILALLLQRGTTVPDEYRTNFSQKHIARIRSLDDFILDEKLDLLELVMEKIKNIELHLDDRYGQDEEVQLIRTVPGIGLVTASVIKAEIDDVTRFSSAKSLAAYVGLTPMTYQSGEKEWGSHTRNGNNRIKHVLIEAMLFHRQHCPDSRISRYDQRKRVAIGRQKSVIATARKLMEAIYFMLVRRQAFHAH

SEQ ID NO: 202703 - protein, 349 aa, unidentified
MGEVSTIGVDIAKSVFQVHGVDADGTVVIRRRVGRAKILEFFSKLRPCLVGMEACATAHHWARELKKLGHDALLMPPTYVKAYLKRGKNDAADAAAICEAVTRPSMRFVPIKSVEQQSTLMLHRTRDLLIRQRTQLINALRAHLAELGLVAAKGREGLCQLVTVVTECGDERLPSNARFACQAIVGQLHAVQTQISGLDKRITQTHRANPDSKRLDAIPGFGVILSTAVVATMTDPKAFKTGREFAAWIGLVPRQNSTGGKDRLGSISKQGDRYLRRLLVVGAISIVRTARMWPDKYPWLIELLGRRPAKVVAVALANKMARVAWAVLAKGETYRAPTRLSNAAITVAA

SEQ ID NO: 202704 - protein, 370 aa, unidentified
MVERTTRYLGLDVSKATIAVAVAEAAGQPELYGQIVNDPSAVRKLVGRVGGRGFRLVAAYEAGPTGYALHRQLTELGVECQVVAPALIPRRAGDRVKTDSRDAVNLARLLRSGDLTPIWVPDEDHEALRDLVRTRYDAKDDLRRARHRLAKFLLRHGANPPAGVKAWSLRYQTWLNQLRFQRVPAQIVFEDYLATERGAADRIRRLEADLRRCAEASPQLATIAALQVLRGLAFLSAVTIVVEVGDFRRFSDARRFMSFTGLTASEYSSGVSRRQGGITHAGNRYLRHVLVQAAHNARFVPSLDGAIKRRLEGLPPDLVEVSLKAQQRLHSRYRHLDRRIGRPKAVTAVARELAGFVWDIGRRMEAAEAA

SEQ ID NO: 202705 - protein, 342 aa, unidentified
MTIVTVGIDLAKNVFAVHGVDAAGKPALVRPSVARSNLLELIATLPPCLIGMEACSGAHHWAREFEKLGHTVRLMAPKFVAPYRLSGKRGKNDAADAAAICEAVTRPQMRFVPHKSIEQQGQLMVHRTRQGFVEQRTATLNRIRGLLSELGLVLPLKAATVRRAELARLEELPGWANTVIGDLLSEVTRLDERIAEYDRHIALMARHSTQAQQLMQLGGIGQTTAMALISTVGNGHDFACGRSFSAWLGLVPGQYSSGGKQRLGRITKAGDAYLRSLLVMGARAVLAAAMNTRTPKQDPISRWARSLAERRGYWRAVVAIAAKNARMCWAVLQRGEAFKMPA

SEQ ID NO: 202706 - protein, 350 aa, unidentified
MTISHYIGFDVHKKSISYCVKTADGTITEEGKLRATRQVLREWAGKRQQPWHGAMEATLFSSWIYDALQPFAAKLEMGNPSMMKAIGAAKKKSDRLDARKIADLVRCNLLPACYVASVEMRELRRLLRYRNTVVAQAVQMKNKMSGLLMEVGAEYSKQQLHGKKYFTELMGELEEVPESVKDMLRLSRSALEMFETTQRQLLNRLGKEPALVKRLELLRSIGGVGEVTSLTWALEVCDPQRFPSIGDALSYCGLTSALKSSADKQQRGPISKQRNPHLQTVLIEAAKLAPRWNSQLAELHQRELQRGNRNRATLAVARKLVAYLLAVDKSGKRFEVRNPPAKEMEAEKVA

SEQ ID NO: 202707 - protein, 366 aa, unidentified
MTSVSSVAELIHLGMDTSVKEIVVAVLRPGEEVPVVDRIPGDEESVRRLIGRFPDRRLLSACYEAGPGGYELHRLLTSMGVACDVVAPSLIPKGSSDRVKTDKRDSVRLALTHRAGLLTPVRVPSPAEEAVRDLVRARGDLLDDRKRMQQRLNAMLLRHGRVWRGGKKWSYAHRAWVDRQVFDEPALAEAFSLYRGGLEAREAELTAAGARLAAWAAREPLAGPVARLGCYRGIAQLTGLTLAAEVVDWRRFASARAFMGFAGLIPTEYSSGSRTRRGHITKAGPEGVRTALIEAAWAYRYRPAIGATLHRRQAGQPPETLARSWKAQQRLHAKYQKMTARGKPPGVAVVAVARELAGFVRAEMIT

SEQ ID NO: 202708 - protein, 400 aa, unidentified
MISVGIDVSKGKSTVCILKPYGEIVSKPFNITHTQKDLSELSSMLFRLNDEVKIVMEATGIYHLPVLTYLQEKGFFVSVINPYLMKSYRNESLRKAKTDKIDSRIIANYGIDHWFKMKEFQTSGEIYEELKLLGQQYRHYMKLHLLSLAELTHLLDLTMPGIKNLLASWNETNRKDKRSDFVERFWHYDVITSMSEQEFTEEYILWAKEKKYVPSQEKAKVIYTLAQESIPTLPSETSSVKILVTEAVRVLKEVDANLGLILSRMQEIAKTLPEYSVVREMGGVGNTLAPKLIAEIGDVRRFRNGKALVAFAGIDPPPYESGQFVGCNRKISKRGSASLRKVGYETMRSLKMRSRPEDPVYRYVVKKESEGKSKKSAKIAGLNKFLRIYYARVTELYKNI

SEQ ID NO: 202709 - protein, 367 aa, unidentified
MEKVVSTGFGCHYSQEMEEAMNKPKHYVGIDVSSKTFTSSIGCMGSKWQIQVKPRQFENTIDGYAACLHWLQQGDALPENAIICMEATGVYNECLAHFLVANRYQVSIEAPLKVKRAFHPEGHKSDPVDSTQISEYAYRFWDELRIWQPRKEVMEQIKTLLTVREQFVVEKTAHKNALGALKRKVIRTPLAETIHETAITQLKSNIKKIEEEIQRLIDEDPDFRNTIRLLMSIPGVGMMLAAHMLVVIQSAPQALSAKELASFIGICPYEHSSGSSVHHSSTSRHYGPPGLRRLLFLAAMSVRTHHPKYQQYFYRKLNEGKPPMLVINNIANKLLKIMVAVLRSNTPYITNYQSVNPGMFKMALTRS

SEQ ID NO: 202710 - protein, 343 aa, unidentified
MKQISTIGLDLAKHVFQVHGVDEEGVVIVRKRLRRSDVVEFFAKLAPCTVGIEACASAHYWAREIGGLGHTVKLMPPAYVKAYVKRGKNDASDAEAICEAVQRPTMRFVPVKSAAQQASGMIYKVRELLVRQRAQATNAFRSHLSELGIVAAQGRSKLADLIDVVRDANDSSLPTAARMALQELAGQIEALSARIERLDEAIVAQVRSSEAGRRLTSIPGVGPITAGAMLAMVPDPGSFRSARHFATWLGFAPRQKSSGGKQRLGSISKQGNRYLRGLLILGAANVLRFMRKNAVSAWLAALRQRRPFKVAAVALAHKMARIVWALMVKGGVYRAARAAIATS

SEQ ID NO: 202711 - protein, 397 aa, unidentified
MACDCEVPRRLRVSGWRGLQRVSLVSWLCALGEAKQSGYEIIVSLGQSVKLRPFGVRSVAAMCLFNSNSYKSDGTPEVLVSSYLQGGVSHVKEHVVYCGIDVAKGQLDGALLGKRWQVPNTKAGIRRLIKMLRQRNTCPQVICEASGGYEQDLVELLHQAAVPVTLVQPQRVHQFARASGILAKTDKIDAQVLVRFGQALAPAPNAAPGAQTLLLRELDRQRAHLSGLLVAEQNRRAQLRDPSLRQLSAQLIKQIQGHIVRIDARTQAIIAADQELKAKAKMLTSFSGVGLRTATMLLAQMPELGQLNRREAAALAGLAPFNRDSGTWRGQRRVCGGRSLVRRGLYMAALTAARRNHILAPFYQRLRAAGKPPKVALTAVMRKLLIALNSALSPTPA

SEQ ID NO: 202712 - protein, 461 aa, unidentified
MAGVVIGIDPHKGSHTAVALDVHEKQLGRLRVRASSRQVDGLLEWASGWPRRRWAIEGARGLGQLLAQQLIASGERVLDVPPKLAARVRLLDSGQINKNDPNDARSVAVAALRAHELPELAAEDHAMVMRVWARRYHDLARLRTQVVCRLHAVVCELVPGGVRKYLRASQATDVLDRIVADSPVAQAKLELARELVADLERIDAQRREAKGRTARAVAATRTSINDVYGVGPIVAGTVLGYVRDIRRFPTRDRFASYNGTAPIEVSSGDRKIYRLSRRGNRQLNHAIHMAAISQIRHHDSEGRAYYEKKIAEGMTGKTALRALKRKISDTLYARMIDDARHLAAKDPGGHTGNDSASSAAGSHPETPALRKSHSRATANSKTGTGQRPLTLRPAPDRRRTSRRAAGVQVEPRPGPHRGRRQDRPNGQMSRSPLRTDRVIQPCVKIAGPAHSWVTAFPAPGP

SEQ ID NO: 202713 - protein, 409 aa, unidentified
MVGIDVAKEIHYARAFDYRGIELAKLLKFSNTAEGFQKLEQWMQDICQQHNKTDIIVGFEPTGHYWFALGDYLKNLGYRLAIVNPFHVKRSKELDDNSPTKNDRKDPKTIAMLVKDGRYREVYIPEDVYQELREAIGERDRLVQRMTSIDNQVNRWLDIHFPEYQTIFSDWQGKAALLTLRHFPTPEKIVSAGPEKIEAIWKASMKRSAGLKKAQELVKVADGSIGRKTGLVTAEASLQNLLTEYELYRKQYEQLEQLMMDLLKQVPNAEKLLDIKGVGLITVATFVGEVGNINRFQDPRQIQKLAGFNLVENSSGKHNGKTRISRRGRRRLRHGLFMAMITILATNQEFRLLHQKNLTREKNPLTKMQSIIALCGKLIRVFYGLLRNGTDYSAEKMLGDIELGMRAAA

SEQ ID NO: 202714 - protein, 344 aa, unidentified
MQHYVGLDLSVKETSVCIIDKAGKVIREVKVATKPVPILAVLTEEALAIERIGLEAGPLSQWLYGALAEAGLPVICVETRHMKAALSAQINKSDRNDARGIAQMMRVGLYRPVHVKTLASQKRRMLLTSRQLLQAKALDIENDLRGTLRNFGLKVGMVGTVKFEARIRELVADHPDLAAIVEPLLIARRVLREQLGVLHRQLLEIVRHDEVCRRLMTTPGVGPVVALTFRATVDVPSRFASSKAVGAAFGLTPRRQQSGEIDRMGGISKCGDGMMREMLFEAALVLMTHSRKWSWLKAWGLKIARHRGMKRAIVAVARRLAVIMHRMWVDGTEFRWTREEAAAT

SEQ ID NO: 202715 - protein, 354 aa, unidentified
MSQTLNTAIAVIGIDIGKNSFHVVGHDARGAIVLRQKWSHGQVEARLANMPPCLIGMEACVGAHHLSRKLASLGHDARLMPAKYVRPYSKGQKNDFNDAEAIAEAVQRPTMKFVATKTVEQLDLQALHRVRERLVSQRTGIINQIRAFMLERGIAVRQGIGFLRTELPSILATRTDALSPRMLRVIEELAGDWRRLDQRIDSLSGEIEALARQDQACSRLMTVPGIGPIISSAMVAAIGTGDVFSKGRDFGAWLGLVPKQISTGDRTILGKISRRGNRYLRVLFVQAAWVVLVRIKNWERYGLRSWIEAAKKRLHHNVLAIALANKLARIAWAVLAKGRAFELTRTNDAGVRPA

SEQ ID NO: 202716 - protein, 459 aa, unidentified
MNRKQRRETMRKIQSEDLTLEVLHPDAAGIDIGNESHYVAVPPSRDTQPVRRCGCTTAELKAMADWLKQCGIRTVAMQSTGVYWVAAYDIFEQAGLEVYLVNARDTKNLPGRKSDVQESQWLMKLHTYGLLRNSFRPSQEIRTMRTYWRQRNDLVQSAGRHILRMQKALTQMNVQLANVLSDISGVTGQAIIKAILAGERDPHKLAQLRDRRVKASQEQIARYLEGNWQEDLLFVLKQEQEAYEFCQQQIAECDRQLAQYLQQREDRSQGAPLPEEKRKGRLKKKRANKPQFDLREGLFRMTGTDLTRIDSIDVMTAMTVLSEAGWDMSKWKTEDHFVSWLRLCPDNRISGNKVIGKGRLPTNNPITIALKMAASTLRLSKTYLGAQFRRFRTRLGAPIAIKAMAAKLARLVYRMLRYGMKYVDQGAAFYELQHRQLQVKQLKWKAAKLGFQIVQATAA

SEQ ID NO: 202717 - protein, 401 aa, unidentified
MQQDQQHDSVDVFVGVDVGKGQHHAVALDRNGKRLYNKAMPNGEAKLRALISELRAHGRLLFVVDQPATIGALPVAIARDEGVMVAYLPGLAMRRIADLHAGEAKTDARDAAIIAEAARSMPHTLRSLRLADEPLAELTMLCGFDDDLAAQITQTSNRIRGLLTQIHPALERVLGPRLDHPAVLDLLERYPSPATLAAASEKTLANRLTKLAPRMGKNLAAEIVQALNEQAVIVPGTQAATIVMPRLAQQLAALRKQRDEVASEVERLVLAHPLWPVLTSMPGVGVRTAARLLTEVAHKAFASAAHLAAYAGLAPVTRRSGSSIRGEHPSRRGNKVLKRALFLSAFAALRDPISRAYYTRKVEQGKRHNQALIALARRRCDVLFAMLRDGTIYQPKAADNA

SEQ ID NO: 202718 - protein, 354 aa, unidentified
MKYFAGMDVSLEETAICVVDEAGRMIKEVRAASEPEALHTALAGFDLPIERVGLEACSLTAWLHGELAAAGWPTICIESRHAKAAMGAMPNKTDRNDARAIAQIMRTGWFRAVHVKTPMCRSWRSLLVARRTVLNEMRTIENVVRAILRETGLKLGTPPRKDFIVRVREMTSGEKGLTMMIEPLLQILGTMLHEFTGLTKQALVIVRAEPICRRLMSAPGVGPLTALAFRATIDQPERFKKSRDVGAHLGLTPRRHQSGETDIQGRISRCGDELTRTALYEAAHSLLIRSKKWSALRAWGMKIAKHRGMARARVAVARKLATILHRMWIDDVDFRFSREQTTNPDVKAIVFTRA

SEQ ID NO: 202719 - protein, 338 aa, unidentified
MEHFVGIDLHKYVSQLAVLRESRSPSQLRLANDVVTVERVLKKLPKGSKIALEAMGSWWWMVELAQKTGHEVFLSHPKQTKAIASARLKSDKVDALMLAKLLKADLLPTVWIPPENQRHVRELLTHRARLVRQRTAVINELRAVYAKRNIDPQAKLQRAQPQVSGAEDLSGYAPRIVGEDVELLGFVNRQIGGLDKELMKIALEDGSAKRLMTIPGVGAVSAVAMSCWIGEIARFSNAKKLASYFGLAPRVRQSADTERHGHITKEGNRMVRALVIQAALVHTRRGKGPSRKHYLGVLKRRGKPIARVAAANKLLGVIFHMLKEPIDYQEFLRRSDAQ

SEQ ID NO: 202720 - protein, 401 aa, unidentified
MNAVGIDVSKGKSMVCVMRPFGEVVLEPFEVLHTAQNLHDLAEKLKALDGETRVVLEATGNYHKPVAFVLHDAGLFVSVVNPVLIHDYDNNSLRRVKTDRKDAVKIANYTLDKWTRLRQYLPEDDTRLALKNCYRQYQQAVAVRTMLKNNLISSLDLTFPDANKLFSSPAKSNGCEKWVDFIGDFWHSECVSSLSSDAFAKKYLKWCQKHGYNFTRSKSDTIYACAVNAASLPKSPTSKLLIQQQVAQLKAVSQSVAAFQQEMLRLSQQLPEFDTVMEMYGVGPSLGPQLMAEIGDIRRFSSKKLLIAFAGIEPQPNDSGKIVGNDSGISKVGSAVLRRTLFLIMTVILKTQPQDEPVFQFMNKKRSEGKPYKVYMMASANKFLRIYYARVKAVMDSKHSK

SEQ ID NO: 202721 - protein, 387 aa, unidentified
MTRVVIGMDPHKRSVTIEVMGPDETVFDGGRYATDQSGYAAMLRDARRWPERVWAIEGCSGIGRHVATRLLADGEQVVDVPPKLSARVRVFSTGQGRKTDATDAHSVALVGTRMAGLRPVVDDQQLAVLRVLADRRRALGEDHTRMVAQLHHLLLELIAGGAKKDLSAAQAKTLLAKVRPRDAAGKTRRRVAAELIADLERIYTRKKAADKELRELVEATGTSLLTLNGIGPSGAARLLIDVGDITRFPTKGHFASWNGTAPLDASSGDQIRHRLSRAGNRQINRTLHIMATVQLRNPTEGRAYYDRKKAAGKTSMEAMRCLKRRLSDIVYRQMVNDAVRAMTGPGGQPGTATQSSATGSHPHTGSSDKSLPGPATTDPTTVLPAAS

SEQ ID NO: 202722 - protein, 437 aa, unidentified
MDGRAKRPKKQKERKQTMNDSEPWQQHRAFGGLDWASQKHSVIVVDPRGKVIEDFEIEHSALGWKKFREKLRPYGSIAFAIETSQGVAVEQLLEAGMRVYPLNPKSAQAYRERKAPSGVKDDRLDAWSFADALRVDGQNWKALRPEDPLIKELRLVSRDEVTLIEQRTAFINQLRHALAEYYPAALEAFEDWTSVSAWMFLQRFPTPESLAQAGKRQWQKFLHSRRLWGSDQGPRRMEIFAHASEFAGTAPTVKAKSLLALSLVEMLFAVQKHLELYRQRIEELFARHPDHDLFGSLPGAGPKIAPRLLSEIGDDRQRFDGDPQNLQCLAGTAPVTKRSGKQRSRKYWPVHQRWACDKHLRHAIHLFAEQSLSRCVWAELYYQHHRKKNQSHANALRRLGQRWLKIIHKMWIDRTPYNAELHHRNQLQHGSWIFQLQ

SEQ ID NO: 202723 - protein, 339 aa, unidentified
MNFIGVDLHKKLITVCVMNQNLKVTARKTLSCDQPDQIVEFFRQFAPFQAVIEATASYLWLVELLDPLAEKVALANPKKLRIIAESTKKTDRLDAQVLAEFLARDMIPESHMPTPRQRQHRRLVRHRQYLRSRLTSVRCRIRSILADYNADRKDLFSAQCGKAYFKQVALSDADRFVIKQMWAEFEDHQARLVALTKKIKTFAAKAPKREAEARQIVKTAPGVGFVTAEVVLSELGDVSRFRNAKTVCAYAGLVPSVRQSGGKRSKDLHITKEGSGLLRWALVESAWRLVTCNVKWAAIFSRLRKRSGKKRAIVAVARKLLCVLYAMLKTSTPYKVMAT

SEQ ID NO: 202724 - protein, 371 aa, unidentified
MDVHSTSYSLCALEPIFGQENKFFFETKVAAEPSNIIKYLDDIESCFANDECTFVTGYEAGCLGFSLYNYLKGRGIDCKILAPTKMSEEKGGKKVKTDKRDARAIAQNLAYGTYSAVFVPTEEDLAVRDYIRMRNDHKAAVKRIKQQINALCMRHGYIYQRTNRTAEHLKYIQGMTLSPLYREILQEYLATMEQLNNKIKAFDVRIEELSKTKRYKDNVGKLACFTGITRSRALAIIAEIGDFRRFLKPLNFAAYLGLVPGEKSSGKKQKRIAITKAGNSHIRKELIEAAQSICRGLPGYKSRALLARQQGNDNTVINYADKASARLRRRYYKLGRCGKKHNVAVTAVARELSCFICGMMNGLTDVQIKKA

SEQ ID NO: 202725 - protein, 319 aa, unidentified
MSKITIGVDIAKKKFDVACLISEKYKHKIFTNDELGFIAFVAWFTPLCGDVNPLICMEATGSYSLPLADFLAKQHYAVSVVNPAKIHAFAKSELSRAKTDKADAKLIARYALTMAPPLWKPTPTNIRELQALVRRVEHLLEMIQMERNRQDTADSTIVDSINTVLATLEAELKATRKTIHEHINNDPDLKKRGDLINSIPGIGNATTAYLLIAMSEHHQFKNAKQIVAFAGLAPALQESGESKKNTHIDKNGDSALRKALYLPALVAWRHNPLIHTFCERLKANGKNGKVIVCAAMRKLIHLAFGVIKSGQPYDPNYAI

SEQ ID NO: 202726 - protein, 377 aa, unidentified
MQKVRWVGLDVHAETIAVAVAEGGGEVRALGMIPNRPEALRKLMRKLGATGRVRVCYEAGPTGYVVYWQLTALGIPCAVVAPTLVPVRPGDRVKTDRRDAVKLARCYRAGDLTPVWVPDAAHEALRDLVRAREAAKQDQLRARHRLGKFLLRHGRRPPQPMAPWTQRHLAWITHQVHFAQAAQEATLLDYLHEVEHAAARVARLERAIDAAILEAPPRMRAVVDALQALRGIAKISAVTIVAEVGDLSRFARARQVMGYSGLGAREHSSGARCRRGGITKTGNAHLRRIVVEAAWAYRHRPAVGKALRTRQAALSPAVTALAWKAQHRLYGRYRRLLAKGKCQQQVVTAVGRELLGFIWAIGRTVETDQAPHQPLAA

SEQ ID NO: 202727 - protein, 354 aa, unidentified
MLIIGCDYHPSFQQISFVDTDTGELQERRLEHHEEAEKFYRDLVVQGMKVRVGMEASGHARWFERLLGELNFELWIGDASEIHRKRERKQKTDRQDAQHILRLLLKDDFPRIWVPSWENRDLRQLLWHRHRMVQARTRMMNQLQAVALNEGLRCKKKLWREAGRKQLEAFRLAPWASRRRQDLLELLDRLNPTIAALSQAIEQEVEKCPVAQRLMTHPGVGALTALAFVLIIERADRFQCGKQIASYLGLVPLEDSSGNRRRLGHITKQGNSLLRFLLVEAAQVTARSLPEWRSKYVHLTMRRGRKIAKVAMARKLAVRLYWMMRKEWDYEQVKKFGSHAGQPGNRHGVKSNIE

SEQ ID NO: 202728 - protein, 410 aa, unidentified
MNNPLFVGIDVSKKDNHVQFLNSSGEKLRRFAVANNQTGVSDLVENIKKVFSNNDINSVIIGLESTSVYGDHLAASLRQDEFLSQVDGSVHVLNAKQVAKFKESYADMQKNDTVDAFVIADYLRFGRISKEVHMDERYIALRNLTRARFQAAQNLTREKTRFVETLFYKFSDLQSSEVFSDTFGATSLAVITEFFSVDDIAYMDLQELADFINEKGKGKFADSTAIAKELQAAARSSYRLSKTVNESVNQLLAIRLIGIKAIQSQIKELDKAIENYMQLFPNTLISVKGIGPVYCAGIIAEIGDINRFSNQAALAKFAGLAWTEYQSGGFKAANTRMINSGNKYLKYYLLEASNKVRMHDAEFNRYYQVKFKEVPNHQHKRALALTARKLVRLVYCLLSTNRLYTPPTQM

SEQ ID NO: 202729 - protein, 344 aa, unidentified
MNYYAGLDVSLRTVNICVINDQGEFIAETKVDSEVTDVVAYFDGLALDILSVGLEAGTMTQFLTYGLQSAGFEVVCMEARQVKAALSAMRNKTDKNDARGIAQLLRSGWYSPVHIKSMDSHRIRLLLSSRKAVLSKCIDLENEIRGLFKVFGIKLPPKLGHGSFDPAVRDIIETDVTLAESLLPLLDARLVLYHCFRKLDNRTRHMAHADLVCQRLMSAPGVGFVTALTYKAGVDDPTRFKHSRTVAAHFGLTPRRFQSGEIDIEGHISRCGDRDVRSTLYTAANAMMTRSSKWSPLKAWGMKLAKTRGHRRAVIAVARKLAVILHRMWIDDTQFQWGSEGARS

SEQ ID NO: 202730 - protein, 365 aa, unidentified
MERNSPVPMLADIVDAVVGVDTHRDTHQVEIALPNGAPLATTTISNDSSGYAELLAWIVDHAPGPRVALSIEGARSYGIGLTRAAAAAGLMVLESEQPSRTTRRGKGKSDPIDAHLAVLAALRLRADRLPTPRSDGDREALRILLTTRDELTTTSTAQTNRLRALLLSGDDADRRVARSKLTDSTLGALARRRQPRDASREQAVRQGEIRRLALALREAGRALKTNRAQMQTIVNDLAPGLLDRPGIGPVCAAQTIASFSHVGRCRNDAAFAALAGTSPLEASSGRTVRHRLNRSGDRQLNRAIHTIANTRMRSCATTRAYVARRTAEGKTTSEIRRCLKRYIARELYRSLTTAMTTTAEGPDQS

SEQ ID NO: 202731 - protein, 410 aa, unidentified
MERVIERGAALDVHKKSVTACVRVPGPEGGRRQEVQTFGTTAAALLALRDWLSAHGVTHVAMESTGVYWKPVYYVLEELFTCLLVNPAHVSKVPGRKTDVRDCEWLAQLLEHGLLRGSFVPPVAIRELRDFTRYRAVLVQDRTREANRLHKVLTDAGIQLASVASNVLGKSGRAMLTALVEGTTDPEVLADLAQGKLRRKLPALREALAGRFRKHHALLVSQLLAHLDYLDEALEDLTAQIEEALGPFASEAARLDAIPGVGPRTAEVVIAEIGVDMRQFPTARHLASWAGLCPGTHESAGKRRPVRTRKGNRWLRAALIEAALAAVNVRDSALAGRYRRLVRRSGHKKAIVAVAHKMLTTAYLLLADGRTYQELGAGYYDAQRKDRDVRRALQALERHGYRVSLEPVAA

SEQ ID NO: 202732 - protein, 394 aa, unidentified
MKLVGIDVGKNSHHFCVMDKETGEFNVTPTSFSNNKEGFDFLINSLKPYSKKSILLGMEDTGHYHVALLKFLLSNGYTVALINPKTTDLTRKMEGGITKNDKLDTITICDVLDTPERKKQYRITKVDRFDLYEQRQLTRHHHNLKEELNVYCNRLQKSIDLVFPEFNTLFSSKYSIVYMNLLKTFGSAEAIASTDIRTIRKCFEIKGRGNRISLTPEKLKECAKNSIGISSEVETIQIKHLVSQITLIKEQIAEIDKKIEEFSITNNSPILSIPGISHFSGTSILAELGDIGNYSKPSQIIKFAGVAPYHYESSQYNAQHTGITKKGSKYLRKTLYQIILPVINNNPVFKKYYLLKISQGKGHRCAQGHCIRKLLRIIYHLLETGQSFDPALLR

SEQ ID NO: 202733 - protein, 369 aa, unidentified
MVTHTLHPIIVGFDVHKDTIMACTFDRSSGEVGTARQFNNIPDRIARFVRTLRASGYEPEICYEASSCGYVIYRQLRALGVECAVIAPTSIPRRAGERIKTDRRDAEKLATMYAGSLLETVQVPDLELEQVRALVRCRLTLSEDLTRSKHRTTRLLESRGHVYREGQNWTQKFWAWLNRITLEGADETVLRVWVEEIHYLEGQIIAVDTDLAHEAEGERFRETVQLLGAFRGVALLTALTLATELGDIRRFSSPRQLMAYLGMVPSEHSSGARTHRGSITKTGNTRARKALVSAAWKYAAKPARSRALKKRQEGVDAHVIATAWKAQQRLYKRFHALAFRKPRSVANVAVARELAGFLWAALQPKHTHT

SEQ ID NO: 202734 - protein, 372 aa, unidentified
MPPCRECDRPMPLRSVKDRCRARVIALHPPSEPVQLPGLVARIIARLGQKEEAMTPAQVYVGIDVAKRRLDIALWPTGESRSLANDPTDINKLVTWLQTQQPQLIVLEATGGYERAAVASLATAALPVVVVNPRQVRDFARAIGRLAKTDTLDAAVLARFAEAVRPSPRPLPDAQMELLRALVTRRQQVVEMLTAERLRLASVQPAIQVLIQKHIAALEKELAHLEEELDRTIRQSPLWRARERLLRSVPGIGPTVTAVLLADMPELGRLDRRQVAALAGVAPLNRDSGQCRGRRCIWGGRARVRAALYMAALVATRHNPVLKNYYQRLLEAGKAKKVALVACMRKLLTILNAMLRDGTAWQETSVTHAIPA

SEQ ID NO: 202735 - protein, 422 aa, unidentified
MNQSLNEEQFAAFIGIDWADSKHDLCLRKSGSHHRESSSLTHTPEAIEAWANALRRRFGGKPVAICLELNKGPLVYALSKYDFMVLFPVNPLTVARFREAFSTSGSKDDPSDAELQLEILLKHRHQLRELKPSSPAIRALEQLVEHRRRLVSDKVRLNNRITSVLKNYFPQVLEWFKDRDTKLFCEFLTRWPTLARVKRARRSTLERFFHTHHVRSAARINKRIEGIKAAVPLTTDEAIIVPNELLLKAMIGQLQMVLGAIREFEDEITLRAQAHADFAIFDSFPAAGKAMAPRLLVAFGDQRERYTCADEVEKYSGIAPVTIRSGNQCSVVWRWRCPKYMRQTFVEWAALSIRQSFWAQAYYEQKRAQGKSHQAAVRALAFKWIRIMYRCWQDRKPYDESTYLQALQRRGSPLFKYLANST

SEQ ID NO: 202736 - protein, 384 aa, unidentified
MDANQVMGADAGNIVLAVSLELSAAQWKVALHDGLRERPAVHAVGAPQAGIRLQGVLELIEQHKLKWALPIHVRVVVSYEAGQDGFWILRALSSRGIECYMVDAASIPVERHKRRAKTDRLDAIRLVTNLRAWLHGERDRMRVVRAPSAQDEASRQLIRDRGQLHKEVLQHRERMRKLLVTLGCWDEVDHRSFARRLAAGQLACHDGTPLPDELRERLQRETARLELAEQQLATLERTLEQRLPTPVRERITYLRRLRGVGHIGASRLMLELFWRQFSNRRQLGACVGLVPQPYDSGQSHVDQGISKQGNRRVRTQLVEMAWGWLRYQPDSALARWFNERTQGTGPNRRARRIAIVALARRLVIALWRYLRDGVIPEGARFKPV

SEQ ID NO: 202737 - protein, 360 aa, unidentified
MSTMTDRGRVVTGGVDTHKDRHVAAVIDEVGRVLGSEAFAVTAPGYRALLAWMRSYGPVVKVGVEGTGSYGAGLARYLAGEGVTVTEVIRPNRQTRRRRGKSDPTDAEAAARAALNGEAAGTPKSHDGAVEAIRVLRVARRGAIQASTRAANQLRDLVVTAPDDLRARLIALPTVKRADTAARFRPGDLRDPTEATKAAMRSIARRYHALQSEIAEIDAELAELVPAVAPAGFLDRQGVGTQVAAALLAAVGDNPGRVTSEASFAALCGVSPVDASSGKQVRHRLNRGGDRQANSALWRIVFTRMAHDPHTKAYVQRRTAEGKSQKEIVRCLKRYVAREVYKSLVGRNAHTVIAPTPAAA

SEQ ID NO: 202738 - protein, 338 aa, unidentified
MTILTVGIDLAKNVFAVHGVNATGGVQLRQPKVARAKLNALVATLPPCTIGVEACSGAHHWARQFAAHGHTVRLMAPKLVTPYRMSGKRGKNDAADAAAICEAVQRPNMRFVPVKSEDQQSRLMVHRARQGYVAARTACINRIRGLLSEFGVVLPLKAEVVRASAREHLEDLPGYANLVIGDLLSEVSHLDERIKQYDKHIHAMAKDCTAAQQLMQLMGVGETTATAIVAMVGNGREFDSGRQFAAWIGLVPGQYSSGGKARLGRITKAGDPYLRSLLVLGARAVLNAAQNKTDSLSRWAMALWQRRGYWKAVVAIAAKNARMTWAVLNKGEAFKLPA

SEQ ID NO: 202739 - protein, 394 aa, unidentified
MATIGIDIGKRQHIAAVHHEGEREARKAILRFNSDRGGFAELARWLQRQGEVSRAVLESSGHYHLNLAAALQRSGVPVAIVNPLESKYFAKRRLQRSKSDPADARTLATLAMVDQPAVRDVLAGAELREAARFAMSLVDELGRIDQRICRLVELGFPELERAYDDPTCVSALAVLRSAPTAAAAARKRTATLAQAARPGGGRRIGAKKAEQIHTLAQDTIAAPELADQIGFQIRLLIAQHDLLEAQIAEAEAHLGTLMDGELVRRLRTIPGAGPAIVATLIAEIGDIARFSDFDKLVAYVGVHPAEKSSGEKGKDPETSWRMSKAGNAYLRTALYRMAIVGIQHNPLIKAHYARKRAQGKSKMNAVGHCMRKALAIVWGVWRSGTDFAAPLTTP

SEQ ID NO: 202740 - protein, 336 aa, unidentified
MKLIPVGVDIAKNVMQVHFINTDTGEIFNKAIRRDKFLEFFTNRSPCLIGMEACGGAHHWARELTSLGHKVKLMPGEFVKAFNIRNKNDTADAQAIWRAVQQPGKAVAVKTEQQQAMLALHRIRSQLMKYRLMQTNALHGLLAEYGEVMRKGHASLVKNVPEILIRLSERLPAVLIDSLREQLSEVERTDGRITDIERRIRELSRDDPGVKAISEIPGVGFLTATAAVASMGSTDAFRSGREFAAWVGLVPRQTGTGGKIQLLGISKRGDKYLRKLLVNGAHSVIQNAREPGPWVTDLLKRRPVNVASVALANKMARIIWAVLSQGRPYQKEAVLN

SEQ ID NO: 202741 - protein, 422 aa, unidentified
MLGIGIDWAEEFHDIALGTQEKGVIEEFRIDHGPAGVTALIERVFRLEPDPAEVRVVLETRHGLLVEALIDAGFTVVPVNPDLVARRRGPARKKDDAEDARICCLLALDRHAALKTLIPHGEIGGELRAIGRDDERATRDQRRLLNRLRADLQTTYPAALVLAGKDLGAPTVLRLLDRWPTQPELAQASRVELIEFARLGRHGWPERFADRVSAALAAPSLPTRDYLVRAKAAGIRLTAVQLLALHEARRDWEQRMAELLLGGPRTGRDHTVKDPDPGIAFPGGEIYLSFPGLGDRLAARVAGEIGEHITQFDHPSGLQCYAGTAPVTRRSGKSDFVVARRLAHNHYLGAAVHQWAFCSLLRSGWAREFYDGKIAAKKSHHAALRALSNRWLEILWHCLIKGVPYDETVHVANRNRALGHAA

SEQ ID NO: 202742 - protein, 402 aa, unidentified
MRADTTGLNVQSGRRPQPNRGARHHAVREHRPHRHRAQLLVVARRRAPAGAKKSRLHRIEGGDTGALLALIAELRSRALTQLGGAAEVACCFEAGRDGFWLHRLLTAHGILVYVLEPTSILVNRRSRRAKTDRLDAEGMLRVLAAWLGGDRQVCSMVRVPTPEEEDGKRPHRERERLVQEKLRIENRIEALLFTQGIRARPSLRSWERELTELRTGDGRTLPPLLRAELDRLRRRLVLILELIRELEAERAAALAAAPDEAMAQKITSLQRVRGIGANFSAVLVREVLYRSFANRRQLASYVGVAPMPYQSGGMDRDRSISRAGNPRARTTLIQLAWLWLRYQPGSALATWFRERVGTLQGRTRRIAIVALARKLLIALWRYVEAGVLPAGVEIRTGTVPAA

SEQ ID NO: 202743 - protein, 347 aa, unidentified
MRFYTNPHQFYCGIDLHARSMYVCIANRDGEILMHRNMKAAPAPFLQAIAPYRDNLVVAVECLFTWYWIADLCAQEGIAFVLGHALYMKAIHGGKAKNDKIDSQKIAVLLRGGMLPQAYVYPAPMRATRDLLRRRMHLMRKRAELLAHVQNTNSQYNLPEIGKKIAYKANRDGVAERFTDPAVQKTIEVDLALITYYDELLRDLELYIRKTAKQHDANTLYLLQTVPGIGDILSLVLLYEIQDIGRFPSVQDFASYCRLVKCSKESGGKRLGTSGKKIGNAHLKWAFSEAAALFLRNNAEGQRLLARLEKKHDKGKALTILAHRLARAVYYMLKRNTAFNIDTFLHG

SEQ ID NO: 202744 - protein, 338 aa, unidentified
MSVAKVIGIDLGKSTFHLIGHDYAGREVFRHKYSRAKLVDFLSVQESTTIAMEACCGAHWLARKCKEFGHEVKLIPAQYVKPYVKSHKNDYIDADAIAEAATRPNMRFVSVKTEEAQLGIVIRRVRSGYIKERTACMNRIGSILLEFGLSFPRGHHQMKNLFQWIADQNEVLPPLLIAELTTQYEYYNQLNVWIKAQEDKLLALNKENDIAKLLQTIPGVGPMTASCCISAVGSPQDFDNGRNFAAWLGLVPFQYSTGGNHRMLGISKRGNKELRELFIHAARAVMWRDKTAEKFFGTWLIDLKCRKPFNVALVALANKIARIAWSVMTKKKPFEIRF

SEQ ID NO: 202745 - protein, 427 aa, unidentified
MNESVADQPIGTPQVAAYVGIDWADQKHDVVLRSVDNPAKAEHQVIKSELNALNDWIAQMHERFGAKGKVLVCLEQSRGALIYQLMAYELFELYPINPSQLAHYRKTFFSSGAKDDGPDADLLSELLMCHRDRLKAWKPDDQLTRELATLNEGRRNAVDRRTELANEIKSQLKLYFPLALQILENDITTALAANLLVQWPTLAELQKVSPSKLRKFFYGHNSRQEKKILERLALIKEAKPLTTDAAIIRPTALRVKLLAQQLKSLLPFIAEYEKRIAELFGSHPDSFLFDNLPGAGPALAPRLLTAFGTDRDRFEVASDVSTLNGIAPVRIASGKRSSVHFRWACPKFQRQSFHEFATHSIRFCPWAQAYYQTQIARGKDHHVAVRALAFKWIRILFACWKNRVPYDPDRYLKALQSRGSEYAQTVA

SEQ ID NO: 202746 - protein, 402 aa, unidentified
MNCVGIDVSKGKSLIAVMRPFGEVVVSPFEVRHTANELSELAGLLKSLDGETRVVMESTGNYHAPVAWLLHGPGLYVSVVNAMLVHDYGNNSLRRAKTDKKDAVKLANYGLDHWLTLPRYIPEEDTRLMLKICYRQYQQYSKVQTMLKNNLISLLDTTFPDANRLFTSPPRADGSEKWVDFVATFWHCECVCGRSEKAFTTQYQKWCRKHGYNFSEDKALDIYASACRHFGVIPKTDTAKLLVEQAISQLQTTSSALAALKQEMQSLAASLPEYPVVMGMFGVGPTLGPQLLAEIGDVRRFHSKKALVAFAGIDAPPYQSGQIDVRSRSISKRGSASLRRTLFLVMSVILQCAPIDEPVYQFMDKKRSEGKPYRVYMMASANKFLRIYYASVKAYLESLEHD

SEQ ID NO: 202747 - protein, 354 aa, unidentified
MPATAQTAIAVVGIDIGKNSFHVVGLDERGAIVLRQKWSRGQVEIRFANMPACLIGMEACVGAHHLSRKLKALGHDARLMPAKYVRPYSKGQKNDFRDAEAIAEAVQRPTMKFVATKTADQLDLQALHRVRERLVSQRTGIINQIRAFLLERGLAVRQGQRFLRAELPRILATPPDVLSPRMARVIEDLAGDWRRLDERIGGLSSEIEAIAGQDAGCERLMSVPGIGPIISSAMVAAIGAGDAFTKGRDFAAWLGLVPRQMSTGDRTILGRISKRGNRYLRVLFVQAAWVVLIKPTVWERHGLKPWIEAAMKRLHRNVLAIALANKLARIAWSVLARGRGFEARKIDEVTVQPA

SEQ ID NO: 202748 - protein, 375 aa, unidentified
MTHINQAFVAFDVAKLRNAVAVAESGRDGEVRYHGEIDNTDAATRKFITKLATKYVRITFCYEAGPTGYGLYRLIKSLDHDCIVVAPSLIPSKPGDRVKTNKRDAVNLVKLLRAGELTAVWVPDDRHEAMRDLARARDTAQKDYRAKRQNISSFLLRYGRHFPGKKTWGKSHLNWLASQKLEHLEQRIAFEEAMLAMRQAKERIERLEQAMRQSMPDWSLAPVVQALQAVRGVDIIGAMLFLAEIGDLSRFENPSKLMAYLGLTPSERSTGDSVKRGGITKTGNSRARKLLVEAAWSYRFPARVSKEKQAKVEAAPRVVREIAWKAQTRLCGRFRTLTRRGKRSTVVVTAIARELSAFIWAINRAVIVNPTMARA

SEQ ID NO: 202749 - protein, 405 aa, unidentified
MDDKLDYVMAIDVAKGKSMYYILSIHGEVVLDAIEYDHTLSSFKLIDLKIREERIKQDLAVFMESTSIYHYPVMRYFLEQGYKVIVVNPNLVKKSSTTFRKTKTDKLDCIKIAETYFKEEIKSNSARINDIYFNLMALNRQFLSLEKALTAIKNRYTRLLDIYVPEHELYYTNSSDKYNKKYITLFQYLPHSEYIQRTRIDRIANILNLPFERKYTKRLTKEAIRLKGISKNAYPGVSKLSSEVENLGQIISIMTYLMSEHERAKTKLITLGKQAKEYKYINSIPGIGEQSASQVIAELGDISRFRNYKQINAYCGLEPSIYQSGKAFYNGRITKSGNGLARKVLYTTIMGIIKSSRSYYPEHPINVYYTKKKENKSTKESVIATSTKLIRIIFSLCKNELTFIK

SEQ ID NO: 202750 - protein, 353 aa, unidentified
MERIYIGVDFHARQQTICYLKIETGELVFCELGHENKEQVRAFYAAFSSQVIVGLEASGYSPWFERMLEELGCEVWLGHATEIRRRARWRQKNDRRDAELILDLMLHEEFPRLHRPAVQSREVMRMLRYRQKLIKMRTMSKNSLQALALQSGLARRSRLFTREGKHELSIALMSPAMQWQRDHWWQLLQSLNEQLQETMGWLKTHAQGDVKVARLRTHPGIGLLTALCLVHTLQPVDRFRNTRKVAAYGGFDPVERSSAERKCFLGISKAGSRILRHLVVEAANVAVRSDEDLKRFYKRLAERRGRPKAKVAVARKLLIRAYIMLRDEIDYAEFRHRAVAARLAREITKASSA

SEQ ID NO: 202751 - protein, 416 aa, unidentified
MKYAQILVLAETPPGGLTAGIDWGSADHAVCVVDTAGQVRARFTVAHDRAGIGKLIAGLRAAGVSEAAIERSDGVLVEALLEAGLTVVVVTSRQMRNLRSRYGSAGAKDDRFDAFVLADALRTDRARLRPLVVDTPATAALRAAVRARRDLVAHRIAACNQLRAHLAVAFPGAVGLFASLDSPISLAFLARFGSHDAAGQLTEDDLAAWLHTVPHRGKAARPGQLRARLQAAPRGATGPDGAALVPVTGALVATLATVSAQVQALEAEIAVQLAAHPDAHIFTCLPRAGTVRAARLLAEIGDCRARFPDPESLAGLAGVAPVTRRSGKHISIGFRWAVNRQLRDAVCDFAGDSRHASPWAAAIYDAARARGKDHPHAVRITARAWTYVIWRCWQSGAAYDPAKHNALQRVLEQRKS

SEQ ID NO: 202752 - protein, 430 aa, unidentified
MKSNTQNAKIEAITEKTLVLGIDVGSEMHYARAFDYRGIEYSKKPFKFSNTEAGFVTFKEWILDLKERHEKDKVVPGMEPTGHYWFNLGKFLQDNEMKPVLVNPHHVKKSKELDDNNPTKNDRKDPKVIAGLVREGRYMIPYLPDGVYADLRTASNIRFQLQAELTRIQNRISRWFNIYFPEYKTVYGKPDAKSGMLILKAAPLPEDILTLGIDGVNQIWRDAKLRAVGKARAKTLIEAAEHSVGSKEGAVSARMEIRMLLEDYESRNTRLQEVMVLIEELIRKIPMAEKLLEIKGVGIRTVSGFLAEVGDISRFNNPKELQKLAGLALVENSSGKHKGETTISRRGRKRLRYLLFEVAMSLVAKNPEFRELHNYYTTRRLNPLKKMQSLMAIAAKLIRVFYAMLTKGVDYDPKKMVSDIKRPAVYLQAA

SEQ ID NO: 202753 - protein, 314 aa, unidentified
MTSYHNFIGIDIGKFNFVVAIYSQKETKEYENTSTGILDFLKDYSELLNNSLCILETTGGYELPLLYTLCSKQIKVHRADTRKVKSFIRSYGNAAKTDALDAKALAKYGFERHEQLAIFTPQSKRSLDLFALVQRRCDLKQMLVAEKNRLKGPGGAAIKKSCTQMIKTITLQIDSITAQIEALIAGDPILAEKQKILKSIPGIGNIVAFELLVLLPELGTLNRRKIASLAGLAPRANDSGKYQGYRKTGNGRKGIKPTLFLAAMAARNSKSDLGLKEFYEKLLSKGKKKMVALTALMRKILVVANARLKSHLFA

SEQ ID NO: 202754 - protein, 370 aa, unidentified
MHHPTTLSVGLDVHKDSISVAYAADGRPEPAQFLGPIGTRQCDLDKLLRRLQSKASHLVFAYEAGPCGYVLYRYLTEKGFDCRVVAPSLIPKRPGDKIKNDRRDAVELARLLRSGDLTSVYVPTVEDEAIRDLCRARDATRVTLRSAKLRLKSFLLRLGLHYTGKANWSAAHRRYLAKVVCPTPTQQIVFQESILAVAEQVERLGRIEQELLDLAPSWRLYPVVEALQAMRGVQWVVAITVVAELGDLTRFDNPRQLAAFVGLVPSEHSSGAKRRLGAITKTGNSRARRVLIEGAWAYRYPAKVSAHIQTRIEGLPKAVQDIGWKAQVRLCKRFRRLSSRGKNANVVVTAIAREMLAFMWAIAREVSIKV

SEQ ID NO: 202755 - protein, 416 aa, unidentified
MQVLYPRCAGLDVHKDTVVACVRVIERRKVKTEVRTFKTVTSQLLALSAWLSENGCTHVAMEATGVYWKCVWAILSDGEFTLILANAAHVKAVPGRKTDVNDATWLADLLAHGLIRGSFVPDIPIQELRCLVRTRKQLVREQTRQVQRVEKTLEDANIKLGSELSDVMGQSGRAMIEALIKGETDPVTLAKLAHWRVKATPSGLREALRGRVTRLHRFLLELHLQQIDALMAAIERIDQEVDAHLTAKLSSFRAAIELLTTIPGVSELSATIFLSEIGTDMSQFATAGHLLSWAGLCPRNDESAGKRRSNRLRKGAQWLKTTLVQCAWAASRKKRSYLQAQFHRLRARRGPKKAICAVAASILTAVYHILKDGTLYQDLGPDHFHRRSKEAQTRRLVRNLEHLGYAVTIKPVAPAA

SEQ ID NO: 202756 - protein, 471 aa, unidentified
MHKEKQKKSPGVEPRKVIIKMREGLRVEHPHAGGIDVGDTEFSVAVSGKEGGYEVRSYGTFTADLDCIVKDLQDNGIDTVAMESTGVYYVPLYLKLEAAGIEPYLVNARHAKNVTGRKHDDTDAIWLQKLHTCGLLQKSFQPADQARAYRDLVRQRKKLVQGGSDAVRRMQRALELMNIKLHTVISDILGKTGMSMIRAIIDGERDARKLARFRDKRIKASVEIIVRSLEGIWRQEHLFVLKQSFEAYEFSQKQLAECDKQIRLQLDTLTAIVREGEIYNEDTKELDSKSDSGKRNRKSKQIARKNQIKFDARSYMNKLLGVDLCEIEGISEITVMELVAEIGTDINQWKSEKQFTGWLNLCPNNKLSGGKIISSRLMKKKNHAGLCLRMAALTVARCKTPLGNYYRKMRGKLGGKGAVVATANKMAKIIYAMLKEKKPYDKSIYEKETEINTIKQINYYERQLAKLKKVA

SEQ ID NO: 202757 - protein, 341 aa, unidentified
MKNLFIGVDFSKEKVDVAIIFADGLTETAARVFNEFKTTVSGYRQLVKWVEQNSYGIDPSLWLFCGENTGGYSNGLCKFLYGRGYDMWLENAKSIKDASGLRRLKSDRADASMIAEYAMRNHDKAVMYKPLNESLEQLRELFLFRQTLVRYRCSFQVRREEKRLTMDKSPVKTMISQIGRHMVTTLEKEIEKVNKRIADLIKSDDELTEVFTIVTSVPGIGTQNAVCLMVYTDNFRRFNYDSRKIACYYGIAPFGKDSGTSVHSDPHVHYMANRQIKAMLTQAALAAVNYNHVIARYYKRLVERGKKKQVALNNVKNKLVHLVSAMVRNRQLFSPEYKISA

SEQ ID NO: 202758 - protein, 390 aa, unidentified
MERPMPRLNDLSRSLVTLEQDATLIAVIEMSLTSWLVAGIVPGVERQPLKKLGVDERALLKLLHRWREEAEKAGHRIKRIAVAFEAGRDGFWLARWLRAYGIEARVIHASSVAVSREHRRAKTDRLDTELLKRAFLGWLRGERDHCRMVAIPTIKDEDAKRPNRERESLVGEQSRIVNRMKAALIRLGIRGFNPKLKKAAERLDGLRTPEGDPIPPNTLAELRRDMVRRRLVSDQIRQIENARLERLEHASGDGPHAMVRLLARVIGVGTETADMLVQEVLSRNMRDRRAVARYAGLTGSPDESGKKRHEKGLARSGNARVRRGMIQLAWRFLMFQKDSALAQWFRARTENARGTRKTMIVALARKLLIALWWLVREGVVPDGVVLRPAQ

SEQ ID NO: 202759 - protein, 364 aa, unidentified
MAKGGMLSKSSELQASFDVEGESITIGIDLGDRYSYCCVLRGDGRVLTEGRVRTTADGLAKHFQDLPQTRIAMEVGTHSWWVSRALSEWGHEVIVANPRAVQLITAGNRKSDQMDAEVLARLARVDPKLLSPIQDRDSATYPDVAELNSRDLLVRTRTKLINAVRGMIKTAGFRSPSIGPESFASKASPLIPEQLRSPLMPLVQTISEVTLRIRDSDKRLERIARDRYPETLRLRQVHGAGPVTALQFVLTVGDPLRFHKSRDLGPYIGLVPKKRQSGDVDKQMRISKAGNRRLRSLLVQCSQFVLGRFGPDSDLKRWGSAIASRGGKNGKRRAIVAVARKLAVCYTGCGSLETSTTRYITPRR

SEQ ID NO: 202760 - protein, 367 aa, unidentified
MKKISTAAAKQTRNFQDQKLTIGLDLGDRTSWYCVLDGAGEVLLEQKLATTPKAMKEVFGGMPRSRIALETGMHSPWVSRLLGELGHEVIVAHARNVRLIGESRKKDDRLDARRLARLVRIDPQLLAPVKHRSAQAQAHLMVIRARAGLVRARTSLINTARGLTKSYGERLRGCNPRNLNPEKAQELSPELRLALEPLLGEIESLSERIGEYNEQIEQMSKESYPEVARLKQVKGVGTLIALTYVLTLEDARRFGKSRDVGCYVGLQPGRRNSGQSEPQLHISKEGDPYLRTLLVQGAHHILGPFGADSDLRRWGLKLAERGGKNGKKRAVIAVARKLAVLLHRLWVSGEAYEPLRNHPKVGLATAA

SEQ ID NO: 202761 - protein, 333 aa, unidentified
MTYYLGVDLHKRTQTWVLLNEKEDTPIFTKVYGVTPEEVSVALVNVTKYGDIVAAIEPVCGWQWQVDEMRKAGITVQVSNPRKTVAIAKSLQKTDINDATTLAVLVRTGLLYTSTEVTPETRKLRALVRERSFLIQLRASMQCRLESVITREGRHLLAGTTSSMKGTNLILASDYPEWKRAVLIRADMTTYINQIERILDPYTNTLLIKLLTTIPGVGRITALTWVAEISDFANFSSPEKLCAFAGLVPTERSSGGVQKLGHITKAGSTHLRYMAVEAAMHIREVEQTAHLYAFYDRIKNKRGAMCARVALARKLLTIAWHMVNKNEPYKQMV

SEQ ID NO: 202762 - protein, 325 aa, unidentified
MSSHEIVGIDVAARTLVAIGDEVVLQPAYANTPDGRRALVTALGRSKRPVRVVLEATGIYFLDLACELAAAGIEVMVLNPKAAHHFAEAILQRRKDDPVDAAMLREYGRRMAFVRWTPPRPELFAVRALAREAQAQTKAVTAAKNRLHALRAATLTPVRLIRALERQIRASEALIDQLITAARELIAGDGELQRLFERTDSVPGFAAKGAVMVMAELVILPPMGARQWVAQAGLDVREERSGTSLARKPRISRRGNKRLRQALFFPALTAARCCPEAGAFVDRLVARGKTKLQAIIALMRKLLHALHALWRNNEDFNAAKLFAKA

SEQ ID NO: 202763 - protein, 356 aa, unidentified
MLYLGIDQHARQITISLRDENGDVLQARQISTQPEKINAYFQRLTRERLRNGESFVAVLEVCGFNDWLIRMLRDYRCHKVILIQPDDRKKRKTDRRDAAALSELLWVNRNRLLHGKPVRGLRQVDIASTSDQENRRLTTLRKDAGGDLTRIINKIKQILRRHNLHWEMPTKTFPTVAAIAWLKQLVLPEIDRLAMNHLLTAVEHVQQRMKELEKVIAQRSDARKETTILSTLPGMGSRFTALSLLCRIGRVERFPRACSLANYWGLTPGCRNSGENNQRLGRITKAGSTTARWLLALLVYKVCRKDARLREWFKRIKRRRGSSIARVAVMRKLATIIWHMLSKRKTYAECRALAAA

SEQ ID NO: 202764 - protein, 401 aa, unidentified
MEGPIVSIDVSNGNSHYMCFIKNNKRFGKVKKIDHDIEGFKRLLEDIQKLEAETNEKVCAVFEATGVYTKPLERFLSKNSIKTYMINPLESARKRKEEIHNKKTDKLDPISISKVYYDKEEMMELKKKDETYNWLRKKNRLYEDQLNHLRKYKVTFQNQLSICFPGYLDLFKDGYSDIPMTILKKYPHPDLLKNKKAETVARYLEKNTCHNHKVSLEYALKIIEFAKKTYPGCEKDDVEVEIFKILLDKVIETQRECEKTLNEMITIASTLEEYRYILSIDGIGTNLAARIIAEIGDIEEFKSREALVAYAGLDPHIYQSGDQDGKHLKISKKGNKYLRCLLFLAVGCSIRGAKDNPVNRFYQKKKQQSNPLNSKAAKTACTAKLLKIIYGICKNKTTYER

SEQ ID NO: 202765 - protein, 411 aa, unidentified
MAASAVQPVRFMGLDMHKHYAMVGAVNKEQEVLLRPRKFTWPDFDRWSKQHIGPGDVIVIEASGNAWHVYDQLTARGATVYVANPLLVKWIGSAPVKTDPHDTLKLAKLLAAGMLPTVWVPPAPVRALRTLIGQRQRWIKQRTQARNRLQGLLQDHNLLPPEGDLFAPEQRPWWLALDLAAAERLLVAQDLLALDQLAPLADQVETAIEMQSTSEPWVSEIPFLIQQTGIGLLTAMTLLAAIGDISRFEHPNQLVGYAGLGARVHASGETHNTGGITKQGRRELRTAMVEAAWSAVTHNAFWKAKFARYDRRLGNGKAIVAIARQMLVSVWYLWHNRTVDRHTDALAIAHKLWTWAESGGKAMRHGLSCSHFVRFQLDQLGIGQELTELHYGSHVYRLPPAGSVASLPAAA

SEQ ID NO: 202766 - protein, 320 aa, unidentified
MSASSVVVGIDVAKAHVDVSVLGAKLDAQRFDNQAEGHSALTAALQPLDVALVVMEATGGYETELACALQAAGLPVAVVNPRQARDFAKSMGRLAKTDAVDARMLAEFAAVLLRRQDLARFLRPLADPQQQWLAALVTRRRQLLAMLLSERQRLQITPKGLHPSIEAIVAAIKAQLDDIEAQMVGHVREHFAELDRLLQSASGIGPVASATLIAELPELGRLNRRQIAALVGIAPMANDSGARSGRRRTQGGRFDVRRVLYMAALTASRRNPAIRAFYERLLAAGKLPKVALVACMRKLLTTLNAMVRNNKPWDNSLHGA

SEQ ID NO: 202767 - protein, 347 aa, unidentified
MQILSLDLGKNKTVGCDYERESGKHRFKTAFSTRNGLAQLVKEVKPDRVVIEVCSIAGWVCDLLREMGIEVQVANTSEDAWRWRKVKKKNDRCDALKAAQLSAVNQIREVHIPTIDVRQWRALIAFRQQLVQRRTRVKNHVRDLLLREGQILPRGGKCWTQLGVGELEAMAQPLSEVGMNELWRGELAIELRQLRAVQAEIEVAEEKLDAIGAADPRVRLLRTIPGVGPRLAEAIVALLDRPERFRKASEVSAYIGMVPKELDSGETQRRGKITRHGSRLVRSLLVEVAWAGLRHNPWVRETYQRISGGKKSRKKIAIVAVGRRLLVRCWAMLRDGTSWQWPAAKVT

SEQ ID NO: 202768 - protein, 424 aa, unidentified
MANSVYDPSRYCAFIGIDWADKSHDVCIQEKGSDEFEHTTVEHSPEKLTTWILELAERFNYQPMAIAIETSKGPLINFLSPYPFVTLFQVNPLSLSHYRKTFRVSSAKDDINDGELLCELVSTRLRRLRVIQDDDEQTKELGILCEQRRHIVEERKRTGNQLTAQLKQYYPLALEVAGEEIHSTLACEFLLRFPTLQDIQAASDKTVIKFYKEHNCRKGDVIDKRIGLIHKAQPLTTNKIIIETSAMTTKLYARLLLTLNEAVSEYDKKISDRLSKHPDSHIFTSLPGAGDILAPRLLSVFGTDRDKFDSSDDVQKYSGVAPIIRQSGQMKITSFRYACPKYIRQSFVEFAGHSTEYSMWAKAFYQMQRDKGKSYQSAVRALAFRWIRIIYKCWKDNKPYDELTYLKSLQKRRSPIISQLAKIA

SEQ ID NO: 202769 - protein, 429 aa, unidentified
MQIVYRRCGGMDVHKKSVVVCLLLIDESTGEERKQRRSFGTTTRALLELAAWLKRWGVEMVAMESTGVYWKPVWNVLEEELGAECQLMLVNARHFKQVPGRKTDQKDAEWLAELAQHGLVRSSFVPPKATRELRDLTRARATLTEDHTAVANRLQKLLEESNIKLSSVASNALGVSGRRILKELAKGNRDAAELAELALRRLREKIPQLREALEGRMSAHQQQMLNDYLTQLEFLEQQVEELDGRIEAHLIATGQIKQVELLDTIPGVNLVVGATMVAELGVDMKQFPDADHACSWAGMCPGNHISAGKRYSGRTNKGNVWLRRALCQASWAAGKSKKTYLSEQYRRWKGRRGKKRGIVALGHQILEIAYTMLKTGTAYHEWKPAERQTKERRSAKSRGRNWQADINRSIEVLHSLGYQVTAPSATPPI

SEQ ID NO: 202770 - protein, 383 aa, unidentified
MTGTEPHAWETGLMDTITYVGLDVHKATVAVAVAEGGRGGEVRQLGVFENRSEILTKLAARLSKPGRCLSFCYEAGPCGYGLHRLLTGGGHDCVVVAPSLIPVKAGDRVKTDRRDALMLAKLHRAGELTPIWIPDAAHEAMRDLVRARATAGRVLSKARQHLQSFLLRHDQIYRGARAWTLAYRRWLTTVRFAHPAQQIVLQDYIHAVQDAEARLDRLTRQIEELLPSWAMAPVVAALQAMRGVALVVAVTVVAEVGDFRRFANARQLMAYLGLVPSEHSSGTSVRRGGITKAGNVLARRVLIEGAWTYRMPARVSRKLHDRNEKLSPAIRDIAWKGQVRLCARYRRLAAAGKPRVVVTTAIAREMVGFIWAIARIAQPTLQG

SEQ ID NO: 202771 - protein, 386 aa, unidentified
MRVNDMSRAVVPFEQSTTLVVVVGMGAKSWLVAGNVPGVERQPMKKLEPDAAALLGLIERWRGEAIKAGQTIRRVVLAYEAGRDGFWLARWLIARGIEVHVIHSASVAVSRERKRAKTDRLDAAMLMRVFLGWLRGERGHCGMVAVPTLEEEDARRPSRERESLVNEKTRITNRMKSALVRLGIRGFKAHLRKAAQRLEGLRTPEGTGLPANITEEFRRDMARLALVREQITAIEKARIERLQRAPNTGPNLMVRLLARVIGIAIETADMLVREILSRNWRDRRAVARYAGLTGSPDESGTKRREKGLAKAGNARVRRGLIQLAWRFLQFQKESALTKWFWSRTEGPNGVRKTTMIVALARKLLIALWRLVTTGEVPEGVVLRPAV

SEQ ID NO: 202772 - protein, 342 aa, unidentified
MTIAVLGIDLGKNSCSLVGLDATGRVVLRRRMRREGVIAFGAKLPGCVVAMEACCGAHHMGRALAEQGHTVRLMSPEYVRPYVKAQKNDDRDAEAIAEAATRPTMRFVALKSEAQLDVQTLHRVRDQLVGERTALTNQIRSVLLERGHVVAQGRAKLTACLAALLDTDAGASLTPRMRTLMAEVRERWQELDQRIAALDAEFAEQARINEDARRLTTIPGIGALNATALVAAIGDVASFARGRDLAARLGLVPRQVTTGGKPRLVGITKRGSKYLRKTLVQGARAALPSLRQSDTHLGQWLRGLLARSHVNTAVVALAAKMARIVWALLRHGRVYEPAAVAA

SEQ ID NO: 202773 - protein, 402 aa, unidentified
MIDAPNRYIGLDIHKEYFVAVGVNEKLEVVFGPQRVSNYQLDDWILRCLTPEDAVVLEMSTNTYQFYDALLPHVHSVMAVHSPNVAMVTNVRVKTDKKAALALAQLHAAGLLTGVWIPPYPVRDLRSLIARRDKMVRLSTMAKNRLHAMLHRHHLIAPKKPFAFEQRTWWERLPISANEQLLVRSDLDTLDFAQKQVEQIEECLKQASAEDGRIPLLVQLPGVAMLTAITILAAIGDITRFPSAKKLVGYAGLGTRVHDSGMTHSSGRITKAGRKDLRCAMVNAANHAVEHHVHWKKELERLTPHLGRSKAIVAIARKLLVAVWHVLSEEVADRYADPRDVASSFIRHAYRIGVRNLPGQQPALAFTRDQLDRLGIGKDLKEIPWGSKRFKLPPSKLLLEKE

SEQ ID NO: 202774 - protein, 332 aa, unidentified
MNMNPQGGVANDAERPNAGIDVSRQQLDACWGNEERRVENSAAGWDELIAMFKSARVDVVVVEASGGYERALVGALQAASITVARINPRQARDFAKSMGVLAKTDRVDARVLRDFADVVARHADRAKYITPVLEAERAVLAAMMTRRRQLIDMRVAETNRLEHAIKRAARSIGIVLKTLDRQLAEIDRDIDDHLERHFKDQRALLDTVKGVGPVMILTLTSALPELGHLGRRQIAKLVGVAPLARESGPRKGPRHIAGGRAEVRAVVYMAALSAIRTNPVIADFYRRLIAAGNLKKVAMVACMRKLLTILNALLRDHAQWDPTKHQINPKTA

SEQ ID NO: 202775 - protein, 353 aa, unidentified
MTWVGFDLHKRYITACAVNDGGELVAEHRRLLPDVAALLAWLAALPGPVTVALEATLYWAWLHDHLVDAGIAVVAANAYQVKLIWSARNKTDPIDARKLADLLRVHLLPAVWVPTPAVRAQRTLLRGRVYLVRRRTSVKNRIHAHLTAENCRTGVTDLYGVAGRAWLAAVPLSEAARLQVDLLLGLVDYLDAQIARLDPRVKRLAAGHPVAHQLQTWPGIGAFGAALFLAELGDIRRFRSSHELAAYAGLTPSTRSSGDKTRHGAVGRAGNPWLKWLLIEVVQSLKLAPGPIGAQYHKLLRSKGKAKATVAAARKLCCYLYWSLTQGWSYTEWLQQHEGSWGVRPTQTLVSIV

SEQ ID NO: 202776 - protein, 412 aa, unidentified
MKDLLEISCGLDVHKEKIVACILTGPLGKPTRSEIREFSTLIPDMIALRNWIVSKNCHHVAMESTGIYWMPIYEILEDAFYGDITLLVVNARHMKNVPGKKTDMRDSEWISTLLRAGLLNRSFIPEKRIREFRDLNRYRKSVIRDITSQKNRIEKFLQSSGFRLSSFISDIFGASGRNIILHLIEHGQIDKTALDSCLKTKTRNRIDEILMSVNGTLSEHQKAFLRILMTHYDSLKKHLAEIETSLEEDMAPFTLQVEQLNSIYGISTTASCAIIAEIGIDMKPFKTAEHICSWAGLCPGNNESAGKRKSTSVTKGNPYIKSMLCEIAWVIAGKRNTYLSAWYWRIKQKKGAKKAIVALARKLLVIIYTMLKQGTLFDESCFETRRKHCEQKQLSRYIRELEKHGYHVEAQS

SEQ ID NO: 202777 - protein, 462 aa, unidentified
MKNSYWEKENPLLKFMCAIKTHKTEDRGDSAMNNRMNQRLEEITINTLIVGVDIAKTIHWARFTDYRGVEVGKAFKFKNNRDGFEAIVARIEQIRNSKLLRNVFTEVIVGMEPTGHYWKAFAHYMMKLGYRVVGVNPYHTKKAKEFDDNSPTASDKKDAITIARLVKNGSYFAPYLPTDIYADLRILANSRENTMRRNNAVKNQITAIMDEYFPEITEVFKNPLTGKASRQVLKSCPFPALIMELGESGVLEEIKKAVKKTVGIKTVQKLIEAAKTSVGVGYGIATSKIRLWQLVEELEMVEKQLAEIEVAMEKLLYETGYAERMLSIKGVGIVTAARFLGEVGNPLRFDDARQIANYAGYNLIEDSSGNNKSGTVISKRGRNRLRSLLYQMAFTMVSRNPEMKALHQHLTTRSENPLKKKQSLVVVSKKIITVIYSLLKKQATYDPARVLGAVRREMMKAA

SEQ ID NO: 202778 - protein, 402 aa, unidentified
MNAVGIDVSKGKSMVAIMRPFGEIVSAPFEIKHTASDINSLVELINSVEGESRIVMEHTGRYYEALAHQLSEANLFVSAINPKLIKDFDNDSLRKVKSDKADSVKIARYALDKWQNLKQYNVMDELRNQLKTMNRQFGFYMKHKTAMKNNLIGILDQTYPGVNTYFDSPARSDGSQKWVDFASTYWHVDCVRKMSLNAFIDHYQNWCKRKKYNFSQSKAEEIYGKAKELVPVLPKDDITKLIIKQAVNQLNSASTTVESLRTLMNETASKLPEYPIVMAMKGVGASLGPQLMAEIGDVSRFTHKGAITAFAGVDPGVNESGSYEQKSVPTSKRGSSDLRKTLFQVMDVLIKTHPQDDPVYQFLDKKRAQGKPYYVYMTAGANKFLRIYYGRVKEYLSSLPES

SEQ ID NO: 202779 - protein, 460 aa, unidentified
MRKPTEKQLSGMKRTGKSGFPLLNPDAAGIDVGAREHYVAVPADRDAQAVRCFGAFTEDLHRLAQWLLQCGIKTVAMEATGVYWIPLYQILESYGLAVKLVNARHVKHVPGRKSDVQDCQWLQQLESFGLLAGSFRPEAKICVLRSYMRQREMLIRQASRHVQQMQKALTQMNIKLHQVISDLSGDTGLRIVRAIVAGERDRLKLAALKDRRIKSDVALIAKALEGDYRAEHLFALKQALELYDYYQRKIAECDAEIYKEMQTLETRGSAAPLAKHKPRSSHNRLGFASQAELYRIMGVDLTRIDGVNENTAQLILSELGLDICQKWPTEAQFTSWLGLCPNHEISGGKLLKRGTRKVVNRVANALRMCAQSLLNSKSALGAYARRMRARKDTPVAITATAHKLARLIYRTLKYGQDYVDLGSDSYEAKYQAAVVKSLQKRAQSLGYQLVSCQTPGAVVP

SEQ ID NO: 202780 - protein, 338 aa, unidentified
MSAIKVIGIDLGKSVFHLIGHDYSGHEVCRHKLTRVKLIQFISLQESTTIAMEACCGAHWLARKCQEYGHKVKLIPAQYVKPYVKSHKNDFIDADAIAEAATRPKMRFVSPKSEQAQISTVIRKIRTGYIRERTSCMNRVGSFLLEFGISFPRGHANMKKLFQWLADKEAIVPPQLILELRDLLDYYNQLNEKVAAQNQKLIELNKENELYALLQTIPGIGPMTASCCLSSVGDPKDFANGRNFAAWIGLVPFQYTTGGKPRLLGISKRGNKELRELFVHAARAVMWRDASAERYFGSWLIDLKCRKPFNVAVVALANKLARIAWSVMNARKAFEVKA

SEQ ID NO: 202781 - protein, 407 aa, unidentified
MDVMHAKCAGLDVHQQTVVACARLAIGRSVTYDVRTFATTTPELLALTDWLTAHGCTHVAMESTGVYWKPVWQVLDGSFELVLANAMHVRNIPGRKTDVNDATWIADLLAHGLIRGSFVPPAPVQELRDLTRTRKQLVREIAQHTLRIQKTLEQANIKLTGVLADILGVSGRAILHAIVTGEADPERLAGLANERVKAPRADLVAALHGRITAHHRFMLKLHLTQIEALHIAVRDVEARLGEALAPFRAAVDRLITMPGISETVARVIVAEIGFDMSRFPTAAHLVSWAGLCPRLHESAGKRLSNRTRPSNPWLKTTLVQAAWSAARHKHSYFRAQFLRIKSRRGPKKAVLAVAASMLTAAYHMLKTDSDYRDLGVDHFDRRDKAKLAKRLIARLHDLGLAVEIRAA

SEQ ID NO: 202782 - protein, 412 aa, unidentified
MDVVHTHCAGLDVHKKSVVATVIVPETQGGWCKETQTFGTMTADLLTLSDWLQSHAVTHVAMESTGEYWRPVFNILEGNFEVLLVNAQHMHQVPGRKTDVKDSEWLADLLRHGLVRGSFIPPEPQRNLRDLTRHRSNFVRERTNLINRLHKTLEGANIKLGAVASDVVGVSGRAILAALIEGEADAATMAELAKGRLRTKRTELTKALEGRVNAHHRFILTELLCQIDGVEETIEHFDEQIVEYCHPFEEVVAHLDTITGIGPDLAQALLAEIGTDMTRFGTAQRLSAWAGVAPGNHESGGKRRSTKTRQGNRRVKSLLVQAAWAASRTKDTYLSALYHRLAGRRGNKKAIVAVAHAILVIVFHLIIRNEPYRELGGDYFDKQDPETTVKRLAKRIEKLGYQVTLQPASVPA

SEQ ID NO: 202783 - protein, 317 aa, unidentified
MLEAPAIFIGIDISKARLDIAMRPSGECESVAHEEGALQSLVKRWSQMRPTLIVLEATGGLERSISRALASAQLPFVVVNPRQVRDFAKATGQLAKTDRIDALVLARFGEAVRPAVRPLADEASQELKALSARRRQIIEMMVAERNRASRAPKSVGKRIDAHIRWLEAELDRADKDLDQSIRQSPIWQENEDLLRSVPGIGPIVSRTLLAELPELGQLNRKQIAALVGVAPLNRDSGQFKGRRTIWGGRAAARACLYMAALVASRHNSVIGAFYTRLRSAGKKPKVVLVACMRKLLTIINAMIKHRTHWSEFNSQTT

SEQ ID NO: 202784 - protein, 357 aa, unidentified
MNFIGIDLHKKTISVCVVNQERKVLRRKSLDCVEPDKIVSFFEECGAFAAVVEATASYEWLWRLLEPLAQRLVLAHPKKLRVIAESKNKSDRLDAQVLAEFLALGMIPEAYRPTLRQRQHRTLVRQRCFVQKNLTRVRNKIRRVLSDYNADRRDLFTAAGLKYLKEITKKVSEADRFVLNQLLTEWQYHRQQFQAVSRQLKAFAQKASAKEQEIRTVLGSMPAVGPTTIEVVLSEIGDIERFRSQKRVVAYAGLAPGHRESAGHKKDLGITKQGSGLLRWVLIQTAWRTVRCSLRWRSVYENLKKRRGSKRAIVAVARRLLTVMAALWRTGQLYRRAEEGSGQAVLPTHKATVAAPA

SEQ ID NO: 202785 - protein, 338 aa, unidentified
MKIETVGLDIAKQIFQAHGVDRTGKVVLRKRLRRAEVASFFAGLEACLIGLEASGGAHYWFRVLSRLGHKVRLIAPQFVKPYVKSQKNDANDAEAICEAVSRPSMRFVPAKKIEQQDLQCLHRVRSRLIGCRTQLVNQIRGLMAEYGIVIPQHVAQLRRHLPVVLEDDANELTMSARCLFHSLYEELVELESKVSSADQRIERAFRENAECQRIGAVEGIGPVTATAVVAAISDGHAFRNGRQFAAWVGLVPRQHSSGGKTQLLGISKRGDPYLRTLLVHGARSVVYRAKTKTDCRSRWINDKQQRLGTARACVALANKNARILWSLIAKQQVYRPAA

SEQ ID NO: 202786 - protein, 315 aa, unidentified
MRNCIGIDISKHSFDVFVLEKNKALVLTNDSEGIFKCVELCQKIQPELVVMEATGGYEALLASTLQAEGFPVAIVNPRRIRDFARAVGQIAKTDKLDAQIIARFAATLEPMPHELIDSNSRKLKALMSRRKQLVEMHTAECNRKEHAIDIEVQRSIEAIVNAIESQLSNVDKEIENWIQKMPELKQRAEYLQSIPGVGKTTAHMLVTELPELGVFNRRQIAALVGVAPINRDSGVFRGKRMTGGGRRHVRAKLFMPTLAATQFNPVVKKYYRTLVDQNGKSKMVALTASMRKLLCIMNTMLKNEQYWQPNLIENA

SEQ ID NO: 202787 - protein, 332 aa, unidentified
MNMHPQGGVANRDHRPNVGVDVCKQHLDVCLGTLDLRVVNDATGWDVLIAKFKEDDVDLVVLEATGGYERGLVCALQGAGITVARVNPRQARDFAKSMGVLAKTDQVDARTLRDFGDVLARHKDRAKFITPLVDEQRQVLAELMTRRRQLVDMRVAENNHLEHAGKHSVRSIKSVLKTLDRQLEAIDREVDDHLDRHFKDQRTLLDSVKGVGPVTILTLTAARPELGSLGRRQIAKLVGVAPLADDSGPRKGKRRIWGGRADVRAVVYMAALAAIRHNPTIKVFHSRLIAAGKPKKVAIVACMRKLLTILNAMLRDQSMWNAAKHLQSAKTA

SEQ ID NO: 202788 - protein, 360 aa, unidentified
MNANPVAARMHIHCVDLAKEKFQVHSFSHSGECLKRRTLTRSQFERFFCDAQMPRGLIVMEACAGASHWSRRFEALGHQTRLLPAQFVAKNRVGNKNDGNDADAIYATHCDKRIRPVPAKTLEQQDLAALHCARQLLIKQRTQLTNHIRGLLAERGCVAGKGDKGFQLLLARAAERLDPEVSEPLLEIIGLQLKILEALDAQLDALEKRVHQAAQQSPLAMHLTSIFGVGPVIATAFVAEYGRGVERYADARQFAASLGVSPTEQSSGSTHWLGPITKRGDAYRRHLLTQGAHSVVSNCHRHLDPLSDLARRLLDKHKRHNVVVIAVANRMARIIYALLKHPQDYRITRQGWANITAGGY

SEQ ID NO: 202789 - protein, 355 aa, unidentified
MDSKKYIGMDVHKESISIAVMNSAGKIVMECVIETKASMILQFIDGLRGDVHVTFEEGTSAAWLYDLLKPHVTKLVVCDPRKNASMREGNQSDKIDARRLAELLRLNHLNPVYHGEHGLRSLKELVRSYLTITKDLGRVMTRVKAIYRSWAIPCTGKQVYASCHRAEWLGKIGEPGVRRRAEFYYQQLDALRTVRQQVRRELLAEGKKHQAWKRLCQIPSIGPIRAAVLIGILQTPHRFRTKRQLWTFSGFGIETHSSADHRYVKGQLQRSKKPASIRGLNQNHNHDLKNLFKGAALVASSKPGPFQEFYAALLAKGMRPEMARLTLARKIAAITLLIWKKGAHFDAQFLKPQTA

SEQ ID NO: 202790 - protein, 359 aa, unidentified
MTTMTWVGLDVHARSVEAAALDSLSGELRRARFDGRVEPVVEWLAGLPAPVRACYEAGPTGYGLCRAARAAGVEMAVIAPSKTPRAAGDRIKSDRKDAELLVRLLSAGALAPVAVPPPALEAARDLARAREQLRVDLMAARHRVSKLLLRHGRVWERSSGTWTQAHRRWLARQRFEQPATELAFTDALAAIDGLLARKAVLEEHLARVAHQADLWPVVARLRCLRGIDTFSALVLHLEVGEWNRFARAPQLAAWLGLAPALRQSGESAVSGPITKTGSRRARRILVEAAKHCDRPPRIGVTLANRQQGQPDHVLQTAWRAQQRLFCVHQRLRHRGKPANVVTVAMARELACFAWALARA

SEQ ID NO: 202791 - protein, 335 aa, unidentified
MQVYGIDLSMEKFDVNYIDSNGKEKNKEVKNGIISISKFLLNVSRDGILCAEHTGVYGDLLVYLCNQMNIPIALVPGYTIKHSFGMIKGKSDPVDASRIREYGERFTDKLIFSEYDEENLVELKQLYTLRSQLVKARKSLLTSKKGRCHLPMQSLSVHKHLGLVLFGLDIEIIALEEEIESLIKANEGLEENYELTKSVKGVGPVIATDLLIKTGNFKHINTARKAASYAGVFPFPNTSGKMVGKSKTSPFADKKLKALLYMGAKSAVKHNKEYQLYYQKKKLEGKPHYLIMNNVSNKMLRTIYSVIKNKTPYSQDHICLDPRENKINSSPKKVA

SEQ ID NO: 202792 - protein, 444 aa, unidentified
MLRFVGCDVHKRTAVFTILLQDGTVFATYTVPVTREALAAFAERQLTAEDRLAMEATTNTWAVAGVLRPFVKEIVIGNPLKVRAIAEAKIKTDKVDSRVLAELLRSNYLPVVWQPDGETQRLRRLTHRRAALVSDRTRLKNRLHSILHHTLVPLPGYELFSKKGIAWLRQVPLAQEEALARESDLRLLELTELEIAELDQLLVREAWQDEKVRLVMSIPGIDYTVAQTCLAAIGKISRFPNAKKLSAYLGLNPSTRQSGPHCYHGPITKQGNAHARWLLVQAAQHLAQYRGPLGQTMRRIVKRKNRNVAVVACARKLAVLLWHVLSSGEPFRYAEPRTLQAKYSRLRVRATGQRRRGGVAKGTPRSPRYGHGRTRAVPSLPQVLAENGLPEVAPLSKGERVMLDRKRLDTFYRELQTPSRLEANTPTPQVKEPEEDFKSELTQS

SEQ ID NO: 202793 - protein, 397 aa, unidentified
MIAVGIDISKAKSTVAVIDSDGTVLASPFTMAHTQPEMEAFVTYLKGLGEPTTILMEYTGHYHYPVLKKLQGEGFPVCIVNPYQMKKYGDVEIHKAKTDKKDALRIATYALEKSYKLVPYSSMEQKYEDLKFLSRQYSQRITYVAKLKVQLIALLDQTMPGITRILPLNSRNPEKCALLLFIRRFKSFDEIHRIGKARFLASYDVLAKKTSERSASSKGLSIYELAVDSITTRGEDPYIWLSQNQCVDLLSTTQNAADEIISQMRNIAETIPEYKVLRAMRGVGDRLGPIILAEIGDIRRFHSGKALNSYAGNDAPPYQSGQFESRNRHISKRGSSALRKACYEVMQALKLTKPQDDPVYLFMLKKEQEGKPFNVAKMAGVNKFLRIYYARAMELYK

SEQ ID NO: 202794 - protein, 343 aa, unidentified
MKHYAGLDIAVKETSVCILDETGKICREVKVATHPEDLLRILQDPAWHLERIGLEACQLSQWLFDGLAGAGLPVVCIETRHAKAFLKAQINKSDRNDARGIAQMMRVNLFRPVHVKTLTSQKRRVLLTARKLLQEKAIAIENDIRGLLLNFGLKVGMVGAVKFEQRIRELVADLPDLAEIVERLLDARRKLREHFAALHRKLLDLARGDEVCRRLMTIPGVGPVVSLAFVATIDIPARFRNSKAVGPVLGLTPVRSQSGESDRVGRISLCGDGMMRTLLFEAAQTMLRPSTRWSWLKAWAMKVAQRRGGGKAVVALARRLAVIMHRMWCDGTDFRWTREVQVA

SEQ ID NO: 202795 - protein, 321 aa, unidentified
METATAYVGIDVAKAKLDIAVYSSDQQWTFANSDAGISRAVSCLRELKPALIVLEATGGIEVPLVAALAVARLPVVVANPRQVRDFARATGRLAKTDTLDARILAHFAAVVRPALRPLPDAQTQEMTAVLTRRRQLVEMLTAEGNRLGAARSKAVRRRISAHITWLEKELANVDDDLHSSIRNSPVWREKDNLLQSVPGVGPVLSTTLLAHLPELGSLNRRQIAALVGVAPFNRDSGNFRGKRAVWGGRSAIRAALYMATLVATRYNPIIRAFYHRLCAAGKPKKVSLTACMRKLLTILNAMLKHRTPWHYAGIQTFGPCS

SEQ ID NO: 202796 - protein, 477 aa, unidentified
MKSKKELLAKKKHIKRKSAKAKHNRVLGIHNPHAAGADIGATEIYIAVPPDRLEMNVRCFGTFTQDLRAIVQWLREYKVTSVAMESTGVYWIPLYELLEQEGFEIYLVNARHVKNVPGRKSDVQDCQWLQYLHSVGLLRGSYRPAQDICAMRAISRYRDNLLHFGAQHLQHMQAALDQMNLRLHHVIADLSGLTGMAIIEAILAGERDPRQLAKLRDPRIKASQETIAKALEGNWRVEHLFVLGQALQSWKQVQQQLGQCDQKLGELSSQLEGKIDLANSPLPPSAKYCGREPRSKNQPNGPWREELYRHFGVDLTEVPGLSLGVVQTLFVELGADLSAFPTPRHFAAWMGLCPDNAITGGKVIRRGTRRNRQRIRLALRLAATSLHHNKTQLGECFRRLRARLGAPKAITAMAHKLARIIWHLVTHRVGYDESIFAEREEQLLRRKQRQLRNLAHSLGFTLVPNPRPAATSNAEVS

SEQ ID NO: 202797 - protein, 403 aa, unidentified
MTVRPLVWVGIDVGKTSHHACAVDETGKVLWNQKVSNEQRAIEQLIARAHKGADEARWAIDLTSPMALMLITVLLGAEQSVVYVPGHVVNTMTGAFRGEGKTDAKDARVIAETARMRSDLSEVAMPDELVVELAQLTGYRTDVMADWVRGVNRLRSLLGSIFPGLEAAFDYSNRTPLILVAHLCTPAEIRAAGIKGVTAYLSDKGGWPTAIAKTAATAVAAAKQQPLALPGEAGTAALVKRLAGKLLDLDHEIKDIDKTITERFRDHPYAHIIESLPGFGPGLGAEFVVVTGGDLASFATAGRLASYAGLVPVPRDSGRISGNLHRPKRYNRRLRRVFYMAALSSIRGDGPSRQFYDRKRGERLIHSQALLALARRLVDVLWALLRDGREFTPHKPTPATAAA

SEQ ID NO: 202798 - protein, 347 aa, unidentified
MLELFVGDDWAEEHHDVELMDPAGRRLARARLPEGVAGMARLHAMIAAQLGEGVEDAVVKVGIETDRGPWAQALVAAGYEVFAVNPLQAARYRERHSVSGAKSDKADAHTLADMVRTDSHQLRPVAADSPRAEAIKVVARAHKTLIWERTRHTQRLRHALREYFPAALEAFEDLAASDTLELLSKAPDPGAAARLSISQISAALRRARRRKIEEKAAVIQSALRAEHLRQPEVVVAAYAAAVQSTVAVLRVMVEQVKTLQGQVESHFGRHPAAEIILSQPGLGSILGARVLGEFGDADDRYVSAKSRKNYAGTSPITRASGKKKLVMARFVPTTGSSMPSTPKRSPR

SEQ ID NO: 202799 - protein, 359 aa, unidentified
MREQRNKISFRGQKIYVGIDVHLKSWSVTVLSETSVLKKFSQHPSPEALYGFLTRSYPGAEYHSVYEAGFCGFWIHERLTALGIDNIVVNPADVPTKSSEKLRKTDTVDSGKLARSLRANELKGIYTPDSVSLEMRSLIRLKNSITKDTTRQKNRLKSQLRYLGIEIPQEFLTPFSNWSKRFFAWLKEIETLTPSGRQALDIHIRHLEELRRQKLEMTRALRTLAKTDRFREPLRLIMSVPGFGQATGMAFLSEICDITRFRNAEQLAAYIGMIPMCHSSGEKDGTGDITIRKHAVMRCNLIEAAWVAVRQDPAMNLFYTEQCKRMPKSKAIVKVARKLVNRLLFVLKHQTEYVNSIVS

SEQ ID NO: 202800 - protein, 342 aa, unidentified
MREKRSIGIDLHRRRFTCCIRLENGRNCLSEWSLEQLPRFLQKLRRTDEVAVEVTGNTRLFYEAVAPFVARVVVVDPNQFHVISHSVKKTDPHDARNLALYLAKGLLPEVRMKDKEQAEVASLTQTRDRLVKLRTALKNKVNNLLSARGIELDKESLSSEKGLTWVLEQKIEPLAHLELDIIVEQIRSLNRSIARLERVIDEAGKKLEGHRNLTSIKGIGSLGASILLSVIGNVNDFAHEGKLAAYFGIVPRVQDSNETEHRGRITKRGSKLGRTALVQCALIAKRYSPYLHRYYERIRARRGTGKAIIALARKFLSIIYHTLKNNWIFEDFPNFVLAEAKT

SEQ ID NO: 202801 - protein, 391 aa, unidentified
MPMYFVGIDISKYKHDCCIISAADQQIISKFTITNDKDGFEQLLTALNSLSNPEDIKIGFESTAHYALNLELFLENAHHSFMEVNPVLIKEYKKSTTLRRTKTDSVDCESIARWLITVEYKPHSKGFYHAYSLKSLTRLRDRLIRQRSFYLVKITNVLDHTFPEFKPFFNERLSKTAIYLLENYGSAEKMAHMNSASYDKLRCASRGKFSIQQFLRLKELAANTVGVNNSIFDIELNSLLTLYNSLCKEIKTLEAEITKLIEEVHPHYMSIPGIGPISAAVIYAEYGDISNFSNPGQMLAFAGIEPGINDSGTESHGGRMVKHGSSQLRYVLLNACLPLIRFDLTFATYYEKKRAEGKKHRVAITHVAKKLIRVIYALERQDVDFNAQKLR

SEQ ID NO: 202802 - protein, 431 aa, unidentified
MRGKPEERFSPPGFHKRSIPMKYVGVDLHKKSISICVVVLEGRKRKVLARKRFACQDVDGIYQFFRELGTFQVVVEATASYEWFAGLVERLADRVVLAHPKKLRIIAESKYKTDKIDAWVLAEFLALDMIPEAYRPTPRQREHRALVRYRYYVQKRTVSVRNKMRHILANYNADVKELFTAQGLAYLGEQKVSAADRFVLNHLLEEWREHRRRLVEAEKQLETFAKEAPLAEQESRHVLATFPLAGPVTIDIVLSEVGDVKRIRSLKRAGSFAGLAPGFRESAGRRKEQGITKEGPRLLRWAMIQLAWRVVGRTAYWGGIFAKLEHRVGKKKAIVAVARRVFCVIMSMLRSGQAYRTPGGEAAAGFRRDGKGVRGEGAAKKRGKKTPASPRQAAARERTVDQEAKPREVKPQKKPQASRRRPRRGALSAHP

SEQ ID NO: 202803 - protein, 344 aa, unidentified
MQSMYYIGLDVHKRTISYCVKEVSGRIYAEGSVPATRLDLNRWMKTLPQPWTVAMEATVFSGWIYDHLRPHAAALKVAHPLMLRAIAAAKKKNDRIDADKICDCLRCDFLPECYMASTAIRERRRTLRYRNLLVRQMVQMKNKIAVLLMEAGVSYNKQRLHKAGYFRELVASNPDIDEGLCSLLRVCREMVVRLERTESALVRSLERDALLRDRVERLMTIPAVGPITALTWALEVGEVQRFSSIKKAVSYCGLCGEEKSSANSVQRTPLSKQRNKHLQTTLIEAAKMAPRYSAGLALLYDKERRKGNANQATLAVARKLVAYLIAVDRRQRQFEVVEASRTAA

SEQ ID NO: 202804 - protein, 320 aa, unidentified
MQTPSAMLNIGADIGKDEIVVACAEERFSPRKIANRRAELLVWLKGLPAGSRIGMESTGGYHELLAEAAHQLGFIVFVLNPKDTRHYAKAMGLRGKTDRVDAKLIARLIEREHEKLHPWVMPTAEQRQIDRMIKRRAKVSGIRAALSQSLKGLKGFAAELKVLNHRLDKLLARIDARIKALIDANDNRKQDYTRLRQIAGVGPVVGGSLVNTLERVPFKKGDAFVAFTGLDPRPNESGHHIGRRRLSKRGPAELRRLLYLAAMAAAKTKAWKPVYEHYRAKGLSRTAVLVILARRIARIAWSIYTHKTDFDPQRLTAGLT

SEQ ID NO: 202805 - protein, 454 aa, unidentified
MRRVIGMDIHRTFAEVVFWEDGRLRWHGRVDMTRSGLEGFGRSLAKGDEVVLEATGNAMAVVRVLSPYVARVIMANPLQVKAIAHAHVKTDKIDAGVLASLHAAGYLPEVWLPDAETERRRRLVARRNQIVRHRTRVKNETHAILAAHLVPPCPHAELFNGPGRVWLARQALPGDERAAITRHLRELDRLGEDLTVLDREIAEATVDDPAVRRLLTIAGVNLTVAAGLVAAIGDIRRFASPQQLVSYFGLNPRVRQSGLGLAQHGRISKIGRSHARALLVEAAWAAAKAPGPLHAFFLRIRARRGHQIAAVATARKMAVLVWHLLAKETDYLWARPALVAHKLRALELQAGRPMKKGNSAALPSPTTSRRCATRRWRSPSRPSAPISTSWPSGNPSRPGTGAPPTRRHGRAARLASLVEGRSPRRAGAAAPDRCTTPGTTSPAAHGRRKCGGSS

SEQ ID NO: 202806 - protein, 311 aa, unidentified
MPTTPVHVGVDIAKATFAVRLLNKDLSYPNTAAGPAEFGAALEKLPAPAHVVCEATGGYERALVLALHAAKLAVSVINPRQVRDYARARGQLSKTDRVDAAILADYGATLRPEADTAPTAQQLELAALASARQDLIELTGIENGRAEHLTLPLLKKQHAARLRLLEKQLAELDRRIDALIAADAALAVKSARMQSVPGVGPVMALTVLALMPELGRITAGQAAALAGVAPFARDSGEFRGQRHICCGRAAVRRVLYMAALSASQHNRILREHYQSLIARGKPAKLALTAIMRKLIVLLNRLLADPHFVLAQ

SEQ ID NO: 202807 - protein, 330 aa, unidentified
MTTRVLGIDVSSDTFHVALQGENGWMDNSFANSRAGCAQLGRWLKRNGADQVLACVEASGNYWVDVATWLYEHGHQVHRANPLSIRRFIESDLERTKTDKQDARHIGAYIVSRMALPGAVIRLWEPPCAVQYELRALSRRLEELIASRTAIVNRSKDPQVTAFVARGYKRDLTHLDRERERVEAEIDRLIAKDDGLRESRELMETITGIGAATSRLVLAELGDCQQFDCSSQLVAFVGLCPQERQSGTSVRGSNATTRYGHRRIRQALYFPALTALRHDPGCKALRERHAAKDKPPMKTVVAVMHRLLRIIYGVLKNRTPYDPTRALNSA

SEQ ID NO: 202808 - protein, 418 aa, unidentified
MHETQSWFAGVDWASQKHDVWLTDASGKRLGKRTFAHSGEGLVQMCDWLIATSGGKPEDIHVAIEVPHGAVVETLLDRGFKVYSINPRQLDRFRDRFSPAGAKDDSRDAETLSSSLRTDRRAFHQVSLAGPAIIELREWSRMADDLRADQIRHANRLREQLQRYYPQMLQFDSDLAEEWVLKLWEAAPTPAKAARLRQAEVEKLLKRHRIRRIGAAKVLAILKEQALIVAPGVTEAAVAHIRVLIESIRLFTQQLKEAHRQLDKLCKLLAEPIAGENEQTGPEPEQTLGAILQSLPGAGRIVISTLLAEAFEILQRADYPILRKLCGVAPVTRRSGKSRAVTRRLACNPRLRNAIHYLADAARRCDEKSKAKYLALKARGCNHARALRTIGDRLLYVACAMLKNRTLFDPGLESQKCA

SEQ ID NO: 202809 - protein, 419 aa, unidentified
MVVVEVVHVRCAGLDISKRDAKVCVRVVGQGRRGAQQTVTTWGSMTNQVLALREHLVAKQVTLVVMEATGDYWKPFYYLLEDAGFEVMLVNARQVKNLPGRKSDVSDAAWLAQLGAHGLVRGSFVPPAPIRALRDLTRTRTAITRERGREIQRLEKLLEDAGIKLSSVAADITGVSGRAMLEALIDGQRDPAALADLAKRRLRSKIPALTEALTGRFSGHHAFLARVHLDLIDRHTQAIDAVTDRIEVVIEPFRAFRELITTIPGISTCVADVIIAETGADMTRFPTAGHLASWAGTCPGSNESAGRVKSTKTRPGNPYLKGALGVAAMSAARSKDTYLAAKYRRIASRRGPMKALVAVEHAILIAIWNMATTGTLYTDPGAAYYFRLHPEKAKNRAINQLRAIGYNVTLTPLPTPVGA

SEQ ID NO: 202810 - protein, 351 aa, unidentified
MDVLSDNPGLDAQMYFSGIDQHKVSSVITTLTADGQCVAQATLPNDRAALLQYFAQLPGPHRAVVESTGRWYWMRDLLVGAGVDLELAHAKLLKAIAYAKVKTDAVDAHTLAQLLRVGLIPKAHMIADAMRGPRDVLRARLQLVERRLRCDHSLGGLLEKFNVEQLAQLPPLYQLQARLHTAQAELLAGQVKELEQAVQGDLLEDAAIQRLLWIPGIGRLLAFTIYLEVDDIRRFPTVKHFWSYCRLVPGAADSGGKHRHRASRDGNRYLKLAFSHAAIRAVQYFPEVRQWLQRWKRKKPIRVARTLIAKELAQAVYVVLSEGVDFNQQFKGTPLTKRKQASWPRRASPSV

SEQ ID NO: 202811 - protein, 309 aa, unidentified
MFYLGIDQHRKHLTVNLRNEGGDVVLRRQVSTVWTKVRSFFEELRDRCASEGGYVAIVEVCGFNDWLLKLLPETGCRRVLLVQAEQRSPHKTDRRDANRLCELLWTNRARLLDGKKVQQLRVIHPATSQDAEARQITALWQRLTRQRTRTLNAIQHLLLKHNLQQACPTKGLQTQRARAWLAQLELPAVDRLEMDGLLEQWTLWNRQREQVARQLAAQQQAHRPATLLATVPGAAAFGSLALACRVGDIRRFADPGSLANYWGLTPGCRNSGDAQQRLGSITKRGSVIARFVLGQLVLHVLRRDAKLKR

SEQ ID NO: 202812 - protein, 305 aa, unidentified
MTQVYIGVDVSKQWIDVSHPTRGQWQIETPALDRFAAEAAAEHAIVVFEATGRYDRPLRAALAAADAAHVRLSPQAPRQLARVLGIRAKSDRADAVLLRRYGEAFQPAPGRTAPPEPLADLVVRRRQLVKMLQAEHIRAHEPLAEPARASLARMVDHLATEIAALDGLIAGAIATCPERAETARRLRTAPGIGPVTAATLIAELPELGRLDRRALAALVGLAPFENESGRWRGRRHIRGGRAELRRALYVSAMHASRGNGALKPFRDRKIEEGKPVKLAITATARKLLTILNAMVREQKDFKYPA

SEQ ID NO: 202813 - protein, 356 aa, unidentified
MTLTKYIGMDVHKESISIAVMNSTGKFVMECVIETKASMLLQFIDGLRGDVRITFEEGTWAAWLYDLLKPHVSEVVVCNPRKNALLKDGSKSDRIDARKLAELLRGNHLKPVYHGEQGLRTLKELARSYLIISKDVTRVMNRLKALYRSWGIACAGIQVYAPRHRSEWLGRISEAGVRRRAEHCYEQLDVLRLLRQQVRRDLLLESKKHQAWRLLGLIPGIGPIRAALLIALIQTPHRFRTKRQLWTYSGLGLETHDSAQYRVVEGQLQRSKKPVTLRGLNQDHNHDLKDIFKGAATRVSSSSNGPLHDFYEHLLAQGRKPTMARLTLARKIAAITLIVWKKEVHFDASYLKSQAA

SEQ ID NO: 202814 - protein, 341 aa, unidentified
MQITTIGLDIAKNVFQVHGIDAAEKVVVRKQLRRGQVLKFFAALPPCLIGMEACATAHYWARELTKLGHEVRLMPAKDVKAYVKRNKNDAADAEAICEAVRRPTMRFVGAKSAEQQGRLIQHRTRDLLMRQRTQVINALRAHLAELGIVAAQGREGLKQLLTIIADEKDARLPIDARASLIVLAAQLQALQTMIGSIEKRLTVQHRANEASKRLESVPGIGTIGASAITATVTDPNAFRSGRDFAAWIGLVPRQDSTGGKQKLGPISKQGDRYLRRILVVGAHSVLRRARQNPEKYPWLTQLLARRPFKVVAIALANKMARVAWALLARGGTYRVPALAAA

SEQ ID NO: 202815 - protein, 363 aa, unidentified
MRIQRTSVGLDVHARSVVVAALDGVTGEIQRARLTPQYRDLAGWLEQLPGPIVVTYEAGPTGFGLARFLAAAGVECRVAAPSKLQRPTGDRVKTDARDALHLAKLLHLGEIVEVAVPSLSQEAARDLVRAREDARSDLMGARHRLSKLLLRYGLVYYNGKAWTGIHDTWLRQQRRELTLPGTQFAFDAAYESVVAIVDRRSRLDAAIEQMAAESEFTPVVNRLGCLRGVSTLTAFGLAVEIGDWHRLTGRSIGAYLGLVPTESSSGGSRSQGGITKTGNGHARRLLVEAAWHHRPRYNATSLPLRRRWDRADALARARGHAGNQRLHARWEAFDARSKKPTVANAAIARELAGWCWSLATIAE

SEQ ID NO: 202816 - protein, 350 aa, unidentified
MLTDLVDHVLGVDPDRDRITVAVVAARTQGVVASNTFPTTPRGYRAALRWAAEHTEQGRRAWAIEGAGGYGAGLAATPTAEGEHVVEFDHPSARPSKDGAKTDALDAIRAARETLGRTSWATPRSRGAREGLRTLITARDSAKVARISAINVLKALIVTCPVKLREELRRLPLGQLVSRCQRFRFDTATDPELAATKLAMRSTATRIHHLTIECRDLEKAMEPIVAALCPRLLTEPGVGVLVAAQLLVSWSHPGRCRSEAAFARLAGVAPLPATSGQTQTRHRLSRGGDRQLNRVIHTAVLTRVKTDAGTRDYLARRVAQGKTKREAMRCLKRYYARHLFRLLEAAPMTT

SEQ ID NO: 202817 - protein, 461 aa, unidentified
MPDGGGENSSPRRTKQIEGLPVIRRNVAGIDLGSERHWVCAPVAGSISREVADFGATTPELIRMTKWLQACGVESVAMESTGVYWIAPHEVLEAAGLEVLLVDTRQLARVPGRDKKTDPSDCEWIQRLHSCGLLRGSFRPREEVCMLRTLVRDKANLVAECSDWLRRMQKSLDQMNVRVHRAVSHLDGITGMAILRAIAEGERDAQKLAKLRDTRCHKSEEEIAEQLSGHWREDHLFSLRQSLKMYDAIQQRLADYDREILQRLAAMQREEFRQQPPPPVKNPHKAKNMKKRGEEPMREALFRMSGVDLTGIDAIGVETVQVVLSEYGPDLSRFPTEKQFVSHVTLIPHKPMSGGKPVRKKRRSSASTRVAAALRMAALSLRNSATALGAYYRKIARRLNGDVAVFATARKLATLIYRLLRWGQPYVDEGAEAFERRYQETRLKTLKAKAKDLGYQLVASN

SEQ ID NO: 202818 - protein, 384 aa, unidentified
MKEFNAEVVRVEAASVLEAVREANKAKRYEVYVGLDVHKETIAVAIARPGREEPEYRGEIVHTRKGVEKLIGRLSKEFGGAVMLLCYEAGPCGYGLHRQILGAGHDCDVVAPSLIPKKPGERIKTDRRDALKLARLLRAGELTGIWVPDEEQEAMRDLCRARADMKSQERKACQQLGAFVLRHGHHWPAGKQRWTATHYTWLEALKFAHDWQQVVLQEYIDAVKAASQRVADMMGQMLRVLPQWRLAPVVDALTALRGIDKLSAMTLLAELGDISRFQSPKQLMAYLGLVPGEHSSGGRRRQGAITLTGNSHARRTLVESAWSYRFPARQTAHLKRKAAASSWPCCACSISRSTSSSSISIGCGVFIGTAARESRCSTDTPTPS

SEQ ID NO: 202819 - protein, 355 aa, unidentified
MTSTKYIGLDVHKESISIAVLNFAGKVVMECVIETKASTLLQFIHGLRGDLHVTFEEGTWAGWLYDLLKPRVTELVVCNPRKNALLKEGSKSDRIDARKLAELLYMSKLSSVYHGEHGLRMLKELSRSYLTISKDLGRVMNRVKALYRGWAIPCAGTQVYAPHYRSEWLSKIMEAGVRRRAELYYQQLDALRLVRQQARKELLAEARKHRATKLLRQIPGIGPLRAAHLVAVMQTPHRFRTKRQLWTYSGLGLETHDSAQYRVVEQQLQRSKRPVTLRGLNDNHNHDLKDIFKGAAMRASTAAGPLRDFYEALLAKGRKPTMARLTLARKIAAITLIVWKKEVRFDANYLKQQAA

SEQ ID NO: 202820 - protein, 348 aa, unidentified
MKNKSFVGIDISKNVIDVSIFREDTNIKMFPHEVFNNTRKGFGDMCSWLKKSRVVLSKALFGMEFTGCYSLDLEKFLTSKNYSFCMLSTRIVKHHPMGTIDKRDKNDSAKIADFLYRYDGTECAKPYKLPSKAMQQLKQLVNERKFLVEQRTNFMNRMQMFETKEDSAMYESYIKKLNHDIEKIDQEECELMSKEEDVFDTFQNLLTIPGIGFVNATNIIAITRNFTAFDTARQYARYVGVAPCSHTSGTSVKWRARPSAHCNGQVKADLSMAALRAVEYDVEMQMFYNRKLGGRKDSDTKRKALNAVKFKLIRRMFAIGKQKRKWEVLNTSDDRKNLHIEKSKASEL

SEQ ID NO: 202821 - protein, 374 aa, unidentified
MDKNTQVPAVRVGVDLSKRVIQVHAVDAGGRALCNRALAGDKFLAWCATLPAGCMVVMEVSSSAHHWARQLLLMGLDAWIVSAHLAAPYRSEGHVGKNDANDAAAICEAASRPHMRFVPLKSVEQQSLLCVHRLREGIKADRTACINRIRGLLLEFGVAVPAGVRALRLALDDVLEDAANEMNGLARMTLRRAQQQWRELDEHLAWCDDRLAAHERDNADVRRASALMGIGPVGALAAIATVGDFKQFKSGAQFGAWIGLTPKQHSSGGKSNLGTITKRGDAYLPTLLIQGAKSVVNSAHTRSDPISRWALALKERSGWQKAVVALANKNARILWAVMTRGERFDLHHISVKPDRAAPAGRLRSSLHDDTQKMH

SEQ ID NO: 202822 - protein, 284 aa, unidentified
MRFYTQQHPHYCGIDLHARTMYLCILNQAGAIVLHRNMKADPDSFLSAIAPFRDQIAVTVECIFTWYWLADLCAREGITFVLGHALYMKAIHGGKAKNDKIDAHKIAVLLRGGMIPQAYVYPADMRSTRDLLRRRMHLMHQRSQLLAHIQNTNSQYNLPEIGKKIAYKSNREGVAERFADVSVRSSITFDLRRIDFYDGLLNEVELEILRHAKLHNPNTLHLLDSVPGVGKILSLVLLYEIHDICRFPRVQDFVSYCRLVKPKKESAGKTYGFIGAKIGNAHLK

SEQ ID NO: 202823 - protein, 339 aa, unidentified
MKKVNAIGIDLAKSIFHIYGVDKYGNCLFKHKAKRHNLLEILARYESKTVFLESCGSSHYWAREINKIGHAVKLIAPQFVKPYLKSNKNDYLDAEAIAEAGTRGGMRFVSVKQPWHQDMQMFHRIRDRLIKNRTALCNEIRGFLLEYGIEVARGREKLVKELPAILDRDDGFLTPIANAEISELYEELKILNQRIEDSDKKIELQSNTNEDCVRIKKLRGIGPVVSTAIVAAAPNPSAFKNGRDFAAWMGLVPKQHSSGGKQNLLGISKRGDPYLRKQLIHGCRSTVYRSHEDGDAIQKWVNQLKQRRGSNKATVALANKNARMIWALLTKKEDFKFVA

SEQ ID NO: 202824 - protein, 323 aa, unidentified
MTSSKLATRLIGVDVAKNKLDVCDSQGKLKCQVQNRTTSIVKHIVSRIDQPEQTFVVCEATGGYERPLVKALQAAGIAVCGANPFQVRQFGKGLGLLEKTDPIDAKLLRLFGETVDLPPDLPLSADQEHQQALVQRREQLLKLISQEQNRLAQAWDPQVAQMIRQILKQLIAQKKRLECEIETFLKQQAQTNPTVAVLHSTPGVGPVTTATLLCDLPELGQLSRTQIAKLAGVAPLAQQSGQRDKPRSVFGGRSHVRRVLYMAALVAPRHNPVIQAFYQRLRTRGKPKKLALVACMRKLLTILNAMVKHQEPWRTPERVVTGT

SEQ ID NO: 202825 - protein, 337 aa, unidentified
MDYFAGLDISMEETHVCVLDREGRVVRESKAASTAEAIAGELAKAPSCRRIVFETGRMAPILFHGLNQLGLPVVCVESRQAYQALKSLATHKTDRNDARGLAHLARTGFFKPVHVKSLRAHALRSLISARKKLVGQRVTLENQIRGLAVVFGVRLPRALTTAFIDQALKASEGVAGLSAAMRGLSAARVAVMTAVAAIDADIRRMTRASAACRRLMTIPGVGQLTALAFVAAIDDPSRIRRSRDIGAYLGLVPRRYQSGEVDYTGGISKCGDGRVRTLLYEAANVMLTRYKGQLKLKDWAFAIAKRSTMRKARVALARRLAIIMHAMLRDGTEFAPA

SEQ ID NO: 202826 - protein, 405 aa, unidentified
MQVYIGIDWSESKHDVVAMNAAGAVLAQLTIPHSIEGFLQLTDLQEKLGMHSEDCLIGLETAHNLIIDFLWSRGFGQVFVVPPRVVKSSRTRFRHSAARTDLSDALVIADCLRTDRGRMQPWHPDSLLTQQIRAKVSLIHHLTRGVGRLYNRLRDVLLRYYPAALDVFGNQSKVWLAFICAYGSPEKARKLTFEDFRLFARQHRYPNPALLPAAFARLQAPQPVASATIVMVYEDEAHTLARLLLEMKMSKEKALKELKILFDQHPDAPIFDSLPGAGDLLAPALLAKFGDDRDRFTSPASVQALAGTCPVTDASGKHRVIKFRRACDREFRRITQQWAKASLGKSVWANAYWLKVYSRRGYASHAYRCLANRWLAILWRIWQDGVIYDETYHLQQRAMHSKACN

SEQ ID NO: 202827 - protein, 355 aa, unidentified
MTVTIVEEARPVTCRTAITGGVDTHADTHVAAALDPVGGLLGVEEFPATAAGYARLLGWLGGFGTVCLVGIEGTGSYGAGLARHITAAGIRVVEVDRSDRQDRRRQGKSDPLDAVSAARAAQSGRARGAPKGRDGAVEAIRTLMVARRSAAGERTRTINQARALVLTGPDDLRARFARHKPAALITGLAALRPRPGDVAGHATRIALRELGRRAQFLDGQLVRLDELIIPLVTARAPGLLAIYGAGPRTAALLLIAAGDHPERLRSEAAWAHLCGAAPIPASSGKVTRHRHGPGGDRQANHALWRIVFTRLGSDPATRAYAERRTAEGKSKAEIIRCLKRYVAREVYRQLRLAAG

SEQ ID NO: 202828 - protein, 417 aa, unidentified
MKCFVGLDVSYTKLDVCIMLNDTSTPVTASLSNDLSGATEIKNHILDLNHTYHFERIVIGMEATSLYSFHPAMFFHEDSQLKELHVEIMVEQPNKIKKYRDAFEENKNDTIDAFYIADYFRIERFSPSFLKEEKYMALQHLTRTRLQIIEQLTRTKQHFIENIYYKCNTLAYQFKKEELSTNLWSSTMMTLITDEMTLDELANMPLQELADWLQQLGKGHFKDSEKLAQTIQAAIRGSYRLSKLQQDSVNVILGLLAREIRNLEKMIKEIDKAIEDMVETIPEYQCLTSIPGVGKVYAAGIIAEIGQIERFKDHPQVAKFAGLNWREKQSGNSNSQHTSLVNRGNRYLRYYLVEAANSVRRYDDEYKDFYKKKYHEVPKHQHKRAIVLTARKFVRLVVVLLRNHQLYTPPRRLMEDK

SEQ ID NO: 202829 - protein, 367 aa, unidentified
MSSVAHRGFVHVGMDVSKDAIAVAVLPPDRDVAEIDKIFNDEESVRRLIKRLGRRRGLWACYEAGPTGYDLQRLLTSMGVRCDVVAPSLIPKGSGDRVKTDRRDARRLAGLHRAGELTPIAVPTPAQEAVRDLCRTRGDMVQDLTRARNRLTGFLLRHSMVWRGGSNWTQRHDRWLAGLRFEDQALASTYTHYLATVRLRDTALEAVETDLRPWCDREPFGAQVPRLAAYRGVTCIGGLCLAAEVFDWRRFPRARPFMSFTGLVPSEHSTGQSQHRGHITRAGNSHLRAQLCEAAWSYQHRPSVGAGIRQRQQDVSAATVARSWAAQVRLSARFRQLAAHKNVRSVVAAAIARELAGFLWAEMVAED

SEQ ID NO: 202830 - protein, 368 aa, unidentified
MQSVCAFVGLDVHKETISVAVADVGRAGEVRHVGTIKNDPTAIGKLARSLARRHGVVEFVYEAGSCGYNVQRQLSTMGMICRVCAPSLTPRKPGERIKNDRRDAIILARLHRAGELTYVWVPDALHEALRDLVRARHAAGQDVRRDRIRIQAFMLRCDLRFEGKAWSRRHRIWLCNRTFAHPAQQIAFQTYLNALEHDEARKAGVEEQIRELLASSPWAKQMQALQALKGVGPIVAATILAEVGDFSRFAHPRQLVAYFGLAPGEHSSGGTVRPRGITKAGSSIARAVLCEAAWSYRTTPKVGQWMKERCPPVSQDIAALAWKAQLRLHKTYRKLTARGKRSVVATAAVARELLGFIWSIGQRVPLGA

SEQ ID NO: 202831 - protein, 362 aa, unidentified
MNESTLIIAFDQHAASVVAAVLLPGQRTPAVHALSPDLPTIGRFVERVAGRGPVWCCYEAGPCGFELQRFLQARHVACDVIAPALIPRRAGDRIKTDRRDAGQLAVLYRAGALTAIHIPSEQEEAARDLLRCREDSQADLLRARHRLSKFLLRHGRRFTGTKKAWSKAHDRWLRTQAWPIPALDHTHRAYLRTVDEAVARRRAIEEDLRGLVTLEPLRPRVQYLRCFRGMDDLTALTIAAELGDPRRFATAPRAMAFVGLVPSEHSSGTRQARGAITKTGNAHLRRVLVEAAWHYRHRPFVGAALRRRQHGAPAAIISQAWTAQQRLYRRYHRLQARGKPSQHVITAVARELTGFVWAALTQ

SEQ ID NO: 202832 - protein, 364 aa, unidentified
MKKISTTTAKAFRKMEKLTIGLDLGDRSSCYCVLDERGELVLEQKVSTTPKAMGEVFGGMPRSRIALETGTHSPWVSRLLSELGHEVIVAHARNVRLIGESRRKDDRLDAKTLARLARIDPQLLCPVKHRSAKAQAHLTVIRARAGLVRARTALINVARGLTKSYGERLRGCSPRNLNKRAEGLSVELRTALGPLLEEIESLSERIREYNQRIEGIAQEHYPETALLKQVKGVGTLVALTYMLTLEDPHRFSKSRDAGCYAGLQPGRRNSGQSQPQMRISKEGDAYLRGLLVQSAHHILGPFGADSDLRRWGLKLAERGGKNGKKRAIVATARKLAVLLHRLWVSGEVYEPFYSSSRRVLVAAA

SEQ ID NO: 202833 - protein, 345 aa, unidentified
MEPMYYIGLDVHKRKISYCVKDSSGKVVAEGSLPATRLDLDLWMKTLPQPWSAAMEATMFTGWIYDHLRPHAAALKVAHPLMLRAIAAAKKKNDRIDAGKICDCLRCDFLPECYMASTAIRERRRTLRYRNLLVRQMVQMKIKISALLMETGVSYNKQRLHKAGYFRELLATNPDIDEGLCSLLRLCRETVVRLGKTESALVRSLERDSLLVERVERLMTIPAVGPITALTWALEVGDVQRFSSIKKAISYCGLCGAEKSSGNTVQRTPLSKQRNKHLQTTLIEAAKMAPRNSPELAMLYDKEKQKGNANRATLAVARKLVAYLMAVDRGQRNFQIAETSSNIAA

SEQ ID NO: 202834 - protein, 404 aa, unidentified
MQSPKHPPPPKRYIGLDIHKHFFVAVGVDRELEQVFGSHKIEWPDFAGWIKRHLTPDDAVVIEMTTNTWEVYDALVPHVHSVTVVHPPHVKLITRAQVMNDKIAARILARLHATGLLPGVWVPPQEVRELRALVAQRHKMRKLAGKAKTRLHNVLHRHHLKAPRGHVFAAKNRAFWENLPVSGVEKAVALSDLATLDFADGQKNALDEQLGEIAAGDDRVPLLIQLPGIANTLAMTILAAIGDIKRFPSAKQLVGYAGLYGRSHQSGESSTSGQLVSFGRRDLRWAMVQAARAAVSSHPHWKKVYRELEARRGKMKARVAVARKLLVVVWHVLTKCELDRFAVPEKVAATFFAHAYKLGIRNLPDEMNARAYVRHCMDVLGTGKKLDHFYYGKKKVNLPESPPG

SEQ ID NO: 202835 - protein, 344 aa, unidentified
MQMYYIGLDVHKKTISYCIKDAGGQIYGEGKIGATRRELDTWMKTLPCPWTVAMEATIFTGWIYDHLLPHAEQVKVAHPLMLRAIASAKKKNDRIDAGKIADCLRCDFLPECHMAETGIRDRRRTLRYRHLLVRQMVQMKNRISGLLLETGVTHNKQKLHKVGYFRELLSSNDEVSESIRPLLKLSRETIVRLQKTEYTLISSLQRDPLLAERVKNLRTVPGVGPITALTWALEMGDVSRFQSVKQAISYCGLCGAEKSSADKVMRTPLSKQRNKHIQHTLVEAAKLGPRLSHELAEVYEKEKLKGNANRATLAVARKMVAYLLAVDRGKRAFVPQEEQGTAVA

SEQ ID NO: 202836 - protein, 326 aa, unidentified
MHGVDQQGNVVVRRQLRRRQVLKFFAKLSPCLIGIEACATAHHWARELRKLGHEVRLMPARYVKPYVKRNKNDAADAEAICEAVTRPTMRFVPIKTIDQQSVLMVHRTRQLFVRQRTSLINAIRAHLAEFGIVAGVGRNGVEVLLTLIAEGKDERVPPEARDCLVALAAQLDLIKRQILGADRRILAWHRSNSMSKRLEAIPGLGPLGASALVASIPDPHIFRSGRDVSAWIGIVPKQNSSGGKERLGSISKAGNRYLRKLLVVGALSVIKRAKQLGYTRYPWLTKLMERRSVKVAAVALANKNARIAWAMMARNESYRAPKTVSV

SEQ ID NO: 202837 - protein, 374 aa, unidentified
MNDSITYVAMDTHKKEHSVALHHPGQEEIVRFTVRNTAREITKMTRKIIKRAPGGVEFCYEAGVCGFVLKRRIEAHGCHCVVIAPSLIPRKPGERIKTDRRDALKLLTLFRAGLLTEVHAPDSQQEAARELTRCRQAVQENLKRVRHQLLKFLTRHGYLYSEGNHWTGKHLKWLRSLEFEEMLLQDVFDNYFTELQHCLQRLSSLDKQVEKLAKSEPYQTIVGLLRCFHGIDTLSAITIITEIFDFGRFSSPGELMSYLGLTCSEFSSGDKQKRGPITRAGNKRVRRILVEVSWHYRHPCNISKALRERRKDQPQWIIDIADRAGQRLRKRYRHLMHCGKMPCKVSVAIARELAGFIWSVFQEYEARKNGKQAA

SEQ ID NO: 202838 - protein, 333 aa, unidentified
MLFVGVDAHKESSHVTVMDERGQVLPRKSISSTREGVHSVLDGHSEPFKAVVEASYGWGPMYDWLDEMAQEVVLAHPLKVRAIAEARIKTDKIDSEILAHLLRADLVPAAYAPDRSVRAIKPVLRQRLFLVRVRTMVKNRAQALLARHALARPQVSDLYGKEGMRWLKSIELPVPDGKLLEEDLSLIAMLEERIATTEGLIEELCRGDEAVRWLRSLPGIGKFLSVLIRYEIDEIGRFRTAKKLAAYTGLVPSTYASGARLVHGRLTKEGNKWLRWTFIEAASSAIRVSHPLRRHYEAVKQRHGTKASRAATARKLVELTWTLWTERRCYEKR

SEQ ID NO: 202839 - protein, 343 aa, unidentified
MEQYAGIDVSLESVSVCVVDADGRIMREAKLACEPEALITWFGKLEVDMARIGLEAGPLSQWLYARMREAGLSVELLETRHVRDAFKAMPVKTDRTDARGIAQLMRLGWFRSVHCKSLPAQELRAILTARKLVQTKRHDLEMSLRGILRGFGLKVGQTTPRSFEARVRELVDGHPTLTVVADAMLLARAVLVEQLGKLQKRLVSLARQDMRARLLMSTPGVGVLVALTYAAAIDDPARFRSSKAVGAHFGLTPRKYQSGETDVTGRISKIGDAGVRTALYEAANVILTRPVKGSSLKSWAMRVAKRAGMRKAKVALARKLAVVLHRMLANGSAFVAGKAAAKA

SEQ ID NO: 202840 - protein, 403 aa, unidentified
MVKYHVGVDVGKDRHHVSIRDLSKDMYCKNFAVTNDRDGFTALITVLEKLSSERSDFLIGVEACSYALNLSYFLLALGFTLMEVNPFRAGQFRKAQGKKAKTDKIDARTIAAILSLDNHKPLSIPNPILDNLKEFTRFRVDLVNEKSTMIIHLREALSVLFPEYEKVFRQLDSAGSLALLAAYPGPEHMIGAGEEAVGKTLSLASPRRMSRGMARRIIEAARNTVGVTQKQLALGMKISVLAKRILNLQSTICDLDRQITALYNSLPCKPQGFPVGRAPSLATIIAEIGDIHRYRTLKKFLSHLGWCPQSFQTGNYRLEHPKMSHAGNKYVRRLIWMLSIFAVQFVPRCREYFKRRVSKGKAKMHIIVAVGRKLLSALYAMLKSGMAYDPKWEENGRLALARR

SEQ ID NO: 202841 - protein, 395 aa, unidentified
MFIVGIDIAKRSHEAIIIAEDGQVVRKAFSFRNNCTGYNLLLEQVRRLTLVKSQIVFAMESTAHYWLALYARLLKDGYTVMVLNPIQSHSLRELYIRKAKTDARDSLIIADLVRFGRCKASNVPQDKILALRELCRSRAYLVDMAADLKRKLIALLDRIFPEYESLFDSVFSKASIAVLRKYSTPQKVKNANLRKLTDILMESSNGHFGEWKAHQLKEAACSSFGIDDSGGVYSTLLGMFLEQILSLTAQADSLEKQISVFFQEFNNPLTSIPGVGTVLAATSLSEIGDITRFSSADKLLAYAGLDPSVKQSGEFKSNQNRMSKRGSPYLRRAIWLASTVAVHRDPMFQTYYEKKISEGLHYMNVIGHVSRKMTAVIFAVLRDGQPYQPILQSAG

SEQ ID NO: 202842 - protein, 321 aa, unidentified
MSAILGIDVAKSKFDVALYRDGKYKHKVFDNNPAGFDTLAAWLQQHNVPEVHACLEATGAYGDGVARFLFEAGHTVSVVNPARIKAYGKSELLRTKNDKTDAKLIARFCEAHKPPAWRPDPPEIEHLRLLGRRREALIGMRTQELNRLGGPDYAVNESVEKVIAFLNQEIEQISTSIKEHIGKHDGLRKKRELLKSIPGVGEVTIEAILSEINGFEGFDTVEKVVAFMGLSPKDHESGTSVKGKPKLCKIGNARLRKVLYMPTLSAIQHNPFVTALYNRLMAKSKNGMIIACACMKKLVHIIYGVIKTGKPFDPAYNIKTA

SEQ ID NO: 202843 - protein, 333 aa, unidentified
MNKITLIGIDTAKQTFHLVGVDAYGHYDWRKQLSRRRLLPSLAQVEPCEVVLEACGASHHWARSIQALGHTVRLIAPQHVKPYRRGQKNDYRDAEAIISAALSPGMRFVGVKRIDQQAEQALHRVRSRLMSQRNAAANELRGLLGEYGVVFRRGLKPLREGARCFAGTDEAHTLGLVDLVNDVLEEISVLQARMDHYERLIEQRVQADETSRRLREELNGVGKLGASALRVKVADVRDYGNGRHFAAYLGLAPGHSGTGGQVHIGHLKHGHDRYLRQLLIHGARAALRHLGDKQDPQSRWLRGLLERRGFNIASVALAHKNARQAWAIMASAQ

SEQ ID NO: 202844 - protein, 329 aa, unidentified
MEQFIGCDAHKKYSVFVAVNERGEASPAIRVVHDREQYRQFLEGLPAGSQIALEAGGHYYWMVDEMEAAGHQPRLVHPLEAKKRMGKTSKKTDQVDAHGLGILLRNGTLPEVWIPPSGLRDQRESLRLRMFLVQQRTRLKNRIQGALARYNIQIAGVNDLFGGEGRLRLGQRLGELPEHTRQSVELELVTLDFLEVQLGDIEKRLEELMKVTAEADLLKTLPYVGRILSMVMTLEIGKMERFASAAHLASYAGLVPRVHASGGHTRLGQICGNVNHYLKWAFIEAGNLVVIHQKRLAGQHVVRLYQRVKRKKNHQKAVVAVARHLAEAA

SEQ ID NO: 202845 - protein, 409 aa, unidentified
MSSENFTEVFVGLDWAVHTHAVCVIDAAGAVLDRFEVAHDRDGLAELMRRLARFGQRVRIAIERPSGLIVDALVEAGHHVFPIHPNAVKASRPRYRSHGAKSDASDAYLLADLLRTDGHRWRELSPQSDSIRALRALVRSRDDLVATRVALGNQLQSTLEAFWPGAACIFADITSPIGLAFLKRYPSPASAARLSDAALGRFCRSQHYSGRRTPAELLARLHSAAVGLAGPLTNEAAAQLVRSMVAVLQPLVEQTAHLTRRIERFIESLPDGQIIMSFPRAGHVCAAQILAELGDVRERFPSLDQLASEAGAVPVTYQSGKTRSVAFRWACNHRLRKAVTCLADNSRHANAWARGIYTAARGRGCDHPHAIRILARAWLRVIWRAWTDRKPYDPGLHVSAQKLASDQGG

SEQ ID NO: 202846 - protein, 346 aa, unidentified
MTIVDTTRSVTGGVDTHLDVHVAAAVDANGGVLGVESFATTPAGFRDLFGWLAGFGELARVGVEGTGAYGAGLARYLRGRDLEVIEVDRPNRQLRRRVGKSDTIDAIEAARAALSGRASGIAKTADGDVEAIRALLVARRSARDVRIKYLNQIRHLGFTAPDELRERLRGVPREHLARVAASLRPTAGTDTVLYATKLAIQTLGRRVLALETDSARLDRLLDELVHRYAPSLCDVYGVGTHTAAILLVAAGDNPHRIRSEAAFAHLCGVAPLPASSGKITRHRLNPGGNRQANHALWRIVFTRMSSDERTRKYVARRLAEGRTTREVMRVLKRYVAREIYPHLVHA

SEQ ID NO: 202847 - protein, 342 aa, unidentified
MEITTIGIDLAKNVFQVHGVNKHGKVVLRKQLRREQIATFFANLHPCLIGMEACGSAHYWARKLQALGHTVKLMAPQFVKPYVKSNKNDAADAEAICEAVSRPSMRFVPVKNIEQQSVLSLHRVRQGFVKARTAQANQIRGLLGEFGIVVPQGIAYITQRVPELIEDASNALPGSFRLLINRLLEHLELLHRQVDEIEAVIKTWHRDNEASQRLEKVPGIGPLTATALVATIGDARNFDNGRQLAAWLGLVPRQHSSGGKQNLLGMSKRGDAYLRTMLIHGARSVIYRATQKADPNNWVFKITARRNKNVAAVALANKMARTVWALLVHDRSFQPGYAPRAA

SEQ ID NO: 202848 - protein, 347 aa, unidentified
MVTIGIDTHKATLAVSTIDGTGRETGARTFPNDRQGHVGLLRWAQAHGSERRFGIEGSGSFGAALARLLVAAGEAVVEVPAILTERERRHLRRAGKSDPGDALAIARVALREAGLGPIPMPGITEDLKLLVDARDQRVGERTRIANRLHAHLVVLAPGYKREIRNLTAARHLAAVADLLDRLGGVRAELARAELARLRELEAESVVLEGRIRSLVRLTGSSLPTITGVAAITAAKLLGETGDPRRIHSTPAFALMSGTAPIPASSGQTSRHRLNRGGNRQLNRALHTIALVQARTDPRAQAYMARRMAEGKSWLEALRCLKRHLADVVLRTMLADLERSAKPAAMGA

SEQ ID NO: 202849 - protein, 357 aa, unidentified
MPSKLNIAIASVIGIDIGKNSFHVVGQDQRGTIVLRQKWSRGQVEARLANLPPCLIGMEACVGAHHLSRKLQMLGHDARLMPAKYVRPYSKGQKNDFRDAEAIAEAVQRPTMKFVATKTAEQLDLQALHRVRERLVGQRTGVINQIRAFLLERGIAVRQGLRFLRTELPAILATRSDVLSPRMLRLVEDLAGDWRRLDARIESLSDEIEALARQDQACERLMSVPGIGPIISSAMVAAIGTGDAFSKGRDFGAWLGLVPKQISTGDRTILGSISKRGNRYLRALFVQAAWVVLVKLGPKQWERYGLRSWIEAAKKRLHHNVLAVALANKLARIAWAVLHNGRAFECVKTDEMAPRSA

SEQ ID NO: 202850 - protein, 348 aa, unidentified
MKATTIGFDLAKNEFQVHGVDATGKAVVRKKLSRAQVLPFFARLAPCTIGIEACGSAHHWARKLTELGHTAKLMAPHFVKPYVKANKTDAADAEAICEAVARPNMRFVPVKNAEQQAILAVHRVRSGLVAERTAQLNRLRGLLAEFGLIAPRGRRALMERLPLLLAEETLPGVARNLFERQSTRIRQLEADISAEEAVILAWHRNNELSKRLDAVAGVGPITATALVASFGEGREFDSGRQMAACLGLVPRQHSSGGKTRLLGISKRGDTYLRMLLIHGARAVIRTLERRAKGASNPTDRWLAKLLTRRNPNVAAVALANKTVRVIWALLAHDRTYDRNWSGQRATTA

SEQ ID NO: 202851 - protein, 350 aa, unidentified
MLIIGCDYHPAFQQIAFADTDTGELQERRLQHREEAERFYRDLAAERMKVRVGMEASGHARWFERLLSELQFELWIGDAAEIRTKRVRKQKTDRQDAQLILKLMLEDRFPEIWVPSWENRDLRQLLWHRHRLVQARTRMMNQLQAVALNEGLRCKKKLFREAGRKQLEAFRLAPWASRRRHDLLELLDRLTPTIAELTQAIEQEVEKCPAARRLRTHPGVGPLTALAFVLIIGKADRFQCGKQIASYLGLVPLEKSSGNQRRLGHITKQGSTLLRFLLVEAAQVTARSLPEWRSKYYHLTMRRGRKIAKVAMARKLAVRLYWMMRKEWDYGQLTKFGSYAGKPENRDGVK

SEQ ID NO: 202852 - protein, 414 aa, unidentified
MFKIFRNNCCGLDVHKTWIYACIGITDPNGRTEYKQARFSSFSNGLRELAAWLARYSCTEVCMESTGKYWIPVFNILEKSCFVTLAHPKYTKPQKGNKTDRKDAKWICDLFMCDMIKPSFIPSPEIRQLRDLMRYRFKLTNMLTGEKNRAQNCLTVSNLKLDDVFSDVFGKSARSITCYILDHPGETFDVSSFVDPRCKTPVSEIQAAVDGAISPEQAVKLRQCLAHIDELEAHRKEIESEILQIAEPFSAVLDLLSTLPGLDKNKNPMTAIAILSEIGPDMSVFPSSKHLVSWAGCCPRNDQSNQKVKSRRISRAGSYLKPLLVQVANALIKSKKHPEFKERYHRIKSRRGHKKATIAVCKMLLTAIWNMLSKLEPYNPEGFLEHRPVRQEKTLTVSQALELLRLRGYTITNP

SEQ ID NO: 202853 - protein, 437 aa, unidentified
MAKQKRSTFERLSSGAMNRQQRRDLARRLAGNDPGLAIVHSNAGGIDVGNESHFVAVPPDRDANPVQEFGCWTADLKRMAAWLNACRIDTVAMQATGVYSIPLYDILTGHGIGVVLVNAQHTKNVPGRKSDVQECQWLMKLHTYGLLRDSFRLEEKMESVRTIWRLRDRHVKDASRSVQHMQKALTKMNIQLANVISDITGVSGQAIIAAILKGERDPWKLADLKHAMVKASRDEVARSLEGNWRDDLLFELRQAVDSYYFAHQQMRDCDQRLESFLASLPARTLERPSQSAETPTATTPPEKKARKKPKARRNEPTIDLKTELKRICGVDLTSIDGIDVITAQTILSEVGTDMSGFPTENHFASWLGLTPSKDFSGGKPIGTGKRKVQNRVAMALRMAATTLLNSKTYLGSRYRHLRKQLPPLLQQSRPWPATWRC

SEQ ID NO: 202854 - protein, 346 aa, unidentified
MFVACVADGAGRVIETREFNRSGFVAWLSTLPQGTVVGMEACGGAHCWGRTMQALGLEPRLMAAEFVRPYRKRQAVKNDRADAAAIVAALLAPGMRFIPVKTEAQQHRLAWHSLRLGWIEERTALLNRIRGLLAEFGMVVDTGAARLRHKLAELEFDTAQPAPIRHLIQSVRDQLDALDARIAECDRQIAAQQADDAAARRVRDLPGVGMLTADAVVASVGDATMFHNGRQFAAWLGLTPSQYSSGGKPKLGRITRRGDDYLRTLLVQGARSVLAATLRKHRSAPAALTRLQQWIVTLNARVGYHKTLVAIANKHARQLWAVLAKGEAYNPEAWRQGHNMVEQPAS

SEQ ID NO: 202855 - protein, 355 aa, unidentified
MNNEKYIGLDVHQATIVVAVMDSTGKLVMESILETEAATILQFFAGLRGTLSVTFEEGTWSAWLYDLLNPHVDKLVVCNPRKNALLKDGNKSDRNDARKLAELLRGNQLKPVYHGETGVRMLRELSRSYLTIVKDLSRVMNRLKAVYRSWAIPCAGRDVYYTRNRVQWLAKIREAGVRRRAERLYEQLDMLQHLRQQARRELLAESRKHAITAKLRQIPYLGPIRSALAVALIQTPHRFRSKRQLWAYSGLALETRISAEYRMVEGQVRRSKKMLSIRGLNKDHNHDLKGLFKGAATMASARPGPFQEFYQAALAKGIKPTMARLTLARKIAAITLTLWKKGEDFDAEKLKSQAA

SEQ ID NO: 202856 - protein, 377 aa, unidentified
MDQSTTVYVGLDVHKDSIDIALADAARDSEVRHLGTVAGGTDAVSKAMRRLVSAGHRLYIVYEAGPCGYALQRHFAGLGWRCEVVAPSSIPRPPGERVKTDRRDAMKLARLARVGELTPVRVPDEADEALRDLVRAREDAVREQRNARHRLKALLLRNGITYAGKSAWTAAHLRWLAQLALPHAAQQIAFQEYLHAVSESGARITRLEHALRDALPTWTLAPVVAALQALRGVQLIAAVTLVAEIQDFWRFANPRQLMAYLGLVPGENSSGQRRRLGAITKAGNAPARRMLVEIAHLYRHPARVSPVIARRQAELPKTVTDIAWSAQTRLCARFRRLAARRMPHNKIVVAIARELAGFVWAIAREVTPAPSTPQRQQ

SEQ ID NO: 202857 - protein, 317 aa, unidentified
MEETSVGIDVSKSKLDIYLLPEKRYLTVSNDKKGFQKLIKFLKGYNTRLIILESTGGYELLCAYALSEANLPVSIINPKRIRKFAGAKDLNCKTDKVDAKLIAEFAHVMKPEQRELLSKELRELKELISRRTQIVDQITAEKNRCETVTNQYVIKDLQQTISLLNVKVKAIEEEIFKNIEKNTEYKSLYEYLISLKGIGKITAATLIADFPELGYLGREEAAALLGVAPYNSDSGLKQGKRSVKGGRKQARDVFYMATLSACQWDDRIKEFYQRLVSKNKPKKLAITACMRKFIVIINARVKELRIFNHFFDFLTCI

SEQ ID NO: 202858 - protein, 334 aa, unidentified
MKQVNDIGVDVDSEKLVCAMQRAGERRPLATFANTAAGHKRFIRWVSKGARAARVCLEATGIYSLQFALALHEARNVEVMVVNPRAIKDFARACMQRAKTDAVDAGGILEYLERMPFIAWQPPAPEILQLQAINRRIVQLQTELTREKNRCHASEFAGASGDAIANDIEVNIRHLERRIERMHDSGIHLVRSVSSLATKLAHLISTKGIGEASAMRLLAELLVLPDDLAAPQWVAHAGLDPRPYESGTSVHRPRGITKVGNRYLRAALYMPAVVAIQHEPNVKAFYNKLVAAGKKPLQAVVAVMRKLLHAIWGMLKHDQDFDGNKFFKLAEKTA

SEQ ID NO: 202859 - protein, 322 aa, unidentified
MKQKPVLGIDVSKAKADCGLLWADSKYRSKVVGNHAAGFAQLYQWLQKYDAGQAHVCMEATGVYWEELALALSAQGMAVSVVNPAQIKAFGESRLVRTKTDKIDARLIAEFCRAMQPPLWQPPSPSEQALRALVGRLDALQRMRVQESNRLEVARDAVRSNIEAHLHWLDQQIKALTQQIDRHIDQDPELRRKRDLLDSIPGVGGRTSALFLAFCSRTEAFANARQCAAFAGLNPQQHQSGSSVRHPARLSKIGHALLRKAMYMPALVTLYKTPWGKAFRSRLRAAGKPPKLIIGAMMRKLIHVAYGVIKSNKPFDPTLHAT

SEQ ID NO: 202860 - protein, 357 aa, unidentified
MKKTYRLQDYVVRGKEIFVGLEDSKRTWKLAVRSEKMVIHQVSMEAKYPVLIGYLRNKFPDCTIHVMYEASFKGFNLYDQLTADNIDCVVIPPHVVTEPKVNRIKTDKRDAKRLAMVLENHDFKEPCYVPDKERREDRQVTRTLIALQKDIIRTRNRIHRFLEFHGIEVSFPDRWGRDEFRALKKIELSEPLRISLDIFLTQLEELWAHQVALRAALRKLCKKERYHKAYDIARSLPGIGWFTAIRFVLELGEDLTRFTSGKKIASFVGLTSSEDSTGERLQKGRITGMGPGFIRATLIENSWGAIRKDPVLLAKFTRVWHASGSRKKAIVAVARVMIVRFRTCIISGTPYAIGVAA

SEQ ID NO: 202861 - protein, 418 aa, unidentified
MLVAGIDVGAEVHHVAVVDESEAVVTQPTAFAENAVGYDKLFALLGRAGARGGADLPLATASAAPPSTLVVMEATGHYWQNLLAALTAKGFAVALVNPLRTHRFAGEELARTKTDRLDCWQIARFGAQKRPAPSYLPEAAVEELRELMRLRERLVEELVARLNQLHRLVDLGFPEFTRYLKDLNTELATALLHQYPTAQAFRGISRKRLARLSYDGRHQVGTELAQQLIAAAAVSVGSQHSSSHQLGVRYACEDLETLRKRLKRLDGAVAGTLQQHQVGQLLTTIGGIGDTTAAMIIAELGDPARFQSAGALAAYVGVCPAHKHSGKHQPKRSSLTPIGNRRLRHALWMPTLSAATHSNPWLMLFYRRLIERGKPHKVALCAAMRKLLAAIYSVAKHRRPFTMDLNLQSRLRVSYENA

SEQ ID NO: 202862 - protein, 344 aa, unidentified
MGEVSTIGLDIAKSVFQVHGVDADGAVVIRKRISRLKVLEFFAALPRCLVGIEACPSAHYWSRKLQALGHTVKLMPPSYVKAYLKRSKNDANDAAAICEAVTRPSMRFVPIKSEQQQSGLMLHRSRQLLVRQRTMLSNAIRGHMAELGIISAKGRNGTAELLAVIANADNDRIPAVARLSLDALARQYANTTAEIRAIEKHIHAWHRSCEESRRLEDVPGIGPIVATALVAEVGDWKAFSSGRNLAAWIGLVPKQHSTGGKYRLGGISKQGNRYLRWLLVTGAMAVIRYARQHGTKRLWLAHIMERRPIRVAAVALANKIARMAWAMMVRGERFKEPKLLPVAA

SEQ ID NO: 202863 - protein, 284 aa, unidentified
MTNIQPNKTDTESKVSHFAGIDVGAEELVLVILKNGKPFDPQKFSNTPADRARLVKKLVKLPGIVVCLEATGTYHFDLAIALHDAGVLLMVVNPKASHNFAKVLMKNSKTDAVDAHTLAEYAARMDFVVWTRPSDETLNLRSFARRINALTGQKAAAKNHLHALTSTQETPKAVLRDAKLAITQLEKRIDRLTADALILIGKHSELTRILALLIGIKGIGETSAIALMGELLLLPPGLSHREWVKFAGLDPRSFDSGKSVHKKTRISKAGNAHIRSALYMPALR

SEQ ID NO: 202864 - protein, 312 aa, unidentified
MEVLYPRCAGLDIHKDLVVACVRVARGRKVHRELAEFGATTKELLRLHDWLSSHKVTHVAMESTGVYWKPVWHILEGSFSLVLGNAKQMKHVPGRKTDQKDASWIADLLAHGLIRASFVPPRPIQELRDLTRTRRQLVRERARHIQRLQKVLEDANVKLSSVLSDIMGVSGRRILQALVAGERDAMKMARLAHPSVKASHAQIAEALEGKVTQHHRFMLALHLRHMEGIEAEVQVLEERIRKALEPFRRAVEIIVTHPGVQEDAAAAIIAEIGTDMSVFPSADHAVAWACLSPGLNETGKKRKAAPRDARNG

SEQ ID NO: 202865 - protein, 372 aa, unidentified
MNQNILHVGLDVDDTQYHGSAFNRATGEIIDFRCRPTLKGLLTQLDKLQRHFRGLSIRLCYEASYVGFCLQRDLRAHDVHCEVVAPSSIPSPRGKAVKTDRIDAGQLAQFYANDLLTIVQPPDAEQEPDRDLLRTRQKLLLQREQLRRHMHALLRRNGLHYKAQTGYKSHWTKPHYAWLQRTIKGSSGSLQVNLNLLLCQIRGLDGALVAYGQRIEELAGTPRYREAVRSLTCYKGIKNVFALTMITEIGDIQRFAHPRQLMSWIGMDIREYSSGGRHNRLGITKQGNRYLRTAFVEANQRGYRSSRIGKELKARRQDSTPELIAIADRCMRRLNKKGNRLLLAGKHPNKVKVACAREMVGFVWESLNAVAA

SEQ ID NO: 202866 - protein, 341 aa, unidentified
MQIKQIGIDIGKNSFHVIGLGMEGDIVLRRQFTRSGLIAFFKQKTERLEIAFEACSGAHWLAHQLVAMDHEVRLLTPESVRPFAKAQKNDWNDALAIAEAAQRPGRHAVGVKSQEQLDIQALHRVRQRLITARTAIINQVRGLLRERGLVFGSGRMRFDRFLRELLTGQEIQLNSVCRALFATLAAEYEAVDARIEEIDADLATFAKSSSACRALLSVPGVGVIVATALFSAVANISDFRSGRDLAAFLGLVPRQRSTGGKTTLLGISKRGNTYVRTLMIHGMRSAFYNRKKRENGLSTFMERLVERGMHANKIVVASANKAARIIWAILTQSTSFQPNAA

SEQ ID NO: 202867 - protein, 343 aa, unidentified
MQPITIGVDIAKSVFQVHGVDGDGEVVVRKQLRRAAVEAFFAGLAPCLVGMEACATSHHWARVLGGLGHEVKLMPPSYVKPYVKRGKNDAVDAEAICEAVTRPTMRFVAVKSAEQQSVLMLHRSRELLVRQRTMLSNAVRGHLAEFGIVTALGIDKLEKLVVALLEDGDDRLEEMARDVLAQLAGQMRDLQARIKELERRLEAWHRSSEASRRLATIPGIGVITATALAATVTDASAFGSGRHFAAWLGLVPRQSSTGGKERLGRISKMGDRYLRRLLVVGATAVIRYVKRRATPLAAWADTLLARRPARLVSVALANKLARIVWAVLARGGTYRAIPAAAAG

SEQ ID NO: 202868 - protein, 339 aa, unidentified
MQLYAGLDLHSRNTYIGILDHEFNRIFKKRVANDLKLILKTIEPFGSQLKGLVVESTYNWYWLIDGLMDAGYQCVHLANPSAIKQYEGLKHADDQHDAFFLAHLLILDILPQGYIYPKEDRPVRDLARKRMFLVQHKTAHILSLQSLIARCCAIRVSSNQMRHLTLDDLQHLLKEEHLVLSAQANLDSIRFLTQQIKKIEKTINKKIKLNSAFQNLLTVPGIGNILAMTIMLEVGDIRRFAKVGNFASYCRCVPSRRLSDGKSKGHGNRKNGNRYLSWAFVEAAHLTRRHCQQFRRYYNRKVAQANTSLATKALSNKLARICYYIIRDNVPFREELSVL

SEQ ID NO: 202869 - protein, 412 aa, unidentified
MRVLHERCCGLDIHKRFVVACLLTTSVDGTVHKEVRTYSAMTNDLLALADWLRAEDCGPVVMESTGSYWRPVFNLLEEQCEVLVVNAYHVKAVPGRKTDVKDAEWLADLLRHGLLRASFIPAPAQRHLRDLTRYRVHLVDERARLINRLQTVLEDANIKLASVVSDVRGLSAREILQRLLEGETDAQALAELARGKLRAKREALAQAVVGRLQEHHVFLLREQLAHLDYLDAAIARLDAELAARLAAEQEAVALVQTIPGVAQRTAEVLVAEIGTDLSRFPSAEHLASWAGMCPGNAESGGRRLSGRTRRGNAWVRRTLAEVANVVSRMKGTYLAAQYHRIAARRGKGRAVVAVGHSVLVALYHMLTRHEPYHELGADYFDDHQRELVQRRLVHRLERLGYAVTLDPLTTPS

SEQ ID NO: 202870 - protein, 387 aa, unidentified
MTEIRCLVTGGVDAHSDSHHAAALDERGRLLGDSAFATSAEGYQELLAWLESFGQVARVGVESTGSYAAGLARFLAARGVAVVEVNQPHAHTRRRRGKSDPLDAEAAARKVLAGEAAGVPKHTGGIVESIRQLRVAREGAVKANTAALNQLYELVITAPDELRQQLAARKTSRGKASLCLRLRPDRARLHEPLQAAKLALRSVAERVRDLDRQIGLLDQDLAPLVATAAPRTMSLLGVSTQHAGQLVVTAGQNIQRLPNDGAFARLCGASPIPASSGRTSRHRLSRGGDRKANRALHLIAVCRLRYCARTRAYANRRTAEGLSKPEIIRCLKRYIARELYHTLRADLADLNLSAASAQQAVTINCGAGPIGITPTRSTTSRRRRRRT

SEQ ID NO: 202871 - protein, 392 aa, unidentified
MTSMTSAEVVVTGGVDTHQDQHVAAALDHLGRVLGTQSFPTILSGYRQLHRWLSSFGNLGPVGIEGTGSYGAALARFLGQQHVQVIEVVRPNRQVRRRYGKTDVIDAIAAARAVQSGEATGQPKTHDGPVEALRVLKAVQRSGNKARTQALNQIHQLLVTAPEQLRAQLDGLKRADLLATCSVFRVRADDDSLPTMTRLALRELAQRVTHLDAQLAAVTARLARITLAVAPDLMAIKGVGPDVASTLLVTAGDNPDRLSHEAAFAALCGSNPIPASSGKTTRHRLNRGGDRHANAALWRVVLVRMSCDNAPATTSNDAPQKAKASPRSCAASSDTSPARSTSPYRQQSRLDSRSITYLTGSLIRDNAPMSLSVRAAQISDLPAVLALAPLLQ

SEQ ID NO: 202872 - protein, 331 aa, unidentified
MQRKEIFIGVDVSKETLDVAVSSNRNHIRIANSSQGFKQLQAWLKSLQIALADCWVVLEYTGGYEYRLVQFLQSKQICFTRVPGLEIKKSLGMQRGKTDKIDACRIAEYGYEKKEKLKPHKACNAAIASLKQLLTQRRGFVKDKKANEHRMKELQSMMEFKNNDSLIKNYKQAVNFAIKMIDKTEVLLIKIINSEESMSRNFKLITSVPGIGNVNGWMTIAYTENFECFSDARKYGAYCGIVPYDHSSGKSIRGKSRVSHMANKTIKADLDMGARASIAHDPEIKQYYQRRSAMGKHHMSIMNEVKFKLVLRMFAVVNNQEFYVKKLQSAA

SEQ ID NO: 202873 - protein, 394 aa, unidentified
MRKDVTIYVGIDFSKEKFNACLLMEAGIMGESEFPNTKVGYLKLLRWVRKTSELGRLFDVTSVLFCGEHTGTCSIGLCEYLYSARMKVWLETPLKIKYGSGLNRVKDDKADAEMIAYYAKRFYEPDSCELFEPDSEDLKSLRSLYQFRNRVVCDRVAMGNRILSGAFNCSPLVKARMKKHHKAALEDEKEIEREMVKIMESSPELASNYRILVSFKGIGPITAAALIIYTSNFKKFNSPRKFACYCGIAPFGKQSGTSINTKPHVSRFAHIGIKAALVQACKSAIQHNPVIKAYARKLYGKGKHEGVVMNNVKNKVIHIIFKMIQTQTCWNPNYQEAHMNKKEEILKEHEKGATKVTPFIDDYSNILPPNQECAFMEENIIFQEKSPLFICIKT

SEQ ID NO: 202874 - protein, 357 aa, unidentified
MDKVLKQCLGIDVSKLSLSLSLGFLTDKLAKEFLVHNDVTNDLSGYKELLKWMKESVDRSTDLLIVMESTGVYHQGIAHYLYELGYSVSVMQSGRVKRYAQSLDQRSKTDALDSKMLSMLGLERELRLWSPPSVELQQLKMLSRERSSLLKDKTIETNRQGAIVSGVYRDKSASKRHKQRLKLLKDQIVSIEEEMRELISKNEFLKKKLGLLESIPGISFISAATVVGETLGFESIANAKQLTSYAGYDVVLRESGNFKGKTRISKKGNSHIRAALHMPSMTCVRCNPTLKQFYNRLKPNKAKPLVALIAVQRKLLILIFTLWKNEEIYDADFEKKKQQKHKALAAQDNKLINQYVS

SEQ ID NO: 202875 - protein, 447 aa, unidentified
MSTTATLAVLDALAAFVDVGSEQMHVSIAGGPPEVFGTFTTELHRLRDWLQERGVKSVAMEATGVYWLPLYGVLESAGMKVSMVNGKQTRNLPGRKTDMKDCQWGATLHAHGLLQAGFVPPAQIRCLQDYLRLRADHLASGAACVQHQQKALERMNVKLHDVISSLVGESGIKVIEAILAGERDPERLLELCDVRIKKKKADRVKESLRGTWAEEHLFALRQAVENWRHYQGQIAACDRQREAVLRQINGPDQPGDPLPPPALKRGGANAPQIDGLHGLLFKLCGSKDLTVLPAHTDYSLLQLVGETGTDLSQWPTEKQFTAWLGLAPGSHQSGKRHRSVRRKRNRAGRLFCMMARSLAQSKNIALGGFYRRMAARRGGLVATVALARKLATLYWRVMVKGLSYVEAGLKAYEDQVLETKCRALKRLAKQLGRIVLPSLAEIQTAQS

SEQ ID NO: 202876 - protein, 428 aa, unidentified
MLKHNTEPDPAEEFAAFLAIDWADEEHAFRLQVVGQNKVETGTLEQKPHVLGPWVAKLRERFGGRPIAVGLEQSRGALIHALMAHDFLVLYPIHPTTVAKYREAFKSSGAKNDPLDAGQILEILTKHQDRLHRLNPDTVETRLLGRLVEDRRKAVDLRTSHLQALGANLKEYYPQALELTHGNLSSRLACDLLLKWPTFEDFQQAKPSTLKRFYYGHNVRSPEVIERALALAEKSQALTTDSAIVESGRRLTQMYARLLQALSPAIADYDQRIQRVFDAHPEAQLFRGLPGAGPVMAPRLLAFFGTDRSRYAAALNVQSFTGIAPVTKSSGKSKVVHARAACPKFDRQTFHEFSRLSVTHCQWARNYVQYYTDKGKKYHTIIRALAYKWIRILFKCWKESTPYNEDKYMETLKKRGSIFATWHLQKTS

SEQ ID NO: 202877 - protein, 317 aa, unidentified
MTSSLDVYVGIDVSKKQLDLAFEPDNGAKQFSNDDVGIAELVAQLKSPVPRLVVLEATGGLELLVTAALAVAGVPVVVVNPRQVRDFAKAIGRLAKTDQLDARVLALFAKAVQPEPRPVRDAESQALEDFVARRRQIVEMITAEKNRLSMSRRATAQDIEVHIRWLEKRLTKVDSDLHDRLKQSPVWRAKDELLRSVPGVGPVLSVTLMASVPELGKLNRKQIAALVGVAPLNRDSGGRRGTRAIWGGRADVRRALYMASVAAIRCNPVIRDFWQRLRNAGKKPKLALVACMRKLLVTLNAMIRSGAPWRTCQPQIA

SEQ ID NO: 202878 - protein, 684 aa, unidentified
MGGLTNATVATAETTEELRGALERLNDFNNYARNSDFSDVLADAVVGSVTNATGPDSLPASESGKAAVVYGLGGAALGIVNTPAALTVMLVPEVILDATNGDTVIDVTNAITGAEISSPEEIVLDQIEVLEVLESLASGEAVATNEVIDVIEESLGYIKNNTTVSPAAAALAADVEEKLEAARENAIDPLGDGSAPGVNDDGGDADNRTDNEIIEDLIEEILREEAKSTTKSDNDGSDSPHAPTTSIRPVARPDDLDTSGSTKADEKDEPIRAFGTFTHDLHDLVAWFKSHGVTSVAMESTGVYWIPAYEILEQHGFEVILVNARYAKNVPGRKTDVSDASWLRQLHSYGLLRGSFRPAAQIATLRAYLRQRERLVEYAAAHIQHMQKALMEMNLQLHHVVSDITGVTGMKIIRALVAGQRDLDVLASYRDVRCRASVETIKAALNGNDRPEHIFALTQSLELYDSYKGKMLECDRHLETTLATLGADTKHDPSQLPRARTKTKQVSTPSFDVRAALFGVLGVDLTEIHGMGPSLSLKLVGECGTDLRAWPSAKHFTSWLCLAPGNKISGGKVLSSRTRRSSSRAAALLRLAAVTIGRSDTALGAFYRRLAARAGKAKAVTATARKIAVLFYNTLRHGMTYKDPGASHYEERYRNRVLGNLKRRAKSFGYGLQELPSEADMAVS

SEQ ID NO: 202879 - protein, 415 aa, unidentified
MEKVYDICCGVDVHKKLIVACLRSGRKNEIRQYGATTRELLEMASWLYEARCEMVAMERTASYWKPLYNVLETWELPVMVVNAHHMKAVPGRKTDVQDAEWIADLLQHGLLKASYIPGKEQRELRELVQYRKSLIEDRGREVNRLQKMLEGGNIKLSGTVTQINGKSARNILNFITDGGYFDDAKYDEMLANKEIASNLKASKEQIIDDLNGVLSPIQRRVMKELLSHLDELNEHIRNLDDDIDRFMKQEDKNAADAIQEIPGIAATSAQVIISVIGNDMSRFPSDRHLSKWAGLCPGNNESASKRKSGKTTKGNKMLRTTLVNCAHSAAKVKSSYFSALFARISAHRGKKRAYVAVAHSMLIAIYHVLNDKVAFRDLGADYYNQFNRERKANGMLKKLKALGYEVTIAAVPELA

SEQ ID NO: 202880 - protein, 341 aa, unidentified
MDIVVLGIDLGKNVCSLVGLDGSGRVVVRRRVRREALERFVGGLPRCIVAMEACCGAHHLGRIFGAQGHEVRLMSPEYVRPYVKAQKNDDRDAEGIAEAATRPTMRFVPVKSVAQSDVQALHRARERLVAERTALINHLRALLLERGITVPQGRGKLAAELCTFADEDDSRLSPRIRLLVEDLRREWRGLDERIAAFDAEFVALAREDAAARRLMTIPGIGCINATALAAAVGDARTFGRGRDMAAWLGLTPRQRTTGGKPRLLGISKRGNRYLRKNLIHGARAVLPRLADQDTPLGRWSRALLARAPKNVVIVALANKLARIVWAVLAHGRDYDARYATA

SEQ ID NO: 202881 - protein, 400 aa, unidentified
MKKPCIAIDVSKGESHVESYLDLNKLFIKATKIKHDAEGFNYILDVVKKVEDKVGEKPVILFEATGVYHKTLEFYVGEQNLEYFVINPLHSAKFRKRELRSVKTDKRDCSNLAKMYYNGLLMESYKEEEIYNELRQLNRYYETQVSHLVKCKVNFNEKLDIVFPGYNGLFANLYNDIPLLIIKKYNHPKNIVGKEISSIAKHLESKTTHRKAYCINVAEKLISFSKQCCPGCDKKSVDVDILLGMINELEYYQDLCEKTLNRIINLAKNLPYFNILHSIPGIGENLAARLIAEIGDITRFENTKQLIAYAGIDPVIYQSGQMSGEHLKMSKKGNKRLRRLLYLAITCMLRNKSENNSIRDFYEKKMQQTTGMKSMVASFACANKFLRTIYSMCINGTLYQ

SEQ ID NO: 202882 - protein, 336 aa, unidentified
MLLYCAIDLHSNNNVPVVIDQHDNILFQRRLPNDLDTVLLVLEPYKQHLFGVAVESTFNWYWLVDGLSDAGYPTCLVNTTKVKQYSGLKHTDDKDDAFWLAHLMRLGILPTGYIYPREQRATRDLLRKRAQLVRHRTTHVLSIQNQYWRNTGVKLKADFIKRSNDYLGEVEDEDIRLAMESNHLVIQALDEQIKQIECRVKEQVKLLPEYELLLTVDGIGDILALTVMLETGGIGRFREVGHYASYCRCVDSQLRSNDKKKGEGNEKNGNKYLAWAFIEAANFAKRYNEKARRFHQRKKAKTNNVVATKALAHKLARACYYIIRDQVPFDENKLFA

SEQ ID NO: 202883 - protein, 427 aa, unidentified
MAYRIAAVDVHKKMLAVVVADVALEGEYAFARRKFGATPDALHLMAEWLVGQEAEEIVMESTAQYWKPVWGALERYWKPARQKREGATKMSGTLHLCQAKSNRGPRGRKNDFADGERMVKRLVAQELTLSFVPDPEQRLWRAVTRRKAQLTRDTVRLKNQLESLLEQAHIKLSSLVSDVVGVSARRMLQAVAEGETDPAALAALADCRLRATPAQLADALGACGQLPGAYRRLLKMALEQLRLMEEQIEQLDREALDLLQQHQEAVLRVAEVPGFGVESALQMIAEVGPETAAFRSAKALASWVGVCPGSEETAGETKSTRSPKGNRTMRRLLNQSAHAAIKTKGSIFDVTFRRLLPRLGYKQAIWAIAHQLCRLLWLILHQGVRYQERGLEVSAKSRRTRTARMIRELKKLGYRVEGGSVPAANLA

SEQ ID NO: 202884 - protein, 336 aa, unidentified
MFQLGIDVGKKTLDLCLLREGVKGRVKTRKLKNDFNAASTVINWLYKQHCEPADVHIIMEATGVYHESLAYGLYKAVARVSLANPYRSREFARGMDILTKNDQVDAYMLACYGALKEPEPWIPPPESVRYLSALLRRRDALVTDSSREKNRLEKCRATDVPPVVAESIENVLRNLSAELEHLEALILTHLDQHPELKKDYDLLTSIKSVGVQLGLNMLVILRSHRFETAEQAAAFLGVVPVEKFSGTSVRGRSRLSKIGPPEIRAKLYLASLCGLRFNPVMKAMYKRLCQRGKATMCAIGALMRKLVHWCYGVLKTQKPFDAEYLSLDARSACKAA

SEQ ID NO: 202885 - protein, 351 aa, unidentified
MKKIFIGIDVSKKTLDASVIIPSQSDDQPLIKAYGKFENRRGGFRKMVAMVRKEAKGIDTSEWLFCCETTGAYDTQLCDYMAEKNIDIWREHASRIAKTRPNHGKDDRKDSQLIAEYAWRNRDKARAYVPASSSIKDLRQMFLFRRQLVEMRKQLMTRVSELKELFESNKTLSYIFRDSQKQIDRLSASIKDCENHMRELIANDAALNKSFTHVMSITGIGLVSAVAMLIYTGNFEVIDSYKSFACYCGIVPFYEDSGTSVHKREYIGHKSNKMVRVYLIQAAQSAARFNPDMVKYKERMSAMGKAYGVIVNNIANKLLRIAYSLVEHDCDFEANHEFLRAERISETVKSA

SEQ ID NO: 202886 - protein, 338 aa, unidentified
MEYGAIDLHKQRSVIRIVDAEGRVVLERTIATVRDGFERVFAGRGPMRVVVETGTESEWVAQAVEACGAEVVVVDPNYALMYGVRQRLVKTDRRDVAALAEANRLGIFRPAHRVGAAQRAERRQLRVREQLVRVRTRAINLLRAQLRQEGYRLGSGRAESTVARYERLGVATALAEQLDPLIALLTHLAPEIAELDGAAAARAAADPVTRRLMTTPGVGPLTALSYRAALDEVGRFADAGQVTAFLGLVPREDSSGSRRRKGGITKAGPSHVRTLLVQAAWTLWRQRRSVDPLHRWVRAVAARRGRGIAIVGLARRLARVLFAIWRDGVPYRVMASAA

SEQ ID NO: 202887 - protein, 445 aa, unidentified
MAHANRLSRGDVRRNARLDRLRRVVSRDHAVLAVDLADDTQVVVVCDHDSRVLARRTWRCRPWQLDRALGWGLAVACRHGFAGVVVACEPTGHRWRVVVEHATRLGLEAVCVQPLLVRRAREAEDFTRDKSDDKDALLIARLTTQLHCYLPERPTAAWARLRHLGNRRVEQLTLATAAQQRLRDLLECGWPAALEVTRHPLDSSTWRAAMTVGRCDPARIRRLGLARFARAVARELPRWGGRRRNLRILRALYAATGDDRGVTSQRAGSLERSALVLTDFKQALAALAEVEGRMAKVLAELGLAELVTSIRGVSVVGAAAILAETGDPTRFDDAKAVVKHAGLCPRDNASGAFAGKTTISGRGRPLLRLAAWRAVWGALPHNPVFAARYTHLTSRQRNRLSDGQARTAVAAALLRQLWVVCVNRTPWEPAVAGGTIRKEVTDPAA

SEQ ID NO: 202888 - protein, 422 aa, unidentified
MQVIYERCAGIDVGKDVIAVAVRKPGKGPDGRVTEKRMYKTFYGVLAEAAKWLVSQGVTHVAMEATGIYSMPVYHALLEHGDFERVLVCNAGHVKNVPGRKTDLADAEWLAQLLECGLLAGSFIPPAEVKAVRDVIRYRAKIAQQRVSEIARLGNVLQDAGIKIDSVASSIATKSGRAMIESLIDGERRGAVLADLARGKMRSKIPDLSMALEGRFGEHHAMLCRLHLDHLDHLDGMIAALDAQVEKMMQPFRAARDLLVTIPGLGPLSAAAVIAEIGASPREFFPGAAHLASWAGLCPGNHESAGKRHSGRRRPGNQHLQPVLVECAWSAVRHDGYLKALYHRHVMKWGGYRSPVAKNKAIIVVAHALLVIVWHVLATGKPYADLGSDYFARRQDPGRETRRLIARLEALGHRVTIEDPAA

SEQ ID NO: 202889 - protein, 320 aa, unidentified
MTKKKSKSFIGIDVSKQHLEVAVHESDCQFRCANNVNSFGKLIVELIDWRPALVVLEATGGLEIPVVNALHAAGLPVVVVNPRQVRDFAKALGQLAKTDRLDARVLAHFAAAIKPPLRPLKSKEEQELAALTGRRDQLIEMLIDEKNRRAAAASDTVRDQIKAHIDWLEECIAELDEQLKALLQSSAPWQAKDDILQSVPGIGPVVSFSIIADLPELGTLNRQQISKLVGVAPLNRDSGQQRGTRHIYGGRAELRRVLYMAALSASRYNLVIKEFYERLCAKQKPFKVAITACMRKLLSIINVMVRDNTCWKSPQQTVSA

SEQ ID NO: 202890 - protein, 358 aa, unidentified
MNVIHYIGLDVHKKTISYCIKTAAGQIVKEGTLAAERTVLRSWAGSLPQRWCGAMEATIFSAWIYDTLKPYAERLDMGHPAKMKAITAGKKKSDSIDARTIADLVRCHLLPGCYVFSPELRDLRRLMRYRHMIVQQAVRMHNKTAGLLMESGVSFHKTKLHGKKYFADLIKSLEEVPESVKDLLRMSRATREMFENVEKQLVRRLLSDPALRQRVERLSSIDGVGPITALTWALEVGDPHRFASIADAVSYCGLTAALRSSAGKQQRGPLSKQRNAYLQTSLIEAAKLAPRWNPQLAQMHAQQLERGHANRATLQVARKLVAYLLAVDKSGQPFLVRTPPPKNLPAKKKARRSLASAA

SEQ ID NO: 202891 - protein, 404 aa, unidentified
MWYVGLDWADTHHDVVVLDEAGRRVGSRRFAHTHDGLNELKQFLLGIAASPEDLACIVETSHGLLIAFLLEAGIPVYPVNPKTAHQLRKAAGAKTDQIDAYLLAKTGRFDLAELRRLVPDSATVQELKTLTRDQDALIQTQTRLVNQLTACLKEYYPAALHLFAKVQQRSTLVFLQAYPTPQAAQAASLEEITATLRLGKHTNPTRVAPKIFEELHRPQLVASPVIVRAKSRLMLSLVKQLLVVIQEIAGYDAAIRPLFLRHPDQEIWSSLPRAGKRLAPRLLAEWGEDRNRYADATSVQTLAGTAPVPFQSGNYAKAHKRFACVKPLRNVLHQFAWQSTRQEAWALAYYQRKRAEGKTHSMAVRALANVWVRIIYRMWVNKTSYQTATFEAAKRAHASRPHAA

SEQ ID NO: 202892 - protein, 406 aa, unidentified
MAAMMIGIDPHKGSHTAVAIDELEQPLGELRVRSSSTQVVELRSWAKRWPERIWAVEGAGGLGYLVAQQLLAAGERVVDIQPKLGARVRLLATGATNKNDPNDARSVAIAALRSTMLVEVVPEDHATVLKLWAKRARDLGRLRTQVVCRLHAVLAELTPGGFPGSISAAQATTLLEKIEPQGAIELARYELAHEFLADLTRIDEQMRQTKKRITVAVAASGTTVTEIYGVGPFVAAVVIGYVRDVSRFSDRDHFAAYNGTAPIEVSSGNRKVHRLSRRGNRRLNHAIHVAAVTQIRHRDSEGRTYYDKKIAEGKSGKEALRSLKRRISDALFTHLQADARAVTGRTTESGPGGQMGNDSVASATGLHPNTPALRPSHSRTRPKATTRPAPPPSRRSPAVKKVRQAS

SEQ ID NO: 202893 - protein, 400 aa, unidentified
MKDSRKRYIGLDVHKHYLIAVGVDDELNVVLPARRVELSHLESWMKKTLTKQDEVVLEMTTNTWQLYDELSEYAGRVIVVHPPHVALITRSQVITDKIAAAILARLLAKGLLVGIWVPPQEVRELRGLVAQRKKMTGLATQAKNRLHAVLQRHHLVPPAGNPFHEAQQSWWLTLPLGALEKVNVQSALDTLHFAEAQRMHLTSMMEAIASQQEQVTRLLQVPGFGVVTAVTVWAAIGTIERFEDPHHLVGYAGLGTRVHDSGMSTHTGRITKAGRRDLRVVLIEAAQVAANSHPHWKAELARLQPRLGRNKAIVAVARKLLVAVWYILAQHKTDRFAQPEAIAQKFLKFAYQLGKANRPPRQSAAQFVRQHLDALQLGSELTSIAWGSKKPIPLPPSTKK

SEQ ID NO: 202894 - protein, 423 aa, unidentified
MFDTAGRDIANGRCMLHDDFQFFAGIDWGSERHRVCLMNSQGNVCDERWIDHSGSSLAQLVDWFRQQTRDSPSLLAAAIEVPHGAIVETLLEHGFAVFSINPKQLDRFRDRYSPAGAKDDRRDAFVLADSLRTDPHCFRAVRLDDPLMIRLRELSRLEDELTSEQNRVLNRFREQLHRYFPQLLQLCEAGDETWLWTLFELAPSPDRAAKLSQAKIARILVQHRIRRIAAEQVRAVLKTKPLTLAPGAAEAATEHALLLLPRLRLLYRQRTDLARRIEAILEELSAPAEDKSKHRDAAILLSLPGLGRKVAATMLSEASHAIASRDYHALRCYGGAAPITQQSGKKKIVVMRRGINQRLRNALYHWSRTSVVWDPPSKKTYAQLRARGHSHGRALRGMSDRWLKVLMAMLRNQTLYDPQRKAA

SEQ ID NO: 202895 - protein, 493 aa, unidentified
MGACELESGDVALAAIPIRKMTIGIAQTLPLIIDWRIAMPKRTTGDRPELKPVNVGAAAIDIGSKMHMAAVNPASTDVPVRSFGTFTRDLHDLADWFKACGVTSVAMESTGVYWIPVYEILEQRGLEVILVNARYAKNVPGRKTDVSDAAWLRQLHSYGLLRGSFRPDAEIATLRAYLRQRERLLEYAAAHIQHMQKALMEMNLQLHHVVSDITGATGMRIIRAIVAGERNPDVLATYRDVRCHSSIETIRAALVGNDRHEHVFALTQSLELYDVYQAKMLDCDRKLEVLIAALSNKGAKPVGKLSKPRIKTKQVNTPTFDVRTALYGVLGVDLTEIHGLGPSLALKLVGECGTDLRAWPSAKHFTSWLCLAPGNKISGGKVLSSRTRRSSSRAAALLRLAATTVGRSDTALGAFYRRLSSRAGKSKAVTATARKIAVLFYNTLRHGMSYKDPGADHYEQQYRSRVLANLQRRAKSLGFVLQAVPRDAEPAVS

SEQ ID NO: 202896 - protein, 330 aa, unidentified
MKNYKEVVGIDVSKKTIDAFCYQAEVHKEFINDVVGYKSLLKWVSKYSKDSDVFYCFENTGYYSLKLALYLASESIVFVEESPLKIKRSSGIVKEKTDKLDAALIARYAWLYREELAPSTVKSMSHLELGRLLALRDQLVRNNAGLKGTLKEMKVLLSSPTTDSGCISLKRSIDYLSKQVKAVEDRIKEIISEDDSMQKNYELLSSLKGVGLVVASQLIYHTGNFTRFASWRAFSSYCGTAPFEHRSGTSIYKRKQCHYLGDRKMKSLLSMASVSAIQHDSELRQYYKRKVAEGKDKMLAINNVRNKLIARAFAVVKRGTPYVVLQQHVA

SEQ ID NO: 202897 - protein, 345 aa, unidentified
MTESKIVAFDLAKRIVQACVIDGTGAVIAEERMGPERVLSFTARHPHATVALEACGGAHHWGRALERQGHRVLLLPPQRVKSYGDPACKDDRRDARAIAEAASRSYLRPVPVKSEEQQALQSLDRVAALLARQRTQTVNALHGHLSEFGITLPKGPHLLKRRFTELEASPRWRELPEELGAAMGELFAAFLALEDRLSAIKARLAKGAKQSKLGRLLLEIPGIGPITAVSLEAAIGDDPGRFASGRQFAAWLGLTPRVSASGERRQLARITKRGSARLRSLLVVCAQAMLRQYRQGRHGDPLACWARHLLARKRWNVAVVALANKLARIVWKVASSGAAYQARTA

SEQ ID NO: 202898 - protein, 400 aa, unidentified
MRIVGMDIHRSFAQVAILEDGLITRQLRVDLVHDRLVAFAKTLSREDEVVIEVTGNSAAVERLLRPHVKRVAVANPRLVRAIAYARIKTDKIDAETLAKLHAAGFLPEVWVADENTYGRRRQMAERAGVLAQIVRIKGRMKAILHANLIPPYKGHLFGKSGQRWLESLPLPPEEYALLQRLIAELERVTKQLLEIDKVVAQEALDDPRSLKLMTIPGVSSVVASTVLASIGDIARFPSPDKLSSYFGLTPRIRQSGERPARHGRISKQGNRDARKMLVEAAWSAKTAPGPLRAFFNRIQRKHGPGVAAVATARKLAVMIWHILTTGKDYAYARPAFTAMKLRKVALKAGAPRAYGKAGPGRDYWIKELREREAGYVARVEQAYERMVAAWKEKPKKVVMN

SEQ ID NO: 202899 - protein, 398 aa, unidentified
MTESSDYESVQVFIGVDVGKDTHHAVAINRSGKRLFDKALPNDENKLRSLISDLKQHGQILLVVDQPATIGALPVAVARSEGVLVGYLPGLAMRRIADLHAGKAKTDARDAAIIAEAARTLPHALRTLKLADEQIAELSMLCGFDDDLAAQTTQASNRIRGLLPQIHPALERVLGPRLEHPAVLALLQRYPSPEKLASLGEKKLAAQLCKLAPRLGKRLAADIAQALAEQTVVVPGTNAAAVVLPRLALQLITLRKQRDEVALEVEQRVLAHPLYPVLTSMPGVGVRTAARLLTEVACRAFASAAHLAAYAGLAPVTRRSGSSIRGEHPSRRGNKALKRALFLSAFAALRDPLSRAYYTRKMSQGKRHNQALIALARRRCDVLFAMMRDGTFYTPQGS

SEQ ID NO: 202900 - protein, 337 aa, unidentified
MHYIGLDVHSKNFTVAVMDRNGQVLLEGHKPTSEHNLRDVVAGVSGAKVVALEETTVAAWVYRVLKPHAHRVIVCDPRHNELIAKSGHMTDAQAARQLADLARGKFVKAVYHPADEGRQAFRELVQSYHQLQRELVRVKNQLKAKFRQQGIPCAGSDVYQPHQRGFWLAQIKHDDVRFQVEMMMETVEHLMEQKVAYLQRLKQRAKAFPEIAAFQALAGIGLVHAATFYALVDEPQRFANKKRLWSYCGLGIAQRSSDGMSSPPHLNRNGNRLLKCVAKSAAQMAVRHGDNAFARQYQRLIASGVKSTNAQLTVARAIIATMFAMWRKGETYIPREV

SEQ ID NO: 202901 - protein, 414 aa, unidentified
MDVLHERCVGLDISKKDAKACVRTPSSKRRGSFTTETTTWGSTTNAVLALRDHLLAARVTLVVIEATSDYWKPFYYVLAEGLNVILVNARQVKNLPGRKTDVSDAAWLAQLGAHGLVRPSFVPPEPVRELRDLTRARTTATRERGRVVQRLEKLLEDTGIKLSAVASDIMGVSGRAMLEALIRGEGDPQVLADLAKRKLRNKIPELTEALTGRFREHHAFLARLHLDQYDQLTVMIDQLTGRIEEAMAPFRGALDLLDTIPGINQAVAEVIIAETGGDMNRFATAKHLASWAGVCPGHHESAGRTKNTKVRPGNPYLKGALGIAAFGAVRTKDTYLQARYKRLTARRGPLRALVAVEHSIITAIWHMLTDNVPYQELGGTYYTQRDPERVARRAINQLNQLGYTVTLNPRENAA

SEQ ID NO: 202902 - protein, 433 aa, unidentified
MPSLPIIFSEPSGSERSPYGFKNRYKICCGIDVHKTFVVACIASTNDKGITSYESHRFSTYTSGLKTLLQWLLDRNCKDVCMESTGKYWIPVYNILESDCSIVLAHPKYVKAIRGKKTDKKDAKWIADLFKHDLVAGSFMPPADIRQLRDLMRYRFKLTCFKSSEKNRLQNCLTVSNIQLGNVVSDTFGKSAQAILDKLLENPADTSFDLEPLVYKSLKKKLPELRDAIDGYITPEQAGKLKVIKAHYENLESRKAELEELILALAAPYQQELTILQTAPGISSPFTAIGIISEIGTNMEAFPSAKHLCSWAGLTPTNNESAGKKKSVRVSKAGCYIKPLLVQCANAVVKSTKHPEMRNRYLRLKKRRGHKKAIIAIARMLLTALYHMLKNGENYNAKLYQKSDLLPVDREITVEQALMIARNQGYKIKSATA

SEQ ID NO: 202903 - protein, 339 aa, unidentified
MTHTIVGVDIAKKVMQVHWVDPETGEIVNRPVKRAAFLEYFANRSPCLIGTESCSGSQHWERRLIEMGHRVKLMPAKFVKAFNIRNKIDAADARAIWMATQMDSKEVAVKTEAQQAVLALHRMRQQLVKFRTMQINSLRGLLTEYGEVMGVGRAALDKSVVGFLERLSGRLPAILIDTLREQWKGLDDLDRQICQIERRLREWMKDDPSAKAIAMIPGVGLLTATAAVATMGQANAFKSGREFAAWLGLVPGQTGSGGKIELQGISKRGDTYLRTLLVHGARSIIYHVREPGPWITQMKQRRPLNVVIVAMANKLARIIWAILAHQLPYRKDYESVRPI

SEQ ID NO: 202904 - protein, 388 aa, unidentified
MIQNLKYSVGADISKEKFDACISVINTLQNTVVKASKTFKNNTSGIKEFILWINKHKKEEIPLVITAEATGVYYELFAITIYEHGYNISVVLPNKSRRYLQSKGYKSKNDKIDAKGLSEMGAEQNLTKWEPFSKNIYVLRSLTRQNEDLQTIKTTITNRMEANKSSGYKSEFIENQLVNMLKSINKHIKEVKDQIQKLIEGNEILKNKIPKICKVKGLGILTVATIVAETNGFKLIQNQRQLVSYAGYDIIENQSGKRSGKTKISKKGNSHIRRALHMPALSVVKYKQAGFNHLYNRVFIRTAIKMKGYVAVQRKLLILIYTLWKKDEEYDPNYLIRKDITFGDEESKFLFSLNSEGVDKKVGDQKSPTQDKLPYDVSPEVLFSLVQK

SEQ ID NO: 202905 - protein, 412 aa, unidentified
MDVVHERCAGIDIGKADVKVCIRVPGPGKRRRKEIRTFSTMTRDLLAMRDWLLAEQVTVVGMEATGAYWKPVFYLLENDIECWLLNARHMKNVPGRKTDVADSEWICKMVEHGLVRPSFVPPPAIRQLRDLTRYRTEVIRERTREAQRLEKLLEDSGIKLSAVVSDLLGKSARAMLEALIAGERNPTVLAEMALASMRTKRQILAQALTGQFTDHHAFLARTMLDRIDAVRATEARLSEEITRQLAPFRRQIELLATIPGVSTRSAEMILAEIGADMTRFPSAAHLASWAGMCPGNYESAGKHTSGKSRPGDPWLKSALGLAATAAARSKNTYLASRYKRIAIRRGKKRALVAVGHTILTSIWHMLTNDAEYTDLGADYFLQRTGRTRQTRRLVSQLNMLGYQVSLQSADAG

SEQ ID NO: 202906 - protein, 353 aa, unidentified
MRIVVALDVHRRQITYKTLDRESGEVRRGRIAPATRGAVRDWLEQFAGRGAEFALEGTTGWRFVVEEIERAGHRARLADPAETALKRGRKRRAKTDNADCDLQLRLLLAGELPESWIPPAHILELRIRVRTRKLLIDQRTAWQQRLPAQLLHQGVAAGLKPRTRTGREALARAELSPAGRELVALALRTIDTIDRELAPLDRALRSFARRQPACRALIANLYGVGAISATAILAELGDCRRFASSDDAVRHSGLDVTVYQSDSKRSAGRLSHQGPELLRWALFEAAHQSARRGSPDHDYYLRVARRIDHNRACLSVARKLCRRSHHILRELGDAALASVEREPQTEEAIQAAA

SEQ ID NO: 202907 - protein, 354 aa, unidentified
MKRTTKYVAFDVHQATTVASVREESGRVIARSVLPTDSGALTEFVRGMRGARHVTFEEGTQAQWLYELLAPLVDRVVVCDRRGALRQGNKGDQVDADQLSELLRRGALRAVYHGSADRATLKELTRTYRNLVEDATRVMLRLKALFRARGIPTAGTAVYHSRHRAQWLARLLEAGARFRAEALYAELDVLRKLRPKAKAAMVTEARRDPAWPVLRTIPFLGSVRVALLLATMQTPWRFRTKRHLWAYAGLAVVTRSSADYTLVAGAPVRRRRAPMTRGLNRNHNRVLKDVFKGAATAATARPGPLQAFYRSVVARGTREELARLTLTRKLAALTLRLWKKGERYDPTKLTTPAR

SEQ ID NO: 202908 - protein, 356 aa, unidentified
MSEGSWVGLDVHARSVVAGVIDQGSGEVRSLRLPPGPAETVAWLKTLPAPVRVVYEAGPTGYRLARACAGAGINCVVAAPSRIRPPADRVKTDRRDAERLARLLRLGEITPVRVPGPEEEAARDLVRAREDARGDLMRARHRLSKLLLRHGAVYDATAWTRAHDAWLRRQRFQSGPLAVVFDECYGRMLDAKTRRDALDKAIAELAGAPPYVDVVERLVCLRGVSTLTAFALTVELGDWNRFRPTSLGPFLGLTPSENSSGERRRQGAITKTGNSHARRLLVEAAWHQRRPPRLSVTLERRRAGKSLAVRAQADRSARRLHGRWHALEARGKPRTIVVVAVARELAGHCWALATME

SEQ ID NO: 202909 - protein, 488 aa, unidentified
MAHSADTEFSSPAEAPARKAGWVHAHCARLRSPYAAQDNPFASGSTNPDRKGSDIMLKINYMSTLFVGIDVSSKSNAVYAMDFEENKYISSSFGNNQPGADELAGMIADCMQNHKNLDTVIVCLESTSVYSVHIANFLSTCELLMPYKPCVFVVNPKTTANYRKSYIGMEKTDPADAFLIADFARVGRTKKLEPWRGSQFIALKRLTRHRMHLSECIAREKTYMVSNLYLKFSELQLLDGNDRPFGNIYGATSSAVLTEFLSPQEIIVLSEEELLAFLAKKSRNHISDISRTSELLRKAARDSYRLDKCMYEPLNVSLASSFNCIQAYQKEIKLIEQAIEKCINGMNPNAFLILKSIPGIGPVWASGILSEIGDITAFHSSDALAKYAGLYWLKNDSGDFTSEDNAVSKAGNPYLRYYLGEAANSVRRYVPEYADYYAKKHAEVSKHQHKRALALTSRKFVRLVFGLLVKNQLYTGEKLDTEYNTESN

SEQ ID NO: 202910 - protein, 345 aa, unidentified
MKILGCDLHTRYQQIAMLDEETGELVERRLEHGNGEAKEFYTHLAGPVRVGIEATGHTRWFEQLLAELGHELWMGDAARIRAAEVRKQKTDARDAALLLDLLLSGRFPRLWRPARQERDLRHLLWHRQKLVWMRNAVGNQLHALAMGEGLCRKKQLFTKKGRCELEALKLDAWASRQRQELLHLLDQLDASLAQFDQAVNEQAAANGDAVRLMTHPGVGPVTSLAFVLIVGPAARFERSKQLVSYLGLNPCEHSSGGKQKLGAISKQGNPMLRGLLVEAGHTAARMDPELRQDYQRLRLRRGGSVAKVAIARKLAVRMYWMLRREVNYTQLVRTQGSSRATLVQQ

SEQ ID NO: 202911 - protein, 399 aa, unidentified
MIKDHETVDVFIGVDVGKSNHHAVALDKKGKKLLDKALPQDEAKLRSIIDKLAKHGTLLLVVDQPATIGALPVAVAQAAGIMVGYLPGLAMRRIADLHPGEAKTDARDAYIIAEAARTMPHTLRSIAVADEQAAELSMLCGFDDDLAKQATAASNRIRGLLTQIHPALERAVGPHLDHPVMAELLRKYPGPEALRRAGQTRVAAFMVKYAPRAGKPWAAEIFAALDQQSVVVSGTGAAGIVLPQLAAQLAQLRTSRAEVLAQVEKLVEAHPLHQLLTSLPAVGVRTAARIITEVVGKEFKTAGHLGSYSGLSPVTWRSGTSIRGDHSSKKGNKILKRALFLSAFAALKDPVSRAYYDRKRTEGKRHNQALIALARRRCDVIFAMLRDGTLYEAPAAQAA

SEQ ID NO: 202912 - protein, 425 aa, unidentified
MLAVGIDWSEEFHLVALGRPSEGVFEVRRVEHSPKAVDALCARIAALEPDPAEVRVVLEARHGLLVERLIDAGYVVVPVNPDLIARRRGPAKKKDDVEDARIACLLALDRFERLRPLVPHGELAGELRAIARDDERAAKDARRLLNRLRQDLLSTFPGALEIAGSDLGAPTFLRALERWPSAEALRAASREQLVAFARGCKHGWPERFADKVEAALAGDHFQARPYLVRAKADTIRLTASQLLAIGKQRRAWERRMGELLLGAPRRGRSKTPRPDELGEGFPDGEIYLSFPGLGDRLAARVAGEIGDHPSQFESPNALQCYGGKAPVTRRSGKSELVVSCRLAYNRHLGDAVQQWAFCSLRRSSWARAFYDGKRAQGKGHHAALRALGNRWLGLLWHCLRRGLPYDEAVHVANRERARSSQLLAA

SEQ ID NO: 202913 - protein, 338 aa, unidentified
MKLYGAIDLHSNNNVTVLIDEQDQVVYQKRLPNDLSLIARQLSGYQDELQGIVVESTYNWYWLVDGLMDQGHRVHLANTAAIQQYEGLKYTDDHTDARWLAHILRLGVLPEGYIYPKEERAVRDLLRKRGQMVRQRTTNLLSIQNLITRNTGSSIRSNRIKTLDAEQVDDLLPNPDLALAVKANLAMIKCAAEQIEILERTVTDRIKLREEFSFLKTVPGIGQVLALTIMLETGQVQRFPTVGDYASYCRCVGSQKLSNGKKKGSGNTKNGNKYLAWAFVEAANFAIRYNARIKSFYQRKKAKSHGVVAIKAVAHKLCRACYYIVKDQVAFDVAKAFA

SEQ ID NO: 202914 - protein, 344 aa, unidentified
MEKIIRIGLDTAKHVYQLHGVDSAEEPVLRKKLRRKEMVTFFQKLAPTVIAIEACGGSHHLARSLATFGHEVKLIPPHYVKPYVKRGKNDAADAEALCEAMSRPSMRFVPVKTAEQQAALMLVGLRERLIRNRTQLANSIRGYAAEFGVIAAKGLCRIGPLLERIAADVSLPALARELFAIQAKEYALIEAELKVIDVKLMAWHRDNACSRRLSQIPGVGLVGASMLVMKTPDPRLFRSGRQFAAWLGLTPKDHSTAGKVRLGVITRAGDEALRSTLVVGATALLRRVREGSNRNSSAWLLDLLRRKPPKLVAVALANKIARIAWKLMVSGETYRPSFVAASAA

SEQ ID NO: 202915 - protein, 380 aa, unidentified
MEKDIRFVGLDVHAETIAAAVVDPGSPVESLGTIVHRPESVRKLMRRLGHPDQLRVCYEAGPTGYGLYWLLTGMGIHCDVVAPTLIPTKSGDRVKTDRRDAEKLAKYYQNGDLTPVWVPDAEHEALRDLVRAREAAKSDQTRARHRLSKFLLRRDRRAPKGVRRWTKKHLTWVRREVKFDLFAQQATLEDYVAEVLHAGERIQRLEQRIDDAIEEVPQSTRAVIAGLQALRGIAKISAVTIVSEVGRLSRFARPRQLMGYSGTVSSEHSTGQRVRRGAITKTGNAHFRRILGEAAWSYRHRPYVGPVLRKRQKGVPAEVVEIAWKAQQRLHRKYQRLLGRGKVKQQVVTAVARELTGFIWAIGVHLEQSLGVEVMPRGTK

SEQ ID NO: 202916 - protein, 428 aa, unidentified
MERENCNRLAEFRQLRKDIRGSDKHLIVGIDVAKERHNAFFGTATGETLYRRLIFDNDKDGFERLLLQAEAMKVQHGLKKVVFGLEPTANYHKPLGEYLIKNGYAVVLVATDAVKKNRSLLDGRWDKNDKKDPTNVADLISQGKCLFYEHPRHEVRDLRNLLSFQRKLKKLEHSTRMRIRNHLVAQYFPEMDTCCNWGVNEGLAIVKSCLDPAAISALQYDEFLRKIQTRGVTLAQQRRLSTVWQRAFKSMGCECGLSVEYEARMMVKILEQVRMSIADTQQQIKTICEKFSEYEYLLSIPGFGPDISAKALGAIGYPFRFDNASQVLKLVGLDLSASRSGKNSNNITPSISKKGKSELRYALYQAALIASSKDKHFIAYFTNKLRGREKEKGIKTKMRVKLSAKMMIIAWTLMKKKEFFDPKYLNME

SEQ ID NO: 202917 - protein, 423 aa, unidentified
MTSMTVAPPLTNPPLPAEALVAGVDTHKDTHHVAILDHVGRPVADREFRADGRGYAEIITFLRGHGNVDRVGVEGTGSYGAGLSRALATAGMTVIEVARHDRQARRRRGKSDPLDAHQAAVTVLADTDTAIPKSGDGAVESLRILIGERRSAAKARAQVMNQIHALLITAPELVRHAFRALTGQRLVNTLAKTRPGTGGSGDPDVVARQTLKRLATRYLTMQAEIDIIEQQLGLLVRQVNPTLLSLGGVGPVTAATLLVAAGDNPERLRTRATFAALAGVAPIPASSGQRTRHRLSRGGNRHANAALHRIVLLRMRHREPRTMAYFERRRAEGLTNRDIMRCLKRHVANEIYAALLNPAADNPTGHELRAQRQQIGIPISILAATLGVPYQRLRRLEIGTRADPELEQRASLALAQLSPPETA

SEQ ID NO: 202918 - protein, 343 aa, unidentified
MKLIRVGVDLAKNVFQVHGVDRSEKAVWCRKLRRENWLKVLRETVEPGCEIGMESCGGAHHWARQLQAHGFRVRLVAPQFVKPYVKSNKNDARDAEAICEAMSRPHMRFVAVKTIEQQDLQAAHRIRAELTKQRTAKANQIRGLVTEYGLVASKELGQLRRALPCWLEDAQNGLSGRFRRLLDGLWGDLQALDERVAELDREITRLAQNDPLAKRLQQLRGVGPITATALVAAVGNGAQFSTGRQMSAALGLTPRQKSSGGKERLLGISKRGDTYLRTLLIHGARAVIQMAKDKDDRLSQWVTRLAARSHPNVAAVALANKTARMAWAMLRNGTDYQPDLVAG

SEQ ID NO: 202919 - protein, 405 aa, unidentified
MWYAGIDWADQHHDAVVIDEAGQRVATLRVAHTAEGLAELTTFLRGIGDVAEHPEHLACLVETSHGLLISALLEAGLPVYPLNPKTVDRHRKPAGAKTDAIDAYLLARTGRSDLADLRRLAPDSPLITELKVLTRDQDTLIQSQTRLLNQLTACLKAYYPVALDLFGKLHQPTTLAFLQTFPTLEQARAASVDQMAAVLTAAGHPHAAAKAQQIGQQVRRPQLQADPALTRAKARLMLALVAQLQPLIAQIAAYDQEITRLFRMHSDSRAFASLPRAATRLAPRLLAEWGDDRERYADAASVQALAGTAPVAFQSGKFATVHRRYACSKPLRNALHQFAWQSIQKEPWARAYYQRKRQEGKSHSMAVRALANQWVRIIYAFWVKHEAYDATIFLAAQQAHAPRAA

SEQ ID NO: 202920 - protein, 340 aa, unidentified
MSLVLQSLLPFPDSCQGMSPHQQGRGTKMTEHCYGGIDVSKDRLDVMVLPERKSFSVDNNAAGYSELVKRLRGLSIAAIGIEPSGGYERAVIRALLAADLSVRRINPNKLRQFGRARGVLAKNDRLDARLIAEYVAIMPTRVVQRDPATEQLAEVVTMRRQLCDEHVAVENQTAHLEDAMLRRLNKRRLARLAADILLLDRRMAQIVASNANLTRRYELLTSMQGVGPTLAFTLVALLPELGQMSRKQIAALVGLAPYDFDSGRLKGHRCIYGGRLPVRNVLYMAALSACRYNPALKVFHHRLAATNKKPKVIIVAVMRKMITTLNAMLRDNVAWQPKSA

SEQ ID NO: 202921 - protein, 361 aa, unidentified
MTETLVEVIGGVDTHADTHTAAAVDTTGRLLGHQQFPTDPDGYRQLLDWLASFGRVRQVGVEGTGSYGVGLYRHLHAQGISVIEVDRPSRKTRRRRGKSDSIDAETAARAVLAGTATTVPKTRTGIVETLRVITTTRATAVKARTAAKNALTAIARTAPEPLRSQLSGLGTDRLIAAAADLKPGFDMTEPCTATALALRRLARRCHNLAAEIREADLDLELILRELAPDLLARPGVGPATAAQLLITAGDNPQRLRAEAAFAMLCGAAPLPASSGRTDRHRLNRSGDRQANKALHTIALSRSRHHPETRAYIDRRTRQGLSDRDIRRCLKRYIARELFTHLQNALRRNTLQTPPPAQLSTT

SEQ ID NO: 202922 - protein, 309 aa, unidentified
MATSSYVGIDVSKGRLDVAILGKEEVWQVDNIQAGIAQLVKQMQTLAPELIVAEATGGYQRAVVDALFWAGLPVAVVNPARVRQFARACGLLAKTDKLDAQVLAVFGQRVQPRRYAGKSEAEKELSALLVRRKQVEEMLKAEQNRLRTVSPSLRGSVERIIAILKEEKKRLDEQIRELMNEQQAWQEQMEILDSAPGVGPVTTATLLADLPELGKMDRKKIAALVGVAPMNYDSGKKRGYRKTKGGRTELRRVLYMSTLVATRYNPVIQAQYQHLLKRGKEKKVALTACMRKFLIILNAMMRDQQPFRL

SEQ ID NO: 202923 - protein, 401 aa, unidentified
MQVTRIGMDIAKQIFDLHRVDRRGKVTLRKTLRRERVLEFFAQLKPCEVGMEACAGAHYWHREISRLGHTVRLLSAHKVKPYVDGNKNNRHDAAAICEAMSRPSMRFVQPKTTAQQDLQTLHRARALLVRDLTALSNQVRGLLHEYGIVMRKGAAALRRVVPELLTGDDERITAVLKAVVAEQFERFKYLTLRIDRYDRQIGELCKQDQRCQRLLKVPGIGPLSATALVAAIGNGHEFKNGRHFSAYLGLVAGHSNTGDKTVMLPITKRGNRYLRTLLIHGGRSAVYAARRRSDPRSSWLNRLREISCHNVAAVALANKNARVAWAMLRYGEDYRASRAHRQSADLAAARSARPANRALAFAPHRARPAGQRREHFSAPPSVQTKGGAKNAKAESKKARQD

SEQ ID NO: 202924 - protein, 335 aa, unidentified
MTITTIGLDTSKSWFQVHCIDADGRTVLRRKLARSKVLSFFANIPSCLVGLEACGGSHFWARELAKLGHDARLMPARYVRAYVKTNKHDAADAEACCEAVQRPGMRFVPVKTEEQQSMLMIHRARDLLVRQRTAAVNALRGHLAEFGIVAARGTAKAHELMRLAGDDERLPAMAQEALRYIVAQIHDIEIRLKSFEQRILSLAKENEVCKRLMTVQSIGPYIATAIAATVGDPRNFASGRHFAAWLGLTPKQHSTGGKEKLGGISKRGDSYIRRLLIHGARATVARVRSGQMKSAWLSGLLGRRHFNVATVALANKTARVAWAVMSTEQTYRRAA

SEQ ID NO: 202925 - protein, 403 aa, unidentified
MNAVGIDVSKGKSMVAAMRPFGEVVAKPFEVRHTASELRKLADFLKSLDGETRLIVEFTGRYYQPIARYLHEAGIFVSAVHAKLIHDYGNNSIRKIKTDKADAVKIANYGLTNWVSLVRYTPEDDIRLLLKTCNRQYNQYMKTKVALKNNLIALLDQTFPGANTLFSSPAKQDGHEKWVDFASKFWHCECVSKLTKANFTARYNKWCAMAGYHRSDLKAAEVYETACRQVPTLPCNEATKQLVEQAVAQINTIAFTLASVRQEMQRLAALLPEYSVVMAMYGVGNVLGPQLMAEIGDVRRFERKQSLVAFAGVDAPPFQSGIFTSTDRSISKRGSPSLRKTLFQIMVSLLQTSPADDAVYQFLDRKRAEGKRYYVYMVAGCNKFLRIYYARVKGFLNCLNSAA

SEQ ID NO: 202926 - protein, 408 aa, unidentified
MEVLYSRCAGLDVHQRTVVACARLASGSTVQQEVRTFGTTTGDLVALADWLTTHGCTHVAMESTGVYWKPIWHVLDGHFVLVLANALQIRSVPGRKSDVNDAMWIADLLAHGLIRGSFVPPAPIHDLRDLTRTRKQLVREIAQHTLRIQKVLEDANLKLTSVLSDVLGMSGRAMIEALIRGEQDPERLADLSQGRLKASRAAVVAALHGQVTLHHRFLLRLHLTQIDALDVAVRAVEARVGDALVPVQAAVDRLMTIPAVGHTVARVIVAEIGLDMSRFPTAGHLISWAGLCPRLHESAGKRRSTRTRAGAPWLKTALVQAAWVAARTRNTYLRAQFLRLKGRRGPKKAILAVAASMLTAAYYILKDGTTYRELGADYFERRSKTQITRRLIRRLESLGLTVEVRPAA

SEQ ID NO: 202927 - protein, 435 aa, unidentified
MNSIDDIRLEQFRQLKKEIRGSEEYLIIGIDVAKEKHRAFFGTAQGKTLLKNVVFDNTIEGFEKLDAFVDRVKVQYSLRKVVFGIEPTADYHKPLAEHLLKCGLMVVFVGGTAVKNNRQLLNGRWDKNDDKDSANIADLIAQGKCMFYEYPLMTLRNVRILNALKRRLKKREHGISAYIRNHILAQYFPELDKYYGSSETLAVVRECLDPSAIAGMEYDDFCRTVAPGKMTLARERRVGAIWRTAVNSVGCTMGEAAFHEAQIAVDSLKRVRQEIKTLEDKLEDACLEFSEYTYLLSIPGFGPDVSAKVLGAIGDPHRFTSGKQVLRLAGLDLCAKRSGKTSNRATPIISKQGKADLRCALYQAAFIASLKSKDFIPYFTNKLVGRAKEKGIGTKMRVKLAAKLLIIAWTLMKKKEYFDPKYLKLGNRGEQKTAA

SEQ ID NO: 202928 - protein, 442 aa, unidentified
MSNELAVPTAPEPEWAAFVAIDWADRKHYWKLVAAGSQKPEQGELDNTPEAVAVWAAGLNVRFGSRPIAVCLEQSRGSLVYMLLKFPQLVLFPVHPRMAASMREAFHPSGAKGDPSDTAVLLTILLCHRDQLRRLKPDTAETRLLQRLAEQRRLMVNEKTRHSNRLTACLKLYFPQILKWFDDPTSPLVGALLERWPSLEPLQRVHDGTLRKFFHQHNCRSEERIQERIDAIRQAVPATTDTAVLGAEAMAARGFLAVIATLRAHIAELDEQIAKAFAAHPEIALWDCLPGAGAALGPRLLVAFGTDRQRYTKAHELECYSGIAPVRSASGQSEWIHFRWACPKFLRQTFHEFAGHSIAKSEWARAYYDLQIGRGKSHHAAVRSLAFKWIRILYRCWKNRTPYDEQVYLQSLQKRNSPLKALLPGAAWKDVAGFQKLSENPS

SEQ ID NO: 202929 - protein, 369 aa, unidentified
MQEGTTYVGLDAHQESTNGAIILTSGEVVEDRFATTPEGIRRWARRLKRRCKGRILCCYEAGPLGYALQRTLVSLGMECIVIAPSLIPSKPGDRIKTDRRDALKLAELLAAGLLTEVHVPTPEQEAIRDLCRARESVKGDQKRIQHRLSKFLLRRAIRWTHGRKMWTGAHRQWLRGLRLGHVADQDILDDHLLALEQNAGRLAALDEKLAHWATQEPYAEPVAWLRCFRGIDTLTALSVAAEIHDWRRFPSPRALMAYLGMVPSESSSGGKIQRGRLTKAGNRRVRRLLIESAWHYRHRPSVGYRLAKRRVGQPAEIIAIADRAQQRLHSRYVRMSARGKRHSLVIAAVGRELVGFLWAAMQRTEIPSA

SEQ ID NO: 202930 - protein, 375 aa, unidentified
MASSTDVTPVKTWVAIDVAKFTNLALMEFPDGKRKQFRFRHCAEDYDQLVSSLRLGSAPTRIAFEPTGDYHRALGYRLVSEGFDVVLVSSVAGARMREAIFNSGDKNDPKDAQVILQLMKQGMTLRYCDPLILKTHDLQELSKTYHSIAIARKRLQHVLLTHYLPLYFPEMETFWTSTRNEWFIRFLIEFPTPASITSMTFADFREAIWVSMGRRVHKEDKIAEIYRLQLSRYLELCQHRRALESKADEILSRGVDYQHLRSVPGIGPIVALIILAEAGDLRRFTHHRQFLKYCGLDLAKNQSGVSRSREQLSKRGNARLRGGRSGKRHSVPYGCARTPFGTSSSAIPPQRRLTPICDAKRVSPSRRKWRGSFMH

SEQ ID NO: 202931 - protein, 423 aa, unidentified
MSYRIAGIDVHKKMLAVVVADVEVQGEYQFERIRYGSNPEQLRLLAAWLIEHEVEEVVMESTAQYWKPVWGALEQYWKPSGQKRETTGPMSGTLHLAQAQSNRGPRGRKKDFPDAERLVKRLVANELSLSFVPDAEQRLWRTVMRRKYQLTRNRVQLQNRLEALLEEAHIKLSSLVSDLLGASARRMLKALADGETDPAALASLADKNLRATPAQLCDALGACTELNPVYRRLLKMFLEELQLIDQQIGQLDQEMATLLGQHQAAVERLAEVPGLGVDSAQQIIAEVGATAATFPSAKQLSSWVGACPGDEESAGVSKSHRSPKGNRHMRRILNQCANAAAKSKGTIFEIVYRRLVSRLGHNQTIGAIAHRLCRLIWIILHQNVRYEERGPSVSAKSRQRRTHRMIRELRNLGYRVEPVVTTL

SEQ ID NO: 202932 - protein, 409 aa, unidentified
MYYVGIDIAKSFHVACVLDQEDKVLKSSLKFNNDEDGFEHIFLTLTSIDEIPNFTIGMEATGIFFENIYLYLKEKGFNVILLNPYQTNRFREMDTMKKVKNDNIDALMIAALIKSGRYSKAYVSEDTYQGIKSLYRHKASLQDELKKHKRQVSTLLAVVFPEMEQVIKDPYSVTGLALLEKYPTAKHYSHASVKRILKTFRGIKGNNFNEAKAQKLLELAKHSVYQGNGKDERAFVITSHLKQIKFISLEIEATENQMLLLFNQQPSLNSNEEQEVMDIIDNLRTIPGVSDKTIFALMSECGDLSRFVNQNSFIGFLGLYPTLEQSGNKTVHGPIAKRGAKLAKKALYQAAVASIRHNAELNKLFCDKVSQGRAKKEALVIVARKLAHIILAIYKNNVAYNPKRVFVAS

SEQ ID NO: 202933 - protein, 378 aa, unidentified
MHSMTQNDALVVGGVDAHADAHHAAVLDQRGALLSTKSFPTTTPGYRQLLDWLSSHGKIDVVAVESTGSYAAALVRYLRQHGVTIVEVNQPHAHTRRRVGKSDPIDAEMAARLFQAGKAKAVPKQTDGIVESIRLLRVARNSAVKSRSAALVQVRDLIITAPQELRDQLSDRKTLRGKVTVCSRFRPSGNHLRPPSQAAKFALRSTAQRIQALDEEIASLDRELDQLVAAAAPRTVQLLGISTGHAGQLLVTAGQNIERLRSESSFSMLCGASPLPASSGKTTRHRLNYGGDRQANRALHLIAVCRLRHCERTRAYAKRRTAEGKTQRDIMRCLKRYIAREVFNSLRADLADTAQPRPAVSTTIMCGNPGFGINRIRT

SEQ ID NO: 202934 - protein, 337 aa, unidentified
MDHYAGIDVSLECSSVCVVNAEGKIIRETKVASEPEALIAWFGSLGVRLARIGLEAGPLSQWLFTALKQAGLPMELLETRHVRNAFRTMPVKTDRKDAHGIAELMRLGWFRPVHCKSSDAQETRALLTARKLVDAKLHDVEMSLRGTLRGFGLKVGPTTPRRFAARVRELVAGQATLEAIAESLVAVHEVLLRELNVLEKRVRLMARTNPVVRLLMSAPGVGPIVGLVYVSGIDDPARFKSSKAVGAHFGMTPSKYQSGETDYSGRISKCGDEAVRTACFQAAHIIVTKPIKGGWLKSWALKLAKRVGMKKAKVALARRLAVILHRMWVDGTTFKFA

SEQ ID NO: 202935 - protein, 343 aa, unidentified
MYYIGLDVHKKTISYCVKDVAGHVHREGKIGSTRRELDAWIRTLPQPRLMAMEATIFTGWIYDHLLPHAEKVKVAHPLMLRAIAAAKKKNDRIDAGKIADCLRCDFLPECHMASTEIRDRRRVLRYRNLVVKQMVQMKNRVSGLLMETGVSYNKQRLHKVGYFGELMSGNEDISQAVRPLLNLSRGMIRRSGKLEYDLISSLERDPLLRERLRRLRTVPGVGSITALTWALEVGDYTRFRSNKQAISYCGLCADEKSSADKVMRMPLSKQRNKHIQRVLIEAAKLAPRESPELALIRERELERGNPNRATLAVARKMVCYMMAVERRQQDFVPAGELMPTAAA

SEQ ID NO: 202936 - protein, 375 aa, unidentified
MKETVRFLGLDVHAETIAVAIAEPDGEVRSLGTIANRAESIRKLVKKLGPPAHLKACYEAGPTGFVLYWHLAKLGVACEVIAPTLAPMKAGDRVKTDRRDAERLARSYRSGDLTAVWVPNEGSEALRDLVRAREAAKQDQLRARHRLSKFLLRSGQRPAMGVKAWTLGYMAWVRQIRFTQIAQEFTRLDYLHEVEHMGERVKRLEQAITEAVKLASPELQEVIKGLQALRGVAQISAVTIAAELGNISRFVGARQLMGYSGAVPSEDSSGQRTRRGSITKTGNAHLRRIAIEAAWSYRLRPGVGPALHKRQEGVPGEIKEIAWKAQHRLHKRYLRLAAAGKDQRKIINAVGRELLGFIWAIGVKAEAAVRQPIAA

SEQ ID NO: 202937 - protein, 388 aa, unidentified
MTQTTTAAAILAPAVHPEAGHELRSDVFVGLDVGDRKTHACVLDESRNVIARFAFATERVRLRDALFPFRGSRLVLEVGPQSPWMSDFLRKLGFDVIVADARKVAAFTKAGRKTDRRDAETLARLLQGMPEMLGSVHHRSEVAQADLAVIRAREALVEARARLVQHVRSTLKVQGIKVKPCATESFHRHAAEAIPRSYERALRRLVGQIEQMTGEIRRYDRELESLAEERRPLASRLRAIHGVGPVTSMAFLLTVDDPARFEKSRDVGAWLGLCPRIQASGDSNPELSISKTGCPYLRRVLVQSAQYILGPFGKDCDLRRFGEAIAARGGKAAKRRAVIAVARKLAVLMHRLLVSEEPYDPFYIAKRRGEAVPEAETKDVAATAGKSE

SEQ ID NO: 202938 - protein, 339 aa, unidentified
MQIHSVGIDLGKTTFHLVALGTAGKVLLRKKFTQKQLLTFTAKMQTSLIGLEACSGAHFLGRALQKQGHDVRLIAAQFVKPFVKSNKNDFVDAEAIAEAVERNNMRFVPIKTDDQLDLQAIHRVRDRLISRRTAVINQLRAFLLERGMVFAQKPAKLKAAMTDVLENAEADLTPLMRNLIDTLWSEWKLVEQQIEELNDELERISASDAGCTRIRQIPGIGPVVATAIVAAIGNGAAFRKGREFAAWLGIVPRQYSTGGKAKLLGISKRGNVYLRKILIHGARAAVLRIKRDRAPIGAWLDALDSRAPKNVVVVAMANKLARIAWAVLSSGNDYRPVAA

SEQ ID NO: 202939 - protein, 341 aa, unidentified
MEQATTIGLDIAKQVFQLHGADAAGHVLFRKRITRVKLLGFLAAQTRCVVAMEACAGAHYWAREIAKLGHHVRLIAPAYVKPFIKRQKNDAADAEAICEAAQRPSMRFVPVKTEEQQANGIVFRARDLLVRQRTQCVNALRGHLMEYGYVFPKGITHVETLIALVEDLQSSLPDSVRVILKLLIDTFTALEAQIAVLDAEINQRSKSDPTARRLMTIPGVGPIASTAITALVPAAEGFPAGRDFAAWLGLTPLQKSTGGKQKLGAVSKRGERTIRRLLIIGASAVVQQASRRGAPKGSWLAQMLARKPKMLVTVALANKTARIIWALLVKGGTYRTPAAAA

SEQ ID NO: 202940 - protein, 430 aa, unidentified
MEVIYPKACGVDVHKSFIVAVICDSTSVKPQYLRKRFSTFNNSLIEFRNWLLANDCQNVCMESTGKYYVPVYNALEGHISNVVVANPKWVRCIKGEKDDNKDAKWIADLFKLGIVRSSFIPNKDIRILRELTRYLYKLTNMRTSEKNRFTNALTVGNCKLDMVFSDIFGKTSSAIINTILSQNEYNDEDILKNIDKHCKSSNEDILNSICGISWEASQKQRMNVIQEHIDYLDKSIKTIREIIDSIVAPYESAINLLCSIPGIDRKSAITIISEIGTDMSQFSSHYRLASWAGLAPGCNESAGKKKSVKISRAGVYLKPALVEVAHCAVKDKSNDYYAKKFNLISKRRGKKRAYIAIARKILVAIYHMLSTGELFNPSDASKVETTDKDKIKFTKNNFIQSTKQLLSLGLTIDELQEFITSKISESTPVI

SEQ ID NO: 202941 - protein, 339 aa, unidentified
MGRYVGVDLHKRSFQVCYWSRGKTEQREFKVSKAGIETFQKSLKKQDKVGIEVTGNARYLAGEIEKKVKEVKLINPWQFKVISRSVKKTDERDAETIAKYMSKGLIPEVRMKSKEQQQIASLITTRDKLVKLRSTLKNKIHGILNANGYVTKREIFTSEKGLDRIFELELDDAYQFELRIIVGQIKSLTESIDKITEELTNRGKKMKGFDNLKSISGIGDISATIMLSTIGNVEDFEDADKMASYLGIVPRVHNSSDMVRHGRITKMGNKIARTALVQSTLIAIRYNGYLRQFYERLKAKKGSGKAIIATSRKLLVIIYRTLKYDLKFEDFNQYKLATS

SEQ ID NO: 202942 - protein, 408 aa, unidentified
MKLFVGIDVSSEKLDTCFLDSEDHTLLEVSLSNNIVGASKIKEFILQFSNLIEYERIIVGMEATSVYSFHPSTFLAEDAQLKSLGIEVVVMNPKSIHRFKGLFEEDKTDKIDAYRIADFLRFDRFNSSLIKEEKYMALQRLTRSRYQLVGQLTEMKQHFLENLYYKCNTLTKEIDTSIFGSTMMNLLTDSMTLEDIANISLEDLTAILQEKGRGRFSNPQKLAKALSKAVRDSYRLGKVMQDSVDVVLASYAMMIKTLKKQIKELDKAIEQLFEILPESKSLLSIPGIGPVFSAGIIAEIGQIHRFEDEAKIAKYAGLYWKRKQSGNFESERTTMTKTGNHYLRYYLIEAANSVMRNEPVYREYYLKKYHEVPKHQHKRALVLTARKFVRLVDVLLRNHQLYAPERSV

SEQ ID NO: 202943 - protein, 349 aa, unidentified
MVADVVDYVVGVDTHRDEHVLAVVVAPVGALVEQRTVSANGGGYGQALRFAQQYAGGTRVWAIEGAGHYGAGLARYLSQRGETVLEAGRSARSERRLRGKDDELDAVRAARAALTSEPLALPRSGARREALRLLLVARRGAVDVRRQALVQLRSVIVTAPDRLREELRGLAVGRLLERCSRLRRSAAASPDQLATRLVLRSLARRIEAATSEADELEREILEHVRALAPELLEEPGVGPIVAAQLIVAWSHRGRVRSEAAFARLAGVAPVPASSGQTRRHRLSRGGDRQLNRALHTIVLHRRQHDPATRDYIAKRVAEGKSRRDATRLLKRYLARHLYRLLQNQEPLLA

SEQ ID NO: 202944 - protein, 394 aa, unidentified
MILVGIDIGKNSHYFCVINREDGEVLVDPTSFKNDQKGFGLFIQALQPYDKTSILIGIEDTGHYHFALLRYLLSKEFNVALINPVATDMTRKMQGGISKNDKLDTLTICDVLSSSNRKKSYRITKIHKFDYYEQRQLTRHHHNLKEELNVYTNRLQKCIDLVFPEFNSLFKSKYGIVYMTLLKTFGSADKIAHADIRSIRKCFEIQGRGNRISLSAEQLKAAAKESVGIASSADEIQIRHLIGQIELIHAQLDEIDKKIEEFSVEVNSPILSIPGISHFSGTSILAEIGDIGNYPKASKLAKLAGVAPYEHESSQYRAEQTAITKKGSKYLRKTLYQIIVPIIQHNEVFKRYYQLKRRQGKSHRCAQGHCVRKLLRVIYHLLTTNQQFDPALLR

SEQ ID NO: 202945 - protein, 442 aa, unidentified
MSDNMPSILSEPAAFVAIDWGDQKHLWALQPVEGGKIEKGELENTPEAVALWAADLGQRFGGRPIAVALEQKRGAVVYMLLKYAHLVLYPVPPGMSASYRQAFFPAGTKDDSGDTALLLDLLLRHRERLRPWQPDTQETRLLQFLVEDRRQLVNEKTRQVLRLIDCLKQYFPQLLHWFEDMDSPLVGSLLERWPDLQHLQHAHPGTLRKFFHEHNCRKEELIQERIDGIYAATPATNDAAVLEACARKAHSLVKLLTTLRDSIGEFDLRIQELTASHPDVVLFDSLPGAGPVTVPRLIAAFGTRRERYDSAYQVQCYSGIAPVKEASGKIQWTHFRWACPKFLRQTFHEFAGQSIPQCEWAKAYYQQQRAKNKSHHTAVRALAYKWIRIIFRCWKDGRPYDEQQYLQSLRRRRSLLGPAVASATAVGWHQVAGFQKLSENPS

SEQ ID NO: 202946 - protein, 322 aa, unidentified
MKREKSNTKIAGIDVGKRQLDVAVHGVAGGQVFANDVQGVSALVAWLKGQEVGRVGLEASGGYERAVREALSAAGFEVVVHQPAEVRMFARLKRLKAKTDRLDAVLIAAATAQVDAVKAANDPRLVELGERMTAYEQVSEELAKVKTQMEHVTLKDLVEELRVHMLRLKALKAKLLAKVLAVIKAHADLAARYKLLLSLPGVGSVVAVSAVVRMPELGAMDRGQAAALLGAAPFARDSGQYKGMRFIIGGRGRPRRMFYIAAMSARHHDPALKVFGDRLKAKGKPPKVVLVAVARKLVEAANLVLARGEPWLSQPQGAHADA

SEQ ID NO: 202947 - protein, 431 aa, unidentified
METVSDRETIFARCAFLDVHKKTVEATVRLLQGQQVQAETRRWGTMTGQIQALAEWLETQGVTHVGMESTGVFWKPIYNILETRFTVVLTNPGHMKQVPGRKSDVRDSQWGAYLLQYGLLRGSFIPARWQRELRDFTHYRAQLEAERTRVANRLHKHLEDANIKLGSVATDILGMSGRAMIKALMEGEQDAAQLADMAQGKLRTKLPELQLALEGKVTPHHRLMLRLLWKELEAVEELMAEVDRQVQEVTRPYTPQIEQMDPVPGVDRRVAEVVLAEVGPNVDPFPSDQHLSSWAGMCPGNEESAGKRRTGRTTKGNRWLRAALVQAAWAASHTKRSYLGAQYRRLAGRRGKKRALVAVGHSILVILYHLLKDDRPYSDLGRDFFDRMNHDRLIRYYSRRLAELGQKVTVEPLPEVTPGEGMVNVPSPCQS

SEQ ID NO: 202948 - protein, 317 aa, unidentified
MSAQKIHVGIDVSKASLDITYLQTYIQKPNTPKGIQQLITTLKTLSSPVHLVVEATGGYEQSLMEACWKASLLVSRVDPRKVRHYAFSEGILAKTDKIDSKVIRDFAEKKNLIPSFAPDPSVQALQAFVKRRVQILEMIKSENNQLEHVQETKVKSSHKKIIAFLEKQLQVIDLEMKQTIQNHSHLKAKSERLNLIQGIGPVLSSTLLALMPELGSITSNQAATLAGVAPLNHDSGNKKGQRRIQAGRSLLRSCLYMGAVVAARCNPVLSKVYQRLIAKGKKPKVALVALMRKLICVANHLLKNPSFNPIKSTSLKT

SEQ ID NO: 202949 - protein, 346 aa, unidentified
MDYLVRRHIEHFAGLDLHCDNTAVVIIDQEEKWVIKRKLPNTLSKILEELNPYKPTMKGVVVESTYNWYWLVDGLEEAGYKVHLAHPGNIEGPAGKKHTNDFDDAFHLAHLLRMNNLPEGYIYPKESRGLRDLLRKRSILVRKRTSFINSLVNLYCRHTGERLCGQQLLKYPQAQLQEDFADDCVYISARSSLRCIQFLAGQIDQVEKRVTMVHKHHPYFEKLQTVPGIGKILALTISLETGDIRRFSDRGNFVSYCRGVGSKQISNGKKKGEKHRKSGNAYLAWAFVEAANFAKGKCPDAKDFYERKLKESKLNVLATKALASKLARACYYIMKDNVDFDVKRIF

SEQ ID NO: 202950 - protein, 347 aa, unidentified
MSITMIGLDTAKSVFQVHAVNEAGEVVVRRKLQRSELIAFFEKQASCTVVMEACGAAHHWARALTGLGHEVKLIAPEAVRPFVKRGKKNDAADAAAICEAASRPDMRFVPIKSLEQQGVLALHSARSLLVKQQTMLANAIRGLATEFGLTVGLGMGKLGELMALVDADEAVPEKARQALNALFDQCRALDESTEAFEAEIVAHARHDDTARRLATIPGIGPITSSLIAATVADIGVFQSARHFAAWLGLVPRQHSTGGKTRLGRITKSGNREIRRLLVLGATSMVHRAPGWNSAAGAWTRGVLERRPVRLVTVALANKMARIAWAVMTRKEVYHAKGRVAAAAEAVA

SEQ ID NO: 202951 - protein, 318 aa, unidentified
MAQNGAIVGIDVSKDKLDVALRSAKVAAIFANNGDGHRELLTWLVHHGAAKVVMEATAGYEMACRKFLMTAGLEVVVVDPKRVRHFAKSAGQLAKNDAIDAQMIAWFGEVFDDLTGKAQDDEREELEHLLTTRRALGLMQAKVENWSGHERPKLVQKAYQALLRTLACQIDKLDDAIAAQINGTARFAELAEIIRSVPGLRDVSAAGLIAFLPELGLVDRQAAAALLGVAPFDDDSGKHRGRRVIMGGRRKLRTLLYMPLVGAATRHNPVLKAHYQRLLARGKEPKVALMACMRRLIGILNAMLARGEKWDPSKHALA

SEQ ID NO: 202952 - protein, 313 aa, unidentified
MKKTICGVDVSKATLDACIEPGHRQARFDYDSAGIAELAAFCCEHAVELVVMEASGGYERRAFIELWEQGIKCALTNPRSVRHYAEAMGILEKTDRIDASVIARFADAKGLVPTPLPSQAQQRLKALVARLRQITDDLTVQKQRRSSMFDNMEMQASVDEVIALLKRQSRSLEGEIASMIDDDPLWAKLAEAWREVKVVAGRTVARLHAELPEIGTVSNKAIAKLAGLAPIANDSGKRKGKRSTRGGRAGVRSILFLVAGIAAKYDKSLGEFRDRLLKAGKEKMVVRIALARKLLVRLNAKAREARAQYANAT

SEQ ID NO: 202953 - protein, 402 aa, unidentified
MNCVGIDVSKGKSMIAVMRPFGEVVVSPFEVRHTASELSELARLLKNLDGETRVVMESTGNYHAPVAWLLHGAGFYVSVVNAMLVHDYGNNSLRRGKTDKKDAVKLANYGLDHWLTLPRYVPEEDTRLMLKTCYRQYQQYSKVQTMLKNNLISLLDTTFPDANRLFTSPPRTDGSEKWVDFVAAFWHCECVCGLSEKAFAAKYQKWCRKHGYHFSEDKALDIYASACGHFGVMPKTDTAKLLVEQAIFQLRATSAALAALKQEMQSLAASLPEYPVVMEMFGVGPTLGPQLMAEIGDVRRFHSKKALVAFAGIDAPPYQSGQIDVRSRSISKRGSASLRRTLFLVMGVLLQCAPMDEPVYQFMNKKRSEGKPYRVYMMASANKFLRIYYASVKAYLDSLEHD

SEQ ID NO: 202954 - protein, 401 aa, unidentified
MPTLWAGIDAGKRTHHCVVIDHGGSVRLSTKVRNDETALLDLIATVIEIAGDGEICWATDLTDGGAALLIALLAGHDQQLLYIPGRIVHHAAATYRGDGKTDAKDARIIADQARMRTDLQPVRIANQGAVDLRLLTSHRLDVIHDRVRAINRLRAVMLEYFPALEREFDYSKNKAVLVLLSHYTTPESLRRIGVTRLAAWLKARGCRNSAGVAKKAVGAAQAQTTTLPAQAIGSALVTKLAFTITAIDEDLARIDAEIAGHIAHHDNAQLVLTMPGFGPVLAATFIAQIGGSLDAFDNVDRLACVAGLAPVPRDSGRINGNLHRPRRFNRRLLRTCYLAALSSLKNSPSSRAFYDRKRAGGKSHKQALIALARRRINVTWAMLRDNTPYVEPTAEIASITA

SEQ ID NO: 202955 - protein, 338 aa, unidentified
MKICGGIDLHSTNSLIALLNWDGELISQKRLDNNLQGIVEHLSPYQDSIEGLVVESTYNWYWLVDGLMEAGYRVHLANTAAIQQYSGLKYTDDPYDARCLAELLRLGILPEGYICPKEERAARDLMRKRSQLVHHKVTQMLSIQTLWTRNTGRSISANRLRKLTEAEVAERFPQVYIVSAVNGNLRVMRCLEVEIDRIEREVKQAVKLRPDFNLVKTVPGIGDILGLTIMLEAGTMQRFEKVGNFTSYCRCVQTKRISNGKKKGAGNSKNGNKYLAWAFVEAAHFAVRYNPLVKRYYQRKKAQRNTCVATKAVAHKLARACYFVLRDQVPFDVNKLFV

SEQ ID NO: 202956 - protein, 489 aa, unidentified
MPRHASTTSARSTAGAALRVLPQLGHEPLYVGIDVGKAQHVAGFVSRTLLTRYQRFEHCPALTFAQSREGFRALAERIREYVPLTQVYVLLEVTGHYHRGLVQYLHELEIPVYLMHVQKRQAALLKSDKRDALGLANHLYNVLEKGVQSGDPLQAVRRLVPPSAVAAQLAGMIHHREELVRERTQRKNQLTAICDELFPEFTQICKDPNAPSALALRTAFATPAAVAVASASALFAARQGRHPSNAKLLELQRLAAESIGTTDLARIRGLTFEQTQLIAELRLIDHHVVALDAELAQTLAGSREGQILTSMPGMGVIPAATILAAIGSIANFDRSAQLKAYCGWAPTLTQSGTTVDRARLAPRGVRLLKHTLYLVAWQALSHPDNEFARLYARLVPRKCALDERTGQRVGRNKVVGRIAGQIITVLFTLLKRDQEAVAHAQARGLPLPESMLYDPELHRYHHAGHYQAPTGTRTGTMVRLPLPSSPTPR

SEQ ID NO: 202957 - protein, 430 aa, unidentified
MSYRIAGIDVHKKMLAVVVSDVEVDDEYQFERRMFGSNPEQLRSLAAWLLEQEVEELVMESTAQYWKPVWEALERHWKPLRQKREGASRRSGTLHLAQAQSNRGRRGRKRDFPDAERLVKRLVARELTLSFVPDAEQRLWRTVTRRKYQLTRDRVRLQNQVESLLEEAHIKLSSLVSDLLGASARRMLKALAEGETNPAALAALADQKLRATPEQLCDALGACTDLKPVYRRLLKMALEQLQFLEQQIGQLDQELASLLHPHQDAVQRLAEVPGLGVDSAQQIIAEVGSTAATFPSEKQLSSWVGACPGDDESAGVNYSHRSPKGNRHMRRILNQSANAAVKAKGTIFEIVYRRTVPRLGHQQTIGAIAHRQCRLIWLILHQGVRYEERGPAVTKQSKQRRTTKMIRQLRSLGYRIEPPNPQHPNPAQGQ

SEQ ID NO: 202958 - protein, 394 aa, unidentified
MHKKNVTACVLTPKGKEIRTFGTMTDDLIQMADWIKSHRCTHVAMESTGVLWKPVYNILELEELQVLVVNAQHIKAVPGRKTDVKDAEWIANLLRHGLLQGSFIPNREQRELRELVRYRRSLIEERSREVSRIQKVLEGANIKLSSVATDTLGVSGRAMIEAMIQGIDDPKELSELAKRRLKTKKDDLQRALQGLVGPHQKLMLDAQLKHIDFLDEQISKLDEEVKLRMLPFEKDLERLDTIPGVGRRNAEQILAEIGTDVKNQFPSAAHLCSWAGMAPGNHESAGKRKSGRTRKGNKKLRHALVEAARAAARTKNTYLSAQYHRIAARRGANRAAVAVGHTILTIAYYLLTRQQNYVDLGADYYDQRRKDIVIKQSIKRLESLGVKVSIEQPA

SEQ ID NO: 202959 - protein, 402 aa, unidentified
MNPLSIRVAVDVGSTCHRVAVGLPDGKVLDEFDIDHSAGGFNEFFHRIEIIEKCHQLPIAVAMEGFNGWARPLDGQILRHGYRLYSVNNLKLARYKEIFPAPAKTDAIDARRILELFRLSEHLPLAKDALHEVAPIPAENDKLKRLTRRRKQLVWERARVINRLQSDLHAVCPGLLSITQMADNLWFLNFLTCRDALPKLARLRLASLLAIPGVGKTYAARIQAWQQQAQFAPEVEWVGEMILQDARRILALGNDIKAMDQKIAAIASRSELAQSIGSIPGFGKVSMAEIAGEIGTLDRFETESGLAMYMGMASLDNSSGKKSGARTTRHVNTRAKAAMMVAVARHVECVPASRAYYDKKRAEGKKHNQAVRALGRHLVRVIWSMVKQGRKYEIREVNAKNT

SEQ ID NO: 202960 - protein, 360 aa, unidentified
MNGKIVAQDTEVKIGVDVHTGSHVVTVKVGNKIVERTKLRPAAEVWNKYLKRYPGCAIHVIYESGPNGYNLYDWLTEMDGEDGREVRVYVAPPAMVPKAPGKTRVKTDRRDSELLIRAFEAESFRPVVVPDKTRRVERELVRTRDRIMKDIQRTKNRIHGLMKYHGIEYPQGEKNWSKGWREMTIVASDRADATGGLKDILLMHLKELDAACEALAGLEKRIVALASSGECGAVMRKLMKQTGIGTVSAALVATEVVSFEAFDNSEAFASYTGLVSGARGTGNTMHQGPITKEGNRRLRRILVECAWVWVRYDDDAKAKFDSLKITRGKRRAIVAMARRLAVRLYHQIVNGASPAPVMLR

SEQ ID NO: 202961 - protein, 441 aa, unidentified
MSHGRVLSRGDRRRNERLARLRSIVRSHFAVVAVDLASAKQAAVVTDHDSVVLGRRMFTGDAWVIDDILDWAEPIAAKAGYAGVVVGCEPTGHRWKPLLDRCRARGLELMCVNPMLVHRGREEEDFTRDRSDFKDAMIIAKRVAELRCYVPYVMEGHWCRLRHLGARRADQLVAAGSARQRLRDLLECAWPAALSAAADPLDALTWRAAMAVSTDPCRIVAMGFDAFADAVREQLPRWGGTRRNLRVLRAIFHAAHTPGGVQTERAAACERAAYALDDWHYALDQVADVEHRMVQVLDALDLSELVTTITGLSVVGAAAILAETGDPARFDCARTWAKHAGLCPRANESGNFHGSTKVSRRGRPGLRLAAWRALWPAVRHNPVYAARYTHLTTRADNPLCNEQARAAIAAALLRQLFIVVTRRVAWDPAIAAGTGVVPQAA

SEQ ID NO: 202962 - protein, 332 aa, unidentified
MKKIIHFIGIDVSKETLDIALIKNNDKSNIYSSKVTNNKTGFKKMKQWLKLEKIPLHEAVFCIEHTGMYSKPVGKFILSLQGNLWMEMSLKIIRSMGVQRGKNDKIDAMRIALYAQRCQDEMKLYEPPRPVVEKLRTLLQLRKRLINSRNSLQVSCNELTTIDEQAGKEATRLIRSSVTALEKNIDVINEQIDELIASDEQLAHEFEIGTSVPGIARITLAYMICFTNEFKNYAGGKQLACYCGVVPFEYTSGKSVKGKPHVHNMANKFLKKLLHMGAIAAVTYYDEFKCYYKRKVEEGKPKMLVLNNVRNKMVLRLAAVIKNNKPYQKIAA

SEQ ID NO: 202963 - protein, 327 aa, unidentified
MQGWAREGAHSITIAVGVDVSKRELVVVVSGHAALRRYTNDAAGRRRLCHDLAKVAGSGMLRIGLEASGGYERKAVSALRKAGFEVIVFQPIQVRAYAQYLGKRAKTDPIDAHVIALATAAYNGVVRHSDDRLAPLAEHMTLVEQIEEDVVRLKTRRDGFTVTALKARLEAEIKRLTTRRNAEIRSLLKSLRQHHDLAHRLDLVASIDGIGERTALTLIIRMPELGTLSREEAASLAGLAPLDDQSGSIDRPRHIMGGRAKVRRSLYAAALPAAFKWNKPLVDLYHRLIARGATHKKALIACARKLLIFANTVLTRGTPWIKSAAPS

SEQ ID NO: 202964 - protein, 381 aa, unidentified
MRTFGAMTADLLALSDWLAGYAVEQVAMEATGVYWRPVFNVLEAQHAVLLVNPQHMRAAPGRKTDVKDAEWLAEWLADLLAHGLLRPSFIPPAPVRALRELTRYRTSLVQARTQEINRVHKLLELGNIKLAALATDGLGKSGRAMLDGLVAGDHDPEALAELARGRLRAKLPALRQALEGQLQPHHRLLLRQMLAHLDFLEASLAAVLAAIERHLVPFEEAMALAQTLPGVGAVAAAGLIAELGADMRVFPSHKHLASWAGVCPGNKQSGGKHFQARTRPAHPRLKALLCEVAQSIARTSGNYLAALYHRIARRRGKGRATLAVAHAVLVALYHMLRDHVPYSDLGADYFDRLDTERLQRRYVQRLEQLGYTVTLTPAPAA

SEQ ID NO: 202965 - protein, 461 aa, unidentified
MKRKKRCKKALAEPAGSVGLPKIRPLVAGMDVGSENHYVCAPSSDGGTEVRVFGASTPQLLAIAEWLEQAQVESVAMESTGVYWIPLFEVLESRGIEVLLVDARQLSRVPGRKTDVQDCQWIQLLHSCGLLQGCFRPEDAICHLRSLVRGKAVLTSERSDWLRRMQKCLDQMNVRVHRAVSDVDGTTGMAILRAIVGGERDPAQLAKFRDPRCHKSEAAMAEQLAGNWREDHLFNLGQALRMYDIVEERMADYQREIQRKMEQLHCGQADLHPLQPVKRREKAKAIKRRGQEPMRNVLHGMTGVDLTTIDGIGVETAEVVVTEYGRDLSRFPSERQFVKHLRLAPRQAITGGKPMRKGKGRKNSTRAGRALRMAATTLQHSQTALGAYYRRLAANKGADIAVFATARKLATLIYRMLRWGQTYVDDGAAAYEKRYQATRIRRMNAAANQLGYQLVPKVEAA

SEQ ID NO: 202966 - protein, 383 aa, unidentified
MRNVALDLAARKISYCEVTDGQVCGRRTVGSLGALEELLGPKCPPARVAIEACREAWHVHAKLEGWGNQVLLVDTTRVRQLGVGQHGRKTDRIDAETLAHAVERNQIPTAHVLSPQRQRLRMQLSVRRALVETRAQYVTTVRGLVRARGGKIASCSVDHFVAHARRAVLGDALGELVAPLLDMLEQLDAKLALLERQLELECAQEPVIGLLMTAPHVGVVTAAAFVSVIDDAHRFGSSRRVGAYLGMVPSENSTGDRRRLGAITKKGNGYTRSLLVEVSWSILRRSSDDPLHRWASAVAKRRGKRIAVVALARRLAGVLWAMWRDGTVYDPAWVGQRIARGLERQAQDVHLRAAAMTCAASKVRRRARRYQHHLPDGKEVTNS

SEQ ID NO: 202967 - protein, 355 aa, unidentified
MKYYTSTTQFNCGIDLHARQMYVCLMDREGKKLVHTNIKNNDFEYFLKLVGPYRHDLTVCAECMFGWYWLADACQAAGLHFVLAHALYLKAIHGGKNKNDRIDSEKIAHLLRSNLIPPAYVYPAALRPLRALLRQRLYFVWRRSELLARIHSHQLAHNRISPKQTRRVRDSWEQQVLAAEPEPLRQLALQNDLAMIKHFDTQIFALEAELQRQAKKSAAREYALLQTVPGIGENLGMTILCEIGDIARFPTVKNFLSYSRLVKGTVASAGKIKGLRGAKLGNPYLRWAFGEAAVIAKRDHAVIGPLAQRLEARMNGNKFKANTVIAIKLARAVYFMLKSQTVFDPDRLVAALSKN

SEQ ID NO: 202968 - protein, 323 aa, unidentified
MLQLLALFIGIDVSKDTLDIAIFGPDGLLDTFKVSNDKKGFAQIHKRLSVKGAPESWHINLEATSAYHRAFVLWMAELGVKVLVLNPKQARDLAKGLGVLRKSDHTDAIVLGQCAKMAWREPTALASGKPYELQEISRRIGVLTRMRASERKRLLKPGASEALVASLRRCIEFMTAELETLEAEWEALLAGCPEQGEIRKNILTVPGVGKATARVVVSELYATIGEHTSKQCVAYAGLAPQEQTSGTSLRRRGRLFSTGNKILRCALYMGAVSALRNDSESRDLYGRLVAAGKHKKIGIVAVMNKMLRRIAAVAKRKSPWQKA

SEQ ID NO: 202969 - protein, 343 aa, unidentified
MKHYAGLDVSLEETSVCILDETGKICREIKVASHPEDLRRILQDPAWQFERIGLEAGLLSQWLFNGLAEAGLPVVCIETRHTKAFLKAQVNKSDRSDARGIAQMMRVNLFRPVHVKTLTSQKRRVLLTARKLLQEKAIAFENEIRGLLANFGLKVGVVGAAKFEERIYELLGDLPDLAEIMEPLLDARRRLREHFSTLHCKLLELARGDEVCRRLMSIPGVGPIVSLAFVATIDTPARFRTSKAVGPALGLTPVRSQSGQTERIGRISLCGDALMRTLLFEAAQVMLRRTTKWSWLKAWAMKVAHRRGSGKAIIALARRLAVIMHRMWRDGTEFRWTREVQAA

SEQ ID NO: 202970 - protein, 339 aa, unidentified
MRLYVGLDVHSSNTRVGIVSEDGQRVYDCRLANDVGEILRHLAPMKAEIVGVVVESTYNWYWLVDALMEAGYRVHLANPSAMKMYEGKKHTDDRHDAFWLADLLRLSILPEGYIYPKEDRPVRDLLRKRSHLVKLRTSLILSLHGIIARNCGVRLKGDVIKSLKEDRVSPLLEYNEDLHLSGMMTKESIDDFTVKIDKIERYIRTRVKLRWEYRGLLTVSGVGKILGLTIMLETGPVSRFASAGNYASYCRKVPSLRLSNSKVKGRGNRKNGNKYLAWAFSEAASVARRCSPQARRYYDRRCQKTHPAAAHNALASKLAKAAYYIMRDQVVFMPEKLFV

SEQ ID NO: 202971 - protein, 437 aa, unidentified
MTTVTTCSPATRFVALDVHRQYLVVGAVDAQQHVVLSPRRFGFEAFQDWAPTHLTVGDMLVLEATSNAWLLYDQLKPLVADVIVAHPQAVKLIAAARVKTDSRDTIKLASLLAANLIPAVWVPPPEVRELRALVAHRKRLVQQRTQAGNRLHAVLHRHNLVLPAGKPFAAHQREWWRSLDLPVSEKLRVQQDLSLHQALEELVKEVEAELGRLSTCEPWVKQVPFLVQLPGLGVLSAMRVLAAIGDITRFPSAKHLVGYAGLGASVHESGETHRGGHITKEGRSDLRGVMVEAAWVAVEHHSHWKAQFERLSARIGKQKAIVAIARKLLVSIWHVLSQQEADSHAQIQAVTRKLMNWIAHTGATPGKKRDRLLLLYQYLDQLGLSEEVEEINYYGQTYRLSLRQKLLRGAQQRKERQDSLEIHPDVSASQQHGRCRP

SEQ ID NO: 202972 - protein, 394 aa, unidentified
MILVGIDIGKNKHTFSIIDKNSGEILLSPSDFSNNLKGFLFLIQKLSSYTKSELLIGMEDTGHYHFALLKYLLDRRYAVALINPTTTDLTRKLQGGITKNDPLDSLTICDVISSNHRNKPYRVTTLNRFDLYEQKQLTRHHHNLKEELNTYKNRLQKCIDIVFPEFNSLFHSKYGIVYMNILKAFSSAKAIANADIRSIRKCFEFKGQGKRISLSAEQLKLTAKSSIGIPSVAEEIQIRHLVSQIELLEKQLSEIDKRIEEFSLKNNSPILTIPGISHFSGTSIISELGDICNYTKASQIIKFAGVAPYHYESSQFTAQHTAITKKGSKYLRKTLYQIILPVISNNEVFYAYYTKKLNEGKGHRCAQGHCIRKLLRVIYHLLCTRQPFNPKLLL

SEQ ID NO: 202973 - protein, 348 aa, unidentified
MNLKRIGLDTSKAVFTLHGVDHDEKAVLRRNLRRAEMEAFFAKLPPTLVALEACGGSHHWGRRLAFLGHTVQLIPPQYVKPFVKRGKNDRNDAEAISEAAARPDMPSVAVRSAEQQAEAIVLSARELLVRQRTQLVNAVRGHAAEFGIVAAKGTSQLPALLEAVAAGEAVPDAAKEMLAFLGGQVAQLDERILELERRMKQQHKANPVSQLLAEVPGIGPIGALSLALTIDPGRFQSGRHFAAWLGLTPKEHSTGGRQRLGGISRAGNERLRQLLVLGAMAVIRYAKPGSKTASAWLLALLERKPRKLAAVALANKMARIVWAMMATGEAYRGSKTTATQAAGVAVIA

SEQ ID NO: 202974 - protein, 333 aa, unidentified
MKNYDVFIGIDVSKLTLDICGIDNCNEVRIKHSVIKNSVNEIKSYFKKVIKNQRKNIIVGFENTGIYGALVASVLNELCIDYSQLPSLEISKSKGISRGKSDKIDALQIAQYLLSHRFKIKLSTIAENHITEMRLLYTHREKIIKSISQYQREFENKNFLPKEIQKDLIKSTNSILKNLNNNLEKIEKKLSDLIKENKTIEKNFNLIKSVPGVGKQTAIYLLLVTKNFTAFKEARQLACYAGVAPFPYQSGSSINGRNKVNNLADKKLKSLLNMCALSANKYDYDLKEYFEKKVTEGKNKMLVLNNIRNKILSRVFAVINRQEPYVNLKKFAA

SEQ ID NO: 202975 - protein, 319 aa, unidentified
MQTTAVVTTFIGVDVSKDSLVSYLYDSGARRTVPNQRHAILTWLKTLPSGSIIGVEATSTYHELLADLAYAHGMLVYVLNPKDVHRYAKGVGMRAKTDRVDAALIARYIVRERSELHPYRPASAELRQLQRLLMRRAKLSRCRAGLQQSLHGLTGLARSLNQLLERFDAVIDQIDQRIERLINACPLRQAANLHLRSIKGVGPVVAPALLYLLLRFAFLNADSFVAYIGYDLCADDSGKRVGRRHLSKQGPSELRRLLYTAAMSAANSRAWKPIYQRQLAKGLSRTAALVVIARKIARTAWSIYTHNTTFDPARITQQA

SEQ ID NO: 202976 - protein, 347 aa, unidentified
MRLYTKQHKAYCGIDLHARSMYVCILSQDGEILLHRNMKTSPETLLKAIAPYREDLVVAVECIFTWYWLADLCAQEQIPFVLGHALYMKAIHGGQAKHDTIDAQKIAVLLRGGRLPQADVYPAAMRATRDLLRRRLHLTRTRAELLAHIQNTNSQYNLPEIGKKLAYKANRDGVVERFSDPAVQKSVEVDLALIGCYDQLLSDVELTIVQTAKQHDAHTLYQLQSIPGIGKILSLVLLYEIHDISRFPRVQDFVSYCRLVKCAQESAGKRYGTSGAKIGNAYLKWAFSEAAVLFLRNNPVGQTYLSRLEKKHGKGKALTVLAHKLARAVYYILRRDTVFEMDKFLHG

SEQ ID NO: 202977 - protein, 347 aa, unidentified
MEQIIRIGMDTSKHVFQLHGVNAAEQPVLRKKLRRSEMIAFFEKLPATMVAIEACGSSHHWARLLGALGHEVKLIAPQLSKPYVKRGKNDAADAEALCEAMSRPTMRFVPVKSAEQQASLMLMGMRDRLVRNRTQLANAIRGYAAEFGLTAAKGMCKVKPLLDRIAIDPAIPALARELFASHAMEYRRLDEQLPEIDDKLMKWHRANECSRRLAQIPGVGPIGAALLMMKTPAPELFASGRQFAAWMGLTPKDHSTAGKSRPGIITRAGDETLRCTLVVGATSLLQHVRAGRGKNGTPWLLELLKRKPPKLVAVALANKIARIAWKMMMTGEAYHANTSPPPQACAA

SEQ ID NO: 202978 - protein, 341 aa, unidentified
MNVKTIGIDLAKEVFQVHGIDEHGKRLFNKQLKRPKMLSFFANIPPCLIDMEACASAHFWAGKLMSMGHNVKLMAPQFVKPYVKTNKHDAADAEAICEAVTRPNMRFVPVKTPEQQAVLALHRSRQSFIKQRTAQANQIRGLLAEFGIVVPRGIHQLQLQLSEILEDADNSLPSLFRVQLGLLQHHMAYLFDVIATLDKQIEQCYRQNALCQRISKIPGIGPITATALVATIGNASNFENSRQLAAWSGLIPRQHSSGGKQVLPGISKRGDIYLRTLLIHGARAVLQSVKRKKDAVSGWASRLLARRNNNIASVALANKNARIVRALLAKDQEYYAPIMNV

SEQ ID NO: 202979 - protein, 364 aa, unidentified
MEWTQPHYLKRPLKGQDGKLDHPNRGSEEGPVMKVTTIGIDLAKDVFGLHGVDGQGRVAFKKRLVRRRLLEFMSQLPRCLVGLEACSSAHYWARKIERLGHRVRLMSPRFVKPYRKSDKNDANDAEAICEAVTRASMRFVPIKSEAQHEVQALHRVREQLLKSRTALVNQVRGLLAEHGIVAPQGIARARRLLLEILADPERHGLSGLFRETLQEMAERLRFFDERVGAYDDRIERRFKEDERCRRLAKIEGVGPLVATAVVAAVGNASEFKSGRELSAWLGLVPRQHSSGNRSQLLGISKRGDRYLRTILIHGARAALRRADHKRDQRSRWAMRIKQVQGYNKAAVALANQSARIIWAPLTRG

SEQ ID NO: 202980 - protein, 374 aa, unidentified
MGWTAPDGIIVPRWVVDTSQGRPSVEHPTRIFIDTSKELFQLHGVNAAEAVVVRRRLRRGQMLEYFGKLKPAVVGLEACGGAQHWARALRAQGHEVKLLPAQYVKAYLKRNKNDARDAEAGCEALSRPTMRFVPVKSEENQAVQMLVGVRERLVRDRTRLSNEIRGYAAEFGLVAGKGLDKLQPLLERVAAETQLPELARELFGDLGRELTDLEARLAGIERRLLVWHRQDEVSRRLAAIPGVGPIGAVLLRVKTPQPEGFKSGRDFAAWAGLTPKDHSTAGKTRLGVITRAGDERLRAVLVSGAMSVIQKVKAALKAGRPAAWPWLAELVKRKQPKEAAVALANKIARIAWKLMISGQAYRPQPGDLAQPTAA

SEQ ID NO: 202981 - protein, 331 aa, unidentified
MYFSQFVGVDISKNTLDAAIYPAKDKKLDFLHFDNTQKGLGEMMSWLKRRGVKSSEMIICAEHTGVYTNPLIAFADKKGLALSLNSPLDIKHSMGIARGKNDAVDAGRIAEYAHNHRDKLRLYEKPSEAIMKLQYLLTERRQYMRQRTALINLNSAMGKYETPEARNRNESAIRHCEKLVKKVEEQMMAVLCSEPEVKWNFDLVSSVKGIGLINAINTVVYTNNFKAFETPRRYACYIGVAPFDHTSGTSVKGKTQVSKICRTQQKAELSMAARSAVIHDPGLKRYYQRKMKEKGGGKNAHGVVLNAVKFKLILRMFAVVKSGQPYKVLNY

SEQ ID NO: 202982 - protein, 332 aa, unidentified
MLIRKLTGQEPIVKTSSQEVYDHYVSLDWSERTMAIATMTASEATPRVWEVRSDVSRLQEYLQSLGGRIILTFEESTSAHWLYGKLMPYVERLIVCNPGYNRLLCRGPKNDSIDAAKLCLLLRQGSLKEVYHSSSRLYELRLLVSAYEDTVRAGVVAQNQLKAHERGRQTSGKSGSLVVEQLQRRIELYHKEKRQYEEAFTRWVKRTPVLRQLKRLPGIGFRGAVKILGYVIDARRFPNRGHYWSYCGLVWHQKTSGGRHYGRRRPQYNHVLKAVYKTAAMAAIHRRNHIADYYQNLLKSGRAERDARHAIARYIARLSYGILKQATERNNS

SEQ ID NO: 202983 - protein, 421 aa, unidentified
MKRADTWKVRGVRDDTLIVAIDVGMEMNRGYCTIPDGRSTKIFKFDNTREGFDTFWGMVMASKNRFKCNEVIVGYESTGPYGEPLVHYLVKKPVKMVQVNPMHTKRVKEINDNSPLKTDDKDPRVIADIIKLGRALSIVIPEGEAAYLRRVNNSRERHVRERTALVNQLQQLVFLLFPEFKKVIKDIKCRTPLYLLEKYPTPEAISVLDKHVLGEEMRKKSRGKFREQHADMLINLARNTVGIREGVSGLSMDIRHILVQLEMLGNLIAEIEGEMEITLRRIPYSSKLLSIKGLGVVSVAGIIGEIGDFKKFGTQPEIMKLAGLDLYEISSGKMKGQRRISKRGRSLLRKILYYAAIQTIRKNGILHDYYTRLTDRGMKRMMALVAVSRKLLGIIYAIVRDDSEYTVNFESMKRQVIKKAA

SEQ ID NO: 202984 - protein, 347 aa, unidentified
MNFYNTTHPFYCGIDLHARLLYVCILNQAGETIFHKPIAAKPELLHEILNPYIGQIVVGVECMHCWYWVADFCEEHDIDFILGHALYMKAIHGGKAKNDRIDSFKIAQLIRGGNFPLAYVYPKAMRATRDLLRRRLKIVRHGAHLKAHVANTTSQYNLPPNKVNLKNVSAREKIRTTFADKVVQNNVDLDMAILDCYAKELNKIEWFVEQQVKQHKPVGYQLIRSIPGIGLILGLTIIYEIGDITRFPSIQKFASYARLVKCKAESAGKTYGTQGNKIGNAHLKWAFSEAAVLYLRGNEKAQRYLAKLQKRMPKSKALSALAHKLGRCVYYMLVNQKVFDESRFLKC

SEQ ID NO: 202985 - protein, 490 aa, unidentified
MLSPRSESLSLCHLGPRPRLLGGEYMTQKKKASQEKKESALSLPVVRPRSAGIDIGSSEHWVCGPPRADGKPNVRVFGTTTAQLKELADWLVEQRVESVAMESTYVYWIPLYELLESLGLQVVLVDARQMHNVPGRKTDFADCQWIQLLHSYGLLRGSFRPVEAIGRMRAIRRQMENLVHERTRCVQWMQKALDQMNVQVHRAVTDLTGDTGLAIVRAIIAGERDPQVLAKHRDPRCRKSIEDIAQHLVGNWRDEHLFNLASALRLYDAFGREIESYEGRLATELQALAPPESRDKPVPPHPNRAKEKAIRGRGQQPLRTTLWRFVGVDLTRIDGISSGAAQIVLTEVGTDLAAFPSEDHFVSWLRLCPRTPISGGKPLKKRRNGLGANRISGALRMAACALQRSKTALGASFRRVARHKGASVAVFDTARRLAKLIYRMLRFGADYVDIGEQEYDRQFATRRLASLKEAARSLGYALVQQPAAPESASV

SEQ ID NO: 202986 - protein, 341 aa, unidentified
MQITTIGLDIAKNVFQVHGIDAAEKVVLRKQIRRGQVMKFFAALPPCLVGMEACATAHYWARELAKLGHEVRLMPAKDVKAYVKRNKNDAADAGATCEAVRRPTMRFVGVKSAEQQGQLMQHRTRDLLIRQRTQAINALRAHMAELGIVAAQGHEGLKKLLAIIADETDERLPVDARASLIVLAAQLQALQTMIGAIEKRIIAQHRASEESKRVASIPGIGPLGASAITATVTDPSAFRSGRDFAAWIGLVPRQDSTGGKQKLGPISKQGDRYLRRLLVVGAHAVLKRARLHPQKYPWLTQLLARRPFKVVAIALANKMARVAWALLARGQTYRVPRLAAA

SEQ ID NO: 202987 - protein, 343 aa, unidentified
MKKIAIGIDFAKEKFDVTVKNVTNGTSLYGQFPNTRGGGRDMVRMVKKFAKGTTSDDWIFCGEDTGYYSQTIARYLTEKGYFMWLQNPYCIKHSEGGIKRGKNDKADSVSIADYAHRYEDKARKYELPSKVSEELHLLLTRRDAYVRAKRVIQSGAMEIPKRDKQGDTITLIKASNKHLLKEIDDEIERLEARMEEIVAGEEAMQKNYEILRSFPGIGIVNAMCFIAYTDNFTKFGLKSRRIATYWGVAPFGEDSGTSVHKDPHVSHFCNHWLKAILSNAANSSILCNPFIKPYYDRLLKAGKCEGICRNNVKNKIIHIITAMIRKGEKFNPEFNFTNQKAVV

SEQ ID NO: 202988 - protein, 400 aa, unidentified
MGERRGRVWAGIDAGKGHHWAAAVDETGATLWSKKVDNDELAILTAMGEILDLADEVQWAVDISGTSSALLLALLAAHGQQAVYVPGRTVNRMSGAYRGEAKTDARDAYVIAETARNRRDFATIDVPAQLAADLALLTAHRSDLVADRVRMINRLRDTLTGVFPALERAFDYSSQKGALVLLTGYQTPAAIRRRGRARLTAWLANRGVRGADAVAATALEAAQAQQTALPGEDVAAQIVADLAVQILALDDRLKRIDKQIRETFRNHPQAEIIESLPGMGPILGAEFVVAAGDLTAYADAGHLASAAGLVPVPRDSGRRTGNFHRPKRYSRRLRRVFYMSAQTSIIREGPNRDFYLKKRGEGCKHVQAVIALARRRASVLWALLRDNRIFTPELPVAQAA

SEQ ID NO: 202989 - protein, 475 aa, unidentified
MAAVMIGVDPHKASHTAVVISAAEEPLGELRVRACAAQAGQLLAWAAAWPQRTWAVEGAGGLGHLLAQQLLAAGERVLDVPPKLGARVRLLATGNVNKNDPNDARSVAIAALRSAGVREVRADDHAAVLKIWSKRYRDLGRTRTQVVCRLHAVLCELVPGGVSKAITAPHAARLVASIAPSGAVEAARAELAAAFLEDLRSVDARIRETRKTLAAAVQAAGTSLTGLFGVGPVIAAAVIGDVRTVSRFPGRDHFAAYNGTAPIEVSSGPRKIYRLSRRGNRRLNHAIHMAAVTQIGHRHSQGRAYYDKKLAEGKTPKEALRALKRQISNAMFACLQADARRAATSAKSPGGQQGNDSVASAAGSHPRHRLFGQATPGPGHHTTTASGSPAPGPAPQDRSRAQGKAGHSSIAATPPSAQPQVQVERPQRSEDERPGGAARQRPHSAARKARGQGPLVKPPCPTGTSQAAKRTDGNP

SEQ ID NO: 202990 - protein, 338 aa, unidentified
MNLYSGIDLHSNNSVVVVMNAEGKVLYRRRLENDLGKITQALAPYRKDLIGVVVESTFNWYWLVDGLMEASYPVRLANPGAIQQYSGLKHTDDESDAEWLAELLRLRILPTGYIYPKEERGVRDLLRKRGHLVRQRTANTLSVQNIMRRSEGTRLTGNVIKALRPQQVHDIMPQPDVALAMGASVAVIQCLEEQINALEQAVLGRVKLRREFVLLKTTPGIGDILGLTIMLETGEICRFASVGDYSSYCRCVSSTKLTNFKKKGAGNVKNGNRYLAWAFIEAANFAIRFSVPIQRFYERKKKRTNTPVAIKAVAHKLARAAYYIMRDRVAFDVTKAFS

SEQ ID NO: 202991 - protein, 345 aa, unidentified
MIIGCDYHPSWQQVSWVDTETGECGERKLVHATGEAKVFYQQLGAPALIGMEATGNSQWFIELVEDLGHAIWIGDAAQIRASYVRKQKTDKRDAAHILKLVVENRFPRLWTPDREQRDLRQLVLHRHKLVEIRSRVKNELQHLSMNKGMQKKATLWSQAGQKLLRQLPLKPWASCRREDLLGLLEMLNQQIGKLDQAVQKAAEEHPQARLLMTQPGVGPNTALAYVLTIGDVTRFPRGKQVASYLGLIPREESSGGRQKLGAISKQGNRLLRSLLVEAAQIAVRFDPGFRKQYLHRCHQKPKGVAKVAAARRLAVRLYWMLRTETAYPEIVRIESSPRVPLVGAS

SEQ ID NO: 202992 - protein, 357 aa, unidentified
MQSHYKVGCDAHKRYSVFAVRDADGALVKENRVNHERGAIQAFLSRFPQGTPVALESVGNWYWIVDEIEAAGCIPKLAHPAKAKVMMGNVHKTDKLDAAGLATLEHLGSLPTVWIAPGEIRDERELPRTRMAFAKLRAALKNRIHSALAKYALSLDAASDLFAPKWRPQLLQLLQRLPPETCRCVEQELELIDQIQAHICKLEGRIRDRTQLTPSMQLLKSLPGIGDILAIVIDRELGSIHRFPSNVHFASYSGVVPRVTSSGGKYRYGRMVKQANNYLKWAFIEAANAVVRQRHHPRWQQKHVCQLYERTRRRKGHAVAVGAVARHLAEATFWVLTKSEPYQEPRKVSHKQGQARA

SEQ ID NO: 202993 - protein, 385 aa, unidentified
MDRTSCSAVSRHTLHCALELSKKSWLLAIQFPDREQPSVYPIGGGDTEKLMAKLTTARDCWAKVSGAPPMITLCYEVGYDAFWLARFLKARGIECLVIDPGSVQVNRRGRRVKTDRVDVKMLLRTLIAWCRGERHVWSLVRVPSIDEEDLRRSHRERSRLVRERTAHINRIKGLLFGQGIRGINVKSQYKTLAVDKLLTGDGHRLPPRLAREIERELQRLAVVQEQIAEIERERDRAPTPCEATERKRLLLLQLKSIGPAISALLSREVYYRQFVNRRQVGSFLGLTPSPYSSGEEERCQGISRAGSGHVRAIMIETAWLWIRHQPKSALTRWFVERTAGQSTRMRKIMIVAVARKLAIALWRYVEHGLVPQGAILNPREAKMRG

SEQ ID NO: 202994 - protein, 387 aa, unidentified
MSQTIAAPIPAAVDYERTLVLAIEVSNKSWVLAAQVPGLPHTKAKRTINPEAEALLAAITGYRTRAAATGRSIERVIAVYEAGWSGFWLARWLMRRGVEVHVVQPSSVPVDRRMRRAKSDGIDSELLLRTLLAWLRGEPRVCSMVPVPDEADEDARRCVRERTELISERIGLTNRIGAVLATLGVSNYNPLLRNRCRRLAELRTGLGEPLPANAHAKIKRLLARLELVLTQIAELERERDAVVETESPDKASKMIQQLTGLRGIGVQSATVLVREAFVRRFANGKALGSYAGLASSPYSSGGTDREQGIGKAGNRRVRTVMVELAWLWTRYQPDAAQVCWFRERVGSTGPRVRKIMVVALARKLLIALWRFVIDGVVPEGAVLKPAV

SEQ ID NO: 202995 - protein, 347 aa, unidentified
MDQVIRVGMDTSKSVFQLHGVNAAEQVVLRRQLRRREVLAFFARLGPTKIGIEACGGAHYWARELRALGHEVVLLPPQYVKPYVKRGKNDRIDAEAICEAMSRPTMRFVAVKTEAEQAALMLAGLRAQTVRRRTQLSNTIRGYGAEFGLVAAKGLSKIEPLLARVATEERVPDLAKEVFGDFGREYAALEQRIARLEARLMAWHRQNEPSRRLAEIPGIGPITAVMLVMKAPDPAAFGCARNFAAWLGLTPKDHSTAGKTRLGVITRAGDEDLRSLLVTGAMSVIQQVQRGRGAPSPWLLELVKRKEPKLAAVALANKMARIAWKLMVSGQSYDPRRANPKGLAKAA

SEQ ID NO: 202996 - protein, 323 aa, unidentified
MTYIGIDISKDSFVAAFPKVSGYQTQTYPNTVKGIRKFIGLLSATEHHCVMEATGNYGFMLLYLLDRQGIAASMVNPKQIKHFSRMMMTVTKTDPKDACMIAMYGEKMNPPVYKMPSETVMLLKQKKTIIRQLKKQLTASKNLKGSLVALPFQDKNGIKALDKTISFLASQIESLESELADLASSEFDRQVKLLTSIKGIGITLATALIVATGGFSYFNNAKQVSRFIGICPTYQLSGTSVHIKGGINRNGDASLRSLLYVASWSALRSNTTCKECYVRLKANGKPSKVALIAVANKLVRQAFAVIKSDAPYVDGFVSTRQTK

SEQ ID NO: 202997 - protein, 370 aa, unidentified
MKTTTNKTSPAPSVVSTSTPAVVSGFTLGLDLGDRQHHVCVLDVAGNIVREAALPNTRSALAQLLADFPRATVALEAGTHSPWISRYLTDLGATVLVANPRKLHAISRNERKCDRRDAQMLARLARVDAALLHPIQHGSAQAQHDLLGLKLRDALVRSRVSLINAVRFTLKSLGHPVRNPSSEAFHKTVLQDIPADCLPVVQPLLSVLAQVTEQIKAMERDLIARSKTAYPATQRLQQIAGVGPLTALCFVLKIGDPQRFSRARDVGAYLGLCPRRDQSGGTDKQLRISKCGDGLLRRLLVSAAHYVLGPFGPACALREHGQRLTGTGSAREKKRAVVGVARKLAVLLLSLWKHGTDYEPRVTAPVMTPA

SEQ ID NO: 202998 - protein, 345 aa, unidentified
MNKQICIPQATVFCGIDVSARSLAVALINGDGSLAQREFPNSAGGHRALLAWLAKCGGRVRVSLEATGVYSLDLALALDAAETVGLAVLNPKLVNRFAQTLRRSKTDAADAAVLAEYSQRMPFSRWQRPEASHLRLRTIGRYVESLVVEQAGLKNRLRTAEQTSTTPRVVLGDLRQALAAVERRVAKMRREALKLVRAEAALRERFQLLVSVPGIAEISAIRILSELVLLAPTMGVRQWVASSGLDPAHQQSGTSLHKPSRISRAGNRHLRAALYMPALSAVRNDPHLRAFYRALRSRHKTGLQALMAVARKLLHAIYGIFKTGRPYEGKLLFPNIQTEVESIAG

SEQ ID NO: 202999 - protein, 345 aa, unidentified
MEHYVGLDVSLKLTAICIVDQTGKIEREGVVPSDPEAIAAFIKSHAPHVARVGLETGATATWLWTELNKLGLPVICIDARHAKAALKMQINKSDRNDAVGIARIMQCGWYKEVRVKDLDSHAVKALLVSRALLVKIKRDLENQIRGLLKNFGLVIGRAKMNVFAVRAAELTVHRPELAAAIAPLLNARAAIEQQIADLDRKVMRLVRNNAQARRFMTAPGVGPITALCFLATIDDPTRFKRSRSVGAYLGLTTRRYASGEIDWTGRISKCGDMMLRSYLYEAANVMLTRVAKWSALKAWGIRIAKRTGLRKAKVAVARKLAVILHRMWIDGTEFRWSKEAANQPA

SEQ ID NO: 203000 - protein, 356 aa, unidentified
MVSSETKKEKESPMKNITVLGIDLAKDVFQLHGVNEHGKKILGKKVTRTALPTLIAQLPRCKIVMEACGSSNYWSRKFILFGHEVSQISPQHVKPFVQGNKNDKNDARAIVIASQQDGMPTVPIKTVEQQEIQMLHRYRESLVHDRTALANRIRGHLREAGLFLVVGLSQVRKQVPLLLEDAENELTVEMREIISSCHKKLLDLDQEIERYTQKIERYCKQNPVCERLMKLSGVGPMIASIVYATMGSPTNFKNGRHFAAFLGLVPKEHSSGGKHCLMSISKRGDRYIRSLLVHGGRAVVKHASKKTDYLSCWVQRVHKERGYNKAAVAVANKNARHMWAIMAYDDKYVDHLKLCA

SEQ ID NO: 203001 - protein, 310 aa, unidentified
MEIYVGIDISRDTLDIAIQGDDKPRQFMNTPDGIRAICDFLTKLKPTLIVFEATGGYEMPLYIALNEAKLPAAPVNPRQVRDFAKATGKLAKTDILDARVIAHFAAALHPQPRSIPESQEIKEIVARRNQLVQMIVAEKNRLHSTRKNIKARIQVHIQWLEEELDNTNKELEQCINDNPEWQKKNNLLQSMPGVGPVLSTTLLADLPELGKLNRKQIAALTGVAPLNRDSGTLRGKRTIWGGRATVRGALYMATLVATRFNPVIRQLYQRLLDSGKLKKVAIVACMRKLLIILNSMVKHNTKWSYSPCFD

SEQ ID NO: 203002 - protein, 344 aa, unidentified
MDYYSGIDVSLERSSVCVVDGSGKIARETKVASEPEALINWFGSLGFGLARIGLEAGPLSQWLYAAMKQAGLAVELLETRHVSDAFKAMPVKSDRNDARNIAQLMRLGWFRPVHCKSMTAQEIRAMLTARKLVQSKLLDLENSLRGILRGFGLKVGKTTRTHFAGRVEELVKGHPNLQTITEALLRARAVLLAEFNGFEKRVRAMSRLHEKARLLMSTPAVGPIVSLTFACAIDDPSRFTSSKQAGPHFGLTPKKYQSGETDYTGRISKHGDASVREALYEAAHIMLTKPVRGCSELKSWAMRIARRAGTNKAKVALARKLAVIMLRMLKDNVPFNPAAKAATA

SEQ ID NO: 203003 - protein, 337 aa, unidentified
MNKLFIGIDVSKHDLDVAYWQNDKTFFLGKYPNNQNGFQSIYQDIETRRQKANADSVFVVMEPTGGYEQHFAHFAFRKGWEVSLPNPGNVRDWIKGIGKRAKTDKQDAMMLAQFGAIQKPLLWKPLPAEIAELESMLNRLDDLNAILHSETNRLESFTNQEISHKVAVDSIHQNISFLQKQIEGLEKAIKEHFDKHTYLKEQNKTLKTSPGVGSKISPYLLVAVHRFSVLTDGKGTSKEITAYYGLDPKPHESGKSIYKRPGISRQGDRDIRHLLYMGALGGIRGNNPLRAFYLRLTGRGKSAKLAIVAAARKIIVWCWMIFSQNLPFDVTRFRDAC

SEQ ID NO: 203004 - protein, 312 aa, unidentified
MERIFVGIDIAKDQVDVHVHPTDERFQLSRDDAGLAGLVARLQPLGPRLVVLEATGGYEIPVAAVLASAGVPVAVVNPRQIRDYARATGQLAKTDALDARLMALFAEAVQPEVRPLPTPEAQALGDLVTRRRQLVDMLGAERNRHHQARDLRLQRCIATHIRWLTKALAEIEADLATRIRSSPIWRERDNLLHSVPGVGDITAYTLIADLPELGHLDRRKIAALVGVAPFNRESGHWRGRRMIAGGRPAVRSVLYMATLTAVRFNPAIAHFYQRLTAAGRPKKVALTAAMRKLLTILNAMLRDQRPWQPESA

SEQ ID NO: 203005 - protein, 409 aa, unidentified
MDVVITRCAGLDVHQATVVATVRVPDDQGGRRVVTDTFGTMTADLLALRDWLHAYGVTHVALESTGVYWKPVYYMLEDAFTLLLINMQELKRVPGRKTDVKDSEWLAQLLECGLLRPSFVPPPPIRELRDLTRYRVQQVRDRSQEVNRLCKVLEDAGLKLTTVISDVMGKSGRAMLQALVDGTTDPAVLAELARGKLRKKLPELRRALQGRFRPHHAFLIEQIFAKIDFLDEALERLTTEIDQRLVPFEPMLTALDTIPGVDRIGAISIVAETGGDMTRFLTAGHLCSWGAMCPGQNESAGKRRSGKTRKGNRYLRGTLIQAGLGAMRKNGSALQARYRRVARHRGHKKAVVAVGHQILEIAFYIMRDGVTYEELGADYFNRRHAEKAVRRHVRQLEALGFHVTIEKAA

SEQ ID NO: 203006 - protein, 345 aa, unidentified
MKHYAGIDVSLEASSVCVVDASGKVVREGKVASEPEALITWFAGLGVELERIGLEAGPLSQWLHAALKEAGLSVELLETRHVRAAFKTMPVKTDRLDARGIAQLVRLGWFRPVWCKSASSQEARALLGARRLLLDKAKDVEKSLRGLLRNFGLKLGKAAGRTFEPKARALVDGHPVLEAVAEAMLKARAALLAQHGLLHRRVLGMARASERARLLMTAPGVGPVVALGYVSAIDDAQRFTSARRVGSYFGLSQRKYQSGKIDITGHISKMGDAGVRALLYEAAHVILTRQKKPSALKAWGERLARKIGAKKAKVALARRLAVVLLHMLRDGVRFDPARGAPAQAI

SEQ ID NO: 203007 - protein, 421 aa, unidentified
MKKRRYRATNVKQANWEKMASLAAGECVVFGVDVAKDDFFGVLMKTDRSVIETIKWVHPQQTRELADHLLELEAQNLEVVMEPSGTYGDALRGYLTGLGLPVYRVSPKRVHDAAELYDGVPSLHDAKSAYLIARVHLDGASAPWGELSASRRDHHALTAELDLYQSQHQANLNRLDAYLNRHWPEVVRILGLSTVSLPTLIGEYGDPGQVSAHRDEAQRLLRRTGRGLLSGEKIEQVLDSSETTLGVPCTPGERHLLQVLGCELLRTHKALKAIENQIGKGVDKDLVLRRMARVVGKTTSLVLETTQGTPLEYPNPHSYLKGMGLNLKERSSGKHAGQLKITKRGPGKARKYLYFAALRWSHQDPVSAAWYQNKVQRDGGLKGKAVTALMRKLALSLWYVARGEPFDTRKLFNARALGMAA

SEQ ID NO: 203008 - protein, 344 aa, unidentified
MGVTVGIDSHKSSLAVAVLDDLGRLVGVREFANNPEEHEKLRSWIEAHGAARLIGVEGSGNYGARLTRHLLKSGEDVREVPAFLSHRERKKSPSRGKSDVQDALAIARVTARGDGLSAPQRTEAFQDLKLLSDHRDQLVRARTQLINRTHTNLVVSHPGYEKRIPKLRSKRNLQAAMVMLRSDRSVRADLIRDRIGEIRRINEKLAVIEKQIVCKVIESGTGLTQLRGIGFIAAAKILGEVGDLRRLRSKASFAMFSGTAPLEASSGRTKRHRLNRGGNRQLNYALHMMAMARRRGDVETKLYMERQQAAGKSDKEAMRCLKRQLSNVVFRQLIAESRASASAV

SEQ ID NO: 203009 - protein, 404 aa, unidentified
MNNVAGVDVSKGKSMVSVLRLFGEVVTKPFSVGHTGSELKELANYLKSLDGETRVVMEHTGRYYEPVARFLHEEGIFVSAVNPKLIKDYGNNSLRKVKTDKADARKIARYGLDNWVELRQHTPMDTIRMQLKTLNRQQGLYSKTKTMMKNNLIALLDQTYPGVNALFDSPVREDGSQKWVDFATAFWHVDCVRNMSLTAFAERYRKWCKRHGYNFSQSRAIDVHTKAQDLIAMLPKDALTKTMVQQAIDALNAVSASLERLKTEMRTLAAQLPEYPIVMAMRGVGDSLGPQLMAEIGDVTRFTHRNAITAFAGVDLGADQSGTHEAKSARASKSGPPELRKALFLVMDCLLKTMPQDDPVYRFMDKKRAEGKPYLVYMTAGANKFLRIYYGRVKEYLASLENSD

SEQ ID NO: 203010 - protein, 372 aa, unidentified
MNYNTVYVGMDVHKESFTLCSCKYEDEKASHYQRTPASYKNVLRYLAFLRTIYGEDTRFVCGYEAGCLGYSLYHQLENFNVECVILAPTTMLEQRSKRRIKTDKRDAEIIARSLAQHNYSPVHIPTKMDNQTKEFIRMRDDHKAELKKIKQQILSFCLRQGYQYDGSGNWTAKHVKWLRSLKPAGLYKEILDEYLLTYTILTDKLNRLDQRIEELASKEEYKESVSKLTCFLGIKTHTALSVIVEVGDFQRFVSARKFAGYLGLVPGQHSSGDDRNGLGITKAGNTHVRRLLVESAQSYTRGKIGYKSRVLRSRQAGNSPQIINYADRANERLRRRYYKMVLKDGKKYNIAKTAIARELACFIWGMMTDNIY

SEQ ID NO: 203011 - protein, 430 aa, unidentified
MPYRITGIDVHKKMLAVVVSDVEVEGEYHFERRRFGSNPEQLRSLAAWLLEQEVEEVVMESTAQYWKPVWEALERHWKPLRQKQEGASRRSGTLHLAQAQSNRGRRGRKRDFPDAERLVKRLVARELILSFVPDTEQRLWRTVTRRKYQLTRDRVRLQNQLESLLEEIHIKLSCLVSDLLGVSAQRMLKALADGETNPAALAALADRKLRATPEQLCDALGACTDLKPVYRRLLKMVLEQLQFLDQQIGQLDQEMAMLLNQHQDAVTRLAEVPGLGVDSAQQIIAEVGPTAATFPSAKCLSSWVGACPGDDESAGVNYSHRSPKGNRHMRRVLNQTANAAARTKGSIFEIVYCRCVPRLGHNQAIGAIAHRQCRLIWLILRQGVRYEEQGPAVTKQSKQRRTARMVRQLRALGYRIELPNPQHSNSTQVQ

SEQ ID NO: 203012 - protein, 365 aa, unidentified
MAASGKALSFAGQQIYVGLDVHYKSWRVNIYSEKLFLKSFSQPPEVEALRVHLESNYPGATFNCVYEAGFSGFWIARRFKELGFNCIIVHPADIPKTGKERTNKTDDVDSKSLALQLRSGTLKANWEPDDELEADRNLLRCRKRCSRDGARVKNRIHALLKINGVSVPDDIVTKHWSRKFVRWLEAIEFRNGSTRCTLDHMLADLKHLRASEASMIKDLRMRGRAERYRETIELLSTIPGISWLSAITLVFEIGDIKRFPRVEDLCSFVGLVPGEHSSGESVRRGSITPRRNTILRQLLVESSWTAASHDPELTRYFNTKCRRMKPSKAIISVAQRLLKRIRSVWLNRKPFVVELNPSTLESDPT

SEQ ID NO: 203013 - protein, 349 aa, unidentified
MNATTVAVDLAKNVFELAVADAEWRIVERHRLNRARFARFFVHRPPCQVVMEACGSAHHWARRILAQGHTVRLLPAHYVKPYVGRSKTDRADAAALIEAARSPRIREVPIKTVEQQQLQSLHRLRSQWMSTRQRYLSTLRGILREFGIMIPLGASVVKAQIGAALAAADSGIPDGLRPALAQMLQEIAPLEEKILSVERQLAALTRADERVQQLREIPGVGLLTSTALLSTVGDIQRFPSGRHFACWLGLTASERSSAQRRRLGKISKQGDVYCRTLLVHGARSALLAARRAQRAGKPLDRLRRWALNCEQQRGHNKATVALANRLARIVWASWKYQRSFDGNWGNQVT

SEQ ID NO: 203014 - protein, 345 aa, unidentified
MMVTLGTDAHKRSHTIVVVDAAGAEIGSFTVAATPEGHLRLVKWAARWPQRRWAIEDCRTLSRRLEADLLKVGELVVRVPPKLMAGARRSARTQGKSDPIDALAVARAALREPDLPVARLDGPSREVRLLVDYRECLVKDRTAAQNRLRWRLHELEPGYDPPAGALNRYQTLNDIDQLLESHTSTVASLAGREVTRVRELTREANQLERDITRLVTQLAPSLLEIPGCGALTAAKIIGEAADITRFKSRDAYPMWAGTAPIPVWSANNTRYRLNRGGNRQTNAVLHRIAITQIRIHPDAQAFITRRLETGSTKQEAIRLLKRRLSNVVYRTLIADTQPTTLTNAA

SEQ ID NO: 203015 - protein, 371 aa, unidentified
MNTIVYVGMDVHKEIFSLACYTFDKDKVEYEQTIKSDYKLVLKYVEQVRKHYPEGTEFICGYEAGCLGYSLYHQLNDHDLECKILAPTTMAITNTNHVKTDRRDAANIARCLAFHTYSEVYVPDDEDNSIKEYMRMRDDQKDMLKKIKQQIIAFVLRSGKKFEGGKSYWTIPHLKWLRTLDLEEVDKETLSEYLVTYDYLVEKIERLDKRIEEFASKEKYQEKVKNMSCLIGIKSHTALSLVVEIGDFKRFEKAQKFSGFLGLVPSENSSGGNTNRYSITKAGNSHLRRLLVEAAQAYTRGAVGYKSKALKQRQQGCAPEVIAYADKANERLRRKFYKMTLTNGINRNVATTAIARELACFIWGMATENIV

SEQ ID NO: 203016 - protein, 414 aa, unidentified
MQPWSKITHYAGFDWAHDHHKVVIVNPSGKIVADFQIEHTAEGWQRWGEQVAVLGPGVAACVETSQGVVVEQLLESGVVVYPVSPTSAKSYCQRKVPSGNKTDHADAWSLADALRVDGHGWKALAKEDPLVAELRLLCRDEVALIQERTALINQLQSALREYYPAALEAFEDWALPSAWAFVEAFPTPQALVSAGKRKWEKFLHTQQLARPQTYQKRMEIFACAAEFVSGQALTRAKSRLALARVRMLRVLKSQIDSYRAEIEKLFAQHPDHDLFGSLPGAGPKIAPRLLGEIGSDRSRFEDPSALQCLAGTAPVSYQSGQVHKVYLRRHCNKLLRHAVHLWANLSRQSCPWAAVYYQQLRTRGKSHACALRCLGQRWLKILWKMWQTGTRYDAELHARNQLKHGSWVLKIQHP

SEQ ID NO: 203017 - protein, 357 aa, unidentified
MTSMTSMRIVVTGGVDTHGQTHHAAVIDQVGRQLGDREFPTTPTGYQALLSWLQGHGTLERVGMEGTGAYGAGLARHLHAEQVDVVEVDRPDRKARRAHGKSDPLDAYAAARAALSGSATGTPKTRNGVVESIRALRVARSSAVKARTQATNQLKALLLSGPAELREQLRHLNTTTLIATCARLRPTTELTDPEQATKTALRRLARRHQQLNEEIAEADGELRTLVAQAAPRLLALPGVGVEVAGQLLTSVGDNPDRLHSESAFAQMCGVAPVPASSGKVHRHRLNRGGDRDANKALYIVVLGRLRTCQRIRTYVERRTQEGLSKPEIIRCLKRYVAREVYLALRPPRAGKDLASTA

SEQ ID NO: 203018 - protein, 353 aa, unidentified
MKKVIMCSADVHEKNISVEIAVHRETSVAKDYPYAMKGRQKLLSDLKTLAEKNQADRIVVVYEASSLGYGFYDDCRTARVECHVLAPTRMAKSAQDRKRKSDRWDAKKMMELLRGHVLAGNELPSVWVPDHQLRDDRELVRTRIDIGEKKSAVKAQVQMLLKRTRAKRPPEFKNWTLAYRAWLKKVELPAGTRTALDSLLRQLHHLEEESDQMDAVIATLSQTPRYLELVEALQKVKGVGVLAAIVYLTEMGDLSRFANRRKVGAYLGLAPACYESGEASDRKGHITRQGPSRLRKILCQAVWSRVRCDEQERMVYERIVSRNPKHKKIAVVACMRRLGILLWHKGLEAKAAA

SEQ ID NO: 203019 - protein, 430 aa, unidentified
MKSNTQNAKIEAITEKTLVLGIDVGSEMHYARAFDYRGIEYSKKPFKFSNTEAGFVTFKEWILDLKERHEKDKVVPGMEPTGHYWFNLGKFLQDNEMKPVLVNPHHVKKSKELDDNNPTKNDRKDPKVIAGLVREGRYMIPYLPDGVYADLRTASNIRFQLQAELTRIQNRISRWFNIYFPEYKTVYGKPDAKSGMLILKQAPLPEDILTLGIEGVNQIWRDAKMRAVGKARAKTLIEAAEHSVGSKEGAVSGKMEIRMLLEDYESRNTRLQEVMVLIEELVRKIPMTEKLLEIKGVGIRTVSGFLAEVGDISRFNNPKELQKLAGLALVENSLGKHKGETTISRRGRKRLIYLLFEVAMSLVSKNQKFRELHNYYTTRRLNPLKKMQSLMAIAAKLIRVFYAILTKGVDYDPKKMVGDIKRPAVYLQAA

SEQ ID NO: 203020 - protein, 406 aa, unidentified
MERFVGLDVHRDFCEVAIVEQGQVRSAGRVATTPEALTLFAQSVGPHAHVVLEATANAVAIARLLRPHVARVVLTAPSAVHDLGAAKTDKIDARSLARLLSSGFAPEVWTPDDETVALRRQLSRRRQLVKQRTREKNQVHAVLIRNLKARPPMSDVFGVKGRAWLAQQELPGHEREMVAACLRHLDFLDGEVAALDRVIAQRVLASEEMLRLLQLPGVSATTAATLMAAIGDISRFPSPRHLVGYLGLNPRVRQSGSQPAKHGRISKHGPGAVRAVLVEAAWVAARSTGPLRAFWQRTAPEAATRVSRSALRSLEAVDAKFIASCMLPIAPSRSRWTMSFEPVSVAVGSPSPRRPPRRRAGRSRRPCRRGTGGLRSASASPTYPPGTGAPCLFPLLKWFPRGLTNS

SEQ ID NO: 203021 - protein, 350 aa, unidentified
MIIIGVDFHPEFQQIASVDTDTGELQEKRLGHREDAETFYRGLAAAGQKVRVGMEASGHARWFERLLGELQFELWIGDAAEIRTKRVRKQKTDRQDAQLILRLLLEDRFPQIWVPNWENRDLRQLLWHRHRMVQARTRIMNQLQAVALNEGLRCKKRLWRNRGRQQLESFRLAPWASRRRRDLLELMDRLNPTITELTQAIEQEVEKCPQAQRLMTHPGVGALTALAFVLIIGNAERFGSGKQIASYLGLVPLEESSGNRRRLGHITKQGSSMLRFLLVEAAQVTVRSVPEWRSKYLHLMMRRGRKTAKVAMARRLAVRLYWMMRQEWDYQQWNKFGSHAGQPGHRAGVQ

SEQ ID NO: 203022 - protein, 496 aa, unidentified
MSKLYGGIDIGLKEFHFHAMDGDGNPIGKPRRFTNNVPGMKQLVDHLELHIHKQGATSVSLGMEATGLYWFPLFQALQQDERIGQWHTQLLAMNPKLVESFRQAYPDVDKSDPVDALIIADRVRFGRGIAPQHIHSEQFLSLQRLTRFYVHLVQQQTDLKNYASSFLYLTFSEWIRCKPFSDRYGTTACRLMKKYKSAEEMAEMTSDELQALLKDFSKNHFRDPKQKAEDVLQMARDSFTIPPGLVDSVHLLIKQTLQQLDLLEKHLDRLTKQIEKAMKGIKNPLVSIPGIGLVSAALIIAEIGDISRFEIESKLAKYAGLTWRTKQSGNFRAEETFMTKTGNVYLRRGLIIAAQSMVNHNDEYNDYYQRKFKEATRHAHKRALSLTARKLVRLVHAMLSTNQLYMTPEERMKRNKEVNNQSTDLASVDNVAGEETPTVDAVCNVGNPASVLNKEHKKVKGTAAATSSTRQRVGTHRIQNPRLTQSARNTLHLTPM

SEQ ID NO: 203023 - protein, 347 aa, unidentified
MQSMYYVGLDVHKKTISYCVKDVSGNIQGEGSLHATRSDLDRWMKTLPQPWTAAMEATVFTGWIYDHLKPHAAALKVAHPLMLRAIAAGKKKNDRIDAGKICDCLRCDFLPECYMAPTAIRERRRTLRYRNLLVRQVVQLKNKIAVLLMEAGVSYNKQKLHKVGYFRELLATNPDINDGLRSLLRLCRGTMAHLAKTESALVRSLERDSLLAERVERLMSIPAVGPVTALTWALEVGDVQRFSSIKKAVSYCGLCGAEKSSGSTIQRMPLSKQRNSHLQWVLMEAAKMAPRYSPELALVYDRERCKGKGNVNRATLAVARKLVAYLVAVDRRGKDFLVIERENQTAA

SEQ ID NO: 203024 - protein, 453 aa, unidentified
MAIRKHNISLKPGKSRQALTITHPNAAGIDIGSASHFVAVPPDRDDEPVREFPSFTADLNALADWLKDCDVDTVAMESTGVYWIPLFELLESRGFTVFLVNARHVKNVSGRKSDVLDCQWLQQLMSYGLLRGAFRPTDEVCVLRALTRQRATLLRSQARQVQHMQKALTQMNIQLANVISDVVGETGQRILRAIVAGERDGNVLAAMKDVRIHASHDEIIKSLQGNWRGEHLFALKQALALFDFIGTQLAECDREIERQLQCLQTHDGEPGKGKKKSTPRNAPKFDLRTQLFKMCGVDLTRIDGINVTTALAVVSEVGADMSRFPSDKHFASWLGLCPGTKITGGKVMSGKTKCSANRAAQALRLAASALRTSQSALGAYFRRLCSRMDKSKAVTAAAHKLARLIYAMLTKGEEYTDQGQDYYEERYRERVLKQLNQRAEKMGMKLVVAEPAI

SEQ ID NO: 203025 - protein, 355 aa, unidentified
MDSVKYIGMDVHKEAISIAVLSSSGKLVMECIVETKAATILQFFQGLRGSLHVTFEEGTWATWLYDLLKPHVTKLVVCNPRRNALLKEGSKSDRIDARKLSELLRSNLLRPVYHGEHGVRALKELARSYLTISKDLGRVMSRLKAIYRSWGIPCAGKQVYAPRYRSEWLGKIAVAGVRRRAEFCYQQFDALRSLRQEVRKELLAEAQKHDVWKLLRQIPFIGPIRAALLIAILQTPHRFRTKRQLWSYIGFGIETHSSADHRCVDGELRRSKKPASIRGLNRNHNHDLKNLFKSAATIAAAKPGPFQEFYDALVAKGIKPEMARLTLARKIAAITLVVWKKGVRFDANHLKPQTA

SEQ ID NO: 203026 - protein, 374 aa, unidentified
MPRHQRYWVGLDAGHLETAVCLVDAEGHVFFEAMTETRAAPIRDILRRFGVEPVQSITIEAGVGTQMVRDLRSFGFPVQVVDVRKSSKFLAIRRHKTDANDARGLAELGRVAQSMGPQVFVKPVEHQDIRIMINIRRTLLKQRARTDALLQSIFRLHGANIKLLNGRGSLAAEVASQLRLLRTGGVTIRVDLDPLVSMGEALRSHISNIDREMRTMATSIPACARFQTIPGVGTITALSFYSAVGDPYRFKNNRDVRPYLGLTPNLYQSGVTARRGRISRYGNKLTRSHLITAATVLLRTIKTESSLRTWGLQLATKIGFLKARVAVARKLAVIMMAMWKTSTTFHPDESRPRLLHPEQAGLDPVRISGSTIPL

SEQ ID NO: 203027 - protein, 311 aa, unidentified
MATYAGIDIAKRGFDLAFEPKDKPYHFDNDAQGIQRCRTLLLERRPALVVMEPTGGYEVALVSELRATGLPVAVINARKIREFARATGQLAKTDRLDAQLIARFAAVLQPPAQEVVDEQTRTMKALVARRHQLVQMHTAENNRLEHARDKAIKRSIRAILDTIERQMNTVERQIRDHMDSQSELKQKTERLKSVPGVGETTASLLVTELPELGRLNRREIAALVGVAPINRDSGTYRGKRRTGGGRRDLRARLFMPTLVAARHNPVIRRFYQRLVEQGKAKMVALIAAMRKLLTILNVMLKKNEDWNPKIA

SEQ ID NO: 203028 - protein, 355 aa, unidentified
MIIIGVDYHPEFQQIALLDQDTGEFQEKRLTHPEEAEQFYRALAAAGQKVRVGMEASGHARWFERLLEKLQLELWIGDAAEIQSKRARKQKTDRQDAQHILKLMLKDDFRQIWRPSWENRDLRQLLWHRHRLVQARTRIMNQLQAVAINEGLRCKKRLWRAGGRQKLETFRLAPWASRRRQDLLELLDRLNPTIAELSQAIEQEAGKSPEARRLMTHPGVGALTALAFVLIIGDAERFECGKQVACYLGLVPLEKSSGNRRRLGHITKQGNSLLRFLLVEAAQVTVRSLPEWRSQYFRLVMRRGRKTAKVAMSRRLAIRLYWMWRQKLDYQQSKSSVRTQDSPDIAMVCSKTPSN

SEQ ID NO: 203029 - protein, 381 aa, unidentified
MKTSTICTPTREHCATIFVAIELSLRGWLVCIHSPDRDRLSQYDLAAGDSDGLLTRIERTRARVTRSLGLKADVVSCYEAGYDGFWLHRVLVAAGVKNHVFDPASIAVERRGRRVKTDRIDNESMIRTLMAYLRGEPRVVRIVRVPSPAQEDARRLMRERERLVKERTAHVNRIKGLLRTQGLAAGQPKRADWLTWLEAQCDHRGRSLGHCLVAELKRQHERLRMICQQVKALEDERASALPEALAAKAAALIRLRGIGPNFAGNLTGEVYWKDFSNRRQVASYVGLAPSPWQSGGLSRDQGISKAGNRRARCTAIQLAWLWLRHQPDSELSQWYRARVGDARGRLRKIMIVALARKLVVALWRYLETGLVPTGAVFTKGK

SEQ ID NO: 203030 - protein, 355 aa, unidentified
MSQTPNTAIAVIGIDIGKNSFHVVGHDARGAIVLRQKWSRGQVEARLANIPPCLIGMEACVGAHHLSRKLASLGHDARLMPAKYVRPYSKGQKNDFNDAEAIAEAVQRPTMKFVATKSAEQLDLQALHRVRERLVSQRTGIINQIRAFMLERGIAVRQGIGFLRTELPTILATRTDALSPRMLRVIEELAGDWRRLDQRVDGLSGEIEALARQDQACSRLMTVPGIGPIISSAMVAAIGTGDVFSKGRDFGAWLGLVPKQISTGDRTILGKISRRGNRYLRVLFVQAAWVVLVRIKNWERYGLKSWIEAAKRRLHHNVLAIALANKLARIAWAVLAKGRAFELTRTDDAGVVQPA

SEQ ID NO: 203031 - protein, 373 aa, unidentified
MPKYSTAFGMDVHLRSTTVCALDADTGEAVTRRFPGNPWGEIAGWMDGFPGPSLAAYESGYLGFAPQRELAGLGVECVVAAVSKIPRSAADSASKNDRNDAARMAKAILAHDISPVWVPSPEVEGIRDLAGAYDGAAARLATAKQRLLAFLAKRGFVYGGTTPAGNPRKYWTYDFLRWLDKVRPEDDGGVRTLAALRNEVEAAAEARADLLSEYRAAVDASPIAAEVAALQSIKGCAFALAAAFSAEVGDFTRFRSGRQVTAYFGLAPSQRSSGDSVRLGGISGAGNALVRKLAVEGSWCYAAARHQPKLMPRDTGVPLEIRMHGRKGSERLLRRREEMLARGVPAAKANAATAAELVRWLWALGMMCREGAE

SEQ ID NO: 203032 - protein, 346 aa, unidentified
MTIVETRAITGGVDTHADVHVAAALDPIGGLLGVQEFPATTAGYACLLGWLGGFGTIALVGIEGTGSYGAGLARHVTAAGVRVVEVDRSDRQDRRRQGKSDPLDAVSAARAAQSGRARGAPKGRDGAVEAIRALMVAKRSAAGERTRTINQARALILTGPDDLRARFAKHAPAALVAAIASLRPRPGDVAGHATRVALRELGRRAVFLDGQLERLNELIFPLVTARAPGLLALFGIGPNTAALLLIAAGDHPERLRSEAAWAHLCAAAPIPASSGKVTRHRLNPGGDRQANHALWRIVFTRMGSDPATRAYVERRTKEGKSKAEIIRCLKRYVARQVYPHLRPAAD

SEQ ID NO: 203033 - protein, 340 aa, unidentified
MQEQLSRQYVGIDLHRRRSVIVRLDDAGKVLGTVRVDNDPVEFALAMAEAGEGPEVALGATYGYYWAADLLKANGANVHLVHPLGLHWDSRRVKNDVKDATELAKRLWRDDLPEAWVAPPEVRELRELVRYRAKLVALRTSAKAQVHAVMAKQGILPALDDMFGPGGQVLLDKMALDQPYRYRVGSLRRLIEVFDDEVDIAESQVHKRLARHRGYRAVQAIHGVGRVSAAIFVAEIGDITRFADARHLCSWAGLTPSHRESDDIAHRGHITKQGSTLVRWAAVEAVARYHGGAPIAPAFRRIQERRGTRIARVAAARKLLALVFYGLRDSEVRCLAKKAA

SEQ ID NO: 203034 - protein, 369 aa, unidentified
MEKRIKYIGLDVHKNSIAIAIADQGQDQEVRFYATIINRMDLFDKFTRKLISDGSELRFVYEAGPCGYQLYRHLTKKGFQCMVTAPSQIPKKSGSRIKNDRRDAIDLARLYRAGELTAVYVPNAEDEAMRDLSRAREDAKFATRKAKQQLGGFLLRNGHIFTGKSNWSKAHFNWIADIKLAHPCQQITLQEYVDAVQTGCERVDRITEQIQKLTKTWRMAPVVKALQAMRGVSTIVATTTVAELGDLGRFDHPQQLMAYLGLVPSEHSSGEKVKRGAITKTGNGHVRRVLVEAAQAYRLPARISRVLLKRQDGLSPQIREIAWKAQLRLCQRYRRLMGRGKPANVVITSIARELIAFMWAIAKQVAPVV

SEQ ID NO: 203035 - protein, 457 aa, unidentified
MNKKSDKKSSQKKSQKGSQSELKIKFTHAAGIDLGSREHWVCVPAEATQSNIRCFGCTTPELLALANWLTECGVTSVAMDSTGVEWIPLFQILSERDFKVFLVNAKSVKTVPGRKSDVKDCQWLQQLHSYGLLAPSVVPEGDIAVLRSYLRQRENLIQSSSTHIQRMQKSLTQMNLQLHKVISDITGVTGLNIIRAIIAGERNPNKLAKLADKRIKSTPQAIRNALTGNYQESMVFILAQELELYEFYLAQIAGLDGQIEKCLDKFPSVTSEAAPASKKKNRRRSTHPPFDLHSHLYRITGVDFTSIDGLDVVTVQTIISEVGLEPSKFKTVKHFTSWLGLCPGCRITGGKVKSSQTRAVVNRASTAFRLAAQAVSRSNSALGAFYRRIRSRAGAPKAITATAHKIARLFYVLWTKKESYHDLGADYYEQQYRARLVKNLKKKAQSLGFELVEASPA

SEQ ID NO: 203036 - protein, 350 aa, unidentified
MKHCGLDVHTKRTTVVWMDDGTGEISRACAMPNDELVAYLQSLPELKQVVMEAGSTSAFLKRQFDTCQIPAIVVDAHKASRVLEAINSQAKTDKVDAKGLAILSARGWAEQIAVWVADPPTQRLRTLTRSRERWSKVSNITRNGIRATIRAEGLLCAATDLTGPTARAWLDDIEARLDPLTRQILQQDRRMLDQIMENIAVIDVLLKEIAADDERCRQLDTIAGCGVVTAAAVVAEIGDITRFRSAKALRRYAGLTPKIEQSGERTVTGKLVRHCNKHLRRALIIIAQSFVKSARVTDTRAKSCYFRCLFRHGPNPAKVDLARRLCDIIFAMLRDRTDFDPGRLAPAKAR

SEQ ID NO: 203037 - protein, 331 aa, unidentified
MEFKETIGIDVGKETIEVYIHVSQCALEFENTPFGYKKLDKWVLKNISCKKENVLIAFEHTGLYSYPLSVYLTESDFKYVVIPGLEIRRSLGMSRGKDDQIDAKRIAAYAYEKRERLTPYQLPSKQIIEIKRLLSLREKLVKHRAGYQATLKENKRFLKRKENRILFEVHEKMINELKKQVQKVERQLDDFIKKDPQIKKMYDLIISIKGVGPQTALFMIVFTNGFSLFEEWRKFACYAGTAPFPNRSGISLKGRTKVSHLANKKMKSLLSSCALSAIQYNPEMKKYYHRRIEEGKNEMSTINIIRNKILSRIFAVVNRGTPYVNTLGYIS

SEQ ID NO: 203038 - protein, 438 aa, unidentified
MAVVYPRCCGLDVHKESVVACVMVSHDQGTSVRKRTFGTFTKDLHRLRLWLHACKVTHVAMESTGVYWKPVWNILEPHFQLVLLNPAWVKAQAGHKTDQKDSERIADLLQQNKVKPSFVPPVWVRQLRDLVRYRLKLQQENSRVRNRIQKLLEDANLKLGVVVSDCFGLTGRSILRDLRQGRTEAAFLAEYARGSLRLHKQELKLALQGYFTDHHRFLLDRLLAHLEFLEAQVSQLESEIRSRLTEHVAVLALLCTIPGVDEITAWTIVAELGADSTPFEDADHLASWAGLCPGNNESAGKRKHSHTCKANPCLRRALTESAWASSHTKESYLNGLFVRLRARLGQKAAIVAVAHQIVRIIYCMLRDQVPYRELGASYFDLLHRERTVKRLTKRLASMGLAVTLQPLPSPPRPDSPTPPSKGRPRKCVPNLYATNTTT

SEQ ID NO: 203039 - protein, 344 aa, unidentified
MSIMHYIGFDIHKKIISFCEKKVDGTVVDQGVICANRARLTEWSEKRTAEWIGAMEATLFTGWIYDFLLPYALELKVAHPEMLKAITAAKKKNDAADAEKIADLLRCDLLPECYMAPEEQRNLRRILRYRNFLVREAAKMKTKTAGLLMEVGAEYNKEKLHGVKYFRELLDRLDYVPESVLSLLLMTRSNMESFAKMQKTLICALLSDPRISNRVALLMSIKGVGEVTALTWVLEIGEVERFSRISQAISYCGLCSAQKESAGKNYRGPISKKRNKHLQTVLIEAAKLAPRWNPRLAEVYEQEYAKGNRNRATLAVARKLVAYMMAVDKKKTPFEPREVLPKAA

SEQ ID NO: 203040 - protein, 490 aa, unidentified
MKTFQRAKKHVKGKRGAKFRQKTKGFRPCDILGVAIDISKTFHRVMIFNFEGEVLRAPFEIDVFAEGYKELLGETNRLAGASAAKKIFWVMEPTGAYYENLARHLNADGHEVLFANPSQVSSNRDQTMLHGLKSDDVDLGAMADLLMRGECYFYNLEEGVYLELKEMTWWREKKLKMQTMLKNQIRARLDKLYPGLTSEYRGNRPLFSDIWANKGARGLMKTGLTPGQILSLRTDSLRKKFREAGYPITAKQAKEMKEYIGSMLLPDDRILAADIELLRRDVKFLEILEAELAEVEAEMVEGVKKTPWSHLLGRLKGVGDILIASYAGAVGDITRFDRGAQIFRKSGLDSKRKQSGEYEARGLPIRRMGSSLLRCILYKIADSAIKSNPYFGLYYEYMTAERKKLSKKAHIAVCNKLTRVTFAMVRDKAEFNPPTVKIDYLNVMFSRTKEERKQRRKERKNRREKASLDSSVLASRHRVPGKADSLHMRG

SEQ ID NO: 203041 - protein, 409 aa, unidentified
MQPILESCCGLDVHKSMIKACIAKGSLDKPPKFEIRTFSTMTSDLLKLKDWLVKNQVEAVAMESTGVYWKPIFNILEDCFDIVLANPQYLKKVPGKKSDVKDSQWIATLLRNGLIPKSFIPPREIRELRDLNRTRRKHIEIMTSEKNRLQKVLEDANIKLGSVVSKIDGKSSMKMIQSLLEKDELSREEISEMARGKLKSKVPQLVEALNGRVTEHHRFLLRFHLDNIAFQLEQIRELDEEIQRRMVLFQKENSLIQTLPGISKTSAAAIIAEIGTNMSQFPDEAHLSSWAGMCPGNNESAGVKKSEKIRKGNGFLKGILTEVAWAASRTKGSAYSAIYNGIAKRRGKKRALIALGHRILCDIYRVLTTGEAYVDEGAEAVFKRNSKAREGSMIRALERSGYTIINVPA

SEQ ID NO: 203042 - protein, 408 aa, unidentified
MHATMIGLDIAKTVFQVYGEDAARRPVLRKRLSRAALTGLFAKLPPTVVGIEACGTAHHWARTLTAMGHTVRLIPAAYVRPFVKRNKTDARDAEAICEAMQRPSMRQVPVKTVEQQAGRGLETARDLLVRQHTQLMNSVRGLLAELGIVAAQGRRGFAVLCTRIEAGDPAIHPVLLPALLPALQTMLGQWHGTGRAITELEARLVARAKADATMRRLMTVPGIGPLSAHAIVAAIGDGRQFSAARDFAAWVGLTPRQHESGNRRHSGRISRQGDQGGAPAADAGRQRGHAPSPGEAATGHRLAAWHPGPPTGQSRGGGTGRQDRPHRLGHAALGPFLSRRRRRRLSRDAGEPNPARSPQAATAQWSGPGSAHSDLSSRQAARRNAWKPIRVTHRGQRSTSDRIDRPDT

SEQ ID NO: 203043 - protein, 349 aa, unidentified
MEHYAGIDVSLELSSVCVVDAKGKIVKEAKISSDPVALLTFFRGLGIAIERIGLEAGPLSQWLHAGLTQAGFEVVLLETRHVKAALSAMTVKTDRKDARGIAQLIRMGWFRPVHCKSVGSQEVRALLVGRKLLLGKLLDVEFSIRGILRGFGLKMGMVTRRNFEARVRELCAGHSMLEQICAAMLVARSALQTEYTKLHKAMLTIVRKDEVCRRLMTTPGVGPLVAITFKTGVDDPSRIGKSKAVGALFGLTPKKYQSGETDLTGGITRVGDEMVRTALYEAANILLSRVTRFSTLKRWGMDVAKRRGAKRAKVALARKIGVILHRMWVDSTNFRWTKEASTAPRLIQA

SEQ ID NO: 203044 - protein, 368 aa, unidentified
MGQKSSKLYVGLDVHKESIDIAIAEEGGEVRHHGQIGGDANALWRAVRKLESSGRKLVFVYEAGPCGFGIYRGLMKRGHVCWVVAPSNTPRRVRDRIKTDRRDSVKLAGLARAGELTPIYVPDVSDEAMRDLVRAREDAVVMQRQARQRLAALLLRNDVRYGGKTTWTAAHRRWIADVRLAQPAQRLAFEEYVQTVEEATGRVERLSSYIAQEVAQWRWLPVVNALQACRGIQVIHAVRIVAELGDLSRFNHPRQLMSYLGLIPSEDSSGERRRQGSITKAGNGSARRALVEAAWAYQYMAKISGLIARRQAKAPKAALDIAWKAQVRLCARFRRLAARGVSRNKIVVAIARELAGFVWAIGQQVKPV

SEQ ID NO: 203045 - protein, 384 aa, unidentified
MNNNSIIFIGLDTHKENTEVGYSLDSRSDPITHHGKIKTTKQGFEKLVRLFQSKYPGATLHFVYEAGPCGYWVYRLLTKIGHCCYIVAPSLIPKKPGNKIKTDKRDALMLTELLKNGAIDPIYVPEPEDEAIRDLSRARERSMKDLNDAKYQLKALLLRNNIRYDGTANWSLKHLRWLTEIILPHPAQQLVLQEAIHTVTERINRLKRLDNELLHHVKTWRYYPIVKAIQAMRGVRLLVATGVIVELGDLSRFDHPRKLMSYVGLTPSENSSGGARRLGSITKCGNSRARRLLVEGAHSYRYSANISTEMQKRQEGVSKEIVDLAWQAQVRLCRRYQRLVQRGKHRNIVVTAIAREMVAFIWSISREVVVSPVNPKHRLARIPA

SEQ ID NO: 203046 - protein, 374 aa, unidentified
MPLHTYNSVITGSCREARPKSLKGEGNDMDIYIGLDVSLASTAICVLGEKGKIATEARVASTPEAVIAFVRALPPGNAVIGLEAGPLSQWLHKGMSEAGFESVLMETRQVKAALSAMPIKTDRRDAEGIARLLQMGWFRPVHCKSVSSQEMRALLSSRRSVLDALMNMELSLRGVLRNFGLKLGTVSKNRYEARVRELIAGNEMLEAAAEPILRARAALRGELAGLEKLVRSLARQDPVCRLLMTMPGVGHVIALTFVSAIDDPERFHRSKDVGPWVGLTPGRNQSGEKDIVGRITKAGDARLRTALYQAATVMLHRAGPNWLKAWALRLAKQRGNKRATVALARRIGVVLHRMWRDGAEFRYTREEAMAVRAA

SEQ ID NO: 203047 - protein, 487 aa, unidentified
MDSAATLGRKDSNSESDLLIKAAELEKEAVFGRLEEPLIVAPYLEARRGNSHVERRPVGDLSGEMSDQFSGGTAMEVVYPRCSGLDVHKRFLVACLSVVEPSGKRHKELRQVSTMTCDILALKEWLKASGCRQIAMESTGVYWKPIFHLLEDSFEIVLVNAQHMKAVPGRKTDVKDAEWIADLLQHGLLKASFIPGSEQQAVRDLTRTRMRLLQERTRLINRIQKVLEDANLKLASVVSDIMGVTGQAILRALVAGEVDPEQLAQLARGSLVRKTDQLQAALQGKLTPHHRMQLEELLQLIATLDRSIARFDREVAERLRQLDALIERIDAVTGLSRRSIEVLFGELGWDMCHFPDAAHAASWVGICPGQRETGGKQLSGRTRQGNRWAKTVLIQAAHAAGHTQTYLGEQYRRISARRGSKKAAMAVGHSILVIFYQMVKTGEPYHEKGADYFTTINKDKIQQRLVRQLERLGNTVILHPQSETTPA

SEQ ID NO: 203048 - protein, 338 aa, unidentified
MRVVFGIDVSKASSEVAILVNGEKVHGYTISNDAIGFARLLGDLRTVHKPEIIFEATGVYSRRLQTFLDDNGYAYTRLNPLEAKKQLDSLRVRKTDQIDAEKLAQSQFVLNRKPTYVQEEVYQNLRDLSRFYQNLTEDIVRAKNRLHKVLQVTFPELENILSTPSGEQYWNLVIAFPCKDCVLELSNDELSKSIRLSTSKRISDKRVAYLAEKLIALANQSYCAVKKTSPILEEVRYYTKELLRLSEQRQAVLDEMVELAQPLPEYDILLSIPGIAETTATSIIGELGDIRRFQSANQINAFIGIDLRHYESGNFLAKEHITKRGNPYARKILFKWQS

SEQ ID NO: 203049 - protein, 325 aa, unidentified
MADNVTGIAVVGGVDTHKDLHVAAVVDQNNKVPGTRSFSTTRQSYRQMLAWMASFGALKRIGVEYTGTDGSGLLCYFQNAGLEVPEVTAPDRMARRKRGKSDTIDAECAAHAAFSGIRTVTPKTRDGMIESLRVLKTCRKTARSARRVALQIIHPNIISAPDELREQLRIMPRMQRIRMLGSWVPDASEYRNVTSVYRITLKSLARRYLELHDEIADLDVMIAALVDELVPELITHNTIRYENASQLLITAGDNTQRLRSESDFAALCGVSPVPVSSGKTNRYRGDRAAKSVLHIIAIGHLRTDDKTKAYVARRVAEGHTKMEAI

SEQ ID NO: 203050 - protein, 372 aa, unidentified
MNYNTVYVGMDVHKESFSLCAYTIEAEKASHYQRTEADYKKVLNYLEFLRTIYGDDANFICGYEAGCFGYTLYHQLTANNVKCIILAPTTMLEQRSKKRIKTDKRDAEIIAKCLAQHNYSPVHIPTAKDEETKEFLRMRDDHKLALKKVKQQILAFCLRHNYRYDGNSHWTAAHLKWLKALTPEALYKEILDEYLLTYQTLSDKLERLDKRIGELATQDEYKEAVKKLCCFIGVKTHTALSVLVEVGDFKRFASAQHFASYLGLVPGEDSSGDDQNRLGITKAGNRHVRLLLTEASQCYARGQVGFKSKELKASQSGNTPAVIAYADKANERLRRRYYKMVLNKCKKHNVAKTAIARELACFMWGMMTDNIA

SEQ ID NO: 203051 - protein, 453 aa, unidentified
MAARNRSLNLKPGRARQVLTLTHPNAAGIDIGSASHYVAVPPDRDDEPVREFKSFTADLHALADWLQACGVDTVAMESTGVYWIPLYELLDRRGFTVLLVNARHVKNVSGRKSDVLDCQWLQQLMTYGLLRGAFRPADAVCALRSLSRQREMLLKSQGRQVQHMQKALTQMNIQLANVISDVVGETGQKILRAIVAGERDGQVLAAMKNVRIRATTEEIAKSLEGNWRAEHLFALKQALAAFDFIGTQLAECDCELAAQLASLQAHAGTPAKGKRRGRARNAPKFDLRAQLFQMCGVDLTRIDGIDVTTALVVVSEVGTDMSRFPTVKHFACWLGLCPGTKITGGKVLSGKTKRCANRAAQALRLAAAALRSSQSALGAYFRRMCARMDKPKAVTAAAHKLARLIYTMLTKGEEYTDQGQDYYEERYRQRVLRQLSQRAEKLGMKLVVSEQPA

SEQ ID NO: 203052 - protein, 402 aa, unidentified
MAAGQLWAGVDVGKEHHWVAVVDSAGTMVLSRKLANDEQQISKLVAEVDRLGAQVSWTVDLTTVYATLLLAVLAEAGKSVRYLSGRSVWQASVIYRGGEAKTDAKDARVIADQSRMRGDDLPVLHPDDDLVTELRMLTAHRADLVADRTRTINRLRQQLVAVCPALERAAQPAQDRGWIVLLARYQRPKAIRQSGITRLTRILADAEVRNAPAIAQAAVTAAKTQTVRLPGEEVAAALVAQLAQGVIALDERIKQIDADIEDRFRRHPLAEVITSLPGIGFRLGAEFLAAVGDPALINSADQLAAWAGLAPVPKDSGKRTGRMHPPQRYSRRLRRVMYMSALTAIRCDPRSRSYYQRKRNEGKRAVPATICLARRRTNVLYALIRDNRTWQPDSPPITTTAA

SEQ ID NO: 203053 - protein, 396 aa, unidentified
MAKLWIGVDIGKTHHHVAAVDGDGRLVYSRRVANDETSLLTVMAEVSTYGRPVCWAVDVTTGLSALLLTLLWRRQVQVRYVSGTVAFHMATAFAGENKTDARDAVVIAQTIRMRPDIPILEPSDRLLAEFTVLTSYRADLVGQRVATLFRLQELLTGISPALERAVDLNRKAPMMVLACWQTPAAIRHAGVDRITALLRRGHVKNAVQVAEAMVTAARQQTVNLPGQRAAAVVVGQMATEILALEQRIAAVDDLIAEQLDQHPLAPIIESLPGMGPLLTAELLVHTAGMTEYDSPAKLAAHAGLAPVSRDSGTVSGNHRQPRRYHRRLRHILWMAAFTAARECPTSRAYYEKKRAEGKNHRQAILALARRRVDVLWALIRDRKTFTRPAPAIRAAA

SEQ ID NO: 203054 - protein, 368 aa, unidentified
MEDDITVFVGLDVHKDSIAVAVADAGREAPRFVGTCGPKTSELLKTLSHVGEAAHTLVAYEAGPTGFALARELAAQGWHCQVIAVSKMPRRPGERIKTDRRDALTLASYLRSGELTPVTVPDARDEAIRDLSRAREDAVRARLKARQQLKAMLLRHGKPYTGKTSWGPSHELFLARVAFEHPAQQIAWAEYRSAVLEASQRVERITQALREQASDWRFGGAVQALMCFKGIDFVAAVTLACELGDLHRFEHPKQLMAYLGLVPSEFSSGQSRSQGSITKTGNAHVRRVLVEAAWCYRYSARMSRPVTERQVGQPRNVCDTAWRAQLRLCARYRRLAARGMHANKICVAVARELAAFLWEAARQVQHPA

SEQ ID NO: 203055 - protein, 391 aa, unidentified
MVCVGIDVAKDKHDCCILDSDGMVRADCFTIPNNMDGFKQLLQTIRNCTKKSDKIKVGLEATGHYSYNILGFLLDNDLAVYVMNPLHTNLYRKSLSLRKTKTDRVDARTIATMLLSDVDLKSYTDTAYHNEELKSLTRYRFDKVRERAKLKQSVSRLVTILFPELEKLVPSLHIASVYALLSEYPGAKQISEIHLTKLTNLLTTASKGRYGKDKAIQIRDAAKTSIGSVMPAKSLELKHTIKLIKELTSEIDEIEDSIQQIMDELHPPILSIPGVGIQSAAMILAEIGDFSNFESPDKILAYAGCSPSTYQSGKLTNCYAHMEKRGSRYLRHALYNATKYVCHWNPVFAEYLAKKRAEGKHYNVALSHAMKKLVRLIYALQKSGKAYLAAA

SEQ ID NO: 203056 - protein, 369 aa, unidentified
MDKVIRAYVGLDVHKESIAVAVGDAAGGVARFVGTISHDVAQLLKVLGRLGQQGDLEVVYEAGPTGYGLQRALVAAGHACQVIAPSLIPRRPGDRVKTDRRDCVRLAELARAGELKPIWVPSPEDESIRDLARAREDAVNARTQVRHQLKGYLLRHGLRYPAKTAWSKGFYRWLGTLSFDGRPAQIAFAEYQQAVQAADERVARLTEALSSSIEGWRFATVVAALQALRGIDAVSAIGLVAEIGDIGRFVHPRQLMGYLGLVPTESSSGERIRKGSITKTGNAHARRLLTEAAWSYRFKPRIGYRAQVRQERLDEPLRQLAWKAQLRLTARFARLQARGLQINKICVAVARELAGFIWAMARASAPARA

SEQ ID NO: 203057 - protein, 350 aa, unidentified
MLIIGCDYHPGFQQIAFLDTETGECGERRLTHPEEAEQFYQELKQRNAAVRVGMESSGHARWFERLLRDLQFELWIGDAAEIRTRRVRKQKTDRQDAQLLLRLMMEDRFPRIWVSDAANRDLRQLLWHRHRLVQMRTRVMNQLHVVALNEGLRRKKALWRPAGRKQLESLVLAPWASRRRQDLLDLLDQLTPKIQDLTRQLEQEVEKRPVTRRLMTHPGVGPLTALAYELVIGTPERFHCGKQIASYLGLVPSEESSGDRRRLGHISKQGNVLLRFLLVEAAQVTVRSHSEWRSTFFHLAMRRGRKIAKVAMARKLAVHLYWMWRQGLDYGQLHKLGSHAGEPGHPHGVQ

SEQ ID NO: 203058 - protein, 409 aa, unidentified
MKLFVGLDVSSQDAKVCFLNGEGDRLESFTITNDLPGAIILKEKILNTASKLTCEVIKIGLESTSIYSYHPAMFLHNDKELRTYGSQVFMINPKQIANFKKSYPEMDKTDAIDAFVIADYVRFGRHTMSIVKEEQYIALQQLTRSRYQLVHALTKEKQHFLQHLGLKCSQFTQDVGSSVFGNAMMELFLERFSLEELAQMPLQDLALFLQEKGKNRFGNPEEIAKSIQKAVRGSYRLSKVVEDSIDLLLSTSIQIMRTYQAQIKEIEKGIESLMSSLPQTLESIPGIGPVFAAGIVAEIGQIERFTDETRIAKYAGLFWKKYQSGRFTAENTSLTRSGNQYLRYYLVEAANSVRRHVPEYRDYYAKKSAEVPKHKHKRALALTARKFVRLVDALLRNNQIYTPGRSVDR

SEQ ID NO: 203059 - protein, 310 aa, unidentified
MSPSVGIDVAKHELAFAFAPDAPVQSVPNDPRGIRKLVRLLLALKPARIIVESTGGYERELLLELARVDLPVSLVNPWRVRRLAESLGILAKTDPLDARLLARFGEVADPPLTVVRQGTQRLRADLIARRRQLVSIVVAEKNRLQLAPREIRAEIEALIAILEKRIARIDTKIDALHEQDPERSDVARILQSVPSVGPGVCRTLLIDLPELGSLSRREIASLVGVAPFARDSGKKRGQRRIRAGRASVRTALYLAAMNGARFNPKLRVVYERLRAAGKPPKLAFIALARILLVTLNAMVRDRTPWEHTHA

SEQ ID NO: 203060 - protein, 344 aa, unidentified
MDHFAGLDVSVKETSVCIVDDTGRIVREVKVASEPEALLQVLANPAAYRFKRIGLEAGPLSQWLFSALAEMGLPVICVETRHMRAVLKAQINKTDRNDARGIAQMMRAGLYRPVHVKTLRSQKLRMLLTHRKLLQSKAIAIENDLRATLRNFGLKVGVVGATKFESRIRELVENLPDLVVLVEPLLIVRRVLHEQLDILHRRLLAVVRNDDVCRRLMTIPGVGPVVALTYRVTVDVPARFKNSKAVGVAFGLTPARYQSGESDRTGGISRCGDEMMRMMLYEAAQTMLVVSTKWSWLKAWAMKIAKNRGMKKAIVALARRLAVIMHRIWVDGTKFRWTKEVAAA

SEQ ID NO: 203061 - protein, 340 aa, unidentified
MTPTRIGLDIAKNVFQVHGVDDKGTVVIRKRLRRPDILQFFASLPPCLIGIEACSASHHWARELIRLGHEVRLMPARYVKPYVHRGKSDALDAAAICEAVSRPTMRFATIKTAEQQAVLTLHRARELLVKQQTMLANLMRGCLGEFGIVAPLGIRRVSELIAVINDDADTRILPEARIAMRAVADQLCDLQTRIKQIEQAIRGWHRSNDASRRLATIPGVGRITASAIVATVANATEFKSARHFAAFFGLTPKQYSTGGRQRLGRISKQGDVYIRRLLILGGTSLVRYARGAGGSVWAKQLLARRPTRIVTVALANKAARVIWALLTRGEVYQAPQPQAA

SEQ ID NO: 203062 - protein, 393 aa, unidentified
MTVSICEHVTDVDSAKIFAAIELSKASWLVALHLPSHDKISVFQVPGGDVDRLLAILERARETAKARSVLPTVEIHTCYEAGYDGFWLHRLLHAHGIHNQVVDSASIQVSRRHRNVKTDHTDAESLLRVLMAWHRGETKACGIVRVPTPEEEDLKRLHRSRETLLHERVRHVNRIRGLMCLQGIRHIDPGRDGWTAALVGLQTREGRPFPVRLMAEIRREGKLLALAQTLLREVGAELEALVRVKSSGRRQHAVRSTVLHPIALQLARLRGIGPTFAAVLSTEVFYRTFSNRRAVASFVGLTPTPYSSGTSSREQGISKAGNAWARHNAVELAWLWLRHQPASGLTRWFHARVGDAKGRVRRIAIVALARKLIVALWRFVDTGLVPDGAIVKG

SEQ ID NO: 203063 - protein, 432 aa, unidentified
MQDVQDEPLFVQRVAGLDIAKAEVEVTIRVPGDTMPGRRQQETRTFGTTRRQLLDLADWLRSWGVTRVGMEATSDYWKPVFFLLESREFDCDLYNAAQVRALPGRPKTDRADSIWLAKITERGMIASSFVPPEPIRRLRTHTRYRRHLTQARTAEKQRVEKLLEDGHLKLSSVISDIHGVSGRDMLDALAAGQRDPHALAAMARGKMRGKIRRLEEALDCSFFTDEHAAVLAMMLVTLDHYTTQILALTGKIEVLIEPYLPQIEQLDAVDGIGMICAQDIIAEIGTDMTVFPTASHLVSWAKWSPQVRQSAGKRKGSNATGRGNPYLGAALGEAAFSAGKTQSFLGARYRKLTRRMPRKKALVATGNSMLTIIHALLSDPAAVYTDLGADYYEQRMHARRQARNHVKSLERLGYKVTIEAIDPATGELTTAS

SEQ ID NO: 203064 - protein, 343 aa, unidentified
MNTTTKTVVGVDTAKEVFQLHWVDVETGEVHKKQIKRTKFLEHFSNLSPCLIGMEACGGSHHWARRLIEMGHEVMLMPGKMVKAFVSGNKNDAADARAVWLAMQKPEMRTVAVKTEAQQSVLAMHRMREQLIKFRTMQTNGLRGLLGEYGEVMKRGRAAMNEGMPAALQRLAERVPGLLIDTLREQWNRVAVLNREIQQIEARLQAWMKQDEACQAIAKIPGVGLLTATAAVATMGDAKVFKSGREFAAWLGLVPAQTGSGGRVKLLGISKRGDTYLRTLLIHGARSALLCTKEPSEWLQEISKRRPPNVVIVALANKMARTIWALLAHGSAYDKQHTSTRPA

SEQ ID NO: 203065 - protein, 346 aa, unidentified
MIIVGCDFHPAWQQVAWVDTESGETAERKLEHSNGEARGFYASLSAAALIGVEATGNCQWFLDLMTELGHQVWVGDAAQIRASYVRKQKTDKRDAAHVLKLLLEDRFPRIWVPNREERDLRQLLLHRHKLVEMRTRVKNELQHLALNHGVRKQRKLWSEAGQELLRSLALQPWAGQRRDDLFQLLAMLQRHIGLLDQAVKEKSQLDKMAQLLKTQPGVGPITSLAFVLTIGDVSRFQNGKQIASYLGLIPREHSSAGKQRLGGISKQGNRMLRMLLVEAAQTAVRSDPEFRKQYLHRCHSKPKAVAKVAAARKLAVRLYWMLRTQTPYPEIVRIESSPRVPLVGAS

SEQ ID NO: 203066 - protein, 363 aa, unidentified
MEVTTIGLDLAKNVFQVHGVDGKGIVLLTKRVPRKKVRTFFANLKPCLIGMEAQGSSNYWARELKGLGHEVRVMSPQFVKPYSKSSKNDRNDAAAICEAVTRPSMRFVSPKTLEQQDVQTLHRVRELLVKDRTAKANQTRGLLAEYGIVLPKGIARLKKEMPRILEDASNGLTPFSRELFLDLFRQLLDVDDRVKEYDRRILKVFNQSPACRRLATVPGVGPLTATAMVASVGSASDFKNGRQLAAWLGLVPRQHSSGDKRRLLGISKRGNRYLRNLLIHGARAVVRYSAGKEDPASRWLNALKDRRGANRATVALANKNARVMWALLKRRRWHNWHKEAFSFPGLLWGSIDGKTGRTGAFRT

SEQ ID NO: 203067 - protein, 370 aa, unidentified
MLDTTTFVGLDVHARSIKAVSLDVMTGEVRAATFGYDAGAVAEWVRSVDPGARCVYESGVTGFDLQKRLSGLGVDCVVGAVSKMIKPSADRRRKNDRNDAEFLARMLSVGNVVEVWVPDDECEAACDLTRALEDARDDLSRSKQRLSKFLLRHGLVFDERTPTGRRKGNWTRAHWSWIESIRFAERADEEVLAYYVDAVRRAAEEKARLEGLVEGEARKPRWRRRVDSLRCLKGVDTASAADLVFEAGEFSRFRNARSFAAWVGLTPSEHSSGESDRRGAITKAGNKHLRKTLVEAAWHYLTCSGRPKDLAKGQAPDRGARRHAAKGVRRLVERREALLARGVHGSKANVATARELACWVWAVGLMAEEA

SEQ ID NO: 203068 - protein, 337 aa, unidentified
MIHVGVDLHQAFCYMTALDSTGRSLKAGPVANEPAALRRWLRGFSEPVAVAVEACSFWPAFKEAVEKEVSEIRLVHPQRVKAIAAAKLKNDRVDSATLAHLLRCDLLPAAWMADRQTRERRQRVRLRISLGQHRAALKNQAHAILHQHGKRCEWSDVFGKKGRAWLKKVQLPPAARGAMDTYCALIDEVGGHIREQERTIGWMAKADARAKWLATIPGIGVYSAMILLSEIGEVQRFSSAKALYSYAGLVPWVRESAGKKSRGGISRCGSPRLRWVMVEAAHTAVRCSPAAKSYFERMRQRKHPHVARVALARKLLGAAYALLRDGVCFNESIFAAV

SEQ ID NO: 203069 - protein, 343 aa, unidentified
MDHFAGLDVSVKETSVCIVDDTGRIVREVKVASEPEALLQVLRNQAYHFKRIGLEAGPLSQWLFGALAEAGLPVICVETRHMRAVLKAQINKTDRNDARGMAQMMRAGLYRPVHVKTLRSQKLRMLLTHRKLLQSKAIAIDNDLRGTLRNFGLKVGMVGTVKFERRIKELVENLPDLAILVEPLLVVRRVLREQLGILHRRLLAIVRDDDVCRRLMTVPGVGPVVALTYRATIDVPARFRRSKSVGAVFGLTPAQHQSGESDRPGGISRCGDEMMRVMLYEAAQIMLIRTNKWSWLKAWAMKIARHRGMKKAIVALARRLAVIMHRIWIDGTEFRWTREVAAA

SEQ ID NO: 203070 - protein, 322 aa, unidentified
MLDTTTFVGLDVHARSIKAVSLDVMTGEVRAATFGYDAGAVAGWVRSVDPRARCVYESGVTGFDLQKRLSGLGVDCVVGAVSKMIKPSADRRRKNDRNDAEFLARMLSVGNVVEVWVPDDECEAARDLTRALEDARDDLSRSKQRLSKFLLRHGLVFDERTPTGRRKGNWTRAHWSWIESIRFAEGADNDVLAYYVDAVRRAAEEKARLEGLVEAEARKPRWRRRVDSLRCLKGVDTATAADLVFEAGEFSRFRNARSFAAWVGLTPSEHSSGESDRRGAITKAGNKHLRKALVEAAWHYLTCSARPKEPARGQAPDRKSVV

SEQ ID NO: 203071 - protein, 312 aa, unidentified
MTKKICGVDVSSEWLDARLGRHGESLRVERSAQGISALAAFCREHGVELAVLEATGGYEQLAFGLLWAQGVPCALANPRSVRRFAEAMGLLEKTDRIDAGVIAWYAEAKHLVGQQPASAAQRQLRALSDRLRQLTELAVMQSNQRRLVEEPAVQAMFDELLATIRRQARALERQIAALIEDDPLWARLAEAFREIKGVAGRTVARLMAEMPEIGTLNGKAVGKLAGLAPLANDSGKRQGWRSIRGGREGVRSILFVVAEIVRRHDPDFAAFHRRLKDAGKKPKVIRVALARKLLVRLNAKARDVRAELAMAA

SEQ ID NO: 203072 - protein, 346 aa, unidentified
MLADQLDYVIGVDPHRDAHALAIVDVRTGGVVFEATAVGDGEGYACVLRLVYQYAPGRRAFAIEGTGSFGAGLTRFLVGHEERVLEVGRLRRERQSGKSDALDAIRAARSVLGQTRPARPRAGGEREALRALTAAREGAVTARRAGLCQLRGLLVSAPEPLRAELRSLTRAQLLRRLAAVRPGRCQDPELRGTLLALRALARRVTALTVEERELAREIETLTRKLAPQLLDQPGVGPLAAAQVLISWSHRGRITSEAAFARLAGCAPIPASSGQTVRYRLDRSGDRRLNRALHMILVTRRRAHAPTIAYINRRIQEGKSRREATRCLKRYLARNLYRLLENAPMAT

SEQ ID NO: 203073 - protein, 422 aa, unidentified
MNTLGNNSFTAFVGIDWADAIHDVCIQGGGDEHREFARISHQVDAIDTWAQSLYRRFGGPIAVALELSKGPVVYALQKYDFVVIFPVNPTTLAKYREAFTPSGAKDDPTDAELALDLILRHPDRFKPLAPQSVEMRTLVSLVAQRRRLVNDRVRITNRLRNTLKQYYPQALKWFDRIDTPLFCDFIERWPTVIQVKRARRTTLATFFNKHNMRFVSVLETRLQSIKTTTPLTLDDAVITPHRLQALVLVDLLRATLVAIKRFDAAIADLAPQHADYALFDGLPGAGPSLAPRLLVAFGEQRERFSNATELQQYAGVAPVTERSGKKHWVHWRWQCPTFLRQTFVEWSAQTINKSFWAGVYYQQQRDKGCSHQAAVRALAFKWIRILYRCWQTRTPYNETVYLKALQRKGSPLLKQADTTVLA

SEQ ID NO: 203074 - protein, 318 aa, unidentified
MPKPIQVGIDVAKDTFDVGLGVGGELRQFTNDTQGHEQLLSCLMAFEVSLIVMEATGGYERALVCALQAAGYEVAVVNPRQARDFAKAMGYLEKTDRIDAGMLSEFAQTLDRHPKRATFVSALLDAERMELAALVARRRQLVDMLTAERDRLAMSHKAARKSITTVIKTLQRQLQDIEANMAAHVNKHHADLAELLDSAKGIGPNTVATLIAELPELGRLSNRQISKLVGVAPLNRDSGVLRGRRTIFGGRAALRRALYMPTLVATRHNPVIRAFYQRLVAAGKAKKLAIVAAMRKLLTILNAMVRTGKRWDESLHSA

SEQ ID NO: 203075 - protein, 413 aa, unidentified
MTVFCGIDWADDHHDIALVDHTGSVLLQRRINDDVEGWALLLDAFAEHGDTVESPIPVAIETSQGLLVSCLRATGRPVFAINPLAAARYRDRHSVARRKSDAGDALVLANILRTDMHAHRPLPTDTDQARAIAVLARAQQDAVWDRVIAHNRLRSLLHEYYPALLLAIASKRGGLMRPEARALLAAAPTPAKAARLTRPQLVAILRRAGRIRLLQAEATRLQQVLRADYLHQPVAVEDAMGVHALALLALLDAACSNADRLAEAASNAFRAHPDAAIITSFPGQGEVTGARILGELGDDRARFADARGLKAYAGSAPITRASGRVRSVTTRRIKNQRLAAAGYVWAFSALTASPGARAHYDRRRRHGDGHVAAQRNLFNRLLGCLHHCLAAGTHYDEAVAFPIPHDQPDSAAA

SEQ ID NO: 203076 - protein, 467 aa, unidentified
MPCFYKHKNMSKNSKKKKRSAAGQSAKKMERFELLNPHSAGVDIGSMLMVVSYTDREGMINVREFDSFTSSLHELAELLQKEGVEKVVMEATGPYWESLYNILEKHGMEMFLVNPSHYRNVSAQKTDINDAQWLHQLLAHGLIRNSHIAPELYRELRQYLHEREIYQDYKSDSLNRMQKTLTLMNVKFQHLISDVEGVSGMKLLRAIGSGISDPQILLSDIDVAKLKASPEELFSSLQGDYKPHYIHILSNTLKSYDFFKEQMLAYEIHIEQALQELLACNGEHKTTIPKKTRKVRKNQYSFNLKNYLLGIFGVDLTEVEGLDEIGLLTILAVTGTNMKKWPTAEHFASWLNLSPRPKISGGKVIGYETRNSNNPATQAFRLAAHCLWQSKGPMGQQYKRLAATKGSKKAIKAIARRLAVIFYHMVLNKQAFDATRVQPDIEQQKARKIARLQKEAAKFGLTIQKAA

SEQ ID NO: 203077 - protein, 483 aa, unidentified
MHGEVLMEQEEAGQPRRLVGVDLGIASRHSVRVLEADGRVVCRSSCVPTVESLTLMEQAALAGAPAGTRLAVVFEPTGPAWLPIAVFFARRGHEVYRVSSAKAADLRRFLRRHAKSNGIDAETLARIPLADPGGLQPLELPGPDLAALDRRVRACARLTQAAAEHKTRIKDLVRQLMPVTPLTGDIGQADLAVLEHYGDPRTLLAADLGDLTQLIASVSHHQQGQDRARQWHHAAAAAIELYQDHPAVPFAELAAEVATEVRLLRAIQTELATHATAREQHYLQADPGQLARSLPGFAEISGPTLTAAMGRPGRFRDGTRFKSYVGLAPKASETGETDRKGQAMSKAGPSLLRATFFRAADTARRQDPQLARIYYLQMTERGATHTKVCCVVAGHLAERAWAVLNRGTPYVICDNHSNPVTPAEAKKIIAERWTVPEEVRKRRRSRKTAGKAPQPALTRPGTRGDPPRPRSSRSRTTAVKPAT

SEQ ID NO: 203078 - protein, 319 aa, unidentified
MAQNDLVVAGIDVAKSKVDACIRRLTLRQTFPNTAQGHRKLVAWLRKNQVGKAVMEASGGYEREWRNVLHNAGIEVRIVDPRRVRSFALSAGRLAKNDPIDAEMIAWFAETLSQAPGQIPDAAREELAALAKARKALVDIKIRLQAQDEHAAPEPARKAYARALKSLAAEIDKLEVVIAAKIKATPEFAERAEIIESVPGLAQATSAILIAGMPELGQVSDEVAAALIGVAPYDDDSGKRRGERYIKGGRRWVRNGIYMPCLGAATQCNPVLKAFYQRLLAKGKEPKVALVACMRKLIIILNTMLARRQKWNPGRHAMA

SEQ ID NO: 203079 - protein, 456 aa, unidentified
MQHYYLGIDVSKGYADFVILNDKKRPIEENFQLDDTFEGHCCLYERLLRFFDDHPDSTMYAALESTGGYEDNWFRALIKFQGTLNLKTARLNPLGVHANSKADLKRNVTDKISAQNVAEYMIAHPEKISYQQEDHLASLRKQWGFIKMLTKQSTQLLNQLESLIYTANPELLVYCRDGVPEWLLKLLIHYPTASSLSKAKIVKVARIPYISADRAKELVGNAKKSVASATDKVTGKLIVATVKQILHLKQVIKVQTGLMAQECSVPEVDLLKSFTGIKDFSAIGLMLEIQTMERFLSAKKLASFFGLHPVYKVSGDGIGGFRMSKRGRKEPRQILFMVALSAIQSNPLIRGIYLEHIQKGMEKMAAIGLCMHKILRIIYGMLKHNSVFDPEIDRRNREKMVHRNNRVSKDKNRRYQAFDSRAPISRRQHSKREERKQSHSDNNTNNGIIAPAPLST

SEQ ID NO: 203080 - protein, 408 aa, unidentified
MDLTPMHKRVIALDVHQAKITACAVVEHDDGRVEVTKRDFGAFKRDRRALAQWSLEIKPEVVVMESTGVYWKSPFAALEAVGIIAWVVNARHVKAVPGRKTDMADAQWLATLARAGLLRASFIPPVEFRQLRLVARQRQKLVGICSAEKNRLHKVLVDAGIRINVLVADIHGQSARAMVKALIAGQPMHEVLDRRGRLRASREELCEALSTEQFSTVHRFVAEEIVQHIEQIEQRIARMDQYLLDGLRAWQPQLNLLQTIPGIDIQGAAMLLVEIGADRAVFGSAERLASWVGICPGNNESAGKRKSGRIRRGNAWVRRLLCEFAQAAARTRCALKAKFDSLAIRKGHKKSVVALAHKMLRTIYAMLASGTYYQDRSVDYEALSVARNAPRWIKMLRKHGFMADSAAA

SEQ ID NO: 203081 - protein, 390 aa, unidentified
MDADGTRLASRRLPEGLAGIRGFHELVAAHADAPAQVVIGIETDRGLWVEALNAAGYQVYAVNPLAVARYRDRHQVSGAKSDAGDAKLLADLVRTDRHNHRLLAGDTAAVEAIKVLARAHQNLIWARTRHTNTLRSALREYYPAALEAFDNLADRDALAILGRAPTPADAARLSLSKIRSALKTAGRQRNLDAQALEIQTALRTEQLAAPAAITAAFGATTRAAVGIIAELNHQIADLEAELATHFETHPDAGIYLSLPGLGVILGARVLGEFGDDPNRYTTAKSRKNYAGTSPLTIASGKKRAVLARHVRNRRLYNAIDQWAFCALQSSPGARAFYDQHRAAGDLHHQALRALGNRLVGILHGCLRHHTTYSEHTAWAHRQTSPTTRAA

SEQ ID NO: 203082 - protein, 355 aa, unidentified
MASIPKVSRELPMQDVATVGLDIAKQVFQAHGADASGETLFNTKIKRENVLEFFSKLKPCLIGMESCATSYYWARQLLEFGHDVRLIHTRYVKPFVKRGKTDANDAEAINVALTQKTMRFVPVKTLNQQAAITIFRTRSLFVSQRTQLVNALRGHLAEAGLVAAKGIQNYSKLLKLMESAADTVLPTVMKQALTDICDQIHRLNDLVTKLDKEIERRVQHDENACRLLTIPGVGPKTAMCVIATIPDIHRFPSGRHFSSWLGLTPRTHSSGGRSVLRRITKMGNSELRTMLYLGGTVIMMRDKKTPIGRWAARLRAGRPYKVVVIAVANRIARIIWALLTKGGVYDPTYGREASA

SEQ ID NO: 203083 - protein, 341 aa, unidentified
MQISTIGLDIAKNVFQVHGIDAAEKVIVRKRLRRNKVIAFFEAVPPCLVGMEACAWAHYWARELRKLGHAVRLMPAKDVKAYIKRNKNDAIDAQASCEAVGRPTMRFVAVKLAEQQGQLMQHRTRDLLMRQRTQVINALRAHLAELGIVAAQGREGLKDLLAIIADEKDERLAVDARASLIVLAAQLQAVQTLIGSIEKRIIAQHRANEASKRLQSIPGIGIIGASAIVSTVTDPTAFRSGRDLAAWIGLVPRQDSTGGKQKLGPISKQGDRYLRRILVVGAHSVLRRAKHNPEKYPWLTQLLARRPFKVVAIALANKMARIAWALLARGGTYRVPALAAA

SEQ ID NO: 203084 - protein, 406 aa, unidentified
MNVVHERCCGLDVHKATVVACRLTPGRKEVRTFPTTTRGLLVLADWLAEAAITDVAMESTGVYWKPIFNVLELTDLEVMVVNAHHIKAVPGRKTDVKDAEWIADLLKHGLLKPSFIPDRGHREMRELVRYRKTLTQQRNNLVNRVQKLLEGANVKLGDVVTDVMGKSGRAMLKAMLDGRTDSAELANLARGSLRGKRAQLEEALEGSMGGHQRYLLGHQLDLIEFFDHQIEELSVEIEERMRPFESAIEQIMRLPGIGRRSAEQILAEIGVDMSRFPTHRHISSWAKICPGNNESAGKSRSGWTGKGNPWLRAALVEAAWGAARSHKSYFAVQYNRLKIRRGTKRAAVAVAHSLLIVIYHLLRDGTIFEDLGAAFLDERQQQSVVRHSVKRLERLGYRVTLTPAAA

SEQ ID NO: 203085 - protein, 348 aa, unidentified
MERYIGLDAHATSCTFAVLSERGRRLDSAVVETNGRALVKFLRGVPGNKHVCLEEGTQSAWLYEVLRGHVRELVVTHAHERNRGPKDDQRDAFHLANSLRLGAVSPVYKDAGQMGELRAHADVYAKLVTDVVRAQNRLKALFRSRGVQVVGGAVYTQRDRQAYLDELARPYRGSALILYSELDALRAIKKEAEKQLIAQSHRHSISAVLQTCPGMGPIRVAETIPIIVSPYRFRTARQLWAYSGLAIVMRSSSDWVKTPHGWERAQTVRTRGLNRNYNRRLKNIFKGAATTVITQRLEPMVGDYQRGLDQGTKPPMAKLTLARKISATVLAMWKNKEAYHPERYRPTP

SEQ ID NO: 203086 - protein, 365 aa, unidentified
MQKISTMRTSGKSIFEGQLTIGLDLGDRSSAYCVLNETGEIVLEHKLATTPEAMKQVFASMPQCRIAMETGTHSPWVSRLLTALGHDVIVGHAQKVRLITKSRRKDDRLDARTLARLARIDPELLSPVKHRSAQAQLHLTEIRARAVLVSARTALVNSVRGLVKSYGERLRKCGTQQFRRETTSGLSTGLREALEPLLREVESLNERIQEYDRRIAKMAKQTYPETALLKQVKGVGDLIATAYVLTIEDPHRFRKSRDAGCFVGLQPGRRNSGESEPQMRISKEGDEYLRTLLVQGAHYILGPFGKDSDLRRWGQKLAARGGKNAKKRAVVAVARKLAVLLHRLWVSGEVYEPLRNSQKAMSAAA

SEQ ID NO: 203087 - protein, 374 aa, unidentified
MGKNTRYLGLDVHAETITAAIAEGRQKVRSLGQLPNRPEAVRKLIEKLGGGKGLQVCYEAGPTGYALYWQLTKMGVQCEVVAPSLIPKKSGDRIKTDRRDAEKLAQCYQAGTLTSVWVPDAAHEALRDLVRARGAAKDDESRAKHRLVKYLLHYGIRHPNDCRAWTHPWWRWLQGLKFEYQAQQDTMAEHIAEVLHQGERISRLDCAIERAIESAPAEKKAVIEALQALRGVAKLTAITIVTELGTFQRFRKATELMGYTGLVPSEYSSGGKESKGRITRTGNAHLRHVLGEAAWHARHKPWLSNRIKAVVATVPAEVARIAWKAQERLHRKFTKMLFEKKPSGKVATAVARELVGFIWAIGYKVETDALAKAA

SEQ ID NO: 203088 - protein, 390 aa, unidentified
MRLYNTQHPFYCGIDLHARAMYVCILNQAGETLLHRNMKTTPEAFLKAIAPYRPDIVVAVECLFTWYWLADLCADEEIPFVLGHALSMKAIHGGKAKNDKIDSQKIAVLLRGGLLPQAYVYPAEMRATRDLLRRRMHLAHKRGELLAHVQNTNSQYNLPALGKNIAYKANRDGVAERFADPAVQKSIEVALSLVSYYDELLRDVALTIVKTAKQHDANTLYRLQTVPGIGKILSLVLLYEIHHIDRFPRVQEFASYCRLVKCAKESNGKRSGTSGAKIGNAHLTWAFSEAAVLFLRENPAGQKFLARLEKKHDKGKALTILAHKLARAVYYMFKRKVAFDMKRFLNDEGRGVGERDVSLDNHGMNLILATLSNASMTASLNAYERLGHYP

SEQ ID NO: 203089 - protein, 481 aa, unidentified
MKIKSIYPARNSSQLREVLGKYSPGELLYAPIDVAKYNHKACAVNFFGDILTPAFEFSNNAHGVKFFISKITEATRNAKAKKIFIGLEATGHYHQNLTLHLRSLGYEVAVINPFDSWKERLNKSSKTDKIDLGSIAKSLISRKFSSSTVPEGVYYNLQRATRTRRKFVNRRTSSKNIITGLLDNLFPGLWDKEDTIFSDRWGKASLSVLEHYPTPQMVLRLGEKRLTRFLKKGTTKLGEKTARKIISAAKVALTRSPYEQTMDILALRSHLQAYRLYEEIIFHLEKEIAYLLVQTPGTYLLSVPGISVTYAAEVTAEIGDISRFAYANQIISLAGTCSKKDQTGEHDPQNLPISKKGNKFLRTVLNQAGLSLNTWCPDFNAYYSRKVEEKKGRCGIVRTATGNKFARLAFALMKHESLYHPRSFNTLVQDPGNYYLSVYGEILKKLRAFSSEKILPQSNYLEKIKQKLEKEYAINLSEVKG

SEQ ID NO: 203090 - protein, 386 aa, unidentified
MPKPNDLSRSFTAFEQDSTLVAIIEMSLTSWLVGGIVPGIERHPLKKLDVDEEALLQLLHRWRDEAINAGRKITRIVLAFEAGRDGFWLARWLRARNIEAYVIHPNSVAVSREHRRAKTDRLDTELLKRVFLGWLRGESDHCSMAAIPTLGEEDARRPNRERENLLGERTRIVNRVKACLVRFGVRNFKPTLRKAPERLEALRTPEGGPLPPNSFAELRRDMVRLRFVMGQIKEIEETRLQRLENTPNEGSHAMVRLLARVIGVGIETADMLVHEILSRNLRDQRAVARYAGLTGSPDESGKRRREKGLARAGNARVRRGMIQLAWRFLMFQKESALAQWYRSVTNEARGAIRKTMIVALARKLLIALWRMVRTGEIPQGVALRTA

SEQ ID NO: 203091 - protein, 458 aa, unidentified
MAQDAPTGYRAVHRRVPISERPAAASGDHRVSSHCANSEETTLSVTETVGGLEPPRPPGGVDRASADHAVSIVAPDGEQTSRFLVTHHASGLRTLVKRLVKAGVVEVGIERPDGPIVDALRAAGLVVFVIPPGQLKNLRSRYGSAGNTDDRFDAYVLADVVRTDRRRLRPPLVDQPATTALRPLTRARKALLAHRIAVADQLRAHLQICFPGAVGLFADIDSQISPRFLQRFGTQERADRLSIKRWTAWLTSVGHRGRTPAQTLHERLTGAPRGATGPAGDTAAAVTAAFVATLRAINAQIDALAARIAEQLALHPDAPIFTSLPRAGTLRAARLLTEIGDTRGRFPTADSLACLAGVAPSTRQSGKIRALGFRWGADKQLRDALCDFAGDSVKANPWAADLYRRARDRGHDHPHAVRVPARARTNIIWACWTTPTPYDPSRHHALQRVLNQDQSAAA

SEQ ID NO: 203092 - protein, 343 aa, unidentified
MSNDTRIAVDVAKAVFEIAISDREGRVSRRERPKRHQFLPFLAQQPPATVVMEACGSAHYWAREIQKLGHQVVLLPPHHVRPYIRRNKTDRTDAKGILEASRNDDIRPVPVKTVNQQVLTSLHRLRAGWMLERTARLNTLRGLLRELGVFIPVGSREVVPAVWAVIEDADSNLPDALRTIFAEACREIREIEARVRLAEQQLASIAEQLPAVEHLQTIPGVGLLTSTALVGFIGDIQRFPSGRHFASYLGLTPREYSSGLKRNLGRISKRGDGYLRTLLIHGARSVLVHARKQQPDRLREWANQLAKIHVHNKAAVAVANKLARIVWAVWKHEKPFALMTRAA

SEQ ID NO: 203093 - protein, 412 aa, unidentified
MIVGIDVGSETHYARAFSWRNYEYSKKPFAFRNDEDGFASFKAWMDDIAEKHEMEKVIPGMEPTGHYWLNLGAYLQGQGMRPVHVNPHHVKKSKELDDNNPNKNDRKDPKTIAGLVNEGRFSYPYIPTGIYAEIRNLSNLRIQTQEEITRIKNRIARWFSIYFPEIKDVYRNPDAVSGLMVIKQAPLPCDIKGLGVDGVNKIWRDARLKGAGLKRAKTLVTAAEHSIGNTEAPRSARKEIRNLLNDYEIYKSRMDELMEEIEELLSEIPYIDKLMGICGIGIKTVSCFIAEVGDIERFDNPKQVQKLAGYAIVADSSGKHNGESRISHRGRKRLRYALYEAEISVIGKNKEFKEIHHYYRTREKNPLKKMQSVIAVACKLIRIFYTILTKGIDYDGQKMLRDIVRPGMQSAA

SEQ ID NO: 203094 - protein, 364 aa, unidentified
MDKITRVGVDLAKRVYQVHAVDSAGQRVLARPMSPPRFLEWVAALAPGCVVAMESCSGAHHLARRLRLLGLDARLIAGQFVAAYRMQGASGKNDANDAAAICEAADRPHMRFVPVKTPDQQGWLGVHRLREGYKEERTACINRIRGLLAEFGLVFPQSPEALRGVLSEVIEDASNELPGVLRLGLQRAQAHWRELDEQIDWCDARVKQHARENPAARRAAQLCGVGDLTASAIVAAVGDMRQFKSARQFGAWLGLVPSQNSSGGKNRLGRITKRGDDYLRTLLIQGAKSALLSAAKRDDRISRWLLQLRERVGWQKALVAMANKNARILWAVLSRELDYDPEHVPLQPQCKQPVPRAPQEALPA

SEQ ID NO: 203095 - protein, 422 aa, unidentified
MLTTTHDNEEIIERVAALDIGKAELMCCVRVPDGDHAGRRLQEVQACPAMTRAVLGLADHLGRLGVTRVVMEATADYWKPVFYLLEAAGLETWLVNAKDVKHLPGRPKTDKLDAVWLCKVAERQMLRPSFVPPPPIRQLRDLTRYRADLVAARTAEKQRVEKLLEDACIKLSAVVADIFGVSGRDMPAALVAGERDPKVLAQLARRSMRAKIAVLEEAFTGHFTTHHAFLLRTMPGRVDAISADIAALDDRIAAQAAPLAGAVARLDEIPGISLASAHVILAEIGTDMTRFPTAAHLASWARLAPGISESAGKKKGKGSTGHGNAYLASVLGNAAAGAAKTDTFLGEKYRRIARRRGSKRAIVALGRSILVIAWHLLSDPEGRFYDLGPGYHAARIDPERRKRTHIRELEALGYTVTRKPAA

SEQ ID NO: 203096 - protein, 387 aa, unidentified
MIYVGIDIAKLNHFASAISSDGEVLLEPFKFTNDNGGFQKLISSLDSFDKNSLIIGLESTAHYGNNLVEFLVSKHFKVCVINPIQTSTMRKNNIRKTKTDKVDTFIIAKTLMLQPHRFYTVQDIDLMHLKNLGRFRQKIVKQRTRLKIQLTSYMDQVFPEFQYFFKSGLHQKACYCLLKEAPTPDAIVSMHMTHLVHLLVSASHGHFKKEQAKELRVLAQNSVGSSDRSLSIQITQSIQQIELLDSQLNQVESEMKDIILSFDSVIMTIPGIGYINGGMILGEIGDITRFSDPSKLLAFSGLDPSVYQSGNFSASHTRMSKRGSRILRYALINAAHNVVKNNRTFKNYYDAKKSEGRSHYNALGHCAGKLVRIIYKMLTNELEFNLD

SEQ ID NO: 203097 - protein, 344 aa, unidentified
MEHYAGLDVSLELTSVCIVDERGGIVSEAKVASEPEALIGFLRTRELPIARVGLEAGPLSQWLHAGLIAAGFETVLLETRHVKAALSAMTVKTDRRDARGIAQLLRLGWYRPVHAKSASAQEVRSLLTARKLMQAKLLDVESGIRGVLRGFGLKVGPISRGRFEARILELVDGHAILETASDAMLGARAALETEFKRLHRELLAIVRADPVCSRLMSVPGVGAIVAITFKSGVDDPTRFKRSRDVGPHFGLTPRKYQSGELDVTGSITKVGDRMVRTALYEAASVMLTRTVRFSSLKAWAMAVARRRGTKKAKVALARKLGVILHRMWVDGADFRWSNETTAMA

SEQ ID NO: 203098 - protein, 478 aa, unidentified
MEQKYRRCCGIDVHKKSVTVCVLAPSGKPETETKKRNFRTFTRDLKQLRAWLKSCKVTAIAMESTGQYWRPVWNILEGHFEKLLLVNPQHIKGLNGYKTDPKDAQWIAGLLDSDKLRGSWVPPREIRELRDLTRQRVHVLEDQNRVKNRIEQLCQSGNIKVSSVATDLFGVSGRKMLAAIVEGKHDAGWIADYARSSLRSKKRELELALEGSFSEDQRWLLDKELRHLEWLEMQIEVLERQIERRVAPFEEPMRRLMTIPGIDRKTAWTIVAEVGVDMKVYGDARHLASWAGLCPGNRESGGKRMSGRTRKANRYVRRAMCQAAWAATHTKDTYLSAFYRRMKVRKGAPKAVMALAHHLITVVYNVLARGEEYVELGGDYYDRRDKPKTVSRLVARLTRLGYYVNLKPVEPEASQQQESPEEALPVSSAIPPPAPSPEQRASSPQRKGRPCKCAARGIICKHDRTVYVNPMNLEGLHQ

SEQ ID NO: 203099 - protein, 343 aa, unidentified
MEHYAGIDVSLERSSVCVVDATGKIVREAKVASEPEALVVLLRQLGLPLARVGLEAGPLSQWLHAGLAEAGFEAVLLETRHVKAALSAMVVKTDRKDARGIAQLLRMGWYRPVHRKSLSAQEVRALLVGRKLLQAKLRDVELSIRGILRGFGLEVGEVSRGRFAARAEELAAGHEMLGTVIGAMLQARDGLRAEFVRLHRRMLAIVRDDAVCRRLMTAPGVGALVAVTFKTAVDDPGRFRTAKAVGAHFGLTPKRYQSGETDVTGGISKVGDAMVRTALYEAANAMLTRTSRVSALKRWAMEVAKRRGAKRAKVALARRLAGVLHRMWANAADFRRGEEEAAA

SEQ ID NO: 203100 - protein, 364 aa, unidentified
MIYLGLDVHHKSTTIVVVDEQGEVLESTKAPTTMQGLGQALKKWFERQQGAPCAMESGAKAYLVSSIIAELGGAPKVFAADEVHQKTRSQKKKTDERDAYDLAQNLRSGALRREVKLPPLAMQRLRKVLSVRQSFIKQRTQAVNGAKALLRECGADYGDGVLCTRRGWERLLAMPLAELDHQLLLAYQQAYAAAEEQVQQLTKQAEELGEQAPQFAVLESIPGIGPLNRLAAAAWLFDVSRFPSGKYLAAYVGVVPAMYNSGQRERHGHITREGPGLLRALLVEAAQQACRRSNPLYPFYARLSARCGHKKAVVALANKLCRIFYALLTNQRAFDLERLGVEYKPTATTKVRLYRLQRRPARAA

SEQ ID NO: 203101 - protein, 408 aa, unidentified
MTDQQRIVYGGVDTHKDFHVAAAVDEVGRILGTETFPATASGYRRLERWLERHGQIAKVGIEGTGCYGLGLTRFLTSDGIEVIEVNRPNRQLRRRRGKNDTVDAEAAARAVLNGEATSIPKAADGIVEAIRALRMVFRSTRNHRTRIANQIRDLLVTAPDQLREVLEPLDTDDRVARAARFRCTGDQADPNEATKIALRTLARQHEALTVDLDALRARLDELTAQANPALRHAVGIGPDVASILLVAAGDNPERLTTNAGFAALCGASPVEASSGKHVSHRLNKGGNRDANHALWRIVMVRMTCHQPTKDYVARRRAEGKSQRFIIRCLKRYVAREVHQLLLHPQLATTGRDLRQARRRLGHTQAHIAEILGCDPSRISELENDRRCAHELNARYRTWIDSQTATCAA

SEQ ID NO: 203102 - protein, 337 aa, unidentified
MEHIAIDVGGRESQICVRRGDGTIVEERRCATGALKSYLGRRAKGRVILETCAEGFAIADAALGHGHEVRVVPATLVRSLGVGRRGVKTDRLDAQVLSEVSCRIDLPSVHVPSPEARQRKSMCGMREILVGSRTRLVNSVRGWLRTQGKRPRTGAVRTFPRRVRAVYAHEPATVVPNFVERQLVTIEQLTAQIIAAGAEVAELARTDATCRRLMSVPGVGPVTAVRFVAALDQVDRFPNAHAVESYLGLVPGEHSSSDHRRRTTITKAGSPQLRWTLVQAALCARRRRKDDPMVAWSYQVELRRGRHIATIALARKLAGILYALWRDGSTYDPKHHA

SEQ ID NO: 203103 - protein, 434 aa, unidentified
MEEAGDEPLFCERAAGIDIGKAVVSVTIRVPSGTRAGGRQQETREFGTTRRQLLELADWLRCRQVERAGMEATSDYWKPVFFLLEREGFDCLLYQASQVKALPGRPKTDRLDSVWLAKVTERGSLAGSFVPPEEIRRLRTHTRYRRKLVQARTAEKQRCEKLPEDAHLKLSSVISDIHGVSGRAMLAALIAGERNPAVLAEMARGTMRRKIARLAEALDCSFFTGEHAFILQMMLGNIDHYSAQIAVPDEKIAVLCESYERQIAQLDSIPGFGVTAAQDLIAEIGVDMSVFPTGGHLCSRARVAPRARESGGKRKGKTATGQGNPYIGGTLGETASAAGRTQTFLGAKLRRLRKHMPKKKATGAIMRTQLVIAHALLSDPAAEYRDLGPGYYEQQADVRRQARNHVRGLERLGYKVTIEPLDPQTGELITRTAS

SEQ ID NO: 203104 - protein, 404 aa, unidentified
MLFLGIDWSDASLDYYFQNHDQQKLAQGSVKPDVAGLADLFSSVEAHARPGEIGVAIETCHGAWIQAFLDRGYQVYPVNPNMADHFRKTLSANGEKTDEIDARVLSLYLLMFLGKMRPLRPDDPEVVSLRIACEDRVRLVQERTDKLNELGAILKCHYPAFLGLFGDLNSGIALDFLREFPTQGQMQSLTEKKLRHWLQKAGYSCPNRIPEMVEHLKTPALRVEDHLQKAKAPLITYLAVSIETLNREIKSLDDDIDQKMQKLPEAEWAKSLPGAGPVLAPALLACVGRDAKRFASVSEARALMGTAPVTKQSGKTRMVHFRFGCWKFARRTLHLFADESRRFSRWASEFYKSHRASGHGHHATLRALAYKWLKIILAMQRTGKSYDERIFINSRQKHLVKSAL

SEQ ID NO: 203105 - protein, 350 aa, unidentified
MNKVTTLGIDLAKTVFQIHGVDLTGKVVWRREVRRAQLMKIVAQLEPCLIGIEACGGANYWARRFAEFGHQVKMMSPQFVKPYRKSDKNDRNDAEAICEAVTRPSMRFVAVKSVEQQDMLTMHRVREGLMKERVALINRIRGSLSEYGIVIAKDVSNLRRELPGILEDAENELTAAARQLFSELYADLGAREQRIRQLEHSIRALGSQHDVVRRLQTVPGIGYLSATALYGTVGDAKHYRNGRQLAAWMGLVPRQSSSGGKQRLLGITKRGDKYLRKLLVHGARSITTRAERTPRPPDRWLNELRERRGKPRSYVAQANKTARIAWAIMAKGEVYRTPTAALEAGAAVAA

SEQ ID NO: 203106 - protein, 426 aa, unidentified
MEVIHQRCAGIDVSKKDAKVCIRVQGSGRRKTASTVSTWGAMTADILALREHLIEQKVTGVVIESTSVYWKPFYYLLEDVLDVVLVNATAARNVPGRKTDVSDAAWLADLGAHGLLRASFVPPEPIRILRDLTRARTTIAQARVKEIQRLEKLLEDAGIKLSSVATDIVGVSGRAMLEALVAGQTDAAAVADLARRGLRAKIPALTEALRGRFSDHHAFMVRLYLDRIDTHNADITRLTERLEEAMAPFRATRELLISIPGFSTTVAEVFIAETGADMSVFPTAGHLASWAGVTPGCNESAGRVKSSRTRHGNAHLKAALGTAALSACRNADTYYGARYRRLAGRRRPAGTKNGRCQSAAGSIAIVALEHKMLTDAWNMLVDGTFYHDPGADYYTRRHPTKTKNNAVKQLEGLGYHVTLTPHTEIA

SEQ ID NO: 203107 - protein, 316 aa, unidentified
MEIAPIFIGIDVSKARLDVAMRPSAEKLSVSNDEAGIQALVKRLSELKPVLIVLEATGGLERSVSGTLGSAQLPVVVVNPRQVRDFAKATGQLAKTDRIDAEVMARFAEVIRPPLRPLPDEVSLELRALIARRRQLIEMMVAEKNRLSAASKAVRKRIAAHIRWLETELDRADKDLDHSIRQSPIWQEHEDLLRSAPGIGPVVSRTLLAELPELGRLNRKQIAALVGIAPLNCDSGTFRGRRGIWGGRATVRAVLYMAALVASRRNSVIRDFYKRLRDKGKAPKVALVACMRKLLIILNAMIKHKTRWSEIIPQTS

SEQ ID NO: 203108 - protein, 416 aa, unidentified
MSLALPEALFFTGIDWATETHSVCVADAGGKITTEFTIEHSADGIATLIRRLARYGAPGDMPVAIERPNGRLVDLLLEAGHPVVPVSPNAIKTWRDGEVLSGAKSDAGDAAVIAEYLRLRQHRLKTAAPYSDETLALRTVVRSRGDLVEMRVAATNQLSALLEAHWPGAKAVFADVESPISLEFLTRYPTPASACRLGEKRMAAFLVKHGYSGRRTAAELLARLRAAPAGTGREALAEALRDAVLAAVGVLTALNASVKSPGRSAAAHLGEHPDGKIFTSLPRSGQVNAAQVLAEWGDCRQAYDGPDSVAALAGCTPVTSQSGKHRSVHFRWACNKRFRVAMTTFADNSRHASPWAAKTYSDARASGKDHPHAIRILARAWIRVIWPCWLNGIPYDPARHGAAAALAEQPAKQIAA

SEQ ID NO: 203109 - protein, 351 aa, unidentified
MIIIGVDYHPSFQTIAFLMEETGEYVEQELNHSDGEAERFYRKLKEKGVSVRVGMEATGHARWFERLLAELGFELWIGDPAEIKAKRVRKKKTDREDARLMLKLLLENRFPQIWVPSPENRDLRQLLWHRHRLVQMRTRIMNQLQAVAMNEGYRWKKKLFSEKGRALLEKLSLAPWASRRRKELLELLDQLDPKIAELTAAVEQEAKKRPEVVQLMTHPGVGPITGLAYVLVIGTPGRFPCGKQIGSYTGLIPCEDSSAGKQRLGHISKQGNTLLRFLLVEASQAAARCNPDWRRRYAHLIMRREKRIAKVAMARKLAVRLYWMWRNNWQYSQLVEFGSNAGKLGTVHGVK

SEQ ID NO: 203110 - protein, 348 aa, unidentified
MAMTIVESTRSVTGGVDTHVDVHVAAAVDANGGVLGVESFATTRVGYVQLYGWLAGFGSVDRVGVEGTGAYGAGLARHLRGRGLVVIEVDRPNRQERRRNGKSDELDAIEAARAALSGRASGVAKTADGDVEAIRVLLVARRSGRDVRIKYLNQIRHIGFTAPDELRERLRGVPAEHLARTAALLRPTRPGGSVMYATKFAVRTLGRRVLDLEAEAQHLDRLIDELVRRTAPSLLDVYGVGTHTAAILLVAAGDNPHRLKSEAAFAHLCGVAPLPASSGKVTRHRLNPGGNRQANHALWRIVFTRMSSDERTRKYVARRAAEGLSTREVMRVLKRYVARELYPHLVHA

SEQ ID NO: 203111 - protein, 246 aa, unidentified
MAKDTIGIDVSKDRLDAFWHSRTEACCLPNTPEGFGQLCDWLGKEEDVLIVFEATGAYHRGLERHLSLAGLPFIKVNPKQARPFAQAIGRLAKTDSVDARMLARMGAVLELKPQVVEGDDVHDLRELLTARRALVKDQVTAKTRLATARNPLVREKLGRRIEDIGADIQALDEVIAQIARQRGTLEERIRRLMTIPGIGRLTATTMLIDMPELGHLEGKKITALAGLAPMTQQSGLPLQKWRASVR

SEQ ID NO: 203112 - protein, 340 aa, unidentified
MPLYGAFDLHAKTNHLGIIDGSGKRVLMKKLPNEALVILEALKSMKRRIVGLVVESTYNWYWLVDLLMEAGYKVHLANPSAIQKYSGLKHADDVHDAFWLAEQLRLGVLPVGYIYPKEERPIRDLLRKRGHLVRLRTSLIISLQNIITRNVGLQVDVNDVKRLREDRITPLLGMNEDLALAGRASKETIDFLTRQIKHIEKVVEDRVQLKEPYRYLLTLPGVGKILGLTIMLETGTIGRFPGVGDYASYCRKVTSKWTSDGKAKGKGNKKNGNRYLAWAFSEAAECARRYDEQARAYYNRKARKSNFMVAHSALAHKLARAAYYVMRDQVPFIPEKLFAL

SEQ ID NO: 203113 - protein, 367 aa, unidentified
MSSVASQAGLIHLGMDTSKNTIVVATLLPGEDSPVTDRIANEEAAIRRLVGRFADRSVLRAWYEAGPGGYELWRLLASMGVACQVVAPSLIPKGGSDKVKTDKRDSRRLARLGRAGELTPVRVPSPAEEAVRDLARARDAMLADRKRAQQRLTAVLMRHGRIWRGATYWTAAHRAWIAAQRYGEPALAAAIGYYRATLAVREAELAALEAELMPWAAREPLAGPVARLGCYRGIAELGALTLAAEVAGWRRFPAARAFMSYTGLVPAGYSSGERTRRGHITKAGSEPVRTALTEAAWSCRHAPAIGAGLRRRQAGAAPDTLARSWTAQRRLHDRYVHLVHHGGKAAPEAAVAVARELAGFVWAEMTA

SEQ ID NO: 203114 - protein, 371 aa, unidentified
MNHVTSIGLDVHARSVTAVALDSITGEVRSQKFGYSPAEIAGWILRLDSPKAVYESGVTGFHLVRELREMGVDCIVGAVSKMHKPASDRRKKNDRNDAEFLARQLMAHNIVEVFVPDVETEGARNLSRALEDVRDDLTRAKHRLTHLLIRWGYAWNEFNEDGKRRGSWTHAHWEWIRGIELPDAAARESLDYYISEVRHIESQKKAIEKRVAQCASRPRWRDRVEALRCMKGIETVTAFALTVEAGVFSRFDSARAFASWLGLVPSEHSSGERASRGGITKAGNSHLRKLLVEASWHYARATKERKRSLCDESVPASISNHAAVGVKRLVERRRHLSCELRKRPVVANVATARELACWIWALGRMSEGALA

SEQ ID NO: 203115 - protein, 340 aa, unidentified
MEIDILGIDLAKRVFQLHGADRRGQALHRSKVTRAGLLQAVRTLHPRVIAMEACGSAHHWARCFQEMGMEVRLISPQYVVPFVKTNKNDRNDAEAIAEAAGRPTMRFVTVKSVEQQDMQAVHRVRELLVTQRTALINQARGLLAERGVTIAQSPEAFKRAMPQILGQCEGEVTSICQAMLMELVQQVQVLEERIKHAEGWIKSFMKQSALCKKISAIAGVGPITATAMVAAVGDAKEFKNGRHLSAWLGLVPRQCSSGGKSRLKGISKRGDTYLRTLLIHGARSVLRYAVAKTDPRSRWLQELINRRGYNRAAVALANKNARVIQVLLSSEDSYHPATTS

SEQ ID NO: 203116 - protein, 365 aa, unidentified
MENHSIVWVGMDTDTKKNQIAVYRGWETAAEEFEAGMDRQGIKRLVQRLKREVGEVRCVYEAGPCGYQLYRKLREAGIHCDVIAPSLTPRRPGDRIKTNRRDARNLGRLYRAGELTVIAVPNQQQEAVRDLTRAREDVREDLTRRQHRLNRFLHRYGYHYSEGERWTKKYWLWIRQIRFEDTNLQVILEESIRAVEQSLEQLKTYDAKIEENAHKPEFATKVARYQSLRGVQTVTAMTLATEVWDMRGYPTAPQFMKSTGLVPSENSTGEHERRGRITKAGNAHLRRVLVEAAWHYRHRPIAGPAIKKRRRQQPAAVVSIAERADQRLNRKFRRLVDRYNKKPSIAAVAVARELAGFIWAIGQED

SEQ ID NO: 203117 - protein, 334 aa, unidentified
MGLDQHRAQITAEWIDTDTGEVSRSRISPAHRAGVRKFAERFRGQELEVALEATTGWRFVAEELRRVGAVVHLAEPAETAARRGNKKRAKSDRADARHVRELLMIGRLPESWIAPDHLLDLRSRVRLRHTLSHQRGEWQQRIQAVLYHHGCPQRRNLMTAEGLQWLKAQPLPAGAREQVTVALGMIDALDAQLAPLDKELRAYARRQLGCKALMEHFGVGELTAVTILAELGDVDRFSSSREAVRYAGLDITVHQSDQRRSPGHLSRQGPPALRWALFEAAQSAARQGSPDRDYFAQAAERLGANRACLSVARKLLKRSYHTLRELGEEALQPA

SEQ ID NO: 203118 - protein, 410 aa, unidentified
MQTLVERGCGLDVHQATVVACLLIVSKNGKVRKQVRTFGTTTRELEGLREWLLSEGCTHVAMESTGVYWKPIYVILEGAFEIVVANAQHVKKVPGRKTDVKDAEWIADLLCHGLLRASFVPPKPIRELRDLTRYRRKLVESRSAERNRLLKLLESANIKLASVASDVFGVSGLLMLQALVAGQATPQEMAELAKKQMRKKIPALELALEGKVEEHHRFLLSVQLRRLRTVEEDLDILEQRIQEKLEPYAVQFALLQEIPGIDGKLAAAIIAELGVDMNVFGSVPQLASWAGICPGNNESGGKRKSSRIPKGNVYLKTALVEAANAAAKAKGTFLRDKFYRLKARRGYKRAAVAVAHKILVAIYHMLSHQACYNELGDLYLDNLNKHHLTRNLIRRLERLGYTVTLEQKAA

SEQ ID NO: 203119 - protein, 398 aa, unidentified
MTESSDYESVQVFIGVDVGKDTHHAVAINRSGKRLFDKALPNDENKLRSLISDLKQHGQILLVVDQPATIGALPVAVARSEGVLVGYLPGLAMRRIADLHAGEAKTDARDAAIIAEAARTLPHALRTLKLADEQIAELSMLCGFDDDLAAQTTQARNRIRGLLTQIHPALERVLGPRLDHPAVLYLLQRYPSPEKLASLGEKKLAAQLCKLAPRLGKRLAADIAQALAEQTVVVPGTNAAAVVLPRLALQLITLRKQRDEVALAVEQRVLAHPLYPVLTSMPGVGVRTAARLLTEVACRAFASVAHLAAYAGLAPVTRRSGSSIRGEHPSRRGNKALKRALFLSAFAALRDPLSRAYYTRKMSQGKRHNQALIALARRRCDVLFAMMRDGTFYTPQAS

SEQ ID NO: 203120 - protein, 311 aa, unidentified
MDHFVGIDDVAKATLDIASLPDGESWTVTNDEPGLAELAPRLLALAPALIVLEATGGFEFLAAITLAKAGLPITVVNPRQARDFAKAMGRLAKTDALDASLLADFARRVRPEIRALPDEASQLLESLLTRRRQIIEMLTAEKNRLGFARGSVKRDLSQHIRWLEKRLADVDGDLQDAVATSPFYQAKADLLRSVPGVGQVTTLTLLASLPELGHLSRHQIAALVGVAPLNRDSGAIRGKRMVWGGRAPVRAVLYMATLVGLKHNPVLRVFYERLRAAGKPFKVAATACMRKLLTILNAMLKHNRPWNPEHA

SEQ ID NO: 203121 - protein, 400 aa, unidentified
MISIDGVGVFLGLDVGKQTHHGHGLTPAGKKVFDKQLPNSEPKLRAVFDKLTAKFGTVLVVVDQPASIGALPLTVARDAGCQVAYLPGLAMRRIADLYPGEAKTDAKDAVVIADAARTMPHTLRTLDLADEVTAELAMLAGFDQDLAGEANRTSNRIRGLLTQFHPSLERVLGPRLDHPAVTWLLERYGSPQALRKAGRRKLVEVVRPRAPRMAERLVDDIFTALDEQTVVVPGTSTLDVIVPSLAKSLASVHEQRRALETRIEALLEAHPLSQVLTSMPGIGVRTAAVLLATVGDGSSFPTAAHLASYAGLAPATRQSGTSIHGEHAPRGGNRQLKRAMFLSAFAALHDPASRTYYDRCRARGKTHTQALLRLARHRISVLFAMLRDGTFYQPRSPRLA

SEQ ID NO: 203122 - protein, 340 aa, unidentified
MKRLSSLTGLNLNSIEAIGLDVAKEKIDICLFSSQQSLFYRIANNSQAIYQFSTDLTKNGLLKTVPFVLESTWIYHLQCALQLADDWWDVKEINPIITHQQIGYTIRWTKTDTTDSLLLAELWVTKWKKLHSFKRNRKIIELRKKVSLLAWVEKTMQAIKAQYDSYIKSARILWINTNDVDFIRKSLDDLNKCKKELEKSIISESVDEGWTRRIEIIDSITWISPLIAKICYTTFASNDFESKKQMLAYVWLDPKLRQSWTKSWSYKMSKRWNAFTRKKLFQAAFCWIQHSKQYNYIYNREIEKWKHHFEAVLTVVKKMIYTIRSLIKKNEMFDPNYCAM

SEQ ID NO: 203123 - protein, 458 aa, unidentified
MEVMVAAEFDSEADSDSESASASATESPSPSKSDARPPPRARRAVISDATREHCSASKRDRMVGPALTHERGLRCQLQSKSGAEPQREAGPMENVRFVGLDVHKDTIAIAVAESVGGPARVQATVAHDFPSLMKQLRRIGSAASLSVCYEAGPTGFGLCRFLRESGINCVVIAPSLVPKKAGDRIKTDRRDAAKLAHFLRSGDLTPVHVPDESTEAMRDLERARDDAKNAERACRQQLGKFLLRHGRRYDGKTHWTTRHLDWVRTLRFDHEAQTRVLTDHLHAVESATERVLRLTQDITKLVESWSLKPLVTALQALRGVRLITAVVVAAEIADFGRFDSAPAFMAYLGLVPSEHSSGDGRRQGRITRTGNKSVRRLLTESAWSSRFRPARNRELKARQVGVAPEILAISWKAQHRLHHRYTRLLARGKAKQKVIIAVARELAGFIWCVGRQSKLLVA

SEQ ID NO: 203124 - protein, 406 aa, unidentified
MNLNAVGIDVSKRKSTVSVLRPGGDVLMKPFDISHRTADFQTLADKLKALDGETRVVMECTGHYYEPVARELSQAGLFVSAVNPQIINKFQGQGNPLRKVKTDKADSVKIARYTLDNWANLKQYTLMDELRSQLRNMNRQFDFYMKHKTAMKNNLIALIDQTYPGANTYFNSLAREDGSQKWVDFLDTYWHVDCVRKMSLQAFTEHYQKWCSRKKYSFRKSKAEEIYGIAKELVPVLPKDNFTKCIIKQAVAQVNAASQTVEQLRSLMNETASKLPEYPVVMAMKGVGPSLGPQLMAEIGDVTRFTHKGAVTAFAGVDPGVNASGDYSQKSVHASKHGSPMLRKTLFQIMDVLIKTKPDDAVYLFMDKKRAEGKPYYVYMTAGANKFLRVYYGRVKEYLSALQESY

SEQ ID NO: 203125 - protein, 344 aa, unidentified
MTKNDIAVLGIDLGKNSCSLAAFDNTGALLTRKRMTRDAVVTFAAGLPACTIAMEACCGAHYLGRTLEAQGHTVKLMSPEYVQPYVKGQKTDDRDAEAIAEAATRPTMRFVTIKSEEQLDLQVLHRARQRMVGARTALINQLRAVLLERGIVLPKGRASLKLRLGELIEDELAISDRARRLIEDLSSEWSSLDQRITAYDDELAALTRENVMARRLATIPGIGVINATALVAAVGDASAFGKARDLAAWLGLTPRQHSTGGKTKMLGISKRGNKYLRTQLIHGARAALPHLAAKPNRLGEWLQSMLARSHPNVVVVALAAKLARIAWAVLRHEEKFDHQAATVA

SEQ ID NO: 203126 - protein, 455 aa, unidentified
MYLPDWKWIPIRKGLSLMSNKVIFNLDELFISVGIDVGADFSWMSIALPNQQFVGKPYKILHNSIDSLTTAVSKIKEAEELYSLESRIFLESTGIYHYPLFCYLRDKGFNCSVINPIITKNSTNINIRKVHNDRFDSKKAALVGLKPDLKVSLMPSDLALNCRNLCREYYDLMDNRSAYVNKLQGELRMAFPQYLGIFSKVTINTSLTLLETYTSPSAFLKADKQEIIDIIKSTARFGLTYAQNKYNAIIQAATDANQFGYIIDSNIKRIRLYISFIRKYDEEINGILESLHELVDANEDSDFVKQIHLIETFKGAGFLSAVSIMGEIGDFSAFSKPKQLFAYFGLDPSVKQSGKFEGTKVQMSKRGSAIARRVIHTLTLQSISISRNREAKNPVLREYYLKKCDSKPKLVAMGAVSHKVCNMIFAILRDNKPFKIIAPQEHIKQYNSAKCDIAA

SEQ ID NO: 203127 - protein, 310 aa, unidentified
MKQTIVYIGIDVAKAHLDVAWQNRFRRFDNDKAGRVTLVKWIKQEQLALCSWICEASGGYEQDLLDALAEADLAVSLVQATRVRQYARAAGILAKTDKVDARVLARFGAAMRPEPTSPRSAAQKLLRELESQRRHLSDLLVAEQNRLEQLHDEKLRGLARALMGTIKKQIARIDARITTLIMQDQELCQKAQKLTSVKGVGERTAALLLAQMPELGTLNRREAAALAGLAPFNRDSGTMRGKRTIFAGRRAVRRGLYMAALVASRRNPILSNFYRRLRTKDKPHKVALTAVMRKLLLALNQALTPTQSFA

SEQ ID NO: 203128 - protein, 414 aa, unidentified
MEVLNPKCAGLDVHKDTVVACARIAIGGNKATQDVKSFATTTSALFELSAWLEQHGCTHVVMEATGVYWKPVWHVLEGSFELVLANAQHVRNVPGRKSDVNDAMWLADLLAHGLVQGSFVPPTPIQEVRDLTRTRKQLAREIIQHQNRIEKILEDANVKIASAISDTLGRSGRAILDALVAGETDPAKLVALCSDRLKASRKSLIEALRGRVTDHHRFLLKLHLTQVDQLRQGIRDLEARMGSALELFRQHLDNLTTIPGVGDVAAHVIAGEVGLDMTRFATASHLISWAGLCPRLDESAGKHRSRRIRKGAPWLKTTLVSAAWAAVKTKGTYLQAQFQRLRARRGAKKAIIAVAASMLTAAYHILRDSVPYKDLGPDHFTRRNKEHAAKRLKKRLEDLGFSVEVRPATAGVSI

SEQ ID NO: 203129 - protein, 458 aa, unidentified
MGHARARKIPARVVEDEEYQLRHERCAAIDVAKASGVVCTRLPPAREGGRRISKIEDVAATVTAILALAARLLADGVEMVAMESTSDYWRVWYYVLEDAGLNVQLVNSSQARQLAGRPKTDRADAQWLARLTEMGLLRPSFVPPAAIRALRDYARTRLHLVQERTREWQRLEKLLEGALVKISSVVSSLATVSARAMIEALIAGERDPRRLADLAMARLRGKRDQLAAALEGMMFGEHHAELARIHLDLIDFLDRRVRQLDDAIAACLEAIPESWGVDAGGATGPGRGTGPGAPVLAAAQRLAEIPGVSPELARAIIAETGLDMTRFPTAAHLVSWAGLAPVARQSGPRARKPAKGQGNSYLRGHCTQAAAGAARTGTFLGERHQRIARHRGGGRARVAVARSILIIIWHLLKTPEARFTDLGPDWHARKTDRDKKIKGHIRQLEALGLDVAVTPRAA

SEQ ID NO: 203130 - protein, 343 aa, unidentified
MGEVSTIGLDIAKSVFQIHGVDAGGAVVIRKRITRAKLLEFFAALPSCLVGVEACPTAHYWSRRLGALGHTVRLLPPSYVKAYLKRSKNDANDAAAICEAVTRPSMRFVATKSEQQQSGLMLHRSRQLLVCQRTMLSNAIRGHMAELGIISAKGRNGTAELLKIIADEQDDRIPAAARFSLAILARQYAVVRAQIVAIEKRIHAWHRSSEESRRLEEIPGVGPIIATALVAEVGDWKVFSSGRSLAAWIGLVPRQHSTGGKERLGRISKQGNRHLRWLLVAGAMAVIRYARQHGTKRPWLARLMDRRPIKVAAVALANKIARMAWAMMVRGERFKEPKLLPAA

SEQ ID NO: 203131 - protein, 521 aa, unidentified
MAVAPKTKRRTSLPTLTPRKGGLGSRVEAVGPERFGIVAVDCAKNSSRWRLADFYGRCLIPPSTLAHRAVDFDAAVNAIKKASQEQNLGDLIVVVERTGRYHLVVKRAFEKAGFEVRVIDPLATHQFRKPVHAGNKTDDTDLEAIHDAAAHGLGLVPVVWSPVFLELQDWARHRRDLVEKTTRVRCQFREHLHAVMPGYAELFDNIFNVEIGLFVALNHTAATLRVARPDQLAAAAREAGVRCLRSTLETILAWARNAPEPDDRPALHQAVLADLIADLRAKQAQIARAELALARLLSGTPYLVLLSTTGLNVVTVAEFAAEAGPITAYTHARAITGRAGLYPSRYQSGPVDRSDGPLVPKGNRRLRQAILRIADTLMRCNDHFSLLARSLQLRDMPGPKVHIAIGNRFVRIAYRMVAGGQVYRHPSGLHRDYIVQKLIKFYSQHNVNINDTLSALQVAVEHLPADSRPDEARSLTEDQARIAGKHGAGAKRLGAILPPVLARLTTHGLESTPSGELSQPV

SEQ ID NO: 203132 - protein, 442 aa, unidentified
MDTSRIVTAFAELTHFAGFDWASEKHDVVVVDRQGGVVLALEFGDTAEGWSTLRSKLVALAAPQQEVGRIGVAIETSCGPAVERLLEMGLAVYPINPKAAERFRERKAPSGIKDDQLDAWSMGDALRTDGQDWRRLLPDDPATQELRILCRDEISLIEERTALVLRFQATLHEYYPAVLEAFDDTTLPAAWEFMARFPTPAALARKGQRAWEKFLHSHRLGHPETYAKRMAIFARAGEFASPSSAVTNAKSFLAVSIVRQLQALQEQLDAYRARIEEAFAKHPDRDTFDSLPGAGPKLAPRLLGELGANREVFGCAQDLQCYAGTAPVTKKSGKHRLVKIRRACNLTLRATVHYWANLSRQSCAWAEAYYQKKREQGHSHAQALRCLGQRWLKILWKMWQDHASYDEARHSLDQTRHGSWVIDLLPQAQPSAHTPVPVPACG

SEQ ID NO: 203133 - protein, 335 aa, unidentified
MTNVKNFVGIDVSKNYFDAAIVKNVGKQEFIHERFDCNPAGFKLFAKWMKEQIIGEQWATVICMEHTGIYNWPIVKFLEDKKYVLCIEMAMQIKLSLGIQRGKNDKLDAKRIAEYACVQQSKLKQWLPSGKLIEKLQHLMAARDRMVRAIKVIEVPLNEFNAIGNTEMFNLLNKTQKPVLVKMRKALCDLKNKIKKTINEDKKIKIIFKQITSVKGIGDVIGAYLIVYTKGFTTMADKKKLGSYAGVVPFDHTSGKTVRKRSRTDKMTNAVLRRNLCMGAKSAMQWDAELKAYAQRKMSEGKTYAWCITAVSNKLLARVVSCVKNQKEYVEKKAA

SEQ ID NO: 203134 - protein, 482 aa, unidentified
MKRQSIYPDRSQELLALFEGAGNQSKLMCVPIDYAKKDHLVMFCNGNGEVLRKPFSVNNSADGVKYLLGQVTRSCRHRHIQPEHVFFGGEDVNSYAENFANTLRAKGWLVANVNAHDAKKQRENLQASTDRLDLMGIASMLLNRRANCFPAQTGVYRNLRTLVRHRKKLVKMKTEVRNRIHSIVDRLFPGFLNEKKSGIVPFSNSSLYLMEARFSAPQIRRRKRPTLIRNLEKRGTKKADQVAAKLQQYSAQVLTTPDEYSATLQVSLASHVTHYRCLFDGAQQLVKEMAQLLAQTQGAFLTSIKGVGIVLAAGVSAEIGDPLAQRSADKIASYAGVVPKVKQTGGSQGSSITGHVSKRSNHLLKDFVVQSAFHIGHYGPKDLKEDYSRREAAGQHADFGIARRFVRMAMCLMRTSQIYLPPDLRRSDIDSELRSDYYLSMWPYLRDKWSKAGAITTAFAKDKPLGQWRYIVQEVYGIKLKM

SEQ ID NO: 203135 - protein, 351 aa, unidentified
MNTQITALPKLYIGIDIHKRSWKIHCSTDLFSGKSISMEPEPEVLRKYVANHFSEHQVSTAYEAGCCGYYAHRCFESYGWQSLVVNPADIHRKGKEKHTKTDRIDAQLISRELKDGRLESIHVPSVEREELRSLFRRRNDLVKDFRRVKSYIKMQLLYFGIKEPVRFDNDHWSHNYRKWLEDTTFVHSTAKATLDSRLRFFRFVDKELRDVSSQIRGYCRKHHKSDYYLLRSIPGIGGIVACGIISELGDLRRFNSVKHLAGYVGLAPGVHQSGGNYKTMGITMRAHRLIRSYFVEAAWQAIRADPAIQAYYRKHQGKNVKSVIIKVARKLLSRTLAVIKTEIPYTIGVVE

SEQ ID NO: 203136 - protein, 377 aa, unidentified
MSATAFVNNNAVSGVLYMAMELSLNKWCIAFGKGVKMRQVILESNDKLGLCAEIQKAKEKFGLPQDAKVVSCYEAGRDGFWIHRWLESCGIENIVIDSSSIKVDRKSRRAKTDRLDASRMLRQLVLHIRGEEKLQVARVPSEKEEDRRRIHRERERLVKERTGHTNRIKSLLNLFGIKFKNRGYKSWDTYLNNVKDWKDEPLPEDQKSELLREAKRLEMVESQIKELETLRLERIESSDEEVYKKVRQLKQLKGIGDIGSWVFIMEWFGWRKFNNRREVGAAAGLVGTPYDSGESQREQGITKAGNYRIRALATELAWAWLRYQPNSELSRWFIERFNQGKRSRRVGIIALARRLLIALWRYLETGQLPVGAELKAV

SEQ ID NO: 203137 - protein, 338 aa, unidentified
MKLYGAIDLHSNNNVTVVTDEQDHVVYEKRLPNDLALIAQQLAAYRDSLQGIVVESTYNWYWLVDGLMDHGHKIHLANTAAIQQYEGLKYSDDQYDARWLAHLLRLGILPQGYIYPKEHRPVRDLLRKRSQMVRQRTMNLLSIQNLFSRNTGGSMNANRVKRLDSKEVEELVANPDLVLAIKANRAMLQCADEQINILEKSVLDRVKLQPEFGLLTTTPGIGHILALTIMLETGDVGRFATVGDYASYSRCVGSKKITNGKKKGQGNTKNGNKYLAWAYVEAANFAVRYSAKIKSFYQRKKAKTNGIVAIKAVAHKLCRACYYIMKDQVAFDVSKAFA

SEQ ID NO: 203138 - protein, 357 aa, unidentified
MTKGITETTGITIGLDVSDRFTEAYAIDANGEFVASWRMPTKAAALREQLSLYPGARVVLEVGCHSPWISRQLRGDGFEVVVANPRRVRLIAESDSKCDRFDAEQLARLGRIDPGLLAPIVHRGEQAQRDRVLLLTRDGLVRSRTLLINQARGFAKSLGARLPSSSSEGFAKRVREGVGENLFPGLDAILRMVEQLTQEIRSIDRQVERLCQDRYPVTELLRQPSGVGPLTALAFVLTLEDPNRFAKSRDVGPYLGLRPRRRDSGDRRPQLRITKAGDRLMRRLLVSAAHYILGPFGPDTDLRRFGLRVAERGGKAAKKRATVAVARKLAVLLHRLWVTGEAYQALGYDRGEDEQAA

SEQ ID NO: 203139 - protein, 341 aa, unidentified
MRIVGGLDVHRRQITFDYLDEDTGQQRRGRIAPADRMLLRRWLKTTLEGAPAAFAVEACTGWRFVVEELQRAGIEAHLAEPADTAAARGPKRRAKTDRTDARHLRELLAGGRLPESWIPPEQVLEMRAKLELFKDLREEHTAWMQRIHAILLHQGAPAIAGDLLGADNRRRLESGEQLSEAGRQAVATALGILDALDAELVPLRKQIAAFARRQPGCKALQAQYGVGEITAAALWAELGDTRRFSSSRKTVRHTGLDITVYSSDGKRTPGKLSRQGSPLLRWALFEAAKCAARPGAPDHAYYRQVADRLGGNRAALSVARKIARRAHHTLRALGDEALAAV

SEQ ID NO: 203140 - protein, 344 aa, unidentified
MKVTTVGIDLAKNLFQLHGVNEYGKVVFKKQLRRDQMAEFFVNLPACLIGMEACSSAHHWARKLQQFGHTVKLMAPQFVKPYVKTNKNDAADAEAICEAVTRPNMRFVPIKNVEQQAVLALHCVRQGFVKARTAQANQIRGLLGEFGLIVPQGIGHIAGRVPELIEDASNDLPGSFRLLIQRMLDHLKELGRQVDELEMQIVKWHRQSDASSKLAKVPGIGPITASALVASIGDAKSFDNGRQVAAWLGLVPKQHSSGGKQNLLGISKRGDTYLRTMLIHGARAVIYWAEKKPDTCSWINRIVSRRNRNVAAVALANKNARIVWALLAHDREFRPDYTTAKASA

SEQ ID NO: 203141 - protein, 497 aa, unidentified
MPSTDVAAKATIVDAMKRKSIFKNNSQNIDAAFIEAGLPEKVLLVPLDFAKSTHYACFCDGLGRYLRQAFTVKNTKEGLDYLVERIEATRKSRAIGNKRHVIIGGEDSASYTRNFMQRLNELGYLAVRLSSCEVHRQAESVDSSTDRTALRAIAKTMLNRDARPIDGHDVYTELRGLTRQRRRIVHLSTAVKNRIHTHADRLFPGFLAKDSVLTPFSRASLELMSKPAFGAVSISQKNEKALGQLLKRAGTARSAEIAPALKQQARDSIPADKDAARLSAYILAGELQLFRSLASNLEALDQGCARLLARTPEAFIASIKGIGITLAASICAESGSLTQITRTDGLNAYAGIVPKVKQTGGPESEAKIRGRRRSFNRVLKDYTMQAGNHLYLHGPEELMQDAVRRKLAGKAVDTAMARRFLRIARALCKNHLTYLPSHLRGQNASSRERAQYILDTWPALLVKWKRLGLHEEAFAAENPLGQWRLIMQEIHDIDLPL

SEQ ID NO: 203142 - protein, 343 aa, unidentified
MQTITTIGLDIAKSVFQVHGVDAGGQVIVRRQLKRRYVLTYFQKLSPCLVGIEACASSHHWSRELQALGHTVRLMPPAYVKPYVKRQKNDATDAEAICEAVTRANMRFVPTKTPEQQSGLLLHRTRHLFIRQQTAVINAIRGHLAEFGIVAPVGRHGVEELLNVVADPSDRRVPEMARACLLAFGAQLRRIKEQILEFDRLIRAWHRSNETSMRLDEAPGVGPVLATAVVATVADPKAFRSGRNFSAWIGLVPKQHSSGGKNRLGGISKQGDRYLRGLFVAGALAVIRYAKIHGTKHRPWLTQLLARRPTKVAAIALANKIARMAWAMMAKGERYKEPITLAA

SEQ ID NO: 203143 - protein, 388 aa, unidentified
MQFAADRLEAPTAIRTDLGAIFISLELSRSSWVVTSLSPGGGEKMSKQVVRGGDVAGLLEHFARLREKARARTGKVFPFVVIQEAGLDGFWIDRALQNEGIESHVVDPASIATSRRRRRAKTDGIDGEGLVRALLAYKRGEPRVCAMIKAPTPEEEDRRRLCRERKVLIGERVQHVNRVKGLLFSQGISGYEPLRRDRRERLDTLQTGDGRLLPDHLKAQVCRELDRLELLLEQIKAVEAERDVLLAAQQVAAPAPAAMLLDIKGIGPEFAAILWSEGLFRHFDNRRQVASYAGLAPTPWQSGSVDREQGVSKAGNPRLRTTLIQLAWLWLRHQPHSALALWFEERVRRNGGRLKKTTIVALARKLLVALWKYVTAGVVIEGAVMKRT

SEQ ID NO: 203144 - protein, 421 aa, unidentified
MTEDIEWFVGFDWASQTHVACLLDRNGRTVGERKVGHGGAELAEFCDWLIAKTGAPPGRIGVAIETPHGPIVEMLLERGFAVFAINPKQLDRFRDRFTVAGAKDDSRDAHVLGDSLRTDRRAFRRLSVDDPTVIELREWSRIADDLTQERTRLANRIRQQLWRYYPQMLQLADDVTAENFLALFECAPTPARAAEIDEASLAKVLKAHRVRRIGPAEALRVLRQKPLQVAAGATEAAVAHIRIAAERARLVNRQLKETHQRLEALCARLEQPKDGEPESEPGQSSEQRDVTILRSLPGVGRTGLAALLVEAPEPLRRRDYQVLRVLSGVAPVTRRSGKARLVTRRTACNQRLREAVYHWARVAMQVDPQSKKRYLALRQRGHSHGRALRTLADRLLAIACAMLKSQTLFDPNHKIAPPVPA

SEQ ID NO: 203145 - protein, 396 aa, unidentified
MLYLAIDQHKNHLTINIRNEHGDVIQKGQVSTKPDDIDEFFVAFAKKGRKHRGYMAIVEVCGFNDWLIEKLKKTRCSEIVVIQPDNTAVNKTDKRDADALGALLWNNRKRLQGGQRPNGIRRIFPADPDDAAVRQLANFRQHLLRQRTKVINKIKGIMNKHNLTHDAPSENSATQKFFKWIKTVPLPVVDRLEVNMNIEAWELYDKQILAVESELVKRSEATKEKMADVYRLKSIPGISAMGAITLLSRIGDIKRFKNPDSLANYFGLTPGCHNTGGKHRVGGITKRGNAIARQVLNFAVIHITRKDPAMKEWHKKIKKRRGAKTARVAVMRRLATIIWHILRWGKPYQFHYDPPSVTLKKDDRRSSKEVFGGMGNRNHCCKQEGTPSRCRSKTKA

SEQ ID NO: 203146 - protein, 413 aa, unidentified
MDVLHPRCCGLDVHKSSISACILLREAGRVQKHQRRFGAMTQDLHALAEWLRQFGVTQVALESSGVYWKPVWNILEGQFTVVLANAQHIKNVPGRKTDQKDAEWIAQLLQYGLLRPSYVPCEIIRDLRDLTRMRASLSQEASRISSRIQKVLEDANVKLASVATNVLGKSGRAMLEDIITGEDDPEHLASLALGHLRVKIPQLRLALEGKIRSHHRFLLRRLVDQIQFVEHEIALLDERLEDIGRQRPDLAQAVARWDTIPGIDRVAAWALLAEIGDNMAQFPTAQHLASWAALCPGNHESAGKRLRGTTRQGSPWLGRMVCQCAWAAARTKNTYLSSQFRRLAARRGKKRAIIAVAHTLIVIAYHLQKNQSNYDDLGGNYFDRIHSDGLKRYLVKRLEQLGHKVTLEPMEAA

SEQ ID NO: 203147 - protein, 354 aa, unidentified
MTEILKSVIAAIGIDIGKNWFHVVGLDGRGAIALRQKWSRGQVEARLANMPACLIGMEACVGAHHLSRRLSLLGHDARLMPAKYVRPYSKGQKNDFRDAEAIAEAVQRPTMKFVATKTADQLDLQALHRVRERLVSQRTGIINQIRAFLLERGIAVRQGLRVLRAELPSVLATRCDVLAPRMVRIIEGLAGDWRRLDERIEALSGEIEALARLDDGCERLMSVPGIGPIISSAMVAAIGTGDAFAKGRDFAAWLGLVPKQFSTGDRTVLGKISKRGNRYLRALFVQAAWVVLIRSKNWERYGLKPWIEAAKRRLHRNVLAIALANKLARIAWGVLAHGRSFAAGKVAEAATQPA

SEQ ID NO: 203148 - protein, 348 aa, unidentified
MKIVGCDLHARQQSIAMLDRETGELTEKVIRHEGNAVREFYASLGKPVVVGIEATGAMQWFLELLEELGIESRVGDPAKIRAAKTWKQKHDRRDARLILDLLERDRFPAIWMPTSEQRDLRSLLRDRHQWVKMRARLQHTLQAIALNHALRKGSSLWSGTGQEALAKLPLPAYTCQRRNELMSLYAQLQRRIQQLDKQVEEQAQHRPQARRLMTHAGVGPVTALATDVFLGDPSRFTTANEVASYIGMIPSEHTSGKRQRLGKMSKQGNSLLRYLWTEAGMHASGKDPELKRFYRRKLIQKGMGKSRIAAARKLGIRLWIMMRDEIDYEEFCRRGKLRQIGESPCRSA

SEQ ID NO: 203149 - protein, 396 aa, unidentified
MAVYSKFVGMDVHKETIAVSVAEAFGGEVRYVGEIRNTPEAVGKLIRQLQKGGAELLCCYEAGPCGYVLHRQLLSMGVANQVVEPSLIPKKPGDRIKTDRRDSQTLARLLRAGELTAVWVPDEAQEALRDLTRGREDLKHLERQAKQRLQAFLLRHGKVYDHEKKWTQMHFHWLEQVKFDQPIQQIVFQDYLDTLQMLTRRVEALEKQLESAGAASGFGPVIEGLMALRGISRIAATTTMAEIGDLHRFPTAPQLMAYLGMVPSEHSSGATRSRGGITKTGNGHVRRVLVEAAWTYHHPARKTQHLQQKAKRAPEGVQEIAWKAQVRLCARYRLLESKGKLKVKVCTAVARELVGFIWAIGRAFPTPGAGALGDAANPQCIGSRTGNGGRILEVPM

SEQ ID NO: 203150 - protein, 455 aa, unidentified
MAQDTQTGYRAVRHRAPISERPAAESRDHRVFSHCFNSEVTIMSVTHQGVPARVCAGVDWAKDDHAIAIIDPSGGVLDRFAVTHDAAGLKSLVRRLLTAGVDDVGIERGDGPVVEALIQAEFTVLVIPPAQLKNLRSRYGSAGNKDDRYDAYILADVVRTDRRRLRPLVRDSGATIALRTTVRARRDLVEHRVAAANQLRAHLQIVFPGATSLFAAIDSAITLTFLERFSTQAQADWLSPKRLGTWLSSVSYTGHTDPGILHARLLAAPRGSTGTDAQTHTVTTLAFVAVLRSLNTQIEALARSIGEQLAIHPDAHIVTSLPRSGTVRAARLLAEIGDARGRFPTADSLACLAGVAPSTRQSGKVKAVTFRWGANKELRDAVCDFAGDSRHANPWAADLYAKARARGHDHPHAVRILGRAWIHIIWRAWQDNLSYDPTKHGALQALLNNTANKAA

SEQ ID NO: 203151 - protein, 327 aa, unidentified
MENIALIGIDLGKNSFHIHCQDRHGKAVYRKKFTRLKLIEFLATCPATTIAMEACGGSHFMARKLEELGHFPKLISPQFVRPFVKSNKNDFVDAEAIREAASRPSMRFVQPRTESQQAMRALHRVRESLVQDKVKTTNQMHAFLLEFGISVPRGATVISRLSTLLEDSSLPLYLSQLLLRLQQHYHYLVEKIKDLESQLKRKLDEDEIGQRLLSIPCVGTLTASTISTEIGDGKQYASSRDFAAATGLVPRQHSTGGRTTLLGISKRGNKKIRTLLVQCARVFIQKLEHQSGKLADWVRDLLCRKSNFVVTCTLANKLARIAWALTA

SEQ ID NO: 203152 - protein, 320 aa, unidentified
MMAQNGCVVVGIDVAKDKVDGCIRWLSQRQTFPSSAEGRRKLIAWLRKHKVDKAVMEASGGYEREWAKALREARFEVRIVDPKRVRNFARSAGRLAKNDVIDAEMIAWFAETFDDAPSQPHDAAREELATLVKARKHLIDVRTRLQSQNEHAVPGAVLKAHARVLKGLDTEITKLEDAIVAAVKATPAFAERAEIIESVPGLAETSSAIIIAGLPELGTVREEIASALLGAAPYDDDSGKRRGERHIKGGRRWVRNALYMPCVGAATQSNPVLKAFYDRLIAKGKEPNVAIIACMRKLIVILNTMIARGEKWDPSRYALR

SEQ ID NO: 203153 - protein, 360 aa, unidentified
MSNPSSSNHQGIVGGVDTHKDLHFAAVVNAYDRVLASNSFPTTRHGYKSMLNWMQSFGEVKRIGVECTGTYGAGLLRYLQQFGIEILEVTAPDKTDRRKRGKDDTIDAENAAHAAFAGIRTITPKTRDGMVESLRVLKLCRKTAIAARRIALQMIQMNIISAPEAIRESLRTMTRMQLIRTLAAWRPDLGGYRDISTAYKIAFKSLARRYLELHDEIADLDVMISVIVDELAPELIAGKAIGYESAAQLLITVGDNPERLKSEASFAALCGVNPIPASSGKVNRHRLNRGGDRAANSALHIIAIGRLRTDARTKEYVEKRLTQGHTKLEALRCVKRYIAREVYYTLRKRNNVVNSTQITT

SEQ ID NO: 203154 - protein, 399 aa, unidentified
MFVGIDWAKDAHEVCAVDASGKVRHRATVPHSQDGLDQLVGYLGRWATEGELLVGIERPEGRLVDRILEAGYPILLVPTFAMKDFRRRYAVGGAKSDRGDCYVLADVTRTDGHRLRRLEPLSEQTRALRAVVRTRDDLVDQRRGLANQLRATLEAYWPGAAAIFADVDSEICLAFLERYPTPESAARLTEARLASFLTKAGYSGRRPAARLLARLTAAPAGVLGAEAEARADTVRAMVRVMRALLRSIKDLDRSVVAHLGEHPDAEVFTSLPRSGQVNAAQMLAEWGDCRQAYPQADSAAMLGGLCPVTHASGKHRDVSFRWACNKRLRQAMTTFANNSRRASPWAAEVYRQAVARGCDHPHAVRILARAWARVIWRCWQDRRAYDPALHRAARRLKAA

SEQ ID NO: 203155 - protein, 343 aa, unidentified
MDQHIGLDVSLKDTSVSVRQDGKRIWRGKCASDPKLLAEVIRKRAPNAKRVVFETGPLSVWFFHALTAEGLPAICIDARHAKAALDMAANKTDANDADGLAHLAEVGFYREVRVKGFDSMLMRTLIAARRQLMKMRVQMSNQIRGLMKTFGLVVPKGAGSVFDRNVISLLEGEDNLARIILPLLKAWGDIRLRVAELTKQLVAMAGADQRCRLLTSVPGVGTVTATAFAAAVEDSINFKNSRAVGAWVGLTPKRYQSGEVDYEGHISRRGDAKLRTLLYEAASVILNRSTETNALRTWALALKERLGFKRAAVALARKLAVIMHAMLKTGELFDPNAGAAAPT

SEQ ID NO: 203156 - protein, 340 aa, unidentified
MGDITTIGLDLAKNVFQVHAVDVAGSVVLRKRLRRGQVLAFFAGLPPCLIGLEACATAHHWARELIALGHETRLMPPSYVKAYVKRNKHDVADAEAICEAVRRPSMRFVPLKTAEQQSALMMHRARDLLIRQRTMLVNALRGHLAEFGLVEAQGLHKVARLIAIVMDEMDGRVPDIARQVLKVIVSQIEDIQTRIAGLETQVLAWHKSNPVSQRLATIPGIGPIIATAVAATVADPNTFRSGREFAAWLGLVPRQNSTGGKARLGGISKRGDSYLRRLLVNSAHTVLLCSKAAKADPWLTSLLSRKPRLVVAVALANKTARVAWAIMSRSDIYRHATVAA

SEQ ID NO: 203157 - protein, 447 aa, unidentified
MALDVVTKTDKTPVLGRMLSKYVGRKTSSIENGITKARNHSRQRGNIMRVVFGIDVSKASSEVAILVNGEKVHGYTIPNDAIGFNRLLGDLKTVHQPEIVFEATGVYSRRLQAFFEDNSYTYTRLNPLESKKQLDSLRVRKTDKIDAEKLAMSQFILNRKPSYVQEALYQELRDLSRFYQNLTEDIVCAKNRLHKVLQITFPELENILSAPTGEQYWNLVITFPCNSFVLESDDATLTAIIRQSTAKRISEKRVTYLVDKLTKLANQSYCAVKKTSPVIEEVKYYAGELLRLSEHRQGVVEEMVTLAQSLPEYEILLSIPGIAETTATSIIGELGDIRRFHSANQINAFIGIDLRHYESGNFLAKEHITKRGNPYARKILFKCIHNIASASHTNPCHIADFYEKRKRQSQVTSTKPHTIASIHRLIRTMYYLITHNKLYDYTSTQNR

SEQ ID NO: 203158 - protein, 412 aa, unidentified
MEVVYERCAGLDVHKKSITACVLWALPKGKKKQEKRRFATFTQDLLAMADWLRECGVTHVAMESTGVYWKPVWNILEGQLEILLVNAQHIKAVPGRKTDQKDSEWIADLLQHGLLKGSFVPPTPVRELRDLTRYRVSLAQECNRIANRVQKVLEDANIKLASVATDALGASGRAMLDAIIEGETDSGELAEMSKGLLRNKRDELRLALEGRVTEHHRFLLKQLMRHLRFTEARMDDVEQEIERRMEPYQDDVKRLCSIPGVERVTAWGLLAEIGFNMDQFPSAAHLASWAGLCPGNFESAGKRLSGKTRKGSAALRRCLSQAGWAVSTKKNNYLTAFYRRVAARRGAKRAIIAVAHQLLVIAYYLLKRKQEYRELGPNHFDNLNADRVRHSLVRRLERLGHRVTLEPLAQPA

SEQ ID NO: 203159 - protein, 329 aa, unidentified
MRFYTNPHNFYCGIDRHARSMYVCILSYDGEILVHRNMKAAPEPFLKAVAPYREGLVVAVACMFTWYWLADLCAEQAIPFVLGHALSMKAIHGGKAKNDTIDSQKSAALLRGGLLPKAYVYPAKMRATRDLWRRRTPLMRKRAALLSHGHNTTSHYHLPDIGKKIAYNANREGVAARLNDPAVQTTIAIDLALITSDDALLRDVELSMVQTAQQHEAHTLSVLQTVPGIGTILSLVLLDASHDIGRFPSVQDFASDARLVTCSTESAGTRLGTSGKKIGNAPLKWAFSEAGTWFLRNHPHGQKLLTRLAKKHGKGKALTILAHKLARAV

SEQ ID NO: 203160 - protein, 337 aa, unidentified
MKYCGIDLHSNNSVIVVIDDEDRVVAQKRLPNDLARIVEFVALWRGELAGVVVESTYNWYWLVDGLQAAGFEAPLANTAAIKQYDGLKHSGDEADARHLAHLLRLGILPTGTILPRDERAVRDLARKRIQLVRGRTTHILAIENIMARQFGGRMTSNQIKRLSADDIDRMPIAADVGLAMNANLAVIGALDAQIEVLERRLRERVKPRPEYAFLTSVPGIGQALSTTILLETGPIDRFAGVGNYASYARCVDSAHTSNRKKKGEGNVKNGNKYLAWAFVEAANFARRYCPEAKRFYERKKAKTNNIVATKALAHKLARACYHILREGRPFDVTRCFA

SEQ ID NO: 203161 - protein, 366 aa, unidentified
MLYLGIDQHHKQITISLRDGEGSVIQRRQVSTRPEKARAFLEELAHRSGEDGFMAILEVCGFNDWLIELLEEYRCKEIVLIHPDKRSKRKTDRRDAGKLSELLWLNGERLRKGTKPQGLRRVVIPTADDQADRQLTALRKRTAQQRTRTINKIKNILRRHNLTWEQPTKTFQTKLVRVWLAQIDLPPIDRMEMTHLLVQWNMYEQQIEQTQKSIEERFPQNESACQLSTAPGVSAYSALTIASRIGSIDRFASPRSLANYFGITPGCRNSGEATNRLGSITKEGSSMVRFILGQLVLHVLKQDPWMRDWYRRIRRRRGSKIARVAVMRRLVTIFWHMLKHNEGYHVGGPPRLRLKKPRRSEAKMAQ

SEQ ID NO: 203162 - protein, 354 aa, unidentified
MATTSKQNDFTLASVGIDIGKDVFHLVGFDTGGKIVMRRKIRRLALVRELEKLPPCIVGMEACLSAHFVSRTLRKLGFEPRIIPAIYVKPFIKGQKNDYNDAEAIAEAALRPNLKFVQEKTQDQLDLQALHRVRSRLVSRRTATINQIRAFLIEQGITVRTGAHALRNSLFAILENRKDEISPRMSDLIIGLNTDWQELDERIETITGEIETISKSEKNCQRLMSVPGIGPIISTAVVAAIGTGDAFGRGRDFGAWLGLVPRQYSTGGKTVLGRISKRGSKYLRTLFIQAAHVILMRPNNWQKFSFGPWLTEASTRLHRNKLATALANKLARIAWSVLANQKTFDANRKEVKAI

SEQ ID NO: 203163 - protein, 374 aa, unidentified
MKVYVGIDAHTTNYTLATAVIFDEPASNVNSYPPRISNIVAYCKDIKKHFGSETEIITGYEAGTLGYSLRRDLEKHGITCIVMAPSTIAGTELNRKRRRKTDKRDAAAIAKALLTHSYSEVHMPDEEDEAVRDYIRLREDIKQEQKRTKQQIGALCHRHGFHYNDGKYWTKKHIAWLRALPVEGNLKETLDGYIRTFDYYTDRINECDIRIGKIAETDKYRESVHKLICFKGIRTLTALALIVEIGDFTRFLKAKNFAAFLGLVSGEDSSSDGQQLLGITKQGNRFLRRLLTEAAQCFSRSASAKSKEILRRQSGNTEEVIAYADKANMRLRKRYYHLVNRNKKCANKANTAVARELACFVWGMMTGNTHTALA

SEQ ID NO: 203164 - protein, 346 aa, unidentified
MEHYAGIDVSLECSSVCIVDATGKIVREGKVASEPEALIAWLGSSRTDFVRIGLEAGPLSQWLYPAMQQAGLAVELLETRHVHKAFETMLVKSDRNDARGIAQLIRLGWFKPVHCKSLAAQEMRALLTARKLVQSKLHDVQNSLRGILRGFGLKVGETTPARFSGRITGLVTGHPNLEVIAKALLAVHAVLLREFNGFEKRLRRTARADTRARLLMSVPGIGTIVALTYTSAIDDPARFTSSKKVGAHFGLTPKKYQSGETDYTGRISKIGDASVRAALFEAAHIMLTKPLKGCTQLKSWAMRIARRAGMRKAKVALARKLAVIMHRMLADGQSFDPMATAKVAAA

SEQ ID NO: 203165 - protein, 452 aa, unidentified
MAHQKTERTRKKKTRPALGRTNPDAAGIDLGATVHYVAVPADRDENPVRHYGTLTEDLIELADWLKQCRITTVAMEATGVYWIPLFQILEDRGFEVCLVNARHVKNVPGRKSDVQDCQWLQYLHSVGLLNASFRPPADICAVRSLMRHRESLMRTACQHLLRVQKALDQMNVQLHHAVTDITGYTGLAILDAIVAGERNPESLASLRDYRCKKSEAEIAKALRGDWREEHLFTLRQSLEAWRFHQNLMADCDQQIASRMDALEDRGAGPPPVTGKKKGNKPHEEPMREQLYEKFGVDLTAVEGVSIQTCLAFLSEVGTDVEKFATAEHFASWMGLCPDNRITGGRTHAAHTRKVQNRLANALRMAAQSLHRSKAGLGDWFRRLKAKLGTKAAVTAAAHKLARILWAMVKHRRPYDPQRLGNPELARLRKERYLRRQAEQLGFALTPVGGEVS

SEQ ID NO: 203166 - protein, 358 aa, unidentified
MRIIGVDLHTRQQTIAMLDTETGELAEKTLQHDGDEVRKFYSALPGQVLVGIEATGSMHWFLELLEKLGIDHQVGHPSEIRKAETRKQKHDRRDAALLLKLQVENRFPSIWMPSTELRDIRTLLLHRHQWVRMRTRVQNALQAIAISRGLRRGKALWSQTGQHAIASLPLPPYAAHRRTALQDLYHKLHAQIDELDMRVGDQALQRPGAKLLMTHPGVGPVTALASDVFLGDPARFEDGKAVVSYVGMIPSEYSSGGQQRLGGLSKQGNPFLRFLWCEAALHAARRDPDLQRFYRRKLAQKGLGKARVAAARKLGIRLWIMLRDQIDYQEFCRRGQMRQKNGGACAGMPEVGHSPAIQ

SEQ ID NO: 203167 - protein, 341 aa, unidentified
MNLSKTVVGVDTAKRVFQLHWIEQETGEIVSLQLKREKFLEHFANRAPCLIGMEACGGSQHWARKLAAMGHQIKLMPAKAVRPFVGGNKSDVHDARAIWTAVQQPNVKAVAVKTEEQQAILALHRMRSQLVKFRTAQINGLRGLLTEYGEVMPQGKAGVKKGIAEALQRLSDRLPAMVIDTLREQWGRIGQLDEQIGEIERRLKVWLKEDVASKRIAEIPGVGLLTATAAVATMGDAKAFKSGREFAAWLGLVPRQTGTGGRIRMLGISKRGDTYLRTLLIHGARSVLTHAKEPAPWITELRQRRPLNVAVVALANKMARTIWALLAHERTYQKGFVSQPA

SEQ ID NO: 203168 - protein, 391 aa, unidentified
MSKLNDLSRSLVPLNPDTTLIAVIEMSQSSWLVAGIVPGIERQPLKKLDVDKDALLKLLHRWRDEAVRAGRDITRIAVAYEAGRDGFWLARWLRAQDIEAHVIHASSVAVSREHRRAKTDRLDTELLKRSFLGWLRGERDHCNVVAIPTLEQEDAKRPNRERESLVAEHSRIVNRMKSVFALLGIRGFNPKLKSAADRLQSLRTPEGEPIPPHAIAALKRDMERRQLIRDQIRQIEQTRLESLQLTPKTGPHAMVCLLASVVGLGVGTADMLVHEVFARNMRDRRAVARYSGLTGSPDESGAKRREKGLSRSGNARVRRGMVELAWRFLRFQKDSALAQWFRTRTEHAHSTRKTMIVAMARKLIIALWHFAKEGVVPDGVVLRSPNLRPAR

SEQ ID NO: 203169 - protein, 420 aa, unidentified
MLGVGVDWSEDFHVVALGTGDQGVFEVFRVEHRPSAVRALIERIGRLEPDAAEVRVVLEASHGMLVESLLDAGFVVVPVNPDVLARRRGPAKKKDDAEDARIACLLALDRFTSLRPLMARGPEAGELRALARDDERAARDERRLLNRLRADLVATFPAALAIAGEDLGRPTFLQMLERWPTASDLAAATGDELVAFARDCSHGWPERFADRVASALRGEVFVARDYLVRAKAGTIRLTAIQLLAIGAQRRVWERRMGELLIGSTRGKDGKPKGEQPGPTVPGGEVYLSFPGLGDRLAARMAGEIGDIANFASPNALQCYAGKAPVTRSSGKSQFVVTHRLACNPILRDAVQQWAFCSLSRSGWAREFYDSKRAAHKSHHSALRALGNRWLEILWHCLHRRIAYDETRHVANRNRALGRAA

SEQ ID NO: 203170 - protein, 312 aa, unidentified
MEKLSYGGIDVSKDCLDVVVLPEGWFFSVSNDTAGWAELVARLRPLTVCAIGLEPSGGYERGIIRALLAAGLSVRRINPNKLRQFARARGVLAKNDRLDARLIAEYVAIMPTRVVQRNDAVERLAEIVTMRRQLCDEHVAVENQAAHLEDAMLRRLSKRRLIRLEADIRLLDKRLAEMVATNAAFAQLYELLTSMPGVGPVLAFTLIALLPELGKMSRKQIAALVGLAPYDFDSGKLRGHRSIYGGRMPIRNVLYMAALSASRHNPALKAFSNRLADANKKSKVIIVAVMRKMITTLNAMLRDSAAWQPRSA

SEQ ID NO: 203171 - protein, 355 aa, unidentified
MPIVSQTFQFVIGVDTHAKTHTLAILAADGHHVGTAQFPTSPPGMNRALAWVAHRTGGVDATLFSIEGIGAYGAMLAHQVMITGYQVVEAPHMDKKAHHGVGKSDPIDSLMIAHATLPLDITRLRQPRDDNGIRVGLRVLADARVDMNKQRTTHINQLIALVRTINLGIDARSGLTKTQIKQITTWQIRDEPIEAHIARLEATRLATSITSLDNERADNQKNIMSLLKQTKAAPLLDKCGIGPITLANILIPWSHPGRVRSEAAFAALAGVNPIPASSGNTTRHRLNHGGDRRLNNALHTIALTRTRFDPETRDYITRRTTQGRTDKEIRRCLKRYLARQIYRALQDLYNPPATI

SEQ ID NO: 203172 - protein, 421 aa, unidentified
MTGDFRIVGFDCGEDEHGAVLLGTDGEVERTIEVVNRRDEIERALAELMLAIGPGSRLGVVVESKRSHGRIVADVAQALGCRVWQVNTVALNHSRALEGQPRKDDEWDAYLGGRMAFLGMRGCRLVVESTDEERALSRLTRAYGRLRKVHTQAVSRLRASLLELAPEMLHNAWEGPKVGSKAVLYLLERWPGFEGLERARLRSIEGILHTCRYGRRAPGVAKKLREMARRIEVEPEERAAFTMEISLLVHQIRECKESMDRLHTEIAERVQRHPVGAKLLEMRGIGPVIAGVLVSELLPVARTSTEPKCATYSGVTPLARKSGKSLDSDRLAQGVNKHVLHALYTSSVVAIKHSPIDRAYYQKKLRGYKGHRKPHVAAFIALSRQRHKLIYKLMTTAARYDTDTLVASHLDRIERNRVEVA

SEQ ID NO: 203173 - protein, 371 aa, unidentified
MGNRSMFVGMDVHKETIDISIAEGGRQGDVRHYGVIAPDLEALDKVVRALQAPSRVVHFVYEAGPCGFGIHRHLTTKHGLDCVVVSPSMVPKRSGDRIKTDRRDSGMLARLHRAGELRAIHIPDALDEAMRDLVRAREDAVVVATQAKYRLKAFLLRQGRRYPGREGWTIPYRRWLADLSFASVAQHTALQEYRDAIDETERRITRLTEQLRQLTPTWRWAPLVAALQALRGVSFLTAMGVVAELGDLTRFGHPRELMAFLGLVPSEYSSGPSVRRGGITKAGNPHVRRLLAEAAWAYQGIPRIGRQQLYRQEGLPKVVCDIAWTAQLRLTGRFRRLVARGKSKPKVATAIARELSGFMWAIAREVTPASA

SEQ ID NO: 203174 - protein, 347 aa, unidentified
MRFYNRQHRHYCGIDLHVKTMYVCILDTTGQVLVHRNVQSNPEAFLETIAPYRDDLVVAAECMFTWYWLADLCAAEDIPFVLGHALAMKAIHGGKAKNDKIDSQKIAALLRGGLVPQAYVYPAAMRSTRDLLRRRLHLVRKRGQLLAHIQNTRAQYQLPEFGRRLAYPANRAGVAEHFTDPSVRKSIDVDLALIDQYDTLIGDLELTIVREAKRHDADAFHRLRSVPGIGKVLALTILYEIHDVTRFDRVQECASYARLVKCVHQSAGKKLGTGGAKMGNVHLKWAFSEAAVLFLRHTKDGKKIVAGIEKKHGKGKALSILAHKIGRAVFYMLSRGTVFSMEKFLAA

SEQ ID NO: 203175 - protein, 370 aa, unidentified
MKKNSKNSKSPTRSTKTKLRKTDQMTIGMDLGDKTSRYCVLNAAGEVQLEGSCATTKAGMAQVFGAMPYCRIAIEVGAHSPWVSRTLKRLGHEVIVANARQVKLISQSSRKNDKLDAQMLARLARVDPALLRPIRHRSEEAQKDLMTIRIRAALVESRTGLVNAARGLAKSTGERLAACDADQMEVEKLEQLPADLRETLKLLVEEVESLTEKIKECDRKIEQIARDRYPETKLLRQVSGVGPLIALTYILTIEDKQRFPKSRDVGCYVGLRPKQSESGERQPELRITKEGDVYLRKLLVQGAHCIMAKRAPDTDLKRWGTKLAGRGGKNARKRAIVAVARKLAILLHRLWATGEVYEPLRNSQARAKAA

SEQ ID NO: 203176 - protein, 359 aa, unidentified
MCILKENGDKIEEKFGVLTPELDRLRDLLVCHLVGEVAMESTSIYWIPIWRVLCSDFDVKLVNPYFIKQLPGRKTDVKDAQWIATVLQKELIKGSFIPEPVIQELRLFDRKIFYLNRNLQRAEQAIDLILQRCNIRLSNYVSDIGGKSMQKVIDAIIQEITDPEILLSLVHKRTRNKHGDKAIKAALTGIISKADRMMLKLSWEEILMYERQIEECYEQMREICNSHFSQEIELLETIPGIKQEAAMRIVAEIGIDMKAFLTASAIVGWAGLKPRNEESAGKIKGRKTLHGNKYLRILLIQCAWAACRTKQSRFFYKYQNLSKRMNHNKALLANARKLLVIIWNILKKKQSYTTGLLTA

SEQ ID NO: 203177 - protein, 310 aa, unidentified
MDANFVGIDVSKDRLDVHVCPSGEGFAVSRDGKGLEVLIDRLRTLSPQLIAVEATGGFETIVVAALAGAALPLVIVNPAQVRHFAQAVGKRAKTDPIDAAMIARFAAAVRPEVRPLPDEQTRLLGELVARRRQIIEMIVAERQREPRTVIVRVRKSIVRHIKVMEKELAEIDNDIGTLVRGSAAWRHKEDLLVTFPGIANKLARTLLAEMPELGSLTRRQIASLAGLAPFTRQSGHWKGKSMIAGGRAPVRSALYMAALSAITCNPPLKCFYRRLLAAGKPKMVALIAVARKILTILNAMLRERKQWQHA

SEQ ID NO: 203178 - protein, 368 aa, unidentified
MAQSRPALPVSLSALEKGARMPVMIGVDPHKASHTTAALDEHGQLVGQQRVPATLDGYRTLRRWAARWPHRCWAVEGAHSIGRALAQRLVNDGEQVLDVPAKLAARVRVLSVGYGRKSDGDDAVSVAITARSVASLRQVGVEDQATVLHLLTKRRQDLVAARTQTINRLHRLLMDLVPGGARRNLTTKRAAALLAVVTPTGAPAVTRWQLATELVADARQLEQRIAEVEARIKTVITRSNTSLVGLFGVGPVLAATFLGEVGDIGRFPSKHHFAAHTGTAPLEASSGQVVRHRLSRAGDRKLNHALYMMAMVQVRRPSAGQAYYRRKLAEGKAPKEALRCLKRRLSDAVYRCLIADRQARPCQAVTSS

SEQ ID NO: 203179 - protein, 348 aa, unidentified
MALTIVETRAITGGVDTHADVHVAAALDPIGGLLGAGEFPTTPAGYARLLGWLGGFGTVCLVGIEGTGSYGAGLSRHVTTAGIRVVEAARSDRQDRRRQGKSDPLDAVSAARAAQSGRARGAPKGRDGTVEAIRALMVAKRSARSERTQAINQARALILTGPDDLRARFTRHTAASLVTELASLRPRPGDVVGYATRIALRELGRRAEFPGSQLARLDELIVPLVTSHAPSLLALHGVGPDTAALLLVAAGDHPERLRSEAARAHLCAAAPIPASSGKVTRHRLNPGGDRQASHALWRIVLTRMSAHPPTRAYVERRSKEGLSKKEIIRCLKRYVAREACHHLRAAAD

SEQ ID NO: 203180 - protein, 362 aa, unidentified
MKIIGCDLHTRQQTLAILDTETGEVVEKVLLHEASNVRDFYSTLPRPVRVGIEATGSMQWFVNLLEELGIECQVGHPAKIRAAEPRKQKHDRRDADLILKLLVENRFPSIWLPSKELRDLQSLLRHRHQWVRMRTRVQNALQAIALANGLRRGPSLWSHDGQSTIASLPLAPHTAHRRSELQALYVKFEAEIEKLNQRVEEQAWERAGALLLMTHPGVGPVTGLATEVFLGDPARFADSKALASYVGMIPSEYSSGGRQRLGGLSKQGNPLLRFLWCEAAMHTVRKDPELKRFYGRKLIQKGLGKARVAVARKLGIRLWIMLRDQIDYNEFCRRGQKQQKSGGACAGMPETAYGAKSHRPVD

SEQ ID NO: 203181 - protein, 328 aa, unidentified
MGIDLAKASFDFCLLSSHGAVLWRGHLSNDANGIKEFLGQLKAGRWKVSLIHFGLESTGVYGNRLISGLHQAGLALSVLNPAQVKFFAISLLRRTKNDRLDAQIIARFCLERKPLATRPLRPIEEQLKLLVHERESRVCEQTRERNRAKKDPFQIQLPLLISHQRQDHLKQLQKELTQLDRAIHKLMASDLDLKTQSKRLCSIPGIAETTAAKLLSELAGKEFHSARQLAAYAGLTPSQFLSGGSCYGKTHLSKIGNAFLRKALYLPAAVARRWCKPLKPWVTLLERRKLSDLAIRGAIMRKLLHIAFGVLKHQTTFDPSLVFLPKTI

SEQ ID NO: 203182 - protein, 328 aa, unidentified
MTKHTTICAGIDTGKRKLDVAIEGRCEQLQVDNTPEGHELLLAWLRQHRVKRVGIEASGGYEQPVVIELRRKRFVVVVFQPTQVRAYAKFQLQRAKNDKIDAALIASCTAAVRKIHAAPDPRLLPFAERLTMIDQIGEDIARLKNRIESCRNAMIKRLWQEDIARLEKREKAEFTVLVALIRKHRDLARRLELIHSVDGIGLPTAVAILVRLPEIGEITREQAVALAGLAPYDDDSGERVGVRHIEGGRKRLRRALYTAALAASFRWNRQLIELYQRLTAAGKEHKRALVACARKMLIFANTVVARGTPWCDEPPAVNASIAGASSVS

SEQ ID NO: 203183 - protein, 409 aa, unidentified
MQPILKSCCGIDVHKSMIKACVAKGPLDKPPKLTTRTFSTMTSDLLKLKDWLRENEVEAVAMESTGVYWKPIFNILEDEFPVVLANPQYLKKVPGNKSDVKDSKWIAEMLRCGLIPASFIPPKAIRELRELNRTRRKLVGMMASEKNRIQKVLEDANIKLASVVSKIDGVSSMNMIRALMKNDKLSREEISDMARGKLKNKVDQLVEALNGKVTQHHRFLLRLHLNDIAFLAEQVQEIDEQIQMAMIPFQKENTLIQTIPGISKTTASAIIAEIGVNMSQFPSDAHLASWAGMCPGNNESAGKKKSGKIRKGNTYLKATLTEVAWAASRSKGSAYSAIYHSLAKRRGKKKALIALGHQILRDIHRVLKTGIPYIDEGAEAVYLRNSKARKQSAIRFLERSGYTVIMASA

SEQ ID NO: 203184 - protein, 345 aa, unidentified
MQDDLVLGVDTHKDVHVAAIVDAVGRLMDTAEFASSDRGGQQMLAWVRRHGCLRRAGIEGTGSYGYRLTKLLRANGVETIEVNRPDRSARRLRGKSDPIDAEAAAHAVLSGRAAAIPKDREGPAGALRALMVARRSAVKARTQATNQIRALLVACDDDLRKRLNELLGRALARGCARLRSTEGTRSALRSLGRRWLNLDREAGDLEGEIALIVTRVAPRLLDRPGVGVLSAAQLLITAGDNPRRLRSEAAFAALCGASPVEASSGRTSRRRLSRGGDRTANAALWMIAHVRMVRDEKTRSYAASRTERGNNRKEIMRLLMRYIARELYPIILESLTPEPALDDVA

SEQ ID NO: 203185 - protein, 356 aa, unidentified
MQQHPSVGIDWATRRARWCAVTPAGAVIDEGWTPADEDGLAMLVGHLGPDAVACLEMMSGAAWVRDQLTAAGWTVQIADARKAKAVGSLAAKTDKLDARVLAELVRRDLVPQVHVPTFADRELKEHLGRRMHMVRLRTAAINRAHGVLSQFGVTLAFKRLRGDDRELLLIDRGVPEVWRRSVDEAVAVVSMLDQRLIGLEQQLRPLARADPRVALLVTIPGVGDLLGLTIASEIGEISRFASARKLVGYSGLTPRVYQSGQKARTGKLSKSGATMLRWAAIEAAQQAWRPSNPWHQLYLDVKQRCGGKGNPAKAAVARKVLIAVWHVLALQQPFIPSRPRGADAPVPASSSCVLAA

SEQ ID NO: 203186 - protein, 416 aa, unidentified
MKKHSNSPRKSEPTSKRAKSRGPAQLDPEEVLAELVRKLREKLDPKGVAASTREEHQGRGLRPNLDRLTVGVDLGDRWSQYCILDLEGETLAEGQLRTTQQDIAEFFQALNAARVVVEVGTHSAWVREVICSCGHEVLVANPRLMERSKGRKRKNDRIDANKLARLGRVDPQSLHPMQHRSAEVRQDLVMLRARDALVAARTELINATRGLVKSMGTRLAKCSSPSFAQKVEETVPAEIREALLPVVHMTAALSDCIKGYDEKIEKLASEKYGHTALLRQVKGVGPITSLAYVLTLENPKRFVKSRDVGPYLGLVPQQEDSGDSQPQLGINKAGDTMVRRLLVGSAQYILGPFGPDTDLRRYGLRLCERGGKNAKKRAAVAVARKLAVLLHRLWVTGEVYEPLRHGISATVQAAAA

SEQ ID NO: 203187 - protein, 370 aa, unidentified
MDERIKFFVGLDAHKDSIAVSACEAGREPARFVGTMGPDVNGLLKLLAKAGDPAQVSVVYEAGPTGYGLHRELCRRGYRSQIVAPSLIPRRAGERIKNDRRDCLRLAELSRAGELKAIWVPDEAHEAMRNLWRAREDAVGMRLKTRQQLQAFLLRHGRRYPGKTNWTKSHERWIAEQRFEHDGDRIALAEYQLAAQAAEQRVARLTTALTEAAKGWRFEAVVAALRALRGIDTVCAIGLVTEIGDISRFGTARQLMAYLGLVPSEHSSGNTVRRGSITKTGNAHARRLLTEAAWSYRFPARMSQQLRQRSSDLPEPVRNHAWKAQQRLCGRFARLSSRGVQVNKVCVAVARELAGFVWSIAHQASRTQVH

SEQ ID NO: 203188 - protein, 330 aa, unidentified
MIYAGLDLHKSFCQTKICTKEGELVKEGRIKTEAEDIEEFFPGLEDLTIAFEASGNYEYFYDLLEGLGHKVVLAHPLKTKMIAEAKIKTDKIDAKTLAELLRGGFLPTSYVPPKEIRELRHLVRHRIFLGRVRAIIKNQIKTELRRKNIKYPDGAGIFMEKGKKWLRSLKNPVIDSYLAIYEAVDREVKNAEREIEKAGKEYKEVKLLTGIVGIGMYSALIIYSEIEDCSRFSDEEKAFSYAGLVPRVHQSGNTSYYGRITKEGSKYLRWILVEAVRVHVRWCPDSKITKHYNKIKKKKRANVAATAAARKLLQAIYHMLKNKEEFQIEG

SEQ ID NO: 203189 - protein, 415 aa, unidentified
MDVLYERCCGLDIHKKLVVACMITPGLKGTPRKEVRSFGTMTADLLVLSDWLEEQGATHVAMESTGVYWKPLFNLLEDRFTLVLANAQHIKQVPGRKTDVKDCEWIADLLRHGLLRPSYVPDRPQRELRELTRFRTTLVRERAREVNRIQKTLEGANVKLGDVASDVLGTSGRAILDALVGGMTDTAILADLAHGRLRDKRASLERAVDARMGAHQRFLLAEQLAHYDALNQSIDRVSAEIAERVRLFEPIIERMDAIPGIGRRVAEILVAEVGTDMSRFPSAAHLASWAGICPGNNESAGKRKSGRIRRGSPWLRTALVEAAHAAVRAKDTYLSAQFRRLAARRGAKKASVAVAHSILVIVWHLLQHDCHYVDLGTNYFDEHDRQQVARRLVKRLEGLGYRVALDSLPPSASAA

SEQ ID NO: 203190 - protein, 411 aa, unidentified
MRRVIGMDIHRTFAEVVFWEDGRLRPAGRIDMTRSGLEGFGRTLTSEDEVVIEATGNSMAVVRVLSPYVARVIVANPLQVKAIAHARIKTDKIDAGVLASLRAADFLPEIWLPDAATERLRRLVTRRDQVVRHRTRIKNEVHAILHAHLLPRCPHADLFGGRGRVWLERQPLPDDERAAIGRHLRELDRLGEDLVVLDGEIAQAGIDNPAVKRLLTIAGVNLTVAAGLVAAIGDVHRFASPQKLVSYIGLNPRVRQSGLGLAQHGRISKHGRSHARAMLIEAAWAAAKAPGPLHAFFIRIRARRGHQVAAVAVARKLVVLCWHLLSKDVDYQWARPGLVASKLRSMQLQAGMPARKGGKRGIAYVYNVKELRDREIDIARTAESVYERFVSHWQPRRPTAGRTGAAKEERR

SEQ ID NO: 203191 - protein, 355 aa, unidentified
MLRFRLMIKRGLNVSVKETSVCIVDESGKLCREKKVVTHPDDLVAVLSDPAFNFERIGLEAGPLSQWLFEGLAKAGFAVVCIETRHTKAFLKAQQLNKSDRNDARGIAHMMRVGLFKDVHVKTLTSQKRRALLTARKLLQEKAIAMENDMRGLLRNFGLKVGTIRAFKFDERIRELVEAAPDLAEIIESLLAARQKLREEFVKLDRKVRGEARVDPVCRQLMTVPGVGPIVALAYTSTIDIPSRFRHLRAVGAVLGLTPVLNQSGESSRIGHVSLCGDGMLRGLLYEAAQVLLIRVKKWSWLKAWAMNVAKRHGIKKAIVALARRLAVVLHRMWVDRSEFRWTREATPTTTDATA

SEQ ID NO: 203192 - protein, 399 aa, unidentified
MKTCGLDVHKDSIFCAIYNGNSYSEVKEYTTMTNSIRQMGSYLLSEDVKEVAMESTGCYWVPVWDILHEMGFALTLVNPYLIKQMPGRKSDVKDSQWIACLLHKGLIRGSVVPSARIQELRTYCRKYTKLQQQKTRSLQKMDRLMVMSGFRIGSCMSNLGTKSVMNIVTALISGETDPANLVKLVYGNTANKRSGKLREALTGNIKEHHRIALQWEKEEYDLFEQQTRECLIRMSGICEIHYPKEIELLCTIPGISLIAAMLILAETGADMSIFENSGKLTGWAGLRPRNDESAGKYKSTAITKGNRYLKPILVQVSWAAGRTKGSLFNALLTRLSIRKSRKKALIAVARKILVVIWHLISEKKAYNPALIPVYDPAKLSKKIWYHQKEAARIEKLIQG

SEQ ID NO: 203193 - protein, 386 aa, unidentified
MTEHTIIGIDPHKESWTAVATDQRGNRLAAMRYPVSPAGYRKLRRFALKYSEPVWAIEGAYGLGAPLAALLIDDGVAVWDVPAKLAARVRLLSTGHGRKSDQDDALSVAVVAATSTRLRPVQADAASMELKVLTEYRDDLVRTRTQTVNRLHAIMNLLILAGAPRQLSADTAAKLLRRVHPVDALSTTRRMIAVDLIAEIRRLDKRITAVTERITTQTAATGTTLTVICGVGSLTAARILARTGTIHRFPTQNHFAAYVGAAPREVSSGDVIRHRLSRGGDRQLNYALHVIAITQIAMKAGPGRVFYDRKRREGKTKKEALRALKRRLATVVYRRMLADAETKTVSPAGHSGTTLISSVASSHPITGSSEKSLTGPTSNKPNQTAA

SEQ ID NO: 203194 - protein, 322 aa, unidentified
MKTIANNPGIGIDVGKSELVTCIRHSNGAAEPPVAFANSSIGFRKFVVHLTNQKVQSDTPILLESTGPYHWNIARYLADEGYLSKVVNPLHTKQIARYSIRKRKTDKIDAGQLAFLASQNYGYAFVETKEIARKKALVRHYWKLKSVIGNLSKHERYLKQHRGITRATVTPYLIAKCESLKEKIIQDWENGNNLKYLDSIPGITPFLGAAILAELAPLERFQRTEQIIAFAGLDPSVKQTGGKSGTHGKLSKRGSRVLRTTLYLAAFGAFNRSLRPLYDTYRKRGLRHSETLCIIARKILRIAVALLKKRKMFDPKYLEVVP

SEQ ID NO: 203195 - protein, 430 aa, unidentified
MRRKAYRSTEVKHVELELVLSRGPQGPVTVGLDVGKFVIYVVVRWSDGSFERPWRVENPSEIELLVRLLVALAASRKMTVAMESTGTYGDALRGKLSAAGLVLHRVGGKAASDYAEIFDGVPSQHDGKDAAVVAELAAIGKSRAWPCRQPSDADAAMAYWVDWLDAQQSIQKLWTGRLEALLARHWPECTRMIKLTSVSLLSALAHYGGPAGMADDPAAQAQMAKWGHGGLSKAKIELFVGSAARTVGMRQGPRDKERMQQYARLALAAYRECQQAREELAKLALENEVIQRQARAVGEATACVLWVALGDPRSYSSGAAYRKAMGLNLKERSSGRYQGHLKISKRGPSIVRRWMYFASMRAVQDYGRAWYEAKKAKDNDRGMGALIAVMRKLALATYVVGARDEMFDPARLFPGKRGKQRRAAEATTKS

SEQ ID NO: 203196 - protein, 361 aa, unidentified
MSVQRTSVGLDVHARSVVASALDGVTGEVIERRLTPAHADVAAWVGSLPGPVAVVYEAGPTGFGLARFLTAAGIRCQVAAPSKLQRPAGDRVKTDARDARHLARLLHLGQVVAVAVPDAATEAARDLVRAREDVRGDLMSARHRVSKLLLRQGIVYAGGKAWTGVHDTWLRAQRFDSPVLQLAFDTSYETMLAAVDRRDRLDAAIAAMAADSVFTPVVTRLGCLRGVSTLTSFALAVEIGDWHRLTGRSIGAYLGLVPTEYSSGASRSQGGITKTGNAHARRLLIEAAWHHRQPYRAPGADLRRRWDGASPAARDRGRRANRRLHERWARFDARGKRPVVANTAIARELAGWCWSLATLED

SEQ ID NO: 203197 - protein, 339 aa, unidentified
MSIVMGLDQHRAQITADWLDTETGEVKRARVAPADRVGVRRFLERFRGQELEVALEATTGWRFVVEELRRIGAGVHLAEPAETAGLRGPKKRAKGDRADARHLRELLMIKRLPESWIAPDHLLDLRAQVRLRHTLSEQRSEWQQRIQATLYHHGCPQRRGLMVGDGRAWLAAQPLSEAAREQVTVALAIIDALETQIAPLDKQLRAYARRQPGCRALMTHYGIGALTAVTILAELGDCTRFSSSRHAVRYAGLDITVHQSDQHRSPGHLSRQGPPALRWALYEAAQVARRERSPDREYYQATKERIGGNRACLSVARKLLKRSYHTLRELGEEALAPPA

SEQ ID NO: 203198 - protein, 409 aa, unidentified
MDIIPIYKRVIGLDVHQAQITGCAITEQADGSVTYERREFGGFKRDRKALAEWARSVGPDVVVMESTGIYWKSPYAALETVGIIAWVVNARHVKAVPGRKTDVADAQWLASLARAGLLKASFIAKADLRSLRHIARQRQKLGGMLASEKNRLHKLLTDAGIRLGVVVSDLHGQSARSMVKALIAGKAVPEVLSLASNRLRASREDIFEALQAEEITPAHRFCLTEIMAHIEELESRMARFEAQLLRSLHEAGYGVPLQLLQTLPGIDLMGAAMLLVEIGSDMSVFGSAQRLASWVGMCPGNNESAGKRKSGRIRKGNAWVRRLLCEFAQAAGRSRCALKDKFQALNVRKGHKRSIVALGHKMLRTIYAMLSKNTHYVDKTVDYEALMVARNAPRWLQMLVKHGFVPAPV

SEQ ID NO: 203199 - protein, 377 aa, unidentified
MTIDNAVGIDVSMHESTFVGLRRPDEVVLRSRLVPHTADELREIAGEILALPGSTVAFCECTGVYHEPVVKSLRDAGVAVVALNPLLVHKFGGNTLRKVETDKADAKKIALYGLTWGYKFALSVGEDPVRVTLKAVSTFSLPNRRQLSAIIFTHCPSGCFRVCPRCLAVRIATTALSSGRISLMSSLMQNVSAGSAWRSSMSVTKSGAKNTDTMRFGRLKSGTAAVYLKRMVELAKSLPEYETVALLYGCGDATGPQLIAEIGDVRRFAERKGSKSLVAFAGVSPGDSQSGTYDAVSNPIEKRGSPYLRRALFCAAKAYLMKSPADEPVYKTLDKKRAEGKKYLVYMTAAMNKFLKVYYARVMEQYDRLSVGEVIPA

SEQ ID NO: 203200 - protein, 313 aa, unidentified
MSEQYVGIDVSKDRLDIAISDGREFHLGNDEPAHRQLCELLAAQAPRLIVMEASGGLERTAAAELAASGLAIRVVNARQVRDFAKASGRLAKTDRLDAKVLVAFAQAMKLEPREVVSEELQELQALIMRRRQLIEMLVMEKNRLRLARREIKQGLKKHIEWLEQQVREADQDLGIALRKNGVWQEKVELLASVPGIAQLTALKLLASLPELGTLNRRQISALAGVAPFNRDSGRWSGKRCIYGGRALARAALYMAALVGVRHNAVLKAFYQRLRAAGKPAKVALVACMRKLLTIINSMIRHRQPWSPKLLEMA

SEQ ID NO: 203201 - protein, 386 aa, unidentified
MILKLEGGENMSHVSGLNTKTIVVGVDVHKYSHTAVAIDCFGQKLGEHEFGNDYLTQFVSWLDSLGVRASLLVALEDVNGYGVHIVRQLADENIPMRYVPGILTERHRKQSIHREKSDAMDAWRVAKVILTNYEETLPAKESIANQSERMTATNLGFFLVERRSLVSEKTILKNQLHAMIHQYLGDHYMEGFAKAFNPKAIACFLKELKPNKKSIDPTQLPLVKSIHRRLIRLKLLEHQIVEIDEEMRKVAKESEPVRALRQNVIGCGHITACTLLAEVTTIKRFNTKAQFARYAGIAPIHKSSGSHNRLYTSPYGNRKVNKALHTIALYQISRTNDLTNPGRLYYEKKLAEGKTKLWALRCLKRQLANRVFQTLKHEYQARQPSS

SEQ ID NO: 203202 - protein, 345 aa, unidentified
MKVSTIGLDIAKNVFQLVGLDKHGKEVLKKRLRRSQVLEYFAKLEACVVGVETCSGAHYWAEQLERLGHQVKLMSARAVKAYRSKTKNDYNDARAIAEAATREQVRAIAHKSAGQLEAQALHSARELVKSQRNQVTNSLRGLLAERGVVIAKSLKALGERVPEVLEDAQNGFGDGFREVLADLYERFRDLQARLGQYDRRVARLQAQDEQALLAARTPGIGVLTSTAVGAKHGDLSQFRRAEDFPAALGLVPRQDSTGGRTKLLGINKHTDAYLRTLLIHGARSVLSHAHKTPHDPLCRWALAVAARRGQKVAAVALANKLARITWAVVRSGQPYDPNKLRPRAA

SEQ ID NO: 203203 - protein, 423 aa, unidentified
MEVLHECVAGLDVHKDSVVGCVRTVSGDKTTREHRTFDATTDGLLALLEWLTSCRCELVAMEATGVYWMPVWRILSDGAFKLIVVNAAHIKAVPGRKTDMKDSTWLADLAAFGLLKASFVPDEEQHELRALMRTRKQLVREQTRHVQRIQKTLTEANIKLDSVISDIMGRNGRRMIEAMITGVRDPRKLAALADQRLKATPKQLYDALHGRLTDHHRFLLQLHLGQWDTLDATIKGVDREVATRVFRMDTEGMAAKANFSDLIDQLVTIPGVSRLSALTILSEIGTDMSRFATAGHLVAWAGMCPGQNESAGKRKRTRLRKGAPWLKTMLVQCAWAAKRKKDSYYKAQFFRLQSRRGPQKAICAVAASLLTAIYHMLKDGTIHQDLGSGYFDQRPPEIKVKRLVNQIAKLGFEVTLQPIAKAA

SEQ ID NO: 203204 - protein, 325 aa, unidentified
MNALPVLGIDIAKAKFDVELQFKDKPYRRTFCNQAADFAKLNAWLHQLGAPQVHACLEATGVYGDELALFLHAGGHVVSIVNPAQIKAFGQSELSRTKTDKADAALIARFCHEKRPAAWTPPTPEIRELRALVRRLEDLQQMLNQEQNRLSSGLLSESIASSLQASIAFLKAQIKQLLKQIHAPIQQHPDWARQQALISSIDGLAELTAAKLIAEFQDILGYGGGRPLAAQAGLTPRQHESGSSVRGKPRLSKIGHARMRKALYMPAVVAMRHNPIIREFAEHLRQRGKHTMLIIGAVMRKLLHLVYGVLKSGKPFDPHYLKTGA

SEQ ID NO: 203205 - protein, 323 aa, unidentified
MSKKATTKRRSFIGIDVSKKLLEVGVHQSDYHFRCPNDPQNFPALITELISLRPARILLEATGGLERPLLQALHAAGLPVVVVNPRQVRDFAKALGILAKTDRLDARVLAHFAAAIKPALRPVKAQQETELDALVGRRTQLSEMLTQEKNRRGSAATKATRDDIEEHIEWLEDRIQELDEKLKEQLERSAIWQQKDQILQSVTGIGFVTSLALLADCPELGQLNRHQIAKLAGVAPLNRDSGQQRGTRHIYGGRAQLRCKLYMATLAAIRFNPVIKSFYQRLITKDKPKKVAIVACMRKLLVIVNVMIRENKLWNLEAHQLSA

SEQ ID NO: 203206 - protein, 309 aa, unidentified
MDAVYVGIDVSKDRLDVHVQPSGESFSVARDGEGVAVLIARLQPLAPRLIAVEATGGFEIIVAASVGGAGLPLAVVNPAQVRHYAQALGKRAKTDAVDAEVIARFAEATKPEPRPLPDDATQLLADLVARRRQIIVMMVAERQRATRLPKRLKKSCERVIRMLEKELAELDREIDTAVRGSPAWCAKEDLLASVPGIGSITARTLIAELPELGQLDRRKIASLAGLAPFTRQSGKWRGKAFISGGRASVRTALFIATLSAARHNPTIRAFYKRLTAAGKPKMVALIACLRKLLTILNAVARDQKPWQNA

SEQ ID NO: 203207 - protein, 363 aa, unidentified
MIMIGADSHKRTHTVVAVDDVGRRVGEKTVRANTDGHLDLLAWSRRLVDEAALGTSVTFALEDCRHLTRRLEADLLAGGGRVMRVPTRLMAEARKVSREPGKSDPIDAQAVALAALRHPELPVAELEGPAREVKLLSDHRRDLVGQRTRICCQVRWFLHELDPDLEVASRGLRRQSLVADLLAQLNRFDGVVARLTGELLLRCQDLNRQITALEHELRDLVRQLAPSLLAIPGCGVLSAALIVGETAGVHRFRDKDAFARFTGTAPVPVWSGSSNGKVRLNRGGNRAMNYALHMIAVTQARAIGPGRAYLDKQTARGKDRVAALRLLRRRLSDVVFASLRADDLASRPGARVNQAPVDLPAAA

SEQ ID NO: 203208 - protein, 411 aa, unidentified
MNPVVGLDVAKGESQVQAFLDKKQPYKKGFKVAHTLEGLASLLDFIREVENVSGGRPPIVLESTGHYHTPVVQYFEDRGYLLIIVNPLISYRAKSSSLRKVKTDVIDARHLCELYYKEDLEPYKQRGIQLLNLRNLTRQHENITGLLVQTKLQFQAVLDQVFPEYRGVFGDLHSYVSLLTLQAFPTSEEILGTGEETVAKKIKELCKSRSQKWADSQAEKLMAAAVQNPFQKNLYHSLTLSLDMYINMLLEYKKHLSKLEDEIDALAKGIEECKIIQSIPGIGEKIAATIISEIGEIDRFNHPKKLVAFAGIDPSVFESGTFKGTLNRITKRGSSRLRHALYMAVKCAIRDCRKKKTTDEIIPRNKRLREFYDKKREEGKPFKVAVIACANKFLHWIYALLKSKSTFQDLA

SEQ ID NO: 203209 - protein, 363 aa, unidentified
MSKLNMETTVETTIGMDLGDKYHYYCTLDGAGRKTAEGRIAATATGLERMFAAHPRAVVAIEAGTHSAWISRALEGWGHRALVGNPRKLRMIYASQTKSDVRDAEMLARIARADPSLLSPIRHRGRQAQSHLAILRSRDALVKARTSLILHARGTVKATGERLPSCSAEAFARRAREAVPADLHDALGPVLQTIEETTAKIRAMDRRIEALSAEAYPETESLRAVRGVGPVTALAFVLTIEEPARFAKSRDVAAWLGLVPRRDQSGDMDKQLRITKAGDKYLRRLLISCAHYILGPFGGDSDLRRWGQSLCTRGGKNARKRAVVAVARKLAVLLHALWKNDEAYDPLRQSRQRRTDAESSQAA

SEQ ID NO: 203210 - protein, 411 aa, unidentified
MIKENYIYVGIDLHKETHTAVMIDCYNQKLGEITFPNRPADFPKLVAKVKKCNTDGKTIVFGLENAYGYGRALAVWLIDKGYLVKDVNTAISHRQAKHRGAMYRKSDSDDAEAIALATLNMLDKLPDAYPNDAYWSLGQLVHRRDNIMKQRTRLVNQLHEQLCITYPSYKQFFNDISRPTALYFWEHYPSRKYLKGKSVEDLRAELVPVSHNKCSTKTCEKILDAVASDKVKNNAYQDARDMVTLSIVSDLQHYDKQLAEVDKMLEQMYKMLGCTLTTIPGVNVITAVKILAEIGDIKRFSNANKLAQFAGIAPLHLSSSGKGKDVATKQGNRRLQATIYFLAIQMVQVSSKGTPRNPVVRAYYEKRKAEGKTSQQALICISRRLISIIYGMLKYGTEYRMPVVENAGEKL

SEQ ID NO: 203211 - protein, 352 aa, unidentified
MQHFIGCDVHTRNQVVAWIEEETGEIKKRRLEHEGKEVKEFYAQFPRGTVVGIEATFPAYWFERLMGELGHELWVGDAARIRASEVRYQKTDCRDAELLLDLLRTGRFPRIWVPSLAERDLRQLLVHRMKQVRARTQVKNQWHALAISQGVCRKGKLWSVKGRKELESLALLPWAARRRKELLESLDRLDEQVRELDRAVEEAGRAREEVALLRTHPGVGRVVALAFVLTVGPVERFSNSRKRVSYWGLNPRENSSGGRQRRGSISKQGNTMMRWLLVEAAQTAARLDPQLRRTYQRLKKQKVSGVAKVAVARRLAVRLFWMLRTRHNYTQLVHMSGSPRSAVVPPEAEPTV

SEQ ID NO: 203212 - protein, 338 aa, unidentified
MGYYVGIDLHSNNNYIGIIDQEDRRVFKKKSINDLTEITKTLYPYKKKIQGVVVESTFNWYWIVDGLMEAGYRVHLANPSAIKQYEGLKYTDDTWDSFWLAHLLRLGILPEGHIYPKETRPIRDLLRKRLMLVHHKTAHILSMQSMVSRNNGIQMDGNAIKRMNVKELSGLFADKHLLMSASCNHQVINFLSRQIVKIEKTVLSKVRLQETYKKLLTVPGIGKILAITIMLETGNIGRFREVGNYSSYCRCVSSTKFSNGKSKGKGNKKNGNRYLAWAYIEASLFARRYSPEAQSWYQRKMSKSNRIVAAKALSNKLARACYYIMRDQVPYDSAKIFQ

SEQ ID NO: 203213 - protein, 340 aa, unidentified
MNEITTVGLDLAKNVFQVHGVDAEGTMVLRKQLRRGQVLAFFSRLPRCLVGMEACATAHYWARELRALGHEVRLMPAQYVKAYVKRNKNDAADAEAICEAVVRPTMRFVPAKTAEQQAAVLLHRGRERLVRQRTMLVNALRAHLAEFGVIAPQGLRNVGRLIAIIRDDDDARLPGLARLVLQVLAVQIEQLEAAIAALEKRLMGWHKSNPVSQRLATVPGIGPIIATAIAAMVAEPSGFRSGREFAAWLGLVPRQNSTGGKNRLGGISKRGNQYLRRLLINGASANLLRSKATNTDPWVIGLRRRRPSLVVAVALANKTARIAWAVMHRQENYQRMATAA

SEQ ID NO: 203214 - protein, 458 aa, unidentified
MKARRTKGKVKALELEVIRRDVAGLDLGSREHYVCAPAADGQGREVERFGATTGELYRLVQWLKARGVRSVAMESTGVYWIPVYEVLEHHGLEAVLVNARALKSVPGRKTDVLDAQWIQMLHSCGLLKGAFRPGDEVCALRALIRERSTLTQAAADWIRRMQKCLDQMNIRVHHAVADLTGVTGMAIVRAIVAGERDPQALAGLRDRRCHKSVEEIVAYLEGNWRSEHLFVLEQALKTYDFLQERLGQFDAQILLQLHALEHPTAAASPAARDVAPAKLSRMRKRGQQPLHEALRRMSGVDLTTIDGLGVETVQVVQSEIGTDVSAFPTEHHFVSYLKLAPKLAISGGKPVASKKRLSTSTRVGAALRMAATTLRYSKTALGAEFRRLARLKGAGVAVFAMARKLAILIYRLLKFGQSYVDQGVQAYEERFRQRRLAACHSMAKSLGLQILTPETTTP

SEQ ID NO: 203215 - protein, 342 aa, unidentified
MGEVSTIGLDIAKSVFQVHGEDVDGGVVIRKRIGRSKVLQFFGALPPCLIGIEACPSAHYWSRRLQGLGHTVRLMPPSYMKAYLKRGKNDANDAAAICEAVTRPSMRFVPIKSEQQQSGLMLHRSRQLLVRQRTMLSNAIRGHMAELGIISAKGRKGTAELIKIIGNDDRIPAAARFSLSVLARQYEAIAAEIGAIEKHIHAWHRSCEESRRLEGIPGIGPIVATALVAEVGDWTAFSSGRNLAAWIGLVPRQHSTGGKDRLGGISKQGNRYLRWLLIAGAMAVIRYARQHGTKRLWLVRLMERRPPKVAAVALANKIARMAWAIMVRGERFEESKLLPAAA

SEQ ID NO: 203216 - protein, 386 aa, unidentified
MQHATTLPAPERTCSRGDCATLFVSLELSRSTWVATTLAPGSSKMSKHTLVGGDGRKLLELLTRLKTRAEQRIAAPVKVVTIHEVGLDGFWIHRLLEANGVESHVVDPASIAVPRRHRRAKTDTIDGETLLRTLMAWQRGEPRVCAMTVPPSPSEEDRRRISRERAKLLQERVRHTNRIRGLLFGQGITNYNPLHKNRRKNLEQLRTGDGRSVPAHLKSALLREIDRLELVLRQIGEVETERDEMLQLAQPSSPAALLMRLKGIGAEFASVLYLEGLFRRFDNRRQLAAYAGLTPSPWKSGSIDQEQGISKAGNPRLRTTMVEVAWMWVRYQPASALSCWFRQRVGSKRGRIRRISIVALARKLLIALARYLSHGEIPAGAVMTAG

SEQ ID NO: 203217 - protein, 428 aa, unidentified
MPQKLDYAAFIGIDWADTEHAVCLLTPDGSSEKQVIAQKPEDLAAWAIQLRQRFGGKRIAVCLEQSRGALIYALMQYDFLVLFPINPSQLAAYRKALNPSGAKDDPKDARLLASFLREHGEQLRAWKPDDEVTRGLRLLTEQRRRWVEDRVAYCNELLQRLKESYVLALKFAGTELHALNFLALLEQFPSQRDLQRASPQQLAKWLPRRRRVPDDPPAEELLQARIAEVRNTPLLTKDAAILDVSRLAVMHLVAMLRQLNQSIASCEKRIAELMEKHPDTPIFASFPGAGPALKPRLIAAFGTDRKKFASAQDLQRLGGIAPVTKRSGKTCYVQMRWACPKFLRQTFHEFARCSQKKCRWAKAYVAMLQSRGKGYNQAIRALAFKWLRIMFRCWQTGKPYDDDRYLQKLTERGSPLLAHLAPKPSEVT

SEQ ID NO: 203218 - protein, 344 aa, unidentified
MEHYAGLDVSLELTSVCLVDGQGHVVREAKVASEPEALIRFLREQGLEIARVGLEAGPLSQWLHAGLIAAGFETVLLETRHVKAALSAMTVKTDRRDARGIAQLLRLGWYRPVHAKSASAQEVRSLLTARKLLQGKLLDIESGIRGVLRGFGLKVGAISRGRFEARILELVSGQTMLETVIGSMLAARTALQTEFARLHRSLLTLVRADPVCQRLMSVPGVGAVVAITFRSGVDDPARFRRSRDVGPHFGLTPRKYQSGELDVTGSISKVGDRMVRTALYEAASVMLTRTVRMSSLKSWAMAVAKRRGAKKARVALARKLGVILHRMWVDGTDFRWTNEQPVTA

SEQ ID NO: 203219 - protein, 350 aa, unidentified
MLIIGCDYHPGFQQIAFVDTETGEADERRLTHREEAEQFYRTLKTRRVRIGMEASGHARWFERLLVELQFELWIGDAAEIRTKRVRKQKTDRQDAQLLLKLLMEDRFPRIWVPDAANRDLRQLLWHRHRLVQMRTRIMNQLHVVALNEGVRRKKALWRPAGRSELESLVLAPWALRRRRDLLDLFDQLTPKIHDLTRALEEEVEKRPIARRLMTHPGVGVLTALAFELVIGTPERFGCGKQIASYVGLVPSEESSGDRLGHISKQGNALLRFLLVEAAQVTVRSQPQWRSKFFHLAMRRGRKIAKVAMARKLAVHLYWMWRQDWTTVSLKSSVRTRESPYIAMVRSRSLA

SEQ ID NO: 203220 - protein, 400 aa, unidentified
MALTPLAHLAVWLAHSVLAGHRPPSAWLDRGVDRFLKLRLPAAVPTVGARREEGSVITIGVDPHKSSHTAVALDETGQVLAELRVQVDRGTGRRLRRWAERWPERIWAIEGANGLGHLLAQQLVAAGEVVLDVPATLAARARQLDRGHGRKTDGIDAQTVAWVAQRTPALRRVTAEDHAGVLRLLSDRRDELVAERRRVVNRLHRLLRDLRPGGAPIELSATVAARLLGATRPHGAANVERKAMARQLVADLRPLDRALADNRHRCAAAVTASGTTLTKVFGISDVLAAKILGHTGDVARFGTADRFASYTGTAPVEVSSGELTRHRLTRSGNRSLNNALHLAARVQVLHPGPGREYYQRKLAAHKSSTEALRSLKRQLAKVAYRHMVADRARRPLSSLT

SEQ ID NO: 203221 - protein, 378 aa, unidentified
MHEKQKHIYVGVDLHKQQHVAVIINCWQEKLDEIKVENKPSAFSTFLLDMDKLTEEGLTPVFGLEDVGGYGRALAQYLTDHGQVVKEVNPALSYAERKSHVTVQKSDSWDAECVARILVRQLSHLPDAKPHDLYWSIQQLVTRRNALVKAQGALKNQLHIQLSHHYPSYKKFFSEVDGKTALAFWERYPSPSCLEGVSIKQLTTFLLEVSHNTCSVKKANEILKLVIEDGNTTKEYQETRNFLVESFVRHILFGKQEIGKVERELKELMSLLDFQLDSMPGIDLVTASALIAEIGDVRRFPNANKLARFAGIAPVYFGSGGKGKEQKSKQGNRALHALFYNLAVQQVQVAKGSKLPRNPVFHAYYQRKLKEGKTKGQA

SEQ ID NO: 203222 - protein, 316 aa, unidentified
MEAPAIFIGIDISKARLDIAMRPSGECESVTHEEGAIQSLVKRWSQTRPTLIVLEATGGLERSISRALASAQLPFVVVNPRQVRDFAKATGQLAKTDRIDALVLARFGEAVRPAVRPLADEASQELKALSARRRQIIEMMVAERNRASRAPKSVGKRIDAHIRWLEAELDRADKDLDQSIRQSPLWQENEDLLRSVPGIGPIVSRTLLAELPELGQLNRKQIAALVGVAPLNRDSGQFKGRRTIWGGRAAARACLYMAALVASRHNSVMVAFYTRLRSAGKKPKVVLVACMRKLLTIINAMIKHRTHWSEFNSQTT

SEQ ID NO: 203223 - protein, 412 aa, unidentified
MGKSNIEYEQVIDRGCGLDVHRDTVVATVMGKGIKTETQTFGTTTSSLNELGVWLESLKVTDGAMESTGVYWKPVLHVLRTYPVNLIVVNARHIKNVPGRKTDKADSQWICKLLISGLLKGSFIPPENIQELRDLHRYKKKLIGIVASEKNRIIRVLEDANIKLSSVVSDTSGVTASYLIKGLIEGRKDLEKLIAECYHRKLQANPGQIKEAITGRLTAHHAFILKSMQKHIASVEEQIAEIDVEIEKYIKDFEKEIELLQTIPGVGKGGAIGIVAEIGVDMDVFPSEHHLASHSGMCPGNNESAGKKKSSRTRQGNKHLKATLTELAWGATRTKKSYYKAKYESMVARRGKKRALIAIGHKILCASYHIIKNKEAFKDLGYEYLAERRKKNRLEYLKRELKEQGYKIEKAA

SEQ ID NO: 203224 - protein, 435 aa, unidentified
MTLINFVAANQKYYAFNLLSVFIMVFWSVQYLLQHLLVQTQVSHQLLQPLILILQLPQTPQFRHARPGKFFLPVNGMDYFLPLRLTVRNVLTRRITMNILFLGIDLAKNVFQLCGLNQAGKPVYTKRTGRKELLQTLANIPACLIGIEASTGAFYYWQREFEKLGHKVKVISPQYVRPFVRGQKNDGNDAQAIAVALMQPTMQFVPPKSPEQQDIQALHRARQRIVNHRTATVCQIRGLLLDRGIPIGSAVSRARRAIPLILEDAENGLSSRMRRTIAELYDLFNDLGRRIHFFDKEIETVFRQSEACPRIAKVKGIGPKTATAVVAAIGKGTEFKNGRHFAAWLGLVPRQHSSGDRQVLMNMTKKGDKHLRTLFIHGARAVVRVATNNNDGHMNQWVNQLKERRGFNKTTVAVANKNARIIWSMLRNDTGYQVV

SEQ ID NO: 203225 - protein, 400 aa, unidentified
MLSIGIDVSKGKSTVCGMKPGGEIVYAPFEVQHTREGMLELVSLLRSSCEEVRAVLESTGSYHCPVVAALLENGIFVSVVNSLRMKRFCSQSIRKVKTDRIDAMQIALYGLAYWQELQPTKLPEDTYRELQLLARQYYQMTSLLIKAKVDFNAICDQVLPGMQELMNDHAGRHKLSDFVLRYRHTTHILEMGETRFRKDYCKWAEKKGYRNCERMAALIFATAQNGIPVLPNAPSTQIVITEAIRVLHTVEASRDAILTQMQALAKTLPEYSLVREMPCIGDTLAPRLIAEIGDVRRFHSKRALIAYAGIDAPPYQSGKFCANNRHISKRGNRYLRKTGYEVMQSYVMHKPANDPIFTFIEKKRGEGKSGKLAMVAGLNKFLRVYYGKVTELYRSLPAIE

SEQ ID NO: 203226 - protein, 309 aa, unidentified
MKQSVVYIGIDVAKAHLDVAWAGTFRRLPNERSGHAVLVRWIKQSATPVQLICEASGGYEQGLLESLEKSEVKVTLVQAVRVRQYARAAGILAKTDQMDAKVLAAFGSAMQPPPTPPLCAEQKRLRQYEAQRRHLSRVLVAEQNRLAQLSCAELRNLSRGLISKIKKQIETIDTRIGDLIAQDQTLREKAQKLTAIGGVGVRTAALLLAQMPELGQLNRRQAAALAGLAPFNHDSGSIRGKRAIFGGRRALRSGLYMAALSAARFNPILSRFYRRLRTKGKPHKLALTAVMRKLLLALNQTLKPIPSLA

SEQ ID NO: 203227 - protein, 379 aa, unidentified
MTSTEVAAEARETVYAAIELSKKTWVLGIAFPDRDRPSIHRVSGGNVAELVSRLRVAARNERRILVCYEAGYDGFWLARVLAKIGIECRVLDPASIQVNRRARRVKTDRIDVLALLRALIAIDRGERHVCAIVRIPSVEEEDARRSHRERQRLIRERTGHINRIKGLLFAQGIRDIKPKLRRTRVDFAALETAEGRPLPDRLRRELEREYARLALIETQLREVEKERDMADAQDPTVERKRQMLVALQGVGGTSAAILAREVFARPFASRRQLGSYLGLTPSAYDSGSVTRCQGISKAGNSWARRILIEVAWLWQKHQPVSPLSHWYTQKTSGQSSRIRRIMLIALARKLAITLWRYVETGLVPEGVVIAEAEPRSAPA

SEQ ID NO: 203228 - protein, 343 aa, unidentified
MRIVAVGIDLGKTVFHLVAMGERNRVLVRRKFSRQQLLAYTANLEPTLIGTEACAGAHFLATALCAQGHDVRLMAAQFVKPYRKSNKSDFLDAETIADAVQKENMRFVPVKTDEQLDLQAMHRVRTRLVQRRTALINEIRGFLLERGIIFPAKPIHLRKQLPGVLEDATQNLTPRLRWLLSELAEEWKELEARIIAISDAIERISTSDPLCQRLRKIPGFGPLVSTATVAAIGNGSSFRRGRDFAAWLGVVPRQYSTGGKTALYGMSKRGNRYLRQLLIHGARAVLIRVKYDTAGLGQWIHKLAERAPRNKVIVAIANKLARIAWAVLAKGEPYRHQPLAAAV

SEQ ID NO: 203229 - protein, 420 aa, unidentified
MSDDQFTWFAGIDWGSQYHRINLADAAGRHQAEHDVRHDGAGLQEMCDWMVEYSGVPPHQIAVAIETPHGPVVEALLERGFAVFTINPKQLDRFRDRFSVAGAKDDSRDALVLRTSVRTDPQAFRRLQLDDPLIIELREFSRLRDELQQEKDRLANRLRDQLWRYWPQARELSDDLAAGWFLDLWEKVPTPAEAARVSDKAIARILAAHRIRRIDAPEVLRILRQPPLSVAPGTVQAATAHIRSLIARLRPVNQELKQTQRRLDQLCNAIEAAAEQTPGQLCEQRDVSILRSCPGLGRINIAALLAEAWQPLQRRDYHALRTLCGAAPVTRRSGKSCIVLRRYACNKRLAEAVYHWARVATQHDPISQRRYADLRARGHSHGRALRGLADRLLYVLCTLLRRQTLFDVDYKITHPAAAAA

SEQ ID NO: 203230 - protein, 453 aa, unidentified
MSNERSRSKPSGLPIIHPFAAGIDIGSRFHVAAVSPDLCDEPVQTFQAFTSDLERMADWLVATGTKTVVMESTGVYWVAAYEVLESHGLEVILANAREARAVPGRKSDVNDAQWLQRLHACGLLRASFRPGRDIAELRAYLRAREKHTDYAAAHIQHMQKALTFMNIQLHHVIATITGVTGMRIIRAIVAGERDPDALAAMRDVRCKESLETIRSALVGNYQPEHVFALKQALALYDFYQQCIDECDAEIERTMAGLNIGKPMPDAPLPKAKHRSKLPSDPKFDARTALYQLTGTDLTQIHGIGPFLALRFIGECGTDFSRWRTAKHFTSWLTLSPGCKISGGKVLSAHTRKTSSRLTVAIRLAAVTVGRSNTALGAFYRRLAGRIGTAKAVTATARKIAVLFYNAMRYGMDYRDPGADHYEQQYRDRVIKQLHRRAAQFGFALQQQESTANR

SEQ ID NO: 203231 - protein, 410 aa, unidentified
MLFIGNDWAEAHHDIELVDEDGRRLARRRLPEGVDGLATLHALVADHLADDAEADQVLVGIETDRGPWVQALIASGYTVYAINPLQVARYRERHATSGAKSDPGDAHVLAEIVRLDRAHHRPVAGDSALAEHLKVLTRTHQSMIWSRQRQTNALRSMLREFYPAALAAFGDELAGRDALAILTLAPSPEAGRRLSLSKIAAALRRVGRQRNLETTAERIQAALRAPQLEAHPGVVGAYTTAVRSLVAVIAELVTQTEVLRAEVEAGFGRHPDTEIYLSQPGLGAILGARVLAEFGDDPDRYADPKARKNYSGMAPITRASGTRRTVLARYARNRRLADALYHQAFTALGVSPGARAYYDRQRARGATHHQALRALANRLVGILHGCLRHNARYDEATAWHTETTGGVAAA

SEQ ID NO: 203232 - protein, 387 aa, unidentified
MSQPIATLIPAAVDYERTLVLAIELSNKSWVLAAQVPGLPHTKAKRTVNPEAEALLAAIAGYRARAAATGRSIERMIAVYEAGWSGFWLARWLMRHGVEVHVIQPSSVPVDRRMRRAKSDGIDAELLLRTLLAWLRGEPRVCSMVPVPEEADEDARRCVRERSELISERVGLTNRIGAVLATLGVSDYNPLLRNRKRRLTELRTGLGEPLPRNAHAKIERLLARLELVLAQIAELERERDAVVETEASDKASKMIQQLTSLRGIGVQSATVLVREAFVRRFANGKALGSYAGLASSPFNSGGIEREQGIGKAGNRRVRTVMVELAWLWTRYQTNAAQVCWFRERVGPTGRRVRKIMVVALARKLLIALWRFVTDGVVPEGAVLKPAA

SEQ ID NO: 203233 - protein, 309 aa, unidentified
MATSSYVGIDVSKDRLDVAVLGEECTWQVKNTPDGIVQLVEQMQEMPPELIVVEATGGYQRSVVEALFHAGLWVAVVNPARVRQFARACGWLAKTDKLDARVLAEFGRRVPPRRYEGKSEAEKQLSALLVRRKQLEEMLKAEQNRLRTISPSLRGSVERLIAYLKEEKKLLDEQIQQLLKEQKAWQEQCEILSSAPGVGMVTTATLLADLPELGKMDRKKIAALVGVAPMNSDSGKKRGYRKTKGGRGDVRSVLYMSTLVATRYNPLIQSQYQQLLKRGKLKKVALTACMRKFLTILNAMVRDQQPFRV

SEQ ID NO: 203234 - protein, 344 aa, unidentified
MEHFAGLDVSVKETSVCIVDETGKIVREVRVASEPEALLAILKSPAYHFKRIGLEAGPLSQWLFSGMAEAGLPVICVETRHMRAVLKAQINKTDRNDARGMAQMMRVGLYRPVHVKTLHSQKLRMLLTHRKLLQSKAIAIDNDLRGTLRNFGLKVGMVGTVRFEARIRKLVENLPDLAALVEPLLVVRRTLREQFCILHRRLLTIVRDDEVCRRLMTTPGVGPVVSLTYRATVDIPARFRKSKSVGAVFGLTCAKYQSGEVDWSGRISRCGDEMMRVMLYEAAQSMMRSKKWSWLKAWAMQIARRRGMKKAIVALARRLAVIMHRMWVDGTEFRWTREQAAAPA

SEQ ID NO: 203235 - protein, 328 aa, unidentified
MQGKVSSERTAMATVYVGIDVCKEWLDIHLHPLGRSFRVTNDTAGLRRLKRELDALDQMPRSALHIVMEATGKWHRAVQRSLHADGFYVSVVDPLRARLFAKACGFLAKTDRLDARLLAIMGEALKPAQTPPQDQALEALQELVNARSAANGERTALSNRMKTAVTAFLRKELTRRLAALDTHIARLDAEIERSIGAEPEMRRRLDILISIPGIGAVTAASLIAGLCELGACSGKQAAMLAGLAPIACESGERAGHRAIRGGRPAPRNAIYMAALSASRHNPDLTHFAERLKKAGKPNKVVLVAVMRKLIVLANTLITKNRIWTPNPP

SEQ ID NO: 203236 - protein, 390 aa, unidentified
MYLIGIDISKFKHDCFIATETDEVIKESFSFENNAYGFNYLLSVLNSLDPSKEKRIGMESTGHYGINLMRFLHNNKFSFMVLNPYLTEKYRQATSLRRTKTDKIDAHIISKMLLFLDYQTYSSKSYHISSLKSLTRFRLRMVEARTKLKLRVQNILDLTFPEFPKYFSNIFGVLPMRILSTYPSPEKLAKVDINSSYLALKEGIKGSYSFQKFILLINDAKNSIGKSNENYELELLSSIFLINCYNSEITKTEKQIEGIMNQYCFKILTIPGIGIQSAAVIISEYGDFKSFKNSDQMLSFAGLEPSVSQSGTQSFNGHMVKRGSAHLRYSLMNVANTVVKYNIVFSNFYWKKRNEGKYHRVALSHVVKKLLRLIFHLEINNLSFDSELLK

SEQ ID NO: 203237 - protein, 344 aa, unidentified
MTYYAALDVSLRSVAICIVDDQGTVCLERTVSSEVADIVACLKGFDHAIEMVGFEAGTLSQYLSHGLEADGFNAVCLEARQVNAALSAMRNKTDRNDARGIAQILRTGWYARVHMKSRASHYSRALLSSRKAVLQKCIDLENEIRGLFKVFGIKLPASLGHGPYDAHVRPLIEQDADLAAALLPVLEARLMLYRTYLELDRRVKMAARNDAVCQQLMTVPGVGPITAMTFKAAVDDPRRFQRSRTVGAHFGLTPRRYQSGEHDNPGRISKAGDADVRAALYNAANALMGRTQRWSSLKAWGVRLQRSKGRKRALVAVARKLAVIMHRMWMDGSRFQWGKEAAEA

SEQ ID NO: 203238 - protein, 415 aa, unidentified
MALSVLYARCAGLDVHKQSVVGCLMLTAPSGKVRKEVRTFGTTTASLQALANWLASRGATHVALESTGIYWRPVFNLLESHFEVILVNAQHMKAVPGHKTDVKDSEWIADLLRHGLLKASFIPPKPIRDLRDLLRSRKTLVQQRAQAINRVQKVLETANIKLSSVATDVLGKSGRDMLDALLAGVSDAETLAELARGRLRAKLPALREALDGRVDATHRVLLRHLLDLIDFLQGQVDRLSGEIEQLLVPYEGHLARLMQIPGVGRMAAATIVAELGTDMSRFPSAKHLASWAGVAPGNKQSGGKRHRASTTKGNRHLRAVLAEVVWVISHTKDNYLSAQYHRLARRIGTQRAIVAVSHSVLTIAYHLLRTQQDYHDLGPHFFEALDTTRQRDTAVRRLEALGYQVTLQEKMEVPA

SEQ ID NO: 203239 - protein, 419 aa, unidentified
MSFKILKNNCCGLDVHKTWIYACIGITDSNKRTEYKQARFSSFTKGLNELCDWLAKYNCNDVCMESTGKYWIPVFNILEKNNIWVTLSHPKYTKPQKGNKTDRKDAKWICDLYMCGMVKPSFIPPADIRELRDLVRYRFKLTCMITGEKNRIHNCLTVSNLKLDDVFSDIFGKSSRSITEQILQHPGETFDVDPFVDGRCKTPIPEIQAAVDGAISTEQAVKLRHCLNHIDELELHKAEIEREIFRLSEKYESVLTLIRTVPGFDKNPLTAIQVLSEIGADMSVFPTAKNLVSWAGCCPRNDQSNRKIKSTRISRAGSYFKPVLVQIANALIKSKKHPEFTTRYRRIKARRGHKKAIIAICRMLLTAIWHILTDLKPYTPEGYLEARPVNKEKVLTTSQALNLLKQRGYIIKDDAVPIT

SEQ ID NO: 203240 - protein, 347 aa, unidentified
MQNTSELYIGIDVHKKSWSVNLRTDLFDHKTFSMDADPSQLIRYVDRHFEGYQVKCCYEACCCGYNAYHQLSKAGWEVLVVNPPDVPTVNKQQQNKSDKVDCRHLCKQLQAGQLRGIYVPDEKQEQLRSLFRQRNNLTQALRRIKCHIKGELLYYNIQVPKEYDSNNWSKSFIAWIENLEWKYETGQESLQSKLRQLQFSYHEWLAVSNSLRAYVRKYYRKDYYLLRSVPGIGPLTAIGILAELGDIRRFRNLDRLASYVGLIPSVYSSGEVLQTRGLTPRSKRLLRSYLIEAAWTAVRRDMVLQEYYRSHSGKPANKIIVKVARKLLSRIWYVIRSEKYYQSGVKQ

SEQ ID NO: 203241 - protein, 349 aa, unidentified
MPILAEQFVHVIGVDTHKLRLTAAALNASGGCLELLEVGADARGYGRLLELGSRFSGPLLWAVEGTGSYGAALTEHLLANGQTVTEVDRPKRPPRRRGKSDEIDAIRAGRDALAMKRLTPPRRRQEREQLRILFTSRQELVSNRTRLANHLMQLVVTASEKLRSRFLDFGSHGAERLVRQCLASRCHPGMSAEDRTRLTTMRELAHMIRSLSADADRYEQEIAVRVEQMAPGLCAQPGVGALTAAQILLSWSHAGRMPNEATFAALAGVCPIPASSGQTVRHRLNRGRDRQLNAALHWVVLTRCRYHQSTRDYLARRTAQGKTLAEVRRCLKRYAARQLFKFLNRLDKA

SEQ ID NO: 203242 - protein, 389 aa, unidentified
MVVIGTVLIEEEDGSIKQETREFGTFKRDRRQMCQWLKDHGVELVAMESTGIYWKSIYATLERSEILTYVVNARHVKNVPGRKTDVSDSQWLAALARVGLLKPSFIPTKDFRELRIISRQRMKINQTLSAEKNRLNKVLDDAGIRLGGVASDIDGVSAQKIIEGIIDGKPIEELIACVRGRLKAKTDDLRACLDEELSERHIFLLKTLQEHIQFLKSKLEAIDAYLFAAMSPYQKQWEILQTLPGVDKVAAMVLIIEIGIEMERFGSADQLSSWAGMCPGNNESAGKRKSGKTRKGNHAIRSILCEIANAARRTKSQFKGKYESLVIRRGHKRTIIALGHKILRVIFVMLKNVKPYLDPGIDYEELMVDKNAPRWLQALKKFGYLPQTV

SEQ ID NO: 203243 - protein, 355 aa, unidentified
MTFVGLDLHKRYITACALDAGGAILGEVRRMPVSLGALWDFLGSFPAPVTVGMEATLYWQWLHDELECAGHVVRVADARQVKLIWQARSKTDPIDARKLAELLRVNLFPAIWIPDANTRRRRQLLHGRAFLVRERTKIRNRIHGRLTAENLLFPRSDLYGRAGRAWLATIPVSPTLRSQVDRLLRVHDALTIEIHELDEEVRRLRRDHPMIERLHTIPGVGLFGALFLVAEIGAIERFASSHQLAAYAGLVPSTRSSGGKTTHGGVGYASNRWLKWILVEIVQTLKQAPGPVGDQYRRLLRGKGKPKATTAAARKLCCYIYWMWKDGVSYEEWLARRGREVWSEVRPVQRMGAVA

SEQ ID NO: 203244 - protein, 323 aa, unidentified
MAPQPIFVGIDVGKDWLDVAHHTSEEVRRFHNNEAGILELVTHLKTLRPHLVVLEATGGFEFPAAAALAAATIPVVIANPRQTRDFAKSTGRLAKTDTIDALGLALFAARVRPNVRELPTEEARALDAIVARRRQIIDMITAEKNRLGFALKPVQKGIEKHIRWLERQLHDVDHDLDSMIRSSPLWAAKSDLLQSVPGVGPNLSRTLIAELPELGRLSHKQVAALVGVAPISRDSGKMRGKRMIWGGRAPVRSALFLSVWSAAKWNPVIRLFYDRLRANGKPPKVAQVACMRKLLTILNAMARDGHSWDPSIPLDQLRLQHSC

SEQ ID NO: 203245 - protein, 368 aa, unidentified
MKKGSTAATMQSRNFSAQQKLTIGLDLGDRNSWYCVLDEAGQIQLEQRVRTNAKALQAVFGAMPRSRIALETGTHSPWISRLLSELGHEVIVANARKVRLIGESRKKDDRLDAQTLARLARIDPELLCPVKHGSAQAQADLMMIRARAGLVRARTGLVNTVRGLAKSYGERLRGCNVRNMNPDKAEGLSPELQRALEPLLSGIEELSERICEYNDRIEALAQESYPQVALLKQIKGVGTLIALTFLLTLEDPHRFHKSRDVGCYLGLQPGRRKSGQSEPQLHISKEGDPYLRTLLVQGAQHILGPFGVDCDLRRWGLKLAERGGRNGKKRAIVATARKLAVLLHHLWVSGEVYEPLHNSSTTAAAAAA

SEQ ID NO: 203246 - protein, 362 aa, unidentified
MKQYIGCDAHRKYSVFRIQGESGPMGPAIRVNHERGELERFLGSLEPGSPVALEAGLNWMWMVEQIEKANLEPRLTNPLEAKKRMGGVNKLDSSDAAGLLTLLRSGTLPEVWIPRGGQRDLRGLVRSRLVLRRHVSGLKCRIHGVLTQYGLKPLADEEDETEYRDWFTVKARAALLNAMEELPSATREAMRQEYLAMWELERHVKSLETAIQARAGSLGWMRLLRTMPGVGLILGATIWTEIGEVRRFANAERLAAYAGLTPRTHSSGGKTWRGPTSRAANHYLKWAFVEAANVIAAQRRKMEKKHPHAVRLYERVKGNTKLSGKAKVAVARHLAEASWWVLTTKQFYREPTSAAVASSNNG

SEQ ID NO: 203247 - protein, 329 aa, unidentified
MKKLFIGIDISKDVFDFYGISETGETVIPSGILFNSKKGIKSFLTMVKKYTGYEPHMCMEHTGLYGYLLMTEFSSASMRFSVINPLEMKLSSGLARGKNDAVDALRIAKYALANRFDLKPFTLASREIRRLKILMAMRDGQVKIMVQQKNSLKAFKLVAADISLAKELKENQKLIDAHQKVIAKLEKQMLEIIRGNVQLSDSYRKITKVIGVGPLTAIKCIVETENFSKFDDPRKFACHSGLAPFEYQSGSSVRKRARTSPISDKNMKAILFKAASSALQHDPQLKNYYKRKTEEGKHKLSVINAIANKIILRIFAVVKRDEPFVKLSA

SEQ ID NO: 203248 - protein, 336 aa, unidentified
MENFYFIGVDVSTKKLDICVMCGSKVVTEEQVTNHQQAILKLINELKRDLNMTNGDFIICAEHTGQYTYPLICVCKSIDCKLWLENPTQIKYCSGLTRGKNDKVDAKRIAIYASRFCDQAVCYKRPSEELTRLNQLEAERTLYLVDLSKYKAQLTDQKDFMPKALYKDKSSRLKMLIKSLEQVLKAIEDEMNRIIESTKILSRQMDLLTSIDGIGRVVAMNMIIATEAFTRFDNPRQFCCYAGVAPFAYTSGSSQHSKNRVSQRACKYIKTLLHMSAVAITHRKSGELKAYYERKVDEGKNKMTIINALRAKLVARMFAVIKRDEFYSPILSENFC

SEQ ID NO: 203249 - protein, 418 aa, unidentified
MLVAGIDIGAESHHVAVVDRAEAVVVKATAFAENAAGYQELFALLARAGARGGADLPLAAASAEQERTLVVMEATGHYWQNLFAALVAQGYAVALVNPLRTHRFAGEELARTKTDSIDCLQLARFGAQKRPAVTCLPEAAVGELRELVRLRARLMQDVVDRVNQLHRLVDLGFPEFTRYLKNLNTQLATAILRQYPTAAAFRGLSYKRLARLSYDGRHRVGEELARQLIAAAAVSVGSQHTTAHQTGVRYACEDLETLRQRLKRLDGDITAGLQQHQVGKLLTTIAGIGDNTAAMLIAELGDPARFHSAASLAAYVGLCPGHRHSGQHQPKSSSLTPIGNRRIRQALWMPTLSAATCSNAWLMAFYRRLIERGKPHKLALIAAMRKLLAAIYSVAKHRRPFVPFLHSQPLDDEVPARL

SEQ ID NO: 203250 - protein, 339 aa, unidentified
MGMQQVWVGVDVSAKMLQVAAASERQRWSAAVTNDADGHRSLIKKLRQMGREIFVGLEATGNYGLDLAVALHQAGIHVMRINPRAVAQFAKALLQRSKTDRGDADVILSFVQRMNFECWTPPSKAALQLRTLSRHIQAVKALLVEEKNHLHAAQVVSSTPRVIVSDLKRSIAAIEARVERLEEECLEVIGTNGELQERFNLLASTVGYGVTSTIKVLAELAVLPADMTARQWTAHAGLDPRQFESGTSVAKPDRISKAGNRYLRGALYLPALTTVRCNANVRAFYDKLVTRGKKPKQAQVAVMRKMLHAIHAMFRTNSAFDGEKFYSMQNPARVSAHAA

SEQ ID NO: 203251 - protein, 358 aa, unidentified
MIFVGIDVAKDKHDCFILNSEGTVLADVFTIANNRIGFETLLSRIQSCSQGESKIKVGLEATGHYSYNLLGFLLDSGLATYVINPLHTNLYRKSLSLRRTKTDRIDARTIAMMLMSDVDLKSYSNTAYHNEELKSLTRYRFDKVKERAKLKSSVARLVNILFPELEKLVSSLHIAVVYALLSNYPGASYIANANTEELAETLCTASKGRYTKSKTAEIQVAAGVSIGSKMPAKSMELKHTIALIRELDKEISEVESAIDKITSQMDSPIFTIPGIGRHMGAMILAEVGDFSNFASADKLLAYAGLSPSTYQSGQLQNCYAHMEKRGSRYLRYALFNAAKYVCLWCPTFSAYLEKKCDK

SEQ ID NO: 203252 - protein, 430 aa, unidentified
MKYNTQNAKIEAITEKTLVLGIDVGSETHYARAFDYRGVEYSKKPFKFSNTEAGFVTFKAWVLDIKEKHGKDKVIPGMEPTGHYWFNLGKFLQDNEMKPVLVNPHHVKKSKELDDNHPTKNDRKDPKVIAGLVREGRYMIPYLPDGVYADLRTASNIRFQLQAELTRIQNRINRWFNIYFPEYKTVYGKPDAKSGILILKEAPLPEDILTLGIDGVNQIWRDAKLRAVGKARAKTLIEAAEHSVGSKEGAVSARMEIRMLLEDYESRNIRLQEVMGLIEGLVNQIPMAEKLLEIKGVGIKTVSGFLAEVGDIRRFNDPKELQKLAGLALVENSSGKHKGKTTISRRGRKRLRYLLFEVAMSLVAKNPEFRELHNYYTTRRLNPLKKMQSLMAIAAKLLRVFYAILTKGVGYDPKKMVNDIRRPAAYAQAA

SEQ ID NO: 203253 - protein, 546 aa, unidentified
MHKFGAQLANSGIKSMAPDTISTVIHQGPRRAGRNSSPQVPVNNRAVREKNSCEKPLRRDYNGSGRIAPDGSRSYGPQLAKLNRSEPARLSAPALKSERTIAREAPSIRLTEGSAAVCGKPKGTPMMEFKELKHFAGFDWAKDHHCVVVVDQAGEIVSEFEFKHSAQGWKEFSERAAKLPGLGVAIETSSGPAVDQLLRRDFTVFPVNPAASQSYRQRKASSGTKSDHHDAWALADALRTDGRGWKVLNPADPLSVQLRLLCKDEVALIEQRTQMVNQLQQALAEYYPAALEAFEDWTLDFTWDFIIEFPTPEKLARVKEHRWRKFLHTHHLWRPGTAEKRLEIFARATEFQGSSAVVEAKSKLAVSLCKVLRTLEQQLKEYRQQIEELFKNHPDHELFGSLPGAGKVLAPRLLAAIGTDLQRYGNELSVLQAFAGTAPISYQSGKIHKARMRWACDKFMRYAVHLWAECFWKYSPWGKVYYRKKRQEGKSHACALRCLAQRLLKILFRMILDKKPYDAELHARNQEKHGSWVLSLLNKPAPTPCE

SEQ ID NO: 203254 - protein, 315 aa, unidentified
MAKEVFVGIDISKDFLDVGVMPTGEFFRETHDVRGLKSLVKRLTALHPCLVVLEATGGYEMTVWAALEKAKVKVAVVNPRQIRDFARAEGQLAKTDRVDAMVLARYASRMQPEPRKLPSDEQQELGGMMARRRQLLAMISAEENRLSRAKSPLQRRIQSHVSWLRKELLDVDRDLSDRVSKNTEWRRKDQLLRSIPGVGPVLSRTLLAELPELGSLNRKQVAALAGVAPLARDSGLHRGRRVAWGGRAQLRGALYMAALVASRRNPVFSAFYKRLVTAGKPKKLALTALMRRLLVVLNAMVHQNAAWNPSMAASR

SEQ ID NO: 203255 - protein, 400 aa, unidentified
MNIIGIDVSQGKSHATLISKEAEKVTFKFEHNKSGFQILNSYIKSDTVIIFETTGVYSAQLTAYLKSKKVRFYELNPLEAKLRMASLRQNKTDKNDSFKLALLGATQLSEIKNHCNKQSTSPYDSLRILSLRYRQLIKCRTRIINFLRSGLEITFPELNKIFKNAYAVLALQMFRMYCHPDFLVGLTLKEMTNRVYQAVNKRIHKDVIQNYCAQVWLTAKNSYPAVPADSLEVEIISEYCDEIENYNKEIAYIQNKLIKTAASLDNFKFISSIPGAGQLNSALLLGFAGDISRFDNYKQLNAFLGLDLNRYQSGKYLKNDTINRRGSSQGRVVETDMIRSMLRNQGRIQNHLINYYYKLKKPPFNKHDKVALIACANHLNRTIINLVHTHQFYNYSKAIH

SEQ ID NO: 203256 - protein, 349 aa, unidentified
MQLTTIGLDLAKNVFQVHGVNEHGKAVLRKQLRRDQVVPFFANLQACLVGMEACASAHHWARKLQTLGHTVKLMAPQFVKPYVKSNKNDAADAEAICEAVARPTMRFVPVKNVEQQSVLALHRVRQGFVKARTAQANQIRGLLGEYGLVVPQGIAYIAQRVPALIEDAANELPGTFRLLVSRLLDHLKLLHQQVEEIEGQIKVWHRSSDASRRLEKVPGIGPLTATALVATVGDAKNFDNGRQLAAWLGVVPRQHSSGGKATLLSMSKRGDAYLRTLLIHGARSVIYRATQRAANDNWVVQPPAPTRPLPSDRVTRHGDTSDGGTSDGGTSDGGTRDGVPSEKGAAPAV

SEQ ID NO: 203257 - protein, 402 aa, unidentified
MTYDYVIGMDACKYFHHACVLDIDGTQVLSKRINQNEQSLRALFSAFSAYDHKVLVVVDQPNNIGRLTVAVAQDIGIDVRYLPGLAMRQLSRIHAGNAKTDIRDAYIIAHAAKNLPESLRSVDRVEEAFLQLKVLNGIDEDLARSYTRLINQIRSALVGCYPQFEQALRGQIIHRKWVLHLLARYGGPTKIKRLGKAKAAAFARRYKARNPEPVLDAIFAAISEQTVTIAGAHYAEMGVAMSAKDALLKLEHRQQIEKEVIKLINDIPHTQFLLSMPGIGPKTAAQILMTAGDMSDFPSAGHLASYAGLSPRTNQSGTSIMSNSPNRAGNKKLKNALWQSFCASIRFHERSQQFYERKRNEGKRHNAAVVALARRRLNVLFAMMHSGELYRDTPSSTNIATP

SEQ ID NO: 203258 - protein, 369 aa, unidentified
MAKPITYAGLDVHKDTIAVALAEAGLRGEVREHGKVPNTPAALKALTVKLATARRELRFCYEAGPCGYGIQRQLTEAGHECAVVAPSLIPRKPGERIKTDRRDAINLAKLHRAGELTAVWVPDQAHEAIRDLVRARQAAVRTLRQARQQLSGFLLRHRCHYHRPAWTQLHRRWLASLKFDQAVHHIVLEDCIAAVEAAMARRDRLEAHIEAVLPEWSLAPVVEALQALRGVRLVAAATLVAELGDITRFTNPRQLMAYLGLVPSEHSSGRTRRQGGITKAGNGAARRMLIEAAWSYRFPARISREQLLRQERLAKPICDVAWKAQERLCRRYRKLARAGKLPTVITAAIARELAGFIWAIAKQVQPRAT

SEQ ID NO: 203259 - protein, 311 aa, unidentified
MDKSKVFVGIDVSKARLDVGILPAHRNFSFANDESGVIKLAKHLRKKNPTLVVLEATGGYENVAVATLVASNFKVAVVNPRQVRDFAKAIGKLAKTDTIDSYILAEFARVIKPEVRPIADEFSRELSFLVARRRQITEMLTAEKNRLSNAPESIKPEIESHIIWLKNRLRDIDNNLSKTICNSPIYKKKIDLLKSMPGIGPVVSYTLLANLPELGTLSRKQIAALVGVAPFCRDSGTLRGKRTVWGERANVRSALYMSALVATKHNPVIKTFYERLIGAGKAPKVALVACMRKLLVILNAMLKHQTPWQVR

SEQ ID NO: 203260 - protein, 369 aa, unidentified
MVEQKCLLRPAVVRLAQKPGQEDQMTTIDYIGFDIHKKTISFCAKAQDGTILEEGTIPALRNKLLAWAKARPRPWMGAMEATLFTGWIYDLLKALAQELKVAHPPMLKAIAAAKKKNDKVDARMIADLLRCNLLPECYMAPVAIRDLRRMLRYRNLVVRQTTRMKNRMAGLLMETGVAYNKERLHGKAYFSELLGSLQEVPGSVVELLQLSRGQVEFFVAIQRRLLKGLREHPELSQRVMRLQSIRGVGEILALSWALEVGEVERFASIAQAISYCGLTSAQHNSAGKEQRGPISKQRNKNLQTILIEAAKLAPRYNPPLAVVHERELKRGNRNRATLAVARKLVAYLMAVDKSGKPFEMRVSGQEAAA

SEQ ID NO: 203261 - protein, 412 aa, unidentified
MEVLHAHCAGLDVHKDAVVACARHMVDGAVKREVRSFKTTAKELMALSAWLSVEGCTHLVMEATGVYWKPVWHILADGEFELVLANAAHVKNVPGRKTDVNDATWLAELMAHGLVRASFVPDEPTQEMRNLLRTRKQFMRERSSHVQRIQKTLEDANIKLDSVISDVMGLSGRRMIEALIAGETDPAALAALAHRRIKATPAELEAALRGRVTDHHRFMLGLLLQHIDAIDAAITQIDQEVDGKIEPFRTAIEILSTIPGIHQLSAAVIVAEIGIDMARFPTEAHLISWSGLCPRNDESAGKRRSTRMRKGAPWLKTTLIQCAWAAARKKDSYLQAQFHRLRARRGAKKAIGAVAASILTAAYHMLKNGTLYHDLGPDHFDKRAKAKHVDRLVHRLRNLGFAVALAPLEAAA

SEQ ID NO: 203262 - protein, 347 aa, unidentified
MAIVEVTRPIVGGVDTHLDVHVAAAIDPIGGLLGVESFPTTPAGYHALASWLGAFGPIDRVGVEGTGTYGAGLARHLAASGITVIEVDRANRQERRRNGKSDELDAIEAARAALSRRAKGHAKGGTGNVEALRALLVAKRSARSIRIRSTGQLRHLVITAPDDLRVRLTGLTSKALVAQASVLRARPGSDQVRRATKTAIITLARRVQAINAEIAVLDRHIDTLVRATAPGLAAVYGVGADTAAILLVAAGDNATRIHSEAAWAHLCGVAPIPAGSGKTNGRHRLNPGGNRQANHALWRIVLTRLGQGEPRTVAYMQRRLAAGRTKPEIIRALKRYVAREIYQQLPG

SEQ ID NO: 203263 - protein, 316 aa, unidentified
MIPPPLFVGIDVAKATLDVAVRPTAETWSAPNEATGIDALVARLVPLAPTLIVLEATGGYQGPLVAALVAAALPVVVVNPRHIRAFAQAVGILAKTDRIDARVIAHFAEAVKPAPRPLPDAQTQELRALLVRRRQLVEMVSAERARLDTAPSGIQETIHAHIAWLTTQVAGLDATLTQASQTHPAWQAKDDVLQSIPGVGPVLARTMLGHVPELGTLSPKPLAALIGVAPFNRDSGTLRGRRTVYGGRAQVRAVLYMGALVATRHNPVLKAFYERLLAAGKAKKVALTACMHKLLTIMNAMVRDLKPWQPQEAPIA

SEQ ID NO: 203264 - protein, 425 aa, unidentified
MNTGQAEYAVVIGIDWAHTTHALSMRDMTGQITALELEQSPEAIRRWIEDLKAKYPGQRMAVAMEQTKGPLAYALREYVDVLDLYPVNPMTLASFRKAWATSGAKDDPSDADFLRLLLEKHRELLRLWQPTDQQTHQLAFLSEKRRKLVDIRTKLVQQLMAALKDYYPQALTLIGTDLHDVMSCNFILAWPTFEELKRARRETITSFYYRHNCRSQKRIQERLDRIAAEVPLTTNPALVEPSKMMAVALVKQIVQMNASIRQFDKAIAETFKAHQDAPIFRSFPGAGASLAPRILAIFGTDRDQWADASAVQKFSGIAPVVERSGKTMWVHRRFACPFFARQTFHEFAGSSLVFSAWAKAYYKLQRSRGKGHQAAVRALAFKWIRVLFACWQTKTEYNEAAYVETLKKRNSPLIAFMMSEPVSTT

SEQ ID NO: 203265 - protein, 392 aa, unidentified
MYIIGIDIGKNHHEASIVSPEGKQIGHSLRFATTHKGADSLMSFIFNNIGNSSCIFGMEATGHYWYPIYSFLKARGYTIYVINPIQSDSLRKMYIRQTKNDSIDSFLIAEVIRFGQFTTTSMADENILAMRQLCRYRDSVISSRTEIKLRISTIIEQIFPEYEKQFSSLWLSTSMGILEKYLTPENIENAPIDELFEIIKDKSHNRLTKAKAISIKGAAADTFGIKIAQDTFSFQLKQLIDRMNFLDKQIEALDIEIMKYYEQFDCYLHTIPGIGIIGAATILAEIGDISRFKNSSALVAFAGIDPTVRQSGEFNSTHNHMSKRGSPYLRHAIFLAATTCSFHNSPLNAYYKKKRDQGKHHLTATGAVARKLTTVIYAVLRDSKPYEPKKFC

SEQ ID NO: 203266 - protein, 374 aa, unidentified
MHVAVGQPTQEVKETPMNSVGLDVHKTRCVACVKTQEGRILEEFAFQNTPHGHEELITHLKAYPETQVAIESTGNLWIPIYDRLEDENIHVVLTNPKKTRLIAEAKIKTDRLDARILADLLRANLLSASYVPPQEIRMQRSIIRERARLTQLRTIIKNRIHTLLDKHAYKSPYTDLFGKHGLEWLSKLELPAGDRILLEVNLEQLSSLNHSIHRLNETIATSAVENPEVKLLMGFTGIDYYSAMFLINEIGPVARFSSPKKLVSYAGLAPSTHQSGNHTTHGPITKEGNNHIRWILVEAAQHASRHDPRLSQFYMRIMKRRGHNRALVAVARKMLVTIYHVLNHHSQYRGLRPELFENKIRRLERITNSSLQTA

SEQ ID NO: 203267 - protein, 369 aa, unidentified
MPHVTSIGLDVHARSVAAAAFNPFTGEVVRRSFGTDASEIAEWALGFEDPRACYESGPTGFHMARELRALGLDCAVAAVSKMQRPAADARRKNDRRDAEFIARMLATHNIVEVPLPDMAVEAARDLDRALDDATRELRRSRQRLNMFLIRLGHVWDERNADGARKKAWTRAHWRWVSEIRLEGPQRDALEYYVTAARCAESDRRQLERRVVALAGADRWRPAVEALSCIKGVDTLTAFRLAAEAGSFSRFRSAPAFASWCGLTPSEHSSGESERRGGITKAGNALARTALIESAWHYSTCSPRPKAPAPGTDVPPAIRSRADDCTARLHRRREALAAAGKSACKANAAVARELACWVWEIGCRSEGTVL

SEQ ID NO: 203268 - protein, 375 aa, unidentified
MNNNNTLYVGLDVHKESITVAYAINSEPVELMGKIGTSPTDIQNLCKRLRSKSSQVSIVYEAGPCGYGLYRRLVKSGFDCMVCAPSLIPKKTGERVKTDRRDAIRLVRSLRAGDLSAVYVPGVEDEAFRDLSRAWASARDDLRHTRQRLKSFLLVHGVHYVGRADWGPAHRRWLSKYSFESPWRQLAFDEHRRTIEDRQAQCERLESALKEAVTEWRLYPVVEALQAMRGIQFITAVGLISELGDLTRFEHPRQLMSWFGITPSEYSSGGSRHQGSITKAGNSYARKLLVEAAWSYRHPARISPAIQKRQENLPRPVIDRAWDAQLRLCKRYRKLQAKEKNVNITIVAVARELAGFIWDMGRIAMSVAQQPQCHK

SEQ ID NO: 203269 - protein, 424 aa, unidentified
MNLTQNDRLKQVTSDTLIVGVDVGSQTHFCRAFDWRGFELSRRVFKFSNTGMGFLTFLRWTEEIMNKTEMKKVIVGCEPTGCYWLTFQKFLQDHDVQLVTVNPFTVNRSMELDDNSPEKSDLKDPKTIALLVKDGRFSTSYLPSGIYAEIREASVCRDQIMKQNVRLSNQIQGWLQKFFPEYFECYADWDSTSGLMLLRKAPLPQDILKIGAGGINQIWRDAKVRAAGIKRAQTLVEAAQNSVGLEAGEAARLEIWVLVNDYILKAEQLKRLDEYLEEKVKEVPNVEKLLAIKGVGMSTVIGFIAEVGDIGRFTDPKQIQKLAGLEIVKKSSGKKKGQPRISKRGRRKLRRTMYESAKALMLWNPAFQDVFLYYRNRAKNPLGGMQAKIAVACKAIRVFYVVLQTGCDFDEEKFRKDIIRPEAA

SEQ ID NO: 203270 - protein, 438 aa, unidentified
MHTNIMPTPHPLDLVIGLDRSDRKADLHLINTHSQERHSVVIDTAPEALWEWLLQWRQQHPQTRVGLCLEQPAGHLISFLEAYEWITLYPINPITLQKYREAFVTSRAKDDTRDAYFLAELLWAHPDKLQAWSPEDSPTRAVQQLVLHRRAVVDERTGLTNRLQALLKQYFPQALQLCGEDLWRPLATAFLLKWPSLSALRKVRTARLKAFYYLQGSRSQKLIEQRLGLIEKAVPITDESAVIESFVLRVQLLARELQLVQKTIQEFDQQIARAYAAHPDRELFASLPGAGPVLGPRLLASMGSQRERFGAAGQLQSYTGIAPVTKKSGGSCRIHRRYLCPKFHRQSFHEYAGQSILWSRWAAAFYLQQRSKGSPHHTAVRALAFKWQRIIFRCWQDRRPYQEQTYEGALRKSRSPLVALLDRIEVGKSPWKKGATKN

SEQ ID NO: 203271 - protein, 390 aa, unidentified
MTYYVGIDIAKYKHDCFIADDSGCVIRDSFSFTNDKDGFNVLLSILKELKSKGQIKIGFESTGHYHFNLKLCLEANGFDYVEFNPLLVHKFISTQTLRRTKTDKKDAQLIAKYLMTVDYKPYVNSFYHINNLKSLTRLRETLITDRTRFLNQITSYLDQIFPEFKPLFENGLNESAFYLLTHYMTPAKMSKLDSNKYSKMKSELKHPISYQKICQIKDAAINTIGHTSKALECALKSSLNVYLYLDNQIDELESKIIEIYDSLNCHIHTIRGVSKLTSAGILSEIGNFNKFLTPAQFQAYAGLEPSKNDSGIHDGIGVMVKHGSSYLRKYLMNSAETFYVFNPSISDFYWKKRNEGKHHIVALSHVARRLVNTIFYLEKHNQDFDSTLVK

SEQ ID NO: 203272 - protein, 405 aa, unidentified
MEHRIITAVGIDVSKYKSMVAVRRPGGEVVMEPFEVQHTAAGIAGLVSKLAALDGEVHVVMEHTGMYWRPVAMALKQVGFFVSVVNAILIHRFSDNSLRKVKTDKADAMKIANYALAYWQDLRDYSETDETRQLLEVQCRLYERTIKTAKSLRNSLISILDQTFPGANNFFPTSYRNAKGHYKWVDFVRRFWHKDNVAAVSIQSFSESFRKWCKRTGYHYRQADAERIHRHARESVATFKKNDSTKLLITQAVDSLNAVYEAAEALRGEMYRLASLLPEFDVVMNMQGAGPITGPQIMAEIGDVRRFTHKGALVAFAGVDAPPFQSGTFDSKNRHVSKRGSPHLRAALFRVCSVILQCKDEGNAVYAFMDRKRAEGKHYYVYMVAGAAKFLRIYYARVKECLAAA

SEQ ID NO: 203273 - protein, 411 aa, unidentified
MEVIYKRCCGLDVHKEIVVACLLIREGGKVLKEIRTFLTMTVDLVVLHDWLKAHQVTHVAMESTGIYWRPVFNLLEEDFTVLLVNAAHIKTVPGRKTDVKDCEWIADLLSHGLLRGSFIPPEPIRDLRDLTRYRKSLTDERVRQVNRLQKFLEAANIKLSSVATDVMGASGRAMLEALVSGSTDPQVLSELAKGRLRRKLPELKKALEGRFRPHHRFMVAEILTHLDFLDESIERVSQEVSSRIVPFLPKVKLMDLIPGIDQRVAEGVLAEIGVDMSCFPTDGHVASWAGLCPGNNESAGKRKSGKTRKGDRWLRRYLVEAAWAAIRKKGSYLSALYHRLVVRRGKKKAIVAVAHRLLVIIYHMLKDQESYRELGSDHFNKLNAAYVQRHHVKRLESLGFKVILEPLDKAA

SEQ ID NO: 203274 - protein, 345 aa, unidentified
MVLGGAQMKTYAGIDLHSSNNYIGIIDAKDKRLYSKRHNNRLEDVLKVLGKFKASLQGVVVESTYNWYWLVDGLMDQGYKVHLANPGAIKAYEGLKHTDDKWDSFWLAHMLRLGILAEGYIYPKQQRSLRDLLRRRLMFVRQRTSQILSLQSMATRSRGLNFSGAQIKRFRDEFIEKMFTDPYLVFTAKRNIATIRFLDRIVSEIEAQVTSQIKLKKEFIKLLTTPGIGNILGLTIMLEVGDIGRFVKAGNYSSYCRCVESKKISNGKKKGENNKKNGNRYLAWAYVEAANHAIQCCPKAQKFFQRKMAKSQRTLATKALANKLTKATYYIMRDQVNFDEDKLFQ

SEQ ID NO: 203275 - protein, 347 aa, unidentified
MRFYTRQHRHYCGVDLHARSMYVCVLDQEGNVLVSQNIVSAPEPFLELIAPYREDLAVGVECMFTWYWLADLCAREGLVFVLGHALYMRAIHGGKAKNDRIDAHKIAALLRGGMFPQAYVYPQAMRATRDLMRRRNYLMRQRAELLAHITNTNHQYNLPALGVRPARPAERSGLAEHFAEVPVRKSIEVDLSVIEHYDRELPRLERYLESNAQAHDPVALAVVRTVHGMGRVLGLSILYEIHDIARFSRVQQFLSYCRLVKPTKESGGKILGHSGRKIGNAHLKWAFSEAAVCFLRANKPAQALRARLIAKHGKGKSLAIIAAKLARAVYFMLRRGEAFDAERFFAH

SEQ ID NO: 203276 - protein, 346 aa, unidentified
MKVLIGVDPHKASVAVAAVYEAGGELLERASFPQNRAGLRSLERWATRFPERRWAVENASGLGRHLAGRLAAAGESVVDVPPKLSARVRVLSTGNARKNDGLDALATALAASRNERLAAVDPEVGSEVLRLLSERREDLVAERTRALKRLHGLLRDLLPGGVAGTLSAPRAARILRGIRPQGASARLRRRLASEVLRDVRTLDRKIADLNGLIEAEVEASGTTLTEIFGIGPILAARIISTVGDVGRFPTKAHFASYAGTAPVEASSGEVVRHRLSLAGNRKLNYALHMVAVCQSRSDVRGGSYYRKKMAEGKSRKEALRCLKRRVCDAVFRSLVADSRAHSRSAA

SEQ ID NO: 203277 - protein, 354 aa, unidentified
MVVVGTDVHKRTHTFVAVDEVGRKLGEKVVKATTIGHHKALAWAREQFGEELLWGIEDCRNLSARLERDLLTAGQSVVRVAPKLMSQARASARTRGKSDPIDALAVAQAVLRNPDLPVASHDQSSRELKLLIDRREDLVAQRTSTINRLRQRIHELDPAAEPKPGSLHRTKACTALAKWLDTQHGLLAELARDELADVMRLTEAINTLAARIGERVQKIAPTLLTVPGCGELTAAKIIAETAGISRFRSEAAFSRHNGTAPIPVWSGNTAGRVRLNRSGNRQLNAALHRIAITQLRIPGSAGQQYYRGRIADGKATKEALRCLKRHLSRTVYRSLHTDLHLNRSHQKPETALAA

SEQ ID NO: 203278 - protein, 392 aa, unidentified
MYYLGIDIAKHKHDASIIDDTGKLLAKPISFPNDAQGGQALLDWIFQCIDSPSEMLIGMEATGHYWLAIYSFLLKHNFSVIVLNPIQTNAWRKGTEIRKRKTDKIDATLIADVIRFGRFLETPLVNEKMIALKQLSRFRNSLISNMSDLKRQSIAVLDQTFPEYHTVFSDIFGTTSSKVLMEYTSPSDYEEVSIDDLTYLIETCSRKQLGINTAKQLKELASQSFGITFCKNAFSFQLKLLMEQIKFIEEQVKQCEVKMKQLLIDANSPITTIPGIGPILGATILGEIGDIHRFSKPSKLVAYAGLDASISQSGQYEATRGSISKRGSSHLRRALFQAAITAAWSDPVLKEFYNKKRGQGKHYLVCIGAVARKLCYIIYAVLKNNKAYQVPS

SEQ ID NO: 203279 - protein, 418 aa, unidentified
MDVVHRRCAGLDISKKDAKVAVRVAGGGRAGTKTTVTTWSSMTGQVLALREHLVAAQVTCVVMEATSDYWKPFYYVLEDGPWELMLVNARHARNMPGRKTDVSDAAWLAQLGAHGLVRGSFVPPAPIRALRDLTRTRTALTRERAREVQRLEKLLEDAGIKLSAVATDIVGVSGRAMLEALIAGQRDPEVLADLAKRKLRWKLGELSEALDGRFADHHAFLARTHLDLIDHLTGTIDQVTTRIEEAIAPFRGVRDLIVTVPGISTGVADVIIAETGADMTRFASPGHLASWAGTCPGANESAGRVKSTHTRPANPYLKGALGVAAMAAARTKGTYLAAKHRRIATRRGPLKAVVAVEHAMLVAIWHMLTEQAPYRDPGPDYYARRNPDKTRDRAIDQLRVIGYDVTLTPRAVTDPLHQ

SEQ ID NO: 203280 - protein, 338 aa, unidentified
MKITTIGFDIAKPIFHLFAVNKMGRFVKKKQLKRKQVFAYMAKLEPCLIAMEACGGANYWARELVALGHQVKLIAPQYVKPYVKGNKNDYNDAEAIAEAAQRPTMRFVPIKTVEQQDVANFHRQRERIKKERTALVNQIRGLLAEYGLVINKGVAAVRKRLPEILEDAENGLTARSRELFAELLEELLTIEQRFDQCGQRIAVMNQENEVCQRLDEILGIGPITASATYAAAGEGKDFVNGRHFSAWLGLVPGQHSTGGKTVLLGISKRGNSYLRTLYIHGARAVLRYSAGKQDRFSRWAQAVLARRGHNKACVAVANKMARMAWVIMAKGETYRIAT

SEQ ID NO: 203281 - protein, 376 aa, unidentified
MREKLRFLGLDVHAETIAVAVAEPDGEVRSLGTIANREDSIRKFIKKLGPAEQLRACYEAGPTGFVLYWQLAQLGVECAVVAPSLVPKKPGDRVKTDRRDALKLARSHRSGDLTAVWVPDEASEALRDLVRQREAAKQDQLRARHRLTKFLLRTGRRQPLGLKAWTEHYMRWLAQIRYSQLAQEVTLRDCLNEFEHMSARVKRLEEAILEVVKLAPQAMQEVIRGLQALRGVAHISAVTIAAELGNISSRFESARQLMGYSGVFPSEDSSGKRIRKGGITKTGNAHLRRIVVESAWCYRHRPRVGEKLRKRQQGIPAEITEIAWKAQNRLHRRYAKLMARGKEPRKTITAVARELLGFIWAIGIKAEAACKQPMAA

SEQ ID NO: 203282 - protein, 349 aa, unidentified
MLADELDFVVGVDTHRDQHVLSVVAAPTGAVVAQRSVAASGRGYAQALWFANEQAQGARVWAIEGAGHYGAGLARYLSGRREAVLEAGRSPRGERRLQGKDDGLDATRAARAALGNDELALPRAGQRREALRLLLVARRSAVEVRRRGLVQLRSVIVTAPDRLREELQALPERRLLERCSHFRRSSSLPVDELAAKLVLRTLARRIEAATAEANELEREILAHIRALAPRLLDEAGIGPIVAADVIVAWSHPGRVRSEAAFARLAGVAPVPASSGQTIRHRLSRGGDRQLNRALHTIVLQRRQHDATTQAYIARRVAEGKTRRDATRLLKRYLARHLYRLLQQTEPLMT

SEQ ID NO: 203283 - protein, 316 aa, unidentified
MISYFVGLDVSKATLDVGFFPESVPQFQVKNDPEGFVQLIACLNELEVERILLEATGGYERSVLKALRRAGLSVVRINPRRSRDYASAMGKIAKTDKIDAAMLARFARDFEGFPQVEPDENREELGELIKLRGNLVRHRDDDKRRIKQTTCTTALATYTEHIAYLVKQIKALDKAIENASNVLDCERARRLRSVKGIGIISCGTFMAYLPELGTVTGREIAALAGLAPYNNDSGKKSGPRSIAGGRYKVRGAAYMSTWSMIMHVPEIRARYQGLVARGKRAKVAAVACMRVLLVRLNAMLRDGTEWKDHPVQGPAT

SEQ ID NO: 203284 - protein, 337 aa, unidentified
MEREYVGIDLHRRRSVIVRKNAAGEVLDKVRIDNSPMELAKAVAAAGPNPKVVLEATFGWYWAADVLEEIGAEVHLAHPLGNNWGHRRVKNDERDANDLVDLLRLGRLAEAWIAPPEIRELREVVRYRLKLVRLRAGLKAQVHAVMGKHGVLPTHTDMFCIAGNAVLDKLEFPDAYMARLDSLRDLIDVYDREITALDRRIPKMLVNHQGYRAIQAIPGVGMLLAAVFVAEIGDVTRFPSPDRLASWAGMTPKHRQSDTKVTRLGISKQGSRHVRWAAIEAVSRHHGGGKIKADYRRIAERRGRNVARVAAARKVLILVYYGLRDGEIRCLAESREG

SEQ ID NO: 203285 - protein, 362 aa, unidentified
MNYVGVDIHKKYSVLCAVDERGRKLREARVEGNAPFGFAQFFSGLGGPSKAVVEACWNWGRIHDELEELEGIEEVVLAHPYKTRLIADAQIKTDRLDAYALSTLLRGNLVARAHVPRRETRMRKNLLRQRLYWARLRTMLRNRIHALLDRQRSLELPQCSDIFGVRGLSFLRRLELPETDAALLREQLALHDLIAQQMKAQEKRIGLEFGSEAMHRQLLSVPGIGPTLAAVIACEVDSIERFSSAEKLCAYAGVVPTTHSSGGKTRHGQLLPFCNKWLRWALIEASWVAIGCSPYFGALYKQHRARGKKANSAVLIVARRMCRIIWQLLHEKRDFEKRPLRPNFNFPGCSVVRLTAATAARP

SEQ ID NO: 203286 - protein, 427 aa, unidentified
MPFAGLDVHKKEIEAVVLDERGAVLLRDRFPSRREALQAFARRRLQDCRVALEATTNTWAVVGLLTPLVKEVVVSNPLRTRAIASAKIKTDKVDALVLAQLLRSDYLPRVWTPDEETRCMRQQTSERANLSADRTRLKNRIHAVLHQRLIEAPVKDLFSKAGLSWLRSLCLDAPGQRALEWHMRQLAQVETEFQLLDEELAAHAYQHPQIKLLMSLPGVDYPVAESLLAVLGDIARFPHPDKAAAYFGLAPSTHQSGSHCYHGRITKQGSAHGRWMLIQAAQHVARHPGPLGVFFRRLARKKNRNVAVVATARKLVTIAWHMLKDNQPYRYAQPKTVEAKYSRLRVRVTGKKRKTGCKGQKRPASYGSGKRTRAVAALDEIYAVEGLPPLPARFAAGEQDMLERHRVAEHAAYIRQAHRVARKSLTS

SEQ ID NO: 203287 - protein, 385 aa, unidentified
MPDVTPSLHPGDVRRWVAIDQHKFSIVAAVLPPDGGKPEVCRIETTERAIRRFIDRLGGPEGLSVCYEAGPGGFALWRLLTRLGVACDVVAPSLIPVRAGDRVKTDRRDAKKLVSLYRAGLLRFVHPPTAELEGLRDLLRARDDVRGARMAARNRVLKQLLRHGRIFREGKTAWTKLHRAWLARQRLDDPLAHEALEQLLIHLDGIERQLATLDARLGEIAGSERWSGQVKILTRFRGISTLTALGLIAEIGDFARFSHPRELAAWLGIIPSEYSSGPQQHRGHITLAGNKHARRLLIEAAWHYRHAPRRPATGPPPDERAWQAQVRLYHRHRHLTENGKRSTVANVAVARELIGFLWAAMTDQPLRATDNPSSVNHDQPQEAAA

SEQ ID NO: 203288 - protein, 347 aa, unidentified
MSGLTIGVDIAKRFFQVHVIDEFDQVLVNKKLRRAEFLAFFEDLPCSLIGMESSGSAHHWARELIAMGHNVKLMTPMYVKPYVKRGKNDAVDAEAICEAVTRPTMRFVPVKSVEQQSVLMIHRTRSLLIRQRTMLVNALRGHLAEIGIVAPVGIERVGELVDRVLGHEGDELGVPPLVRSIVETYAQQIMQVTEEVKNLEKQLRAWHRTSEASRRLATIPGIGRIIATAMAATVADPEAFQSGRAFAAWLGLTPRSNSSGGVERNGRITKAGDRNLRTLLVLGATSVIRRVRSGQPSPLYGWVNRLVETGKPPRLVTVALANKLARIAWAVMTGKTDYKPEKAAQAA

SEQ ID NO: 203289 - protein, 360 aa, unidentified
MMETMTWVGLDVHARSTHAAALTLPTAELQRARFGAESEAIVAWLQRLPQPVHACYEAGPTGFVLYRTVRAAGIAIDVVAPTKTPRATGDRVKTDRKDAELLARLLPTGSLRPIAVPPPEVEGARDLARAREQLRVDLCRARHRVSKMLLRHGRVYPGKSTWTQAHHRWLAGQCFDNANSELAYLDYLAAVDGLVARRRALDERLSRLAAEGDWWPTVQRLRSFRGLDTLSALVPALEVGDFARFRSPRQLASWLGLVPSLSQSGESSTQGAITKTGSRYARRLLVEAAWHYGRPPRIGVTLRQRQDGQPAHVLQIAWRCQHRLYRLHQLLSQRHKPGNIVTVALARSLACYLWAAAVAP

SEQ ID NO: 203290 - protein, 313 aa, unidentified
MIIALRYVGIDISKKHLDIFDEADGVPSRIANAPQAITQQVARWQCATLVVFEATGIYDLALREALRQAGIRFARINPARARDFARASGLLAKTDPIDARMLAAFARAMQPAPEQVADPARNTLARLAKRRDQLVLMRAQEKNRRSEADDRAMAERIGRLIEVLDSEIAEIEADISALIKAEAEIADDAKLMRSLPGVGPVACMQLIAQMPELGRVGPKQLAALAGLAPFNVDSGAFRGKRKIAGGRKRVRDALYMAALNAVRRADLFKAFYARLRQAGKPAKLALIAVARKLLTVLNAMMRDRKPYLQTKPT

SEQ ID NO: 203291 - protein, 471 aa, unidentified
MPHHCHQPPAGYFWQGNADNARLRVICRFGISHGVFLTLTKKGGDETMKKTDYLSTLFVGIDIGSKINVVSALNFSQEFLIRMVPVKNAKGGAELIEQLICDALGKDPELKRIIVALESTGYYGFHTANYLSTSEKLLPFGVKVYCLNPKSVKNYKESYVDLPKNDGIDSFVIADFARCGRITIKPWKGAQYLALQRLTRHRLHITECIAREKVYMLNNIFLKFSEFAFLQKDEHPFSNKYGATAEAVLTEFTTTEEIVNSSVEDLVDIITARSRGRIANPVNTAELLQKAARDSYRLDKCMYEPLTTSIACSFNCIRAFEKELKALDAAIGEAVKGLNPTEYQILLSVPGIGKVYGAGILAEIGSIKYYKNHNSLAKYSGIYWNQNQSGDFDGEDTSMSKAGNRYLRYYLIEAAGSVIQHCPEYAVYYEKKYAEVLRHQHKRALALTSRKLIRMLFGLLDKSQLYSPGKE

SEQ ID NO: 203292 - protein, 456 aa, unidentified
MSQKNLKSKTRGLQVININCAGIDLGSKSHWVCCPAEDGVEQIREFTTDTRSLTELADFLRERRVTSVAMESTGVYWIPLFELLTQRDFEVVLTDTRMLSRVPGRKTDVLDCQWIQQLHSYGLLRGAFRPGDDIVKFRALARMKKTLVMEQADWLRRMQKELDQMNIRVHRAVSDISGVTGMAILHAIADGERDPVKLAELRDSKCRKTKEEIAIELTGTWREEHIDNLKTGLKMYNFLTERIEEVQKNIYALLKRILPNAEAANIMAPKLSKKNKAENIVRQGKEPMRQGLFKISGADLTRIDGISVDTAEIILSEIGPDLSKFHTEKQFVSYLRLSPNLAISGGKNVHSKKKTIICCSRVKEALRMAAVTIRLSRTALGAYYRSIAFRKGASVAVFATARKLAQYIYRMLRYGNDYIDIGLEEYEERCRKKRIRNFKANAKDLGFAVTPISVNF

SEQ ID NO: 203293 - protein, 474 aa, unidentified
MNVKGTKKKNQAVTANIFEQQELLKKAEVIRESLTASTWHELETNGKFDKNKKLSFISDDMLILGCDVGSEIHYMRAIDTRGRELSKSAFPFNNDSEGFQSAKEWAVKIAAEQNKSQIVLGLEPTGHYWFCLATWMISNGISVVQVNPYAVKQTKEVEDNSQLKDDTKDPKLIANLVKDGNFGMPYLPEKLYAELRRLSMFRDQLNEDRIRTVNRMHREMKIYFPEYKEALGKVDGAFSLELLKQAPFPDDLVTLGEDGIRQIWHDAKLRGRGYSRAREILQYAKASVGIKDGAVAGRSAVKWFVQKILELDAELAVVEEQINQKCQEIPHASNILEISGIGENTLSGILAEMGDISRFDDVKEIQKLGGLGLVACSSGKHKGETKISHRGRKRLRYWLFQAAKSAVAHAEEFKELHIYYTTRADNPLKKIQSLIVIACKLLRIIYTILKNGTVYDPKKMLMDIRHPEKKAIAA

SEQ ID NO: 203294 - protein, 327 aa, unidentified
MAHYIGVDLHKAFMQVCAVDEAGQRCWEGQYPTSADGLRAWLARCEPAAQVAVEASGPTWWFVDQVRGTLPHVQVIDAARTRLKAGYAAKTDRLDARRLADALRRDSVVTVWYPPPALRDLRELSRYRISLVRTATTLRQRLRAVLLRHGASVRVSDLATARGRAVVHDVPLPGWAAHGRDGLQALLEAVQQQLAPVEAAVAAAGTTDPVVRALDRIPGVGAILGVTIRAEIGVIERFPDAAHLASYAGLVPRVSGTGGRVRYGAITKRGSSWLRWALVEAAIHATRRRDEVGRWARQLALKHGGLKARVACARALCGEIYRTWPRG

SEQ ID NO: 203295 - protein, 421 aa, unidentified
MLTDSPDDGVIIERVAALDVGKAEVVCCVRVPGAQAGHRAQEVRTWATMTRALSAMTDWLHGLGVTRVVMEATSDYWKPPFYLLEAAGFETWLVNARDVKHLPGRPKTDKLDAVWLCKVAERQMLRPSFVPPEPVRRLRDLTRYRVDLVAERGREKNRVEKLLEDAGIKVSVVVSDIFGVSGRAMLAALVAGQRDPLVLAGMARSSMRRKIPELGQAFEGRFSEHHAFLLSRMLAHVDALDRDIAAVEDRIEELIVPFADAAARIDEIPGVGRTAARIIIAEIGTDMARFPSAAHLASWAKFSPGTRESAGRSLGTGSTGHGNVYLARALGEAAVGASKTDTFLGERYRRIARRRGKKRAVVALGRSILVIIWHLLNDPDAHFSDLGPDFYDRHRSTQRAVRSHIRQLQALGYQVSVQPAA

SEQ ID NO: 203296 - protein, 347 aa, unidentified
MAVTIVETRAITGGVDTHADTHVAAALDPVGGLLGVAEFPVSAAGYARLLGWLGGFGTVCLVGIEGTGSYGAGLSRHVTAAGVRVVEVDRSDRQDRRRQGKSDPLDAVSAARAAQSGRACGAPKGRDGTVEAVRTLMVAKRSARSERTQAINQARSLIMTGPDDLRARFARHTAAALVAELAVLRPRPGAVVGYATRIALRELGRRAEFLDGQLRRLDDLIGPLVTGHSPGLLALYGVGTDTAALLLVAAGDHPERLRSEAAWAHLCAAAPIPASSGKTVRHRLNPGGDRQANHALWRIVITRMSSHAPTRAYVKRRTAQGLSKKEIMRCLKRYVAREVYPHLRTGD

SEQ ID NO: 203297 - protein, 354 aa, unidentified
MKKLFVGIDFAKEKFDAAIIDAIGLKEFGDRQFGTFSNDKKGYRQFMKWVKVHCGNSTETEWLFCGEDTGQCSHGLSKWLYGKGLDIWIESPYAIKHSSGIQRLKTDKADASMIAEYAWRHQDKASLFKPLSESLEQLREVFLYRHKLVQQRVAMEIRDNGKESEDSSKGLSFIRRKAKHLIAELNKTIKECDLMIDRIIDSDEELKANYKIVTSIKGIARQNGACLLIYTNNFNRFDLDARKIACYYGVAPFGKESGTSVHSPARTSHFANKLIKSLLTQAASIAKMFNPEIRAYYDRFIQRGKHKSVALNNVKNKLLRIIVALVRNKTMYDSKTFKFYQQRWEEKKLEALAL

SEQ ID NO: 203298 - protein, 429 aa, unidentified
MDKIYDKCCGIDVHKKLIVACFRCGKKQEVREFGATTRELLELADWLKDGGCEMVAMESTASYWKPLYNILESSDLNAIVVNARHMKAVPGRKTDVKDAEWIADLLQHGLLQPSYIPDKDQRELRELVRYRKSLVGERTRELNRLQKMLEGANIKLSGTVSDINGKSARSILEYLLTGKSIDGSKYDEMYEQKIIAHNLKATKEQIVDDLNGVMSPLQRRMMKELLVHLDELNIHIKNLDDEIDNFMKPEEKQASQAIQDVTGIGNTSAQAIISVIGSDMGRFPTDRHISSWAGLCPSDNESAKKRKSGKTRKGNALLRTTLITCAHAAVKNKKSYFYAQYVRISAHRGPKRAYVAVAHSMLISIYHILKDGVVFKDLGADYYNQFNKERKINAYPVSYTHLRAHETDSYLVCRLLLEKKKKTRKDEPT

SEQ ID NO: 203299 - protein, 344 aa, unidentified
MNVSKTVVGVDIGKRVFQLHWIDAHTGEIVSLQLKREKFLEHFANRAPCRIGMEGCGGSQHWARQLSSLGHEVKLMPAKAVRPFAGGGNKSDAHDARAIWTAVQQPNVKAVAVKTEEQQAMLALHRMRQQLVKFRTAQINGLRGLLTEYGEVMAQGKAGIRKGIAEALQHLSDRLPVMVIDTLREQRERIDELDNQISHIERRLKTWHKNDKACQRIADIPGIGLLSATAAVAMMGDAKAFKSGREFAAWLGLVPRQAGTGGRLRLLGISKRGDTYLRTLLIHGARSVLTHAKEPAAWITHLRQRRPLNVATVALANKMARTIWALLAHERTYRKGFVSQPVYC

SEQ ID NO: 203300 - protein, 347 aa, unidentified
MDQIIRIGMDTSKHFFQLHGVNATEQPVLRKKLRRIEMINFFEKLPSTTIAIEACGSSHHWARLLSSFGHEVKLIAPQLAKPYVKRGKNDAADAEALCEAMSRPTMRFVPVKSREQQAALMLVGMRERLVRNKTRLANAIRSYAAEFGLTAAKGTCRIEPLLERISADESIPLLGRELFAFHAREYEQLEKELRAVDAKLIEWHRANECSRRLAQIPGVGPIGASLLIMKTPAPELFKSGRQFAAWMGLTPKDHSTAGKARQGIITRAGDETLRSTLVVGATALLRYVRSGSGKHGSQWLIEMLKRKPPKLVAVALANKIARVAWKMMVTGENYRKNAVPPNLARAA

SEQ ID NO: 203301 - protein, 367 aa, unidentified
MAKYLIVGADVHENHVTTKWSIDQGESHTASFRMSFSGQRKLISTLKKEATKAGADKIEFAYEACYMGFGLYDNLTEASIGCHILAPTKMKRSSGQSREKWDERDAQEILEILKGHLLAGNALPEVWIPDHKTRQDRLVIRRRLDLSDKRTSVKAQIDMVLKKAQVKRPKEIKQKWTKAHMNWLEEICDPETEELQYGSILALESKLRELRMLEEEIRIQDHNIEVLAQDDRYREAVEELCKLRGVRVLTAMVFLTEVGDMSRFQNRRQVASYFGVVPAIYETGEDCERKGHITKQGSSRVRKVLCQASWTRTSVDPAYKRIAAKNPKKKKKAVVALMRRLGIRMWHIARDVQESSGCFSRPEPALN

SEQ ID NO: 203302 - protein, 343 aa, unidentified
MEHFAGLDVSVNETSICIVDDTGRIVREAKVASEPDALLQVLKNRAYRFKRIGLEAGPLSQWLYSALGEANLPIICVETRHMRAVLQARINKTDRNDARGIAQMMRAGLYKPVHVKTLRSQKLRTLLTYRKLLQSKAIAIENDLRGTLRNFGLKVGMVGKLKFETRIRELVESHHDLAVLVEPLLIVRRTLREQLGILHRRVLAVARNDEVCRRLMTVPSVGPVVALTYRATVDVPARFRNSKAVGAAFGLTSAKYQSGEINRSGAISKCGDEMMRVMLYEAAQILLVRSKRWSWLKAWAMQIARRCGRKKAIVALARRLAVIMHRIWVDGTEFRWTREVAAA

SEQ ID NO: 203303 - protein, 333 aa, unidentified
MKSYFIGIDISKDTLDVCIMSDSEEKDIFFKVENTLSGIESMISRNIPENAQLWYCFENTGNYGLLLARILESQEISYYQVPALEIKLSQGIQRGKNDRVDAWRIAKYAKTYCKELKPYLLPSKELLKIKNLLTYRNHLIKVRTQFKNEIKAFYQINKIADVSFEINDIMGHIQQLDKNIALVEEKIKQEIHNQQHLNRNFEKITKVKGVGFLTAAYMIVLTNNFTSFQSPRKFNCYAGIAPFEHTSGTSVQGKTKTSKLRNKRIKTILFNGANSAVIYDEELKSYYQRKKQQGKAHNSIINAVCCKIVYRIFAVVKREEPFVNLTRYNLHMS

SEQ ID NO: 203304 - protein, 291 aa, unidentified
MHIASMGIDLGKTTFHLVALGERNKVLVRKKFSRTQLLVYTANLPSSLIGLEACAGSHFMGAALEKQGHQVRLIPAQFVKPYRKSNKNDFIDAEAIAEAVTKQNMRFAQLKTQEQLDWQAMHRVRDRLVQRRTALINDIRGFLLERGITFAAQPIHLRKNLPTVIEDAEQNLSPRLRSLLDRLWQEWKQIETDVQTITDEIERISNEDTRCRQLRQIPGFGPLVSTATVAAIGNGAAFRRGRDFAAWVGVVPRQVLHRWQAETVRHQQARQRLSASHADPRCAGGTVSREA

SEQ ID NO: 203305 - protein, 364 aa, unidentified
MHSINNIELSSLEETRCQFNGGTGAIKLGIDVHQDFYVVVEQVGGSNPKPPQRLAKEAFLHWATRLKQKSSAEVYAVYEACGFGFSLQRKLSALSINCYVVCPQKLDEQNRRVKTDGLDAKALCLKLDRFVQGNRDALAIVRVPTEEHEQLRAIHRQREQLVGARKRLEAQGRSLMVNHGVEPVQNWWKPRTFAALPAPQWMKELLANSQPILVALQQKISALTVQLQSAASPDQPRGLGKMTSVVIDREIGDWNRFNNRRQIASYTGLCPGEYSSGNTRLQSCVTKHGNPRLRAALVELAWRLVRFQRDYKAVRKWRQILAKGALATGAARKKAIVAVARQLAVDLWRIKTGRLSAEELGLIN

SEQ ID NO: 203306 - protein, 351 aa, unidentified
MPRTTTLHAVTTIGIDMGKTTLHMIGLDARGAIVLRERVSRGRIASRLANVPPCLIGIEAGMATHYVARELTELGHDVKQVPATYAKPFRQGHKNDFRDAHAVAEAVQRPTTRFVPAKTNEQLDLQALHRVRSRLVSERTAVINQIRGFLLERSIIVRQGLRFLRQLLPDILAKRTDVLSPRIVRIVIDLAGDWRQLDERIETVTDEIETLAKSEDSCRRVMTVPGIGPIISSAMVAAIGSGVAFAKGRDFSAWLGLVPKQMSTGDRTILGRISKRGNGYLRMLFMQAARVILLRPANWPKHGFGVWLVRAAQRLHPNVLATALANKLARIAWTVLVQERSYQARVTKAAA

SEQ ID NO: 203307 - protein, 347 aa, unidentified
MEQIIRIGMDTSKHVFQLHGVNAEERPVLRKKLRRTEMMTFFEKLPPTEVAIEACGSSHHWARLLRTFGHEVRLIAPQLSKPYVKRGKNDAADAEGLCEAMSRPTMRFVPVKSTEQQASLMLVGMRERLVRYRTQLGNAIRGYAAEFGLTAAKGMRKVEPLLDRIAVDMAVPSLARELFASHATEYRQLSEQLDDIDEKLLKWHRGNECSRRLAQIPGVGPIGASLLIMKTPAPELFASGRQFSAWMGLTPKDHSTAGKARTGIITRAGDEVLRSTLVVGATALLQHVRNGRGKSATPWLLDLLKRKPPKLVAVALANKIARIAWRLMMTGEKYRGNSELPSYGCAP

SEQ ID NO: 203308 - protein, 369 aa, unidentified
MIKKNTAKLKQEIAEITVTDKKNKADYIIVGVDLSKTKLDVKHIKYKIYSNDEKGHARFIKAIKELGDNVIVAYEATGYISLNFAEMLDTNGIMRCQVSPRRVRHHAKAGVAEAKTDKLDCEVIQSYTMKYWEHLRINEPMNRNYSELQELQRVRNLYTQFIKQAKQILSTCHRESARKPIEENLVKLKEEKKKIEQRIKNLIDEDENSKNLKELLMSQPGVGEETATSLVLNLPELGRVTRKEIASLTGTAPFNYDSGNHNGKRFTRFGRKEIRNLLFMATRAALNSKKENDYHKRFNHLSRITNLKEGRTYMQVIVACMRMMIVRLNGITRDWIAKGKPDLRTYTKMKEEEQKEKEQAEQEKNNQEQ

SEQ ID NO: 203309 - protein, 368 aa, unidentified
MQFIGVDLHTNKFTCCYRDEKSVPDGKKETATFELSPYGIAQFFSTLTGETYVLIEATITTFCFARLIQPMVKQVIVANTYELKQISLARKNTDKVDADILCRILKMQVLSGEQTISPVVVPPVEIQELRGLFTTYRLFRKQTTQVKNRIHSLLKERLYGFTQEEIFTQGQRKAIRALDKGSAMSFQVNQLFDWLESMESQVESLKGRIMEHAEPFMREIEILTSMKGISVFIAIAVIADIISVDRFRNSKAFTSYLRSAPKVANSNTSVNVGRTNKKGRKLSSSLITQSLNHVLDASEKLSEWYDRLTEYKKAGLVRGGLRRRVFAEIYQMLKKGEYHYGRDAKKHEAKMRQYKNILEKRKNLVKTA

SEQ ID NO: 203310 - protein, 416 aa, unidentified
MTFKVVRFICGGMDVHKNLIVATIGTTDKQTLTTEYIQQSFSTFYSDLIRLKEWFISHDCYDVCMESTGKYWIPIYNVLETELNICLTHPKYVKAIKGKKTDKRDSKWICDLYKCDLVKHSFIPKKEIREMREIARYRCKLVYMRSSERNRYQNCLTVSNIGLASAVSDPFGKTATNIMKELMQSEVIEDDKILKLIHKNCKDKDKILDSLQGYHIESDQRFKMDTVMNHIEYLDKQIQACEAELIKRAYPLRDYFQHITHIKGISALSAILIVSEIGTDMNQFESDKQLINWAGLSPANNESANKKKSVRISKAGQYLKPLLVQCALSSIKDKNSYFGIKYCRIKKRRGHKKAIIAIARMMLVCIYHMILTGEEFNPCDYESLTNPKPKKEPTMTVESALQFLKDSNFDFSSIQL

SEQ ID NO: 203311 - protein, 342 aa, unidentified
MSYLGVDLHTNSFTVCRRTKQGKNSIRTFQIARIADFRKTLRKRDLLAVEATGNTAWFVSQIRDRVKKVTVVNPFQFEVIRRSVKKTDKNDSKTLALFLSKDMLPEARMKTKENAQLHSLATTRDKLVKQRTALINKVHNVLNSYGIKFKKESLGSEKGLKSVWAYDWDVIVRIELEILIEQIRSLNKSIKTLDKEMSDHGQKLKGHENLTSIKGIAGRSATVLLSVIGDVNDFADENKLAAYFGIVPRVSDSNETVRHGRITKHGSKLGRTTLVQCTLVAKRYSPYLSRYYERIKSHRGSGKAIIATARKFLGIIYNTLKNEWIFEDFPNFVIASSCVKKQ

SEQ ID NO: 203312 - protein, 330 aa, unidentified
MEHTTWVGIDVSKDRLDVHVLPSAEAWATSRDAAGLAELCRRLQGMTGVVAVEATGGYESIVAASLSSAGLPVVVVNPAQVRAYAKALGQRAKTDPIDARVIALFAEAIKPAVRPLPDQATRMLADMLARRRQIVEMIVSETMRLQRSELARVRKSIERILVALKRELGDVDHDIDSTMRGSPVWREKEDLLASVPGVGRIVARTMVGELPELGTLGRKKMGALAGLAPFTRKSGKWIGQTRIGGGRPAVRTALFLAAQVAKRCNPVLKAFFQRLLARGKSKMAATIAVAHKLLTILNAILRDRRPWENGRVPVGGVAAPEQCARGARSP

SEQ ID NO: 203313 - protein, 367 aa, unidentified
MEKSSTTFVGMDVHKESIDVGIAAAGEARHYGRIAGDAASVDKLTRKLRSVHRDLLFVYEAGPCGFWLYRRLKAQGLECMVVSPSMTPRNAADRVKTDRRDSLKLARLARAGELEPIYVPDACDEAMRDLVRTREDAVCMQRQARQRLQALLLRNEIRYVGKSAWTQAHRRWISGLKLPNAAQQIAFEEYVQAVHEASERLERLAKAIAAELEHWRWRPVVEALQALRGVSAIHAVRIIAELGDLGRFESPRKLMGYLGLIPSEDSSGPRRRQGSITKAGNSSARRALVEAAHGYAYPARVSWVIARRQTGLSKSICDTAWKAQLRLCARFRRLAARRVPRNKIVVAIARELSGFVWAIARQVKPAL

SEQ ID NO: 203314 - protein, 344 aa, unidentified
MAQRNLIALDLAKATIQVEVEDLEHRKVLSCKKMTVKALEKYLAKQPPSIIAMEACSSAHHWCWYAERFDHETILLPPQHVAPYRQGHKTDATDTHAVREAAKRPDRKEAVKKTPELVALQTLLTVREHYVDDKRRLSNQIRMHLMEFGVRIPKSYAALKREVMPILADAENSLPDLVRSLIDRLYQSFIDISANLKELECELKQVVKQNECCQRLMQLEGVGPVCAVLMYVRIGNGAVFQNGKQAAALVGVTPQQHSTGGVINLGHIRKGGVDKQARATLLQGAKSVIQRLTNREQPPRTKKELWLHDLIHRRGVNIAAVALVNKNIRTAWAMLRRGEEYVVA

SEQ ID NO: 203315 - protein, 409 aa, unidentified
MRPILKCCCGIDVHKSMIKACLAKGPLNKSPKIEIRTYSTMTQDLIKLSEWLKENKVEAVAMESTGVYWKPIFNILESDFPVSIANPQYIKKIPGKKTDVSDSEWIATLLRCGLIPKSFIPPVLIRELRDLNRTRRKMVEHLASEKNRIQKVLEDANIKLTSVVSKVDGVSSMKMIEALLNQEEITREDIIAMVHGKLKNKIDALLKALDGRLTDHHRYLLRFHLKQIAFLADQVKELDDMIQKKMEIFRKEADLIRTVPGIGQNTASAIIAEIGTDMSQFPDEAHLSSWAGICPGNNESAGVKKNGKIRKGNKYLKATLCEAAWSASKKKGSAYSAYYNSIAKRKGKKRALVALAHRMLMDIFRVLKTGEPYVDEGAEAVYERNSYGRQKSAIRFLENSGYIVTKASA

SEQ ID NO: 203316 - protein, 368 aa, unidentified
MSKIRIVEVVGQEGLPTPKRPAAGTEVAMAIDISRSKAVYCLRWDGVEQRRLSTPLGMSHLRSLVEQYRECRLHVAYEACGFGYELAWQLQEQGVQVSVIAPSRIERAPGRQVKTDRVDVGKMARKLEKGELKAIYIPSRTIHAQRQLGRTYAQCVKERKRAQIRIRSMLQEQGRLGPLPTQGWKVYSTWVEAQDLPEPVRLCVRAHEHLRTLADQQAQRMRLELRTLARSESYKPLIRALCAQAGVGWLSAIRLVLELGDIGRFPTTAALPHYLGVTPSQYSSGELDHRGHILKCGPAALRAMLLQCAWSAVRRGSDAELKERFDRLAPRIGRKRAIVAAARRLAIKLRERWLKVLSTAEPAQASAA

SEQ ID NO: 203317 - protein, 336 aa, unidentified
MSLEESSVCVVDGAGRIVRETKVASEPEALVRFFRGLGIRMIRIGLEAGPLSQWLHAGLVAAGFEGVLLETRHVKAALSAMVNKTDRKDARGIAQLLRMGWFRPVHAKSPGAQEVRALLVARKLLQTKLLDVESSIRGILRGFGLKMGAVSKGRFVARVRELAAGHPMLERIAEPMLRAREALRTEYARLHGEMLAIAKPDPVCRRLMTAPGVGALVALTFKSAVDDPGRFTRSRALGAYFGLTPKKYQSGEKDVTGAISRVGDPMVRVTLYEAANIMLSRVTRFSSLKRWALDVAKRRGLKRAKVALARKLATVLHRIWIDGTTFHWGKQADAAV

SEQ ID NO: 203318 - protein, 315 aa, unidentified
MTKQLPAVNVGADVGKSQLDLYLLERDRALTVPNEERAIASLIRSLRRYRIERIVIEATGRLEQPFVRAALAQGLPVIVVSPLKIRRFAEAIGQLAKTDAIDARLIAQFAATVKPVARPPSDANAQAIKDLVVRRRQLITLRTMEKNRRQVMPQDLKSSIDRIIKTLDRELKRLEQLIDHAVDQHAPSRHKRELLTSMPSIGNSVATTLIGDLPELGSLNRREIASLTGVAPFNRDSGKLRGKRRIRGGRAHSRTALYLSAMVAIRFNPDIKRFYERLLAAGKHKKVALTACIRKIVTVLNAMIRDNSPWQPAMT

SEQ ID NO: 203319 - protein, 348 aa, unidentified
MLADQLDYVVGVDPHRDSHALAVVHVVSGVVVFEATVVASSDGYAHALKLVDQHAAGRRAFAVEGTGSFGAGLTRFLTVRGEQVLEVGRLRRERRSGGKTDALDAVRAARSVLTSERPATPRAGGERQALQALVAAREGAVNAKRAGLCQLRDLLITTPEPLRSQLRPLTRAQLLQRLAATRPGGGRDPELRGSMLALRSIARRVLQLTVEERELAREIELLTRRLAPQLLDQPGVGPHAAAQLVLSWSHQGRISSEAAFARLAGAAPIPASSGQTIRYRLDRSGDRKLNRALHMILVTRKRSHPATIAYIERRLHEGKTRREANRCLKRYLARSLYRLLEHGAPLAT

SEQ ID NO: 203320 - protein, 345 aa, unidentified
MKNTIVGVDLAKHVIQVCVVTNNKIVSNEELRSDEFMQWLHKTKKVTIVFEACAMSNYWKQQALKAGHDAKLISARLVAMIRQNQKTDKNDALAVAQASQLVDVNFINGKTFQQQEMQSIVRMRALAINHKIALTQQIRSLLLEFNIRVSNQKGGLSGTVLSVLEEADNGFVMPFRDALNATWQHYLAIIDSIKVYEDALTDVIDAHPECKKLLALEGVGVINAVNLYLAIGCGDAGVFKSGRDVSACIGLTPVQHSSGGKIKLGTISKRVRNASLRSCLVNGAMSVVNHLGNREAKTEKEQWLKQLTERRGKLCAAVALANKTVRTAFALLTQGTEYNAQPLNA

SEQ ID NO: 203321 - protein, 363 aa, unidentified
MKGQNRNSGVGPIIKDFVKALRVEANNLTMEQKYFIGIDISKQKIDVAIILSNYQVVFEKIVVNQDKNITSFFKGLMRKLKCSSSEILVCCETTGIYNKPLARVCIELNIDLWIEHALKIKFASSDLRGKSDRKDAMRIAEYCVRYQDRKHLYECPSVAIEELDTLCKVRETLLANKVGIENQLREAKSHDTRKFQQLKELFNRQLKSLEKDLRELELKIEEKLLENNEMRSNVELIKSVPGVGKRTAIQLVILTNNFKDFTSAKHLACYAGVVPFTNESGTIKKKPRISKKANLKLKTLLHLSAMAATRSKTELKQYFIRKVSEGKNKMSVINAIRNKLVHRIWAVIERQTPYVCQENFLTN

SEQ ID NO: 203322 - protein, 475 aa, unidentified
MNIKGSKKKNQVLSVNIFEQQEIIAKAEAIKAELKASTWHELETKGKFDKNDKLSFVSDDMLILGCDIGSETHYVRAIDTRGRELSKSAFGFSNTAEGFESMLDWSTKLAAANDKKQIVLGLEPTGHYWFCLTTWLVVKGISVVQVNPYAVKQTKEVEDNSQLKDDKKDPKLIANLVKDGNFGMPYLPEKLYADIRRLSMFRDQLNEDRIRNLNRLHREMKIYFPEYKDAFGKIDGAFSLELLKAAPFPDELAALGTEGMKQIWHEAKLRGRGYANASSILEYARKSVGIKDGADASRQAVKWFVSRIIELDEQLSDIENQLNQRCNEIPYAKNILAISGSGENILSGILAEMGDISRFDNVKEIQKLSGLGLVACSSGKHTGETKISHRGRKRLRYWLFQAAKSAVAHSEEFKELHVYYTTRKQNPLKKMQSLIVIACKILRVIFTILTKGTTYDPKKLLGDIVRPDQSIPQAA

SEQ ID NO: 203323 - protein, 452 aa, unidentified
MQKQAGKGRSKGLHLECIESNAAGIDVGATEIYVAVPQDRDPQSVRCFNTFTDDLRQMAAWLVHCGVTTAAMESTGVYWLPPYEILEAAGIRVCLVNSKHVKHVPGRKTDVQDCQWLQYLHSVGLLRASFRPESEVCAVRSLSRHRSSLLENAALHVQHIHKALTQMNLQIHHVLSDITGQSGMAIVEAIVDGEHDPARLAALCHQRVRSDRQTVIKSLVGNYRSEHLFTLKQSLQAYRYCRELMTDCDREIEQRIRQLNGKVHLPEKAPPPDPRVHRRSKNEFTFEMVPELYRIFGVDLTAIPGISALTAHILLAEIGPDLSRFPNVAAFASWLALCPANKKSGGKVLSSKTRQSNSRANTALRVAAQTLGRSRTHLGNFYRRLRGRLGAPQAITATAHKLARIVYHLLTTGQAYDESVFLHEDQRQAQRQEKHLRKQAKSLGFQLIAIPA

SEQ ID NO: 203324 - protein, 355 aa, unidentified
MCANKTGSFEDLVVVGVDIGKDTFHLVGFDRAGQLVMRKQIKRLALSATFEQLPRCIVGMEACLSAHFVSRTLRGMGFEPRIIPAIYVKPFNKGQKNDYNDAEAIAEAALRPNLRTVSEKDQDQLDLQALHRVRARLVSRRTASINQIRAFLIEQGITVRSGLRALRNSFEAILEQRRGEISPRMRGILIGLYGDWLWLDKRIEDVSGEIEEISRTEENCANVMTIPGIGPMISTAMVAAVGKGEAFDRGRDFAAWVGLVPTQYSTGGRTILGRITKRGSRYLRMLFVQAAKVIMMRQNRWSTFSFGPWLTEAVKRMPRNKAAVALANKLARTAWSVLRHGTRFDAPRDMAMETI

SEQ ID NO: 203325 - protein, 343 aa, unidentified
MTEVTTIGVDLAKNVFQIHGVDASSQPVIRRQLKRSQVLSFFKKQPPCLVGMEACASGHHWAREVSKLGHEVRLMPARYVKPYVKRNKNDAADAEAICEAVTRPTMRFVPIKTREQQSGLMQHRTRKLFVRQRTALINAMRAHLAEFGIVAGVGRNGVEKLVRLIDKGDDERVPSAARECLLALRDQLEAVKFRIHELDLRILAWHRSSELSLRLGEIPGVGPLIATALIASIPDPHAFRSGRDVSAWIGLVPKQNSTGGKERLGHISKAGDRYLRSLLMIGAFSLIKRAKQAGSTPRPWLAALLARRPTKVAAIALANKIARIAWAMMVRGTRYSEPAAQAA

SEQ ID NO: 203326 - protein, 339 aa, unidentified
MSAIVTIGIDLAKNVFAVHGVDATGKPALVRPSVPRAKLLELIVSLPPCLIGVEACSGAHHWAREFEKFGHTVRLMAPKFVIPYRLSGRRGKNDAADAAAICEAVTRPNMRFVPIKSIEQQGQLMVHRARQGFVEQRTATFNRIRGLLSELGIVLPLKAAVVRREAMVRLEDLPGWANTVIGDLLSEVSHLDERIAQYDRHIALMARQSIEAQRLMQLCGVGETTATALLSTIGNGRDFKCGRQLCAWLGLVPGQYSSGGKQRLGRITKAGDPYLRSLLVLGARAVLAAAKTKSDPISRWAVSLEQRRGYWKAIVAIAAKNARMCWAVLSRGEAFRLPA

SEQ ID NO: 203327 - protein, 341 aa, unidentified
MKNLFIGIDFSKEKVDVAIIFAENLSETASRVFNEFKTTVSGYKQLVKWVEQNSYGIDSSLWLFCGENTGDYSKGLCNFLYGKGYDMWLENAKSIKDASGLRRLKSDRADASMIAEYAMRNYDKAIMYEPLSESLAQLRELFLYRQIVVRHRCSFQVRRGEKILTMEKSPVKTMISQSGRHIVSELNKEVAKIDKRIAELIKSDEELSEVYTIVTSVPGIGTQNAVCLMIYTDNFRKFNYNSRKIACYYGIAPFGKDSGTSVHSDPHVHYMANRQIKAMLTQAALSAVNFNPIMARYYMRLVECGKKKQVALNNVKNKLIHLVTAMVRNHQLFSHEYKISA

SEQ ID NO: 203328 - protein, 356 aa, unidentified
MGRRPKVRKKQCNIMKNHQIGIDISKEKVNICLRGGRKSLWEDETKNTVASIKKALRKGMKDQGVALDDVIVCAEYTGRYIYPLVCACDDLGLFLWMEDPTRIKNSFGIARGKDDKIDARRIAEYADRFSDKAVAYGMPDKTLASIKSKLADRDMLLEDRRRYETQLHDQKGFMDPKDYAQKSRLWTAVIKTLNRQLELLDEQLDELIASDERISRQMELLKSVDGIGDRVALYMIAVTMGFTKFESPRQFFCYAGLAPFKYMSGKSIHSKSKVSQRANKHIKALLHLAAVSAATHMKDSEYRRYYERKTAEGKHPMSVLNVVRAKLVSRMFAVIRRDSKYQRNYNYSTNHEKKSA

SEQ ID NO: 203329 - protein, 351 aa, unidentified
MKNVAYLAMDVHAAHCVLGHMSSDGTFLGNKTFTTAEGNIIDALKAIQAKEKYLALEESNLAYWVAQVATPYVTEVISSDPKENALIYKSPNKTDKVDTRKLCRLLRLGELKRVYQPETDDRAIFKTAIQHYIDLRDQQTRLKNKIKASYRHWGVVDVRGQAVYGATHRETFLIKVKHLHIREQLQRLYTLMDQAESLQEQALKAVKQIGRKYPEIKKFKEIPGIGDVIAHTFDAFIQTPERFTNKRPLWRYCRLGITDRNSDGKPLGYKRLDKSGVSELKSLSYRAWLCAMKGDNEVKRFYSNSLRRTLNRVHARLNTQRKIIAVMYGMWKRGEPYNPKLFLDPSESGVV

SEQ ID NO: 203330 - protein, 324 aa, unidentified
MSDPDVFVGIDVAKATLCVHIQPEGDAGGHERTFEVANAGKGIASLVADLLKLSRAGRRLAIGFEASGGYERELGQALFDADLPCFLIDPARVRAFARAERQIAKTDPLDAGLIARCLKAVGHSLRPYAPNPLVLLLAENVRTRRHLLDQAVELEAQIETLSAPTLRRMMARQIASLRATAKAIEIEMRAILAGDGGTEQLYRRLRTAPGVGPILAATLVASLPELGRLSSRQIAALVGVAPFDRQSGRTDLRRTCHGGRPAVRSVLYMACISVTRMKRGPLKAFYQRLRENGKPPKVAIIATMRKLLVTLNAMVAKNTDWRAA

SEQ ID NO: 203331 - protein, 360 aa, unidentified
MKDKYIGFDIDSNKTVACVVEQGCKDQYTTLKTDVQQMQQYLAQQRQGGNPVHLTFEISGEAGCRYDALRPYVDTLTVSNPNKLTWIYRTRKKNDRIDARKQAVLLSIGEVPKVHIPSRQVRQWRGVIQQRRRIVTQIVSVKNRIRALVKANGFPQPLEPGSWWKAANVQWMQEQTQDWAEAAAEQLWRVHLSNLLEELTMLTRQLKAVTRYLDGYLATQAGAALLMSIPGVGPRTAEAILAYTDDVRRFKRSKQYAAYFGLTPKLDESGQTRRLGHISKEGPSVVRWLIVESAWRVIKRSKGFEAFYERIVGGQSQRKKVAVVATARKLLTIMRAMLLTGELFNEQMLSGSREADPAEA

SEQ ID NO: 203332 - protein, 339 aa, unidentified
MAILYVGIDLAKNVFAIHGVDEHGKPALVRPSVPRARLHQLVAALPPCTIGMEACSGAHHWARLFAKQGHTVRLMAPKFVAPYRMSGKRGKNDAADARAICEAVQRPNMRFVPVKSHDEQARLCVHRVRQGLVEQRTATINRIRGLLSEFGIVLAQKAATVRREAAAHLEDLPGWANTAVGDSLSELHRLDERITEYDRHVVHMAREDERSRALMQLSGIGSTTASALVSTIGNARDFKNGRQLAAWLGLVPGQYSSGGKTRLGGITKAGDGYLRTLLVLGAKAVLAAARTKHDRLSRWAMALEVRRGYWKAVIAIAAKNARMAWAVLAKGDEFKPLVA

SEQ ID NO: 203333 - protein, 309 aa, unidentified
MGNAPQFVAIDVSKAMLDLATPEGTWRTPNSASGIAALGKRLARYERPQLVCEATGRYGRLLARQMGKSGIAMSIVNPRQVRDFARATGQLAKTDVIDAKIILRFAQTMQPPETPHTPENRARLAEQVRRRRQLVDMLAIEKQRLSGLDDPDTLASIREHLAFLKSQIARCDVHIEAEIAADPMLARKSSLLQSIPGIGATTAAVLIAELPELGQADQKQIAALAGVAPMNRDSGQWRGQAHITGGRLSVRCALYMATLPAIRFNPTIRVFYQRLRADGKAPKVAITAAMRKLLIIANAIIQQNRPWST

SEQ ID NO: 203334 - protein, 448 aa, unidentified
MRKETIDFDVLKPHAAGIDVGSRSHYAAIGQRSEDLREFGVYNEDLLALAQWFLDNGIKTVAMESTGTYWQSLYTTLVSAGFEVVLCNARFLKNSRGKKTDVKDARWIQKMHTIGMTRGSFLPDLATEQLRTYCRHRTNLLEHSANTTRKMQKYLRLLNLRLDVVVNDITGLTGIAIIDAICNGETNAEKLASFRNGNCKKSAEEIAKALQTNHRKDFLFALQHEYQLYLNFQTKMKECDIEIEKLLNEQINSDDEKRQHFLDKKIHKRTNKNTPKNIDLNLLSYQYFEGVDLLAIEGVSHSTVLALMSEVGQGIHKFESAKQFASWLRLAPNNKVSGGKILSNKIPKGSNRLKIALRNAANAIGNLKDTSLSNFFKRIAFRKGRVSAISATARKLGVIIWNMVVKKIPYNPISAYEFLDQKRKRKVQEMKKLIHKFDITPNDLGLQL

SEQ ID NO: 203335 - protein, 354 aa, unidentified
MTDGSRALTPVVTAGLDVGDKYSYLCLIDQQSGEVMEEGRLRTTPEVFLRRFDSEQQMTVAIEAGTHSPWVSRKLEECGHKVLVANPRNTRLIYGQGRKTDKLDAEKLARLARVDPKLLSPLAHRGEASQAHLALIRSREVVVRSRAQLINHVRGTVKSFGARLPKCSTASFHKKVAACIPEELRPALEPLLETIASLSTRVRHYDRELEQLAEEHYPQTKLLRQVQGVGTLTALSFVLSVEDPGRFEESRSVGAYLGLVPSKDQSGERDPQKRISREGDEMLRRLLVGSAHYILGPFGEDSDLRRQGLKIAGGAAKNARKRAVVAVARKLSVLFCTICGSQAKSTSCFTTPDN

SEQ ID NO: 203336 - protein, 345 aa, unidentified
MFAGIDSHKDTLAVAVIDSAGRPVVVRQLRNDAAGFTALTSLITEHAAQRVGVEGSTNFGWAAAMRLAEAGVTVVEVPPGLTSRERARRPGQGKTDPVDALAIARITARETTLPPVRPMEGLPADLRVLMDYRAQLIDERTALANRVHAELGWLQPGYQHALPRLTSPTHLRTALAMLEGEGGIRAGVTRTRLIRMLAIHAELAGLRTQITELVTASGTSLTGIYGIGIFVAARILAEVGDVRRYPSRHAFAAANGSAPIPASSGRTVRHRLNRGGNRQLNRALYTMAITEIRADTEGRAYYQRKRAEGKTGREALRCLKRRLSDVIYRTLRADQTSASALDAAA

SEQ ID NO: 203337 - protein, 403 aa, unidentified
MLNAVGIDVSKGKSTVAVLQPGGVVVRKPFNVVHSISGLKELKDYILSLEGETRAVMECTGRYHEPVLLALSEAGIFVSAVNPHLIKNFGNNSIRKVKSDPADAKKIAKYALSNWEDIHPYTSLDDTRSLLKQMNSQRDFYVKQKVTAKVSLISLLDMTFPGANEIFVSCARPDGSEKWIDFVSSFWHVDCVRKLGLKAFTERYRAFCKRYEYLFSKRKAREIFEASKELVATVPKEKGYKDLIERSVEHVRTVCGITARIQSEMLALASTLPEFPVVMSMKGVGNVLGPQLMAEIGDITRFTHREAITAFAGVDPGVDDSGSRHRLSVPASKCGSARLRKALFQVMSVLIQREPDDPVYRFLDKKRSEGKPYNVYMTASANKFLRIYYGKVKAYLAAREMNG

SEQ ID NO: 203338 - protein, 354 aa, unidentified
MGTQKIIAVDLGKFKSVFCVMDVMSRQHSFETVPTTPADVHDLFARHVTADAAATHVVIETCDTAGWVHDLCAALGVAITVIHANGEAWQWRRVKRKTDRDDALKLAKLALMDQLPAVHVPSPPQRQKRRLILHRRSVVTRRTQSRNAIRSIFSQQGLSLVPGGRQWTKAGLEQLREQARPLAACGPDDLWRGRLAIELDLMAAVDQQLKLIDATLDALADDRTKLLQTIKGVGPRVAEATVLYLDDPHRFKNANAVAGYAGLVPKQIESGTMSRHGHITRRGPSLLRSMLTEAAWMVWRHNAWAKLWVQKISHGSRARRKIAIVALARKLLTMLWAMLKTNQPFREPTAAMTG

SEQ ID NO: 203339 - protein, 317 aa, unidentified
MTNVTFPQLIQRGCGIDVHLKVVVATIDGVGIRKETRSFDTFTSCLTEMKEWLLANGITHVAMESTGVYWKPVMRVLEADIPNVWIVNARHIKNVPGHKTDKMDSEWICKLLLAGLLKPSYIPPKEQRQLRDLTRYRNKLIQAIAAEKNRMMRVLEDCNIKLSSVVANTSGVTATALIDMLCEGRNLTIEDIESVYHKKLSASPQELLEACTGFVEEHHVYMLQMIRKSIAQTQGLVDELSKRIKEILIKYDNVLELLKEIPGFNTKVVEDLVSEIGLDMSAFPSEKHLASWAGICPGNNESAGKKKAEELLTVTNK

SEQ ID NO: 203340 - protein, 345 aa, unidentified
MPIVGGFDIHRRQITFDYLDTVTGQVCRGQITPADREHLRAWLARFAGRDDIAFAVEGCAGWRYVAEELAAAGISAHLAEPADTAARRGRKRHAKTDKTDARHLRMLLAEGRLPECWIPPARILECRALLELYNDLRRERTAWAQRIHAVLFHQGAPVLGEGALRTDKGVAELRAAAAVHLSPAGQLQVATALEVIDGLEARLHLVRHQLLDAARHLAGAKALAARLYGVGPVTALAITCWLAGAGRFSSSRQAVRFAGLDITVSSSDRKGPPGKLSRQGPPVLRWAVYEAGKTHARTSAPDHRYYAAVKDRKNSKRACLSEARKILRQAHHILAELGDDALAAA

SEQ ID NO: 203341 - protein, 337 aa, unidentified
MSVYVGIDVHRKRSQVAVVTEDGQVQLNKNVVNGTETVLRLIGDLPAGTPVAFEAAFGWGWLVQLLEDYGFDPHLVHPLRCKAIASARLKNDKVDAAILAQLLRADLLPEAWIAPAEVRQLRALLRHRASLVRLGTQLRNRIHAVAADHGYDRSASYWTGPGRGWLAELDLPAASREIITDCLAVIDGLAPLIDRIDGELHAHAKADPRVKVLRTLPGVGEFTALVMVAEIGDISRFGSARKLASWAGLTPTVRGSDLTVRHGHISKQGSAWLRWVLNQAAQTAKRSPEFAAAYAAIARRRGKKIATIAIARKLLTRAWHLLSDMQATSTDEPPRRP

SEQ ID NO: 203342 - protein, 338 aa, unidentified
MKLFGAIDLHSNNNVTVLIDERDEVVYRKRLPNDLRLIIEQLSPYQSTLEGIVVESTYNWYWLVDGLMEQEHRVHLANTAAIQQYEGLKYTDDDSDARWLAHLLRLGVLPQGYIYPKEERAVRDLLRKRSQLVHHKTANLLSVQNLYTRNTGLSIGANRIKKLTPEQVDGLFTHGDVALAVKANLSVMRCLEAEIKSLEQVVKERVKLKPAFRYLLTVSGIGQTLALTIMLETGDIGRFPRVGNFASYCRCVGSEKISNGKRKGKGNTKNGNKYLSWAFVEAANFAIRYEPLIGRFYQRKKAKTHGVVAIKAVAHKLSRACYYVMRDEVPFDVGRAFA

SEQ ID NO: 203343 - protein, 333 aa, unidentified
MDMYDQHKQDRHEQAAASGMPNYVGIDVSKATLEVAVRPSGEAWQSTNDEAGIAALVNRIQALAAQLIVLEATGGLERLVAAALALAELSVAVVNPRQVRNFAKATGRLAKTDAVDAAVLAHFAQALQPTPRPLPDAQSQALAALVERRRQVVSMLTAEKNRRQRALPAVHAKVAAHIAWLEQALAEVDDELDQLLRASPLWRERDQLQRSVPGVGPAVSRTLLAQLPELGQGSVKHLAMLVGLAPLNRDSGAWRGSRAIWGGRQHVRAALYMAALVGVRHNPVLHAFYERLVAGGKPKKVALTACMHKLLTILHAVLRDRTPWTPVHATVLP

SEQ ID NO: 203344 - protein, 436 aa, unidentified
MAVLAAIDGSKGGRVLEETNDTEEIIGRVAALDIGKAELVCCVRVPGGQGSGKRLQEVRTYPTMTRSLLVLADRLGELGVTRVVMEATSDYWKSPFYLLEAHGFEVWLVNAKDVKHLPGRPKTDKLDAVWLCKVAERQMLRPSFVPPPPIRRLRDLTRYRADLVAVRTAEKNRVEKLLEDAQIKLSVVASDIFGVSGRDMMAALIAGERDPKVLAQLARRRLRAKLSLLEEAFVGHFSDHHAFLLATMLGRIDQATADIAALEAHIEAQIAPFAQAADRLDEITGVGRAAAQVIIAEIGTDMGRFPTPGQLVSWARFAPGVKESAGKKKGKATTGHGNPYLARVLGEAAAAAGKTNTFLGERYRRIARRRGTRKAIVAVGRSILIIIWHLLSDPQARFHDLGPDFYDTRIDADRKKRNHVRQLEALGYTVTLQPAA

SEQ ID NO: 203345 - protein, 346 aa, unidentified
MGSYVGLDVSLRSTSVHVVDRDGKCLWRGKCATDPSVLVETLRRHAPGIARVGLETGFLSTWLCHALAEAGLPVVCMDARQAKAVLQVRPNKTDANDAEGLAQLLRSGFYREVRVKSWDGMLLRNLVAARRQLVRTEVDLANQIRGILRTFGLALPPGGGGGCRFEAAVRERAPMRPGLDLVVLPLLDAWRAVRDRVVVLTSAVVAAARRDRRCRLLMTAPGVGAITALTYVGTVEDPVLFRGARTVGAWLGLTPTRYQSGDTDVSGRISRCGDPLLRTYLYEAANQVLTRSRSDSALRRWGLMLKARNGHKKAVVAVARKLAVILHAMWSRGEAFRAEPPGAVAA

SEQ ID NO: 203346 - protein, 351 aa, unidentified
MLIIGCDFHPSFQQIAYLDSESGEYGERRLTHPAEAKVFYGSLAGRQVRIGLEATGNFRWFRRFLGERGHEMLLGNPSAIHASNPRRQKTDKRDARHLLTLLVEDRFPAVWQPPVENEELRQLLLHRCRMVRLRTKVKNQLDAVAKNEGLLSARGWQEKRCQIEALPLPGWYAERRKDMFALLDELDRRIQPLDEAVKKAAGENAGARLLMTHPGVGPVVSLAYVLTIGDWQRFPRGKHVASYLGLIPAEESSSDKRRLGHISKQGNELLRWLLVEAATTAQRHDLSWHREYLRLSMNKHHGVAKVAIAHKLAIRLYWMLRSGQDYQQVVERGSHAGQSVCPSGCGLTPRT

SEQ ID NO: 203347 - protein, 335 aa, unidentified
MLYVGIDLHKEKVYGIVMNENGKLIKKEKFENEPEEFHKFLKNMEKAVVAIESTGFAIPVYDFLKENGYETKVAHPLKTRAIAEAKIKTDKIDARILANLLRSDLLPSSYIPSKEIRKIRDMTRHRAYMVRFRTRLKNKIHAELAKRWIKTKGNIFTKKGIEWLRSLGIESINRYLDVMEILNEKIREISLEIKEIAKENEDAKLLMTIPGINYYSAMLILAEIGDVKRFSDSHKLCAYAGLIPSTYQSGNKMYHGHITKQGNKWLRWILIQCVHIHIKYDTHLTRFYKRIARRRGKKIAVVATASKMLRVIYQMLINKEKFEPFPVKSRKFSVG

SEQ ID NO: 203348 - protein, 430 aa, unidentified
MKYVEKQNEKIEIINEGTLVIGCDIAKATHVARAFDFRGIERGKALHFDNTQNGFNKLVLWSKKIMIDNNKSDVMFGVEPTGHYWLCLSQFINESKMAQMVLINPSHTKKAKELDDNSPTKDDHKDAKTIAKLMIEGRYSFAHIHTGEYAELRAGMSQRQQLQNVLSTVKGRITTWLDRYFPEFASVYKSYEGKAALAILKHFPLPQDILRPKTEAEMDIWRKQVIRNAGVKKALALEVAARQTVGLKSAHEFARMEIDYLLVQYELINEQLTTLMTKIEAVLARLPEAKAMLDIPGVGVITVAGFLAETGDLKNYRHWRQIIRLAGFNLKTNSSGKHRGKTTITKRGRPELRALLYRCVLALIANNPEFKALHHYFITRKENPLKKMQSMIAICGKLIRILFSIGRNQSIYRPEKAFGELSQKENQAAA

SEQ ID NO: 203349 - protein, 317 aa, unidentified
MTGNRKVVGIDVSKATLDCAAVPVKSSLQVGNDDAGIAQLITWLREVKPDLVVLEASGGYETGAATALAGALFRVAVVNPRQVRDFAKAKGRLAKTDRIDAVVIAEFGVAIDPQVSQLPDEDTKALQGLLARRSQLVGMRTQELNRVAQASSALRPQIKDHIAWLNEAIRKCDIDLTAKLRSSPAWKTKDDLFRSMPGIGPINSRMLMACLPELGQLNRQKICALVGVAPFNRDSGKFKGQRRIWGGRAQVREALYMAALTAKRCNPVIRILYERLTARGKPHKVAMVACMRKMLIILNTMTKNNANWNPNLKTIGN

SEQ ID NO: 203350 - protein, 346 aa, unidentified
MLTIGLDLHKRETQLCIGHEEGTLEERRIATTRERFTAVLGRLPRARILLEASTESEWVARHLEQLGHEVIVADPNFAPMYATRSRRTKTDRRDARTLMDACRLGAYRPAHRLGDERRHVRAELAVRDALVRTRTRYLGLAKALLRRDGLRVASCESHLAVQRIAALELSPPLKEELQPLFEVLLPINTQIAAADRRISALEETDPAVALLTSVPGIGPLTASAVVATIDDVTRFTCAHQFEAFLGLVPGERSSGEKRRIGPITKAGNSRVRWLLVEAAWRILRSTKADTAALREWTLGIAERRGKRIAVVALARRLAGVLYAIWRDQQPFHPAKIRRPRPRAVAA

SEQ ID NO: 203351 - protein, 340 aa, unidentified
MAIVAGFDVHRAQITFDALDGETRELTRGRIAADPGAVRGWVERFGEREVHVAVEACTGWLFVCEALNEAGAVAHLAEPVETSALRGKKRRAKTDRADARWLRTLLAEGRLPEAWIPPAHVREWRTRTRLRKTLIDERTAWLQRVRATLFHHGVRGVPAELRSAAGREFLARLELPAADLERIEVALQMVDALDRQLGPIEQALRRLARRQPGCRALMDHFGIGELTAPMILCELGDASRLSASRKAVRCAGLDIGVHRSDRRARVGKLTRQGSPQLRWALFEVAQSACRPQSPDHADYLALKARGLSHVRASMTIARKFARRSFHTLRELGPSALDPVS

SEQ ID NO: 203352 - protein, 344 aa, unidentified
MEQYVGLDVSQEVTHLCVVDSKGKTAWQGKCSSTPDAIAAAIRARAPKVARIGLESGPLSTWHWHALNAMGLPVVCLDARHAQAALSMQVNKTDKNDAAGLAQIVRTGWYREVQVKSMDSHTVRTMLGTRGQLVGMRTNIRNQIRGLLKTFGIVLGKSTGPLLEKQVSELTNGGGILSDSLRALLAILRSVSEEVAKLDRIAHQHAKQHKICRHLMTIPSVGPLTAAAFVTAVDDPAKFRKSKSVGAFLGLTPRRYQSGDADVNGRISKCGDHLARTYLFEAATSLLTRVQKWSALKAWGLRIAKRGGMRKAKVAVARKLAVIMHQMWLTGEAFRWSNTESSAA

SEQ ID NO: 203353 - protein, 398 aa, unidentified
MSLDPHEEPAAIQTHIGAIFISLELSRSKWLITSLVPGGGQKMSRHSVEAGNLAGLLARFWAIRDKASARTGISYPIIVIQEAGLDGFWIHRALEKEGIESHVVDAASIAVSRRRRRAKTDKIDGEALLRVLLAFKRGEPRVCSMARAPTPQEEDRRRICRERKTLIVERIRHVNRIKGLLFSQGIGDYEPLRRDRRRALEAVRTGDGRALGANMKAQIGRELDRLELLLGQIAAVEAERDAMLAREAEAKAARGANRAPAAVEMLMDLRGLGPDTVAMLWTEAFYRSFDNRRQLAAFVGLAGTPWKSGSIDREQGVSKGGNHRLRTAMIQLAWLWPTHQPDSALARWFRERTKGASKLQKKKMAVALARKLLVALWKWVDAGVVIEGAVLKSAARAS

SEQ ID NO: 203354 - protein, 348 aa, unidentified
MTSLTDKTRRVVGGVDTHRDVHVAAVVDDIGRVLGSAEFPSTISGHRCLLRWLRRHGELDRVGVEGTGAWGAGLSRFLIAEGITVVEVDRPNRQHRRRHGKSDTTDAEAAARAALNGDANGAPKTRTGNVEAIRALRVARRSAIKARTQAANQLHALVVTAPDELRGQLRALPLAELAATAARFRPGHTITAVTGTKIALAEIARRWLALSEEIARLDEHLDRLVAATAPRLVARHGIGTDTAGALLVAAGDNPHRLRNERSFAALCGVSPLDASSGLQRRHRLNRGGDRDANHALWRIALVRMATCPRTRAYVARRTAEGRTKKEIIRCLKRYIAREIHADLLDLQQ

SEQ ID NO: 203355 - protein, 424 aa, unidentified
MTIDNAVGIDVSMLMRTFVGLRRPAEIVLRSRLVPHTADALREIAGEILALPGSTVAFCECTGVYHEPVVKALRDAGVAIVALNPLLVHEFGGDTLRKVETDKADARKIALYGLTWGYKFSPSVEDDPIRVTLKAVSRQYVFFSKQKTAQRNHLHALSERVFPGVQELFTSKDRDDGSVKWVDFLNEFPHAECVGRLSPARFGERYKKWSRKHGYYAVRAEHIYSHAKSCVTSLPFDADAKLLVQTAIAQVDQVSATVAVYLKRMVELAKSLPEYETVNALYGCGDATGPQLIAEIGDVRRFAERKGCKSLIAFAGVAPCDSQSGTYDAVSNPIEKRGSPYLRRALFCAVNTHLLNSPADEPVYRMLNKKRSEGKKYLVFMTAAMNKFLKIYYARVMELYDCLAACEITSELNQPAAPRPSCVA

SEQ ID NO: 203356 - protein, 350 aa, unidentified
MPTLFGLDVHAASTTFAVVGESGKRLGTHVVETNGQALVEQLKTIPGQRHVCLEEGTQSMWLYEILSPHAEEVVVVMVSESRGQKNDAKDAFTLAEQLRTGAISKHVFKEVGEYGTLRELGRTHTMVVQDVVRVQNRIKALFRSRGIAVVGKSVYSEEGREACLKKLPHASRGAATTLYAQYDAVEAIRRQASIDLVTEAHRHPMSRVLESCPGLGPIRVAQLMPIVVSPARFRTKRQFWSYCGLGIVMRSSSDWVRKPDGGWARAEVKQTRGLNVNHNSTLKSVFKGAATTVIAQLETEPLHQDYQRLIAAGTKPNLAKLTIARKLAAIALSMWKSKEKYDPTKHRKQG

SEQ ID NO: 203357 - protein, 343 aa, unidentified
MQAITTIGLDIAKSVFQVHGVDAGGQPVIRRQLKRRHVLTFFQKLPPCLVGIEACASSHHWSRELQALGHTVRLMPPAYVKPYVKRHKNDATDAEAICEAVTRANMRFVATKTPEQQSCLMLHRTRHLFIRQQTAVINAIRAHLAEFGIVAPVGRNGVEQLLGIVADPNDKRLPEVARVCIAALGTQLRVLKAQVLNFDRQIMAWHRSNETSKRLDEIPGVGPVLATALVASVADPKAFRSGRDFSAWIGLVPKQYSSGGKDKLGSISKQGDRYLRGLFTAGALAVIRYAKIHGTKHRPWLTALLARRPTKVVAIALANKLARMAWAMMAKGERYKQPVALAA

SEQ ID NO: 203358 - protein, 379 aa, unidentified
MRDFSRYVGIDIHKKTMTWVALDGKKRELGSGKMPMGALEGWAKKTLTASDRVVIEATGNSHHVHGILKAYAGEVLMANPLAMHDRTKAMRKTDRVDAMALAEALACDYVKSVWVPDEETRLKREWATHRRGLSAQLTRTKNRMRACLYRHGRDYTGPGILDEKAAEEVKKGSLPEMVKSVFLSHWRVGRALKDEIERLEGEFSRESLKDDQCLRLMTLPGVKAQAAIIITSAVGDIERFATPKKLASYSGLVTSVSKSDETVRYGPITKQGRSLLRWIMVEAAHAAVMTPGPLRDRYQRLVRKGKKSQQAIVAVARHMLELVWIILKRKTVFKHATAKYLVFKFRSVLRKAYGRCPQKAAPALMNAVMGWKACPTTSS

SEQ ID NO: 203359 - protein, 336 aa, unidentified
MSHYCGIDLHSNNHVMVVIDGEDKRVFEKRLSNDLSLTLNALSPYQESLQGIAVESTFNWYWLVDGLQEHGYDLRLVNTAAVKQYDGLKYSDDHHDAFHLAHLMRLGILPTGYIYPKEQRAIRDLLRRRLSLVRTASTQLISVQSQIWRSTGLRIKSTDLRKPDFISPRVDDYTLQAIHAGLAVYQTLHREIDVLEKSAYQAVKLTDAFKLLQTVTGIGKILGLTIMLETGTIGRFAGPGNYASYCRCVDSTRTSNGKKKGEGNAKAGNKYLSWAFSEAAHFAVRFEPLAQRFYERKKAKTNGIIAIRAVARKLARATWMMLKHQVPYDAKRMFPG

SEQ ID NO: 203360 - protein, 330 aa, unidentified
MKTWNVVLGVDVSKKTVDICWAEQELFLQVDNKSEGFSKFKKWCKDNQIDLQKTFIVLEYTGGYEYRFIQFCESQSIDYRRVPGLEIKKSMGMTRGKSDKADAFRISQYGEEKIRRLEPDKPLDNNILELKTLLSFRKRLVRESAGYQSTVKERKHMYEVDDQEMITAIANEKMEANARYIRKVEERIMELIKSNESMHFNYLIITSIRGIGPVNGWMTIAYTENFISFPDARHYAVYVGVIPFEHTSGTSIKGRRRTSNLAQKELKQELNQAAKTAMQYDPEIKAYAERKMKSKDYGLVLNNIKFKLILRMFSLVKRGVKYVENYKRAA

SEQ ID NO: 203361 - protein, 353 aa, unidentified
MKNRNSLGTRSKVTIGMDTSDKRNAVCILRNDTGEVIKRISVANTPEGMTAFFSRFSPTSVAFEVGCHSPWINDVLTGLGHDTVVANPRQVALISRSIRKTDKHDAELLARLLRADRELLRAIKHRTRDGRIDLALLRTRNRLIGTRTGLIASIHGTVKSFGERIRGMDASVFHKHAAQDIPEDLLPQLEPLLEVLTTLAKQINSVNKEVTRLCREKYPETTLLRQIPRVGEITSLTFLLTIEDPERFEKSRDVGAYVGLIPRKAESGDRSPELPITKAGDRELRRLLVQCAHQVIGKLGPPSDLKDWGLALAARGKKQAKRRAVVAVARKLAVLMHRLWVTGEVYRPRRDVA

SEQ ID NO: 203362 - protein, 324 aa, unidentified
MEQIEQWIGIDVCKRWLDVQIRPQGMSFRVSNNPLGIQELMTHLKQPSAVGRIILEATGGYERQVALHLWTLNYPVVVINARQARNFAKAANQLAKTERVDAAILAWFGEALKPPIRPFASEAQAQLQDLVTRRRQLEEMLTAEQNRLSGLRGTAQADVEAHLDWLRERIHQLDQQIEAQISQCQEWQIKQTRLKSVPGVGQVVAATLLALLPELGQLSTQKIATLVGVAPLNRDSGQRQGKRTIFGGRAAVRQMLYMATLVAVRHNRVIRAFYEQLLNRGKPTKVALVACMHKLLTILNAMIRTSTDWRSPKQVVSQPAALPT

SEQ ID NO: 203363 - protein, 416 aa, unidentified
MDIVHEQCAGLDVHKKTVVACVLRSAPGGVIDKEVRTFGTMTADLEAMRDWLAERGCSHVAMEATGVYWKPVYNVLEQREALTLLVINAQHLKTVPGRKTDVKDAEWIATLLRHGLLRASFIPDRHQRELRELVRYRTALIHQRAAEVNRLQKTLEGANIKLAAVLSDVTGVSGQRILEALIEGESDPEQLAELAHVRVLKHKREALEQAVVGRLSDVLRFVVQQQLQHLHDLEAQIATCDAKVADLLRPFEAALERLRSITGVGPRTAEIILVEVGLAIQRFPTARHVSAWAGMCPGNLESAGKRQRVGTRKGSPWLRAALAEAAWAASKSKDAYLPALFRRLSARRGKKRAIVAVGHSILVTAYYLLTRGAMYQDLGETYFDERDRQNVVRRSIRRLQGLGYTVHLESTDTKAA

SEQ ID NO: 203364 - protein, 440 aa, unidentified
MILIREVADAPVIMGISKPAGLKSPCGEVKIMNPLFVGIDVSSRNNVAYLMKPDGSKHSSFSVQNNLGGAKILSERIVSALESVPLSDLVIGLEATSIYGDSLVYALREDGSLGRFQRKIHVLNPKQVRKFKEAYPDLPKNDWVDAFVIADHLRFGRIAKEVYMDDYRYQALRTLTRSRFDIIQNLTREKQRFANYLFLKCSGIAQAKDIQNTSATTIALMERFETVDDLANADLDELTAFIAETGRGRFADPDAAAKAVQAAARGSYRLPKTVNDTVNQAMAVSIASMRALKEQVKVLDKAIEQQFEIIPNTLTSIPGIGKVYSAGIIAEIGDIHRFDSQASVAKFAGLVWHRNQSGDFEAEHSQMIKSGNRYLRYYLLEAANSVRRCDSEFRRYYDLKFKEVNKCKARNEIQELIRAQKNVERFFAEEKDTTEKILTC

SEQ ID NO: 203365 - protein, 347 aa, unidentified
MNHYAGIDVSLECSSVCVVDANGKIVREAKVASEPEALIAWFGSLGLCLERIGLEAGPLSQWLYAEFKRAGLAVELLETRHVRKAFEAMPVKSDRNDARGIAQLMRLGWFRPVHCKSIEAQEVRAVLTARKLVQSKLQDVENSLRGILRGFGLKIGKTTPKTYAERVQELVAGHPSLERIGAALLAVRSVLLREFNAFEKQARSMARADAKARLLMSAPAVGPIVSLTYASAIDDPARFRSSKQAGPHFGLTPKKYQSGETDISGRISKIGDAAVREALYQSAHLILTKPIRGCTELKSWAMRIAKRAGMAKAKVALARKLAVIMHRMLADNAVFNPNAKAARMAAI

SEQ ID NO: 203366 - protein, 318 aa, unidentified
MNSYSKNESANPAVNFVGMDVSKAKLDSFVTGGKPRVDDNTSRGHAALIGHLRGLQNPRVVCEASGGYERAAVAALLDAGIGVCVVPPGRVRHFALAEGLLAKTDRIDAELLARYGEKIRPPLELPADPAAVRLREMLDYRRIISDRRVATSAQLSLAKGYLREGLQAQLDGLKAALRQVNKDIAAHIKADPVLRDKAKRLRQLCGVGPMLAATLLAYLPELGLEGDKTLASLAGVAPHPADSGQYRGKRRIRGGRAVVRDVLYMAAVTASTHNPILAAFYQRLTKKGKPGKVALVAVMRKMLSVLNRLIADPQFSLA

SEQ ID NO: 203367 - protein, 346 aa, unidentified
MMIIGCDFHPSWQQVSWLDTETGETGERKMVHASGDAKTFYQQLAAPALIGVEATGNSQWFIELVQDLGHEIWIGDAAQIRASYVRKEKTDKRDAAHILKLVVEGRFPRLWTPDREQRDLRQLVLHRHKLVEIRSRVKNELQHLSLNKGMQRKQKLWSQAGQKLLRELPLKPWAACRREDLLGLLAMLNQQIGKLDQAVQQAADQHPQAKLLMTQPGVGPNTALAYVLTIGDVSRFPRGKQVASYLGLIPREESSGGRQKLGAISKQGNRLVRSLLVEAAQIAVRFDPGFRKQYLHCCHQKPKGVAKVAAARKLAVRLYWMLRTQTAYPEIVRIESSPRVPLVGAS

SEQ ID NO: 203368 - protein, 339 aa, unidentified
MYPFYLGIDLHLKRTFMVLMNAKGEIIEKERISNQEITKYLQKKVPQETYAVLEATRNWPFMYDVLNEHVQQVDLVHAKGVRAIANAAVKTDQIDASTLAHLARMNYIPKAYAASKETRDLRQLLRHREWMVRQRSKAKNRIHAVLAAYNLVSPVTDLFGAVGREYLYDVMEKELRPSSRRVVEDHLSLIDHLTERIRALEKSISLNEKEEHIVNLLRSMPGVGRLIALIILAEVGDISRFHSPKALCSWAGLTPKVHSSDAVVQHGHITKEGSRYLRSAMVQAATTACRVSPKWYRVHEHMAYRCGRRAARVAVARRLLTVIYYMWKRDQPYQENYGQ

SEQ ID NO: 203369 - protein, 344 aa, unidentified
MEYFAGLDVSVRSTSICVVNADGTVVLEVKVATEPAAIAEGLKHAVQGGAFKRVGLEAGPLSQWLYAALATMGFPVVCVETRHMKAALSAQINKSDRNDARGIAHMMRVGLYKPVHVKTLESQERRMLLASRKLLVGKMFDIERELRATLRNFGLKVGQVSAGGFEARVAELVAAYPRLAAITGPMLAARRALREQYTVLHRMLIAIAHDDPVCRRLMTVPGIGPVVSVAYRSAVDIPERFPHSKTVGASVGLTPRRYQSGDLDHSGHISRCGDAGLRVLLYEAAQSLLTVTKKWSWLKAWAVQVAKRRGLKRAIVALSRRLAVILHRIWVDGTEFNWSRPAAT

SEQ ID NO: 203370 - protein, 453 aa, unidentified
MSIDTTDPGADRVVRVQVGIDAAVVANHQVTIRETTRDGQVQLSRFHAPPTIAGLTRLSERLAAYPHVLAVAEPTSMTWLGLHVALHEAGCDLALVGTRHAARLRGAISGKNKSDVIDADVLAMAGDVFTLSPLRPPTPPQLALRRAVVRRGKLVIDGNRSRRRLISLARWAFPDVWEEFAGSWPTAVAVLTRWPDLTALASARRSSVTNVVAAHTRGVPDVDARAERIRTAAGRTAAFWQGHLDLQALAWETSEHLRDIALAAEQIERATTQAHHYWAALYGDDPLLLSVPGMGPMTAPTIRAFFADASAFPSAKAAAAYVGLTPSTWSSGTVVQPSRAITKEGPAVLRLACYQAAGGARRVDPQLAAYYRHLMVERGHCHTQATIAVARKLVERTWTVLTRGQPFEYRDLDGTPLTRAAAKDAARSLAVPKTVRARARARSAATQRSKLTK

SEQ ID NO: 203371 - protein, 389 aa, unidentified
MKIYVGIDIAKLNHFAAAISSDGEIIIEPFKFTNDADGFQLLVSKLESFDKNSLIIGLESTAHYGDNLVRYLVTELYQVCVLNPIKTCQMRKNNVRKTKTDKVDTFVIAKTLMMQDNLRFVSFFDLDMMDLKALGRFRQKTIKQRTRLKIQLTTYVDQVFPEIQYFFKSGLHQHAVYALLKEAPSPKEIASMHMTHLANLLKVNSHGHFTKEQAKELRVLAQKSVGANDSAISIQITQTIQQIELLDSQLEKIEAEMTDIMKFNDSVIMTIPGIGYINGGMILGEIGDIHRFSNPNKLLAFAGLDPSVYQSGNFQAKTTRMSKRGSRVLRYALVNAAWNVVRNNATFKAYYDAKRAEGRSHYNALGHCSGKLVRVIWKMLTDNVEFNLK

SEQ ID NO: 203372 - protein, 343 aa, unidentified
MSEVSIIGLDLAKHVFQAHGAGHDGRVLFRKRLRRDEVLAFFSRQPFCRVVMEACGGSHYWARELQQLGHDVKLIPPAHVKPFVRRNKTDAADAEAICEAAVRPNARFVPIKSEVAQGGATLLRTRQLLERQRTQAINALRGHMAEYGFIAPQGRWHVDRLVAMIEDKEVALREEVRIGLTALASTIASLTQHLDRLDGQIKASVKQNETARRLMTIPGVGPITAASIVALVSDPSVFRRGRDLSAWVGLTPREHSSGGKQHLGHISKQGDKTLRRLFLLGATAVVRQALMRPLTPNTWLGSMLARKPRMLVITALANKIARVAWALMAKGGVYGEKAEVKVG

SEQ ID NO: 203373 - protein, 348 aa, unidentified
MDHIIVGVDTHKANHIAVAINAHGGRLDTITIPATRKGYSSLQAWACKLGHIRAFGIEGTGSYGAGLSRALLAHGHTVLDVMRPNRQLRYLHGKSDTLDAESAARSVLNGQATALAKAQTGSSEMIRHIKIARDSAVKSKSQAMITLRTLIINAPSDLRDALDQIKGPIALVRHIATFRPGEIISPSSSAKAAMRAIARRWLMLHEEIAEHECELERMVTDKAPALMKSFGISTMTVAEMLILIGDNPERIKSEAALAKMCGVCPIPASSGKTSRMRLNRGGNRQANAAIYRVAVVRMRDDDRTKTYATRRTAEGKTRREIVRCIKRYIIREIYRYLCTPLTSQLSGA

SEQ ID NO: 203374 - protein, 412 aa, unidentified
MSETIQRFVALDIHKHYVVVGAVNAQQEVVLHPRRVSFVQFDGWAQKHLRPTDAVVLEATTNAWYVHDLLEPLVARVVVAHAYHVKLIAASFVSTDKRSTLALARLLAANIIPEVWVPPLQVRELRALVAHRERLVSQRTAAKNRLHSVLHRHNIIAQEGRPFSEANRDWWDSLPVSPTQKLRARHDLAVIEHLTSLIEEAEDELARLSVSDPWADVVPFLIQLPGMGLLTAMTILGAIGDITRFAKAKKLVGYSGLGSRVHDSGKTHRTGGITKQGRRDLRAAMVEAAWAAVRSHLLWQAKFDKLAIRIGKQKAIVAIAHKLLVVVWHVLTEQAADRHADPEKVAFKFMIWSWKLDNHLRDGLTTRQFIRYHLMRLQIGDDLTHIRRGGQDRGIASAEEVLALRPELRPVS

SEQ ID NO: 203375 - protein, 293 aa, unidentified
MLIHYIDIAKRNFVIAVSSLSKTKTETNNPKGIAYTIEYLKKHKVALVVTESTGGLEIPAAKAIRRAGIAVIIANPRQTHQFAQSQPLTKTDAKDAKMPAFFAQMTAQKEDSQTMPYQPPTEAEEVLEALVNRRNQPADMRTAEKNRLHQVHETQVGSVKQLIAHFDRLIDELDKQIDDHTHTHFDGKAQVAEQIKGIGSITTATLMAMLPELGRLSHKRIASLVGIAPHPRESEETKFKAAALAEGLRCLRHCIWLPWQRHVLNRLFGISTNARCPRVSRIRLPLRHVCANC

SEQ ID NO: 203376 - protein, 315 aa, unidentified
MTSAQVFVGIDVSKAQLDIALRPEGRFAASNDEAGFAQVIERLRAVPPALVVLEATGGLEIPLTGALAAAGVPVVVVNPRHVRDFAKAAGKLAKTDALDAQTLAHFAEVMRPEPRPLPDEQTQTLAAILTRRRQLVEMLTAEKNRLASARKPVRKSLRAHITWLERELAHTESDLAQAIRESPVWREKDALLRSTPGVGPVLTTTLLANLPELGTLTGKQIAALVGVAPLNRDSGTLRGKRTVWGGRAQVRAVLYMGAIVAARFNPVIRAFSQRLRAAGKAKKVVLTACMRKLLIILNAMVKHRTPWCTEMAQCA

SEQ ID NO: 203377 - protein, 348 aa, unidentified
MVVGIDVHKRAHVAALLDERGGELDTLSFANSPEGMRRLQAWLVERDAGEAVVGVESPAGYGRLLVASLEAAGHEVLNVPAWRTHRERRRHGPGKTDPGDAIAVAQVVLRKRAELGPALEPALVRALALLELQRRRLVRDRTQAIQRLRADWNQIDPVGEARVVNVTRQRELRRLKRISFGPGLVEQVATRCIRDLARDIDDLNQRIAALDAEIAQLLLEHGNPVDDIHGAGTQIAAAVIAHAGDVRRFRDAAAFARFCGAAPIPCGSGQTSGRHRLHRGGNRQLNAALYRIAIVQARHHPPARTYLARKIAEGKTPREARRALKRHLANVIYRRLYAWAEAAPALNT

SEQ ID NO: 203378 - protein, 402 aa, unidentified
MAAGQLWAGVDVGKEHHWVCVVDNSGTVVLSRRLGNEEQPIRALIGEIDSLADQVAWTVDLTTVYAALLLTVLADAGKSVRYLAGRAVWQASAVYRGGEAKTDAKDARVIADQSRMRGDDLPLLHPDDDLITELRLLTAHRADLVADRTRTINRLRQQLVAVCPALERAAQLSADRGWVVLLARYQRPKAIRQTGISRLTRILADAGVRNAAAIAAAAVAAAKTQTVRLPGEQVAAGLIADLAQGVIALDDRIKTTDADIEDRFRRHPLAEVITSIPGMGFRLGAEFLAAVGDPELIGSADQLAAWAGLAPVSRDSGKRTGRLHTPKRYSRRLRRVMYMSALTAIRCDPASRAYYQRKRNQGKRPIPATICLARRRTNVLYALIRDNRTWQPDSPPITQSAA

SEQ ID NO: 203379 - protein, 412 aa, unidentified
MKQQADRAAGLDVHRDNVVAATRINEPGGEVTVTKKKFPTTRRGIGDLGVFLTEAAVTRVAMEATGVYWKPVFYALEGLFDELWLCNAQHVKNVPGRKTDLGDAEWLADVAAHGMVRPSFVPPPEIRELRELTRYRKTQVDARGKEIQRLEKTLQDAGIKLTSVASVVWGVSSRRIIEALIAGERNPAVLANLAVGKLRPKRSQLEEALDGRFGAHHAFVCRQVIEHIDFLDTSIAALTDEIAARLLPFEAAVGLVCSVTAIGELSAQAIIAEIGVDMSRFATAGHLCAWAGVAPASYESAGKRRPAGTRHGSTWLRRVLVEVARAAARTRGSYFSAQYSRIARRRGPNKAAVAVANSILAVIWHVLTNGCIYEDPGADYFERRHDPAVEAKRLQARIEALGYDVTLAPKAA

SEQ ID NO: 203380 - protein, 351 aa, unidentified
MIIIGCDFHTRFQKIAMVDTEIGEITKRRLEHGNGEARAFYAALPGPARVGMEATMNAQWFERLLQEYHHELWVGDAAQIRAAAVRKQKTDDRDALHILDLLVRDKFPRIWIPSPENRDLRQMLRHRDKLVRIRTSVQNQLHALAMSQGLCRKAKLWTKAGRKELEGLPLDPWASRRRRELLQLFDQLDPQIDELDKVVIQEAEKRPAAVHLMTQQGVGPVTALAFVLTVGPVERFPTSKHLVSYLGLNPSEDSSGGRQRLGAISKQGNSMMRHLLSEAAQTAVKFDPELRRDYLRLKFRRGISGVAKVAIARKLAVRLYWKLREAAQPNTAARMQGSPTNLMVGESPSRS

SEQ ID NO: 203381 - protein, 371 aa, unidentified
MRFYTEQHQFYCGIDLHARRMYVCILDREGRVLHHRDHTANREELLKVLKPYRADVAICVECTFSWYWMADVCAEEKIPFVLGHALYMRAIHGGKAQDDRIDSEKIARLLMGKLIPMAYAYPAGMREVRGLLRRRMHLMRHRAELLGHVQSTRLQYNLDPLGKNIGKKCHRRDMAEHFPEGDIRKLAEVDLAVIEDLDVVIKDLEGHIERHAQQQDPMSLAILRTIPGVGDILALVMLYETHDINRFETAQRFCSYARLVKCQMRSAGKLYGTNGAKIGNAYLKWAFSEAALLFLRSTELAKKYKERLERKHGKGGSLAIIAHRLGIAVYNMLKRRQVFDVYRFLGISKPTVATKPQAPSDVSSNDVARSA

SEQ ID NO: 203382 - protein, 407 aa, unidentified
MTRYYLGVDWADTEHAVWVGNEAGEEVMARSVEHTPAGLGEFGRWLYERQAEGIELWAAIEKPEGRVVDFLLDHGVVVYPVNPKALDRARDRFRMSGAKSDGFDARVLAEFLRTDHPHLTPLMPSSARAQELKLLTRDYQRLVRQQTRLVNQLTATLKEYDPRPLECFEELTSAVAREFLRSYPTPEALATLTPKAWQRWARAQHVSQARTVELWEALRAPQLSVPAHVVRAKARLVRVLVDELETVVRAVNEYRKAVDDFFTAMPEAEWARSLPAGQSGTTVPTLWAELGDAPGRWQGLRHLQAQAGAVPVTERSGKHQFVHFRFACNTHLRYAVHLLAFLSLRQSEWARAYYQRYRARGHTHHQAVRALGAKWLKIIFVMWDRQVPYNENDHLAMIARQQLRQVA

SEQ ID NO: 203383 - protein, 387 aa, unidentified
MYFVGIDISKFKHDCAIIDELCDTVMPSWSFSNDREGFSHFKALLDSLEGEKKIGLESTGHYGQNLKQFLESNGFTFMEFNPLLVSRFVRSKSLRNTKTDSIDALSIAQYVMTVEYKPYPSSFYHLDKLKSLTRFRNSLVRQRSRQLVELTNVLDKLFPEFKPFFKDKFSVTALYILAHYQTPERIANMNARSYEALRKLSRGRFTLSNFIQLKALAKNTVGTQSDYLLDQMNILLELYSQLDSKVDELDAQIKECVRGIDPPCLSIPGVGELSAAMILSEFGDFSKFQNPSKMLAFAGLEPGYFQSGQSEYTGHMVKHGSSKLRYALMNCCLPLISNEPVFAAYYAKKRSEGKPHRVALTHVAKKLLRVIYTLQTKNIRYDPTMIH

SEQ ID NO: 203384 - protein, 422 aa, unidentified
MLEETPDTEEIIERVAALDIGKAEVVACVRVPSPDKPGRRVQEITTYSTMTRSLLGLADRLRELRVTRVVMEATSDYWKPVFYLLEAQDLDPWLVNARDVKHLPGRPKTDKLDAIWLCKVAERQMLRPSFVPPVEIRLLRDLTRYRADLVNVRTAEKNRVEKLLEDAQIKLSVVASDIFGVSGREMLAALIAGQRDPKALAQLARTRMRAKIPLLEEAFVGHFTNHHRFLLHTMLARVDQTSADITAVETKIEELIRPFVQAVGKLDEIAGVGLTAAHVMVAEIGVDMTRFPTAAHLCSWARFAPGVKESAGKKKGSGTTGHGNPYLARVLGEAAVSAGKTGTFLGERYRRIARRRGKKRAIVAVGRSILVIIWHLLSDPDARFHDLGSDFYDNRIGPERKKRNHIRQLEALGYKVTLQPAA

SEQ ID NO: 203385 - protein, 397 aa, unidentified
MIAVGIDVSKSKSTVAILDSYGTVLATPFNMAHTQPEMNALVSRLKELGEPVTILLEYTGHYHYPVLKKLQDEGFPVCVVNPYQMKKYGDVEIHKAKTDKKDALRIATYALEKSYKLVPYSFMEQKYEDLKFLSRQYDQRIAFVAKLKVQLINLLDQTMPGITKFLALKSRNPEKSALMLFIKRYKSFDEIQRMGKTRFLATYATLMKKTTDRHAPQKGLAIYELARDSITTRGEDPYIWSAQDQCVDLLATAQNAADEIITQMQNIAETIPEYKVLRAMNGVGDRLGPVILAEIGDIRRFHSAKALNSFAGNDAPPYQSGQFESRNRHISKRGSSALRKACFEVMQALKLTKPQDDPVYQFILKKEQEGKPYNVAKMAGVNKFLRIYYARAMELYR

SEQ ID NO: 203386 - protein, 316 aa, unidentified
MRKSITVAKEQTRNFAEKKYIVGLDLGDRWSWYCVLDDRGEVVFEQKLSTTPKAFREVFGAMPHSRVALETGTHSPWVSRLMKELGHEAIVAQASKVRLIGQSRKKDDRLDARTLARLARIDPELLGPIQHRSARAQADLIMIRARAGLVRARTALINAARGLTKSYGERLRGCSARNMDAEKRKGLSAELQLALEPLLRAIESLSQQILAYNERIEQMAGEGYPEVERLKQVKGVGTLIALAYVLTLEDPRRFAKSREAGCYVGLQPGRRNSGSSTPQLHISKEGDSYLRTLLVQGAQHIKRSFGAVYDRVMAHP

SEQ ID NO: 203387 - protein, 361 aa, unidentified
MNTRQSNKLDFKGQNIYIGIDVHLKSWSVSVLSEHSVLKRFSQSPSPESLHKFLTTHYPGADYHSVYEAGFSGFWIHEKLVTLGINNIVVNPADVPTMSKEKLRKTDAVDCGKLARELRSGTLKGIYVPDIATLEMRSLIRLRNRIVKDTTREKNRIKSFLRFHGIDIPEEFTRYSVGNWSKRFLAWLREVLLSTEYGKEALGIHIEQFVRLRGILLGQTRLLRALSRSDALKEPIRLLTSVPGIGITTAMSLAVEIDDIGRFCNADALASYIGLIPMCHSSGESQANGNITVRKHAMLRCYIIEAAWIAIRKDPAMTMAYQGYRKRMNAQKAIVKIARKLVNRIFFVLKHGQEYVPCVVN

SEQ ID NO: 203388 - protein, 353 aa, unidentified
MRRPKDKLIAGLDLHSNNVMIGIINQDGKRVAHRKLECDLKQVTGFLAPLKPQLQSMAVESTFNWYWLVDGLRAQNYPIDLANPAKIEQYSGIKHADDKDDAYYLAELQRLKILPTAHVYDPELRPVRDLLRRRSNLVHQRTALLLSFKSLYARTTGQRLDLSDVKKMEPKEAPKLYRHPANQLIAQVQAEHIQALDKSINRLEKAVLGCARKIPMYEKLLTLPGIGRILAMTITMEVGDIKRFKTDGDFASYCRMVDARRLSNGKQKADNNQKCGNKYLSWVFVEASNFSRRYDEQCRRWYDRKAAKTSKIIATKALGCKLSKAAWHVMAGQCDYDEKRMFPELATQPMKAS

SEQ ID NO: 203389 - protein, 347 aa, unidentified
MSIIMIGLDTAKSVFQVHGVDAAGKTGIRRKLSRVELIPFFRKQEVCTVVMEACGAAHHWARLLTGLGHSVKLIAPEAVRPFVKKGKKNDAADAAALCEAASRPDLKFVPAKNLEQQGILALHSARSLLVRQQTMLVNAMRGLATEFGLIVPKGIGRLGELRTLVDTDEAFPDAARRVFTELLDQCNLLARSIETFETEIVAHARNDQTARRLATIPGIGPVTASLIAATVTDIGVFKSARHFAAWLGLVPRQYSTGGKNRLGRITKAGNRQIRRLLVLGATSMVYRAPQWNSAAGAWTRGILARRPVRLVTVALANKMARIAWALMTREEVYRARGRIVAATEAAA

SEQ ID NO: 203390 - protein, 332 aa, unidentified
MENFYFIGVDVLKKKLNFCVMFEGKVVHEEETSNHQGAIMSLLHHLEEDYGIASGQMLVCAEHTGQYTFPLACACKAVECKLWLENAAEIKYSSGVQRGKNDRVDAKRIAIYASRFQDKVQYYERPTEDIERLKQLESERTLYVTDLAKYKGQMKDQKEYMPKSLYERKMKRLQALMDDLEEAIQSITDEMDEVIASCPVLFRQRELLMSIDGVGRVVATNMIIATEAFTRFGDPRKFNCYAGVAPFSYSSGSSLHSKARVSHRADKVMKRLLHLAAVAVTHRIGGELKKYYERKVAEGKNKMSVINALRAKIVARMFAVIKRNERYKPILS

SEQ ID NO: 203391 - protein, 366 aa, unidentified
MKKTNTVRVNGNMIFKGHKLTIGLDLGDRWSNYCVLDEAGEVLLEQKLATTPEAMKQTFERIPRSLVALETGTHSPWLSRLLKELGHEVLVAHAQKVELISKSNRKDDRHDARTLARLARIDPELLGPVRHRSAKAQIHLTVIRARAELVRARTALVNATRGLAKSYGERLRKCGTEQVSRELAAELSVELREVLEPLLKEIESLNERIKEYDARMEKIAKESYPQVALLKQVKGVGTQIALTYVLTLDDPHRFAKSREVGCFLGLKPGRRDSGQSQPQMHISKEGDRYLRTMLVQGAHYILGPFGEDSDLRRWGLRLAERGGKNAKKRAVVAVARKLAVLLHRLWVSGEVYEPLRNSQKAMRAAA

SEQ ID NO: 203392 - protein, 410 aa, unidentified
MRRIRDRVGGLDVHRDSVVACVELFDGHSVEVDKHTFSTTAAGVRELGEWLAEREVELVVMEATGVYWRPVYYGLEDRFDELWLVNAHHVKNVPGRKTDMSDAQWLADVGAHGMVRASLVPPPEIRGLREMTRYRKIQIKARSQEIQRLERLLQDAGIKLTSVASKVWSQSSRAMIEMLIAGETDPAVLADLAKRRMRSKIPALIEALESRWQPHHSIVARQILAHIDFLDATIDTLNTEIVECVAPFQAAVELLCTIPGVSTLTAQTIIAETGADMTRFPTAGHLAAWAGVAPASHESAGKRRPAGTRHGSRHLRHTLIEAARAAARTKGTFLSARYQRITRRRGPNKAAVAIAHSILVSAHHMLLTGEIYHDPGADHYDKRHNNPDRKHQRHITELQAAGYTITRTAA

SEQ ID NO: 203393 - protein, 401 aa, unidentified
MTSVRSRAWIGVDIGKTHHWVCAVEETGKRLLSCKVLNDEAQIIEVIAEVSELAAGRVWAIDILGTPSALLVALLAKAGEQMRYASGRVVAAMSTAYAGEGKTDAKDAYVIAETARIRADLSVVDTDTDLVRTLGVLTGHRADLVADRVRMINRLRDLLTSVFPALEREFDFASCKGALVLLSGYATPEAIRRMGEARLSRWLRQRRVRGYADVAARAVAAAQTQHTVLAGQDVAASIVAELANSILAQHERLKLLEQQIQDTFAQHPQAEVIESIPGFGPVLGASLLVAAGDLSAFPTAGHLAAAAGLVPVPNDSGRRAGNLHKPRRYSRPLRHALYLSAQSSMMRAGPNRDYYLKKRDQGRTHSQAVIALARRRIDVLWALLRDNRTWTATPPARAQAA

SEQ ID NO: 203394 - protein, 357 aa, unidentified
MREYIAFDSHKRYTIMERENIQTQAARQCRIDHASGTIRHALRDCQAGTAVAVEATGNWYWIISEIEQAGLRPLLVHPRKAKLMMGLINKTDQLDVHGLNRLQRNGTLPTVWIPPAELRDLRELTRVRMVLAAQRTRLKNRISATLAKYGLAVTNASDPYCQKARQQLGELFGQLPPQTQWAARTLLAQLDFIEGQIREQEQRLKQLIAVTPEMQRLMSLPGVGVILSAVIWLEIGTAERFASAERLASYAGTTPRVHASGGVVRYGRLRTDVNRYLKWAFVEAGNSVAVNHARCPQRHVSELYRRLKARKGHAKAIGAVARHLAEAAFYVLSGHEPYQEPTLCPGRSKGGVSADLS

SEQ ID NO: 203395 - protein, 379 aa, unidentified
MHIASIGIDLGKTTFHLVALGEQNKVLVRKKFSRAQLLAYTANLPATLIGLEACAGSHFVGAALGEQGHQVRLIPAQFVKPYRKSNKNDFLDAEAIAEAVTKQNMRFAQLKTQEQLDWQALHRVRDRLVQRRTALINEIRGFLLERGITFAAQPIHLRKNLPGVIEDAEQNLSPRLRWLLDRMWQEWKQIEIEVEAITEEIERISKDDARCRQLRQIPGFGPLISTATVAAIGNGAAFRRWRDFAAWVGVVPRQHSTGGKQKLYGISKHGNVYLRRMLIHGARSVLFRVKYDTGGFGQWVRRLAQRAPRNKVVVAIANKLARIAWAVLSSGRDYRHQPLRPLAAAEGRGKDAALGKAQNAFHFSTASTTKIRESSTKIC

SEQ ID NO: 203396 - protein, 346 aa, unidentified
MNMLSETVDVVIGVDTHKHTHTAAVVQAATGAEVENDTLLANHDGYLKLVAMADRHSPLRVWAIEGTGGYGAGLARHLIELGEVVIELDRPNRPARRQGAKSDPLDAVRAAREALTRKHLAQPRSRGQRAALSVLITVRAMSVQATGDAQRQLQSLIVSAPEHLRERFTGMTTHAIVTSASKLRINASWDLESRVTAQALRAVAQRTQHLQNEAATHERQIMTIVRDWRPDLLEKRGVGPIVAANVLCAWSHQGRCRNEAAFASLSGTAPIPASSGLTTRHRLNRSGDRQLNRALHIIALARLRTDPATRAHADRRRSEGKTDREIRRCLKRYIARQLFKQLEHTT

SEQ ID NO: 203397 - protein, 416 aa, unidentified
MNAVGIDVSSRKSTVAVLRPLGEVVCLPFDVTHDIAGLASLVEKLKALDGETRVVMEHTGRYYEAVAKALHEAGFFVCAVNPLLIKEYGANSLRRVKTDKADAVKIARYALDNWADLRDFTPMDAIRYDLKTLNRQFQLASKQRTASANNLIALLEQSFPGIRKCFDSPVRSDGTQKWVDFAHSFWHVDCVRKQPFAAFCERYRKWCKRHAYLFKLSNAEEVYALAKRAVVLTPKSKVVKVLVQEAANQLISISRSVEVYRAEMDRLAAMLPEYPVVMAMYGVGKSYGPQLMAEIGDVRRFERKQALVAFAGIDPMPNQSGDKNVRSNKSSKRGSPYLRKTLFNVIRTYLQCAPQDEPVFQFLNRKRAEGKPFYVYMLAAANKFLRRYYAKLRDYFASLDTLQSVDPIPTTLKASL

SEQ ID NO: 203398 - protein, 427 aa, unidentified
MSEVESVKQEPQFAAFIGIDWADKKHAWSLRAVGSEKRERGELEHTPEAVEAWVGQLCQRFANRPIAVAVEQSRGALVFMLSKYEPLHLFPVPSTMSARMREALYPSGTKDDPRDADLLLDLLLQHRDKLRRLSPDTEATRLVQNLVEARRKLVDEKTAQTNRLTGHLKIYFPQMLDWFERLDTELVCALLERWPKLEELQKVPPAKLRTFFHKHHCRDEELIERRIVAIRQAIPAIRDRAVIEANSTLVNVIVRLIRSLVEGIANLDEKVKEAAAAHPDFLIFDSLPGAGAALAPRLLAAFGSQRERYGSAQEMQSYSGIAPVTESSGKKQWVHFRFACPKFLRQTFHEWAGHSIAYSVWARSYYQRLRSRGKGHHAAVRALAFKWIRVVFRCWKDGVAYDESKYLASLARRGSPLSAIVATGKTL

SEQ ID NO: 203399 - protein, 340 aa, unidentified
MMTTTIGLDLAKSVFQVHGVSSEGQVTVRRKLRRAELMGFFRELPACLIGMEACATAHYWARELSNLGHEVRLMPPSYVKAYLRRQKNDAADAEAICEAVTRPTMRFVPVKSAERQAVLTLHRTRELLVRQKTTLIRAIRSHCAEFGLVVPQGARRVFDLLNLMREASSSSLPETAVVTMETLAVQLDALAVQIRTLERRLLAWHRKNQTSQRLATIPGVGIITSTALAASISDPSLFRSGREFAAFLGLVPRQNSSGGKDRLGRISKKGDGYLRKLLVVGATSVIRRARTGVTPSAGWVQSLLERRPSRVVTVAMANKTARIAWAVMARGESYSASTTV

SEQ ID NO: 203400 - protein, 365 aa, unidentified
MPSVSHLGPTHLGLDVHKDTISVAILTPDRDGPDVDRIPHDEPSVRRLVGRLGDPRWLRACYEAGPTGYELARLLHSMGVRCEVIAPSLIPKAPGDKVKTDRRDCRRLARLHRAGELVAIRIPSVQEEAVRDLCRARADMVEDRTRARHRLSKFLLRHGRPWRGGNAWTLTHERWLLAQRFHEPALAATYAHYRTVLQGRDAQLEAIEADLAVWYDLPPFADAVHRLSAYRGITRLGALTLASEVCDWRRFPRAAAFAGFCGLVPSEYSSGTSMWRGHITKCGNAHLRAQLVESAWAYQHRPAVGVDLRGRQQGLDPQVVTRAWAAQLRLCGRFRRLAARKDSKNVVATAIARELAGFLWAEMAA

SEQ ID NO: 203401 - protein, 421 aa, unidentified
MTSILSNTQPTTWVGIDIAKRYNDVLVDRPGHRRRGFRVANRLDDYQRFAKFLSDLPEPPVIGFEATGNYHRTLAFFLAERGFSLRLISSVAAARTREALYNSWDKNDPKDAQVIVHMLKTGVTQHYHDPLIHEINELQELSKTHFQISLHKVRIQHSILTHYLPLYFPEAEKYMTNSRAQWFTHLIERYPCRAAVEKFSQTEFIDDAWSFVGRKVNKTAFLEDFYETATQTIGLPVSEDSEAIRMFRIVLREHQRLCEVRSEIEKEAESFLGDDEDYIRLKTLPGIGPILSLTILAEGGNLRRFAHHRQFLKYCGFDLATQRSGQFRGRSKLSKRGNRRLRYAFWMAATIAIRMRENSFRDKYARYTQSDPTNADLKRKALTAVAAKMARVAHGMIKSETNYRPFHERAVPGGVIPSEGR

SEQ ID NO: 203402 - protein, 356 aa, unidentified
MIFWQVQGGSSTCRLRSVGIDLGKTTFHLVALGENGKVLLRKKFTQKQLITFTAKMQTSLIGMEARSGAHFLGRMLREQGHDVKLIPAQFVKPFVKSNKNDFLDAEAIAEAVDRQNMRFVPIKTDDQLDLQALHRVRDRLVARRTSVINQLRAFLLERGMVFAKTPFKLKQAMPEILENADANLTPRMRNLVSLLWSEWKDLEQQIVAMNEEVEQIASSDPACQRLRQIPGIGPLVATAIVAAIGNGAAFHKGREFSSWLGLVPRQHSTGGKARLFGISKRGNRYLRKLLVHGARSAVLRVKRERSPFGPWLNAPERRSPVKVVITAAANKLARIAWAVLSSGQDYRAVPDAITVA

SEQ ID NO: 203403 - protein, 411 aa, unidentified
MTYKVAGIDIHKKVLMVVVTDVAAEEWEFDSRRFGTVASEREHLAAWLQERGVHEIVMESTAQYWKPIWLDLEPHFRQLHLAQAHSNRAPKGRKHDFADAQRLTRRLLAGELILSFVPDAEQRGWRTITRAKVQLVRDRVRLQNQMEALLEEMRIKLSSVISELLGLSGRRILQAMAEGESDPSELAKLGDFRLKCSQEELADALRGQWQPLHRQMLKLFLERLDLLDRQTQQLDRMAAGTMQPYEDAVIRLAAAPGFGPDSAQQTIAEVGAQAQSFDSPARFASWAGLCPGREESAEHNHSSRSPKGNKFLRRILTQAAQAAVKKKGSHFQIVFLRWMPKLGYQAAIWAIAHKLARLVWKILHDRVHYIERGQESDPAVQRRRANKMIQALRRMGYKVEISSLNPQPAQG

SEQ ID NO: 203404 - protein, 408 aa, unidentified
MGRAAEAMAPSSSTRTDGGCPVAQVNDLSRSLTAFDPISTLVVVVEMSKASWLVSGVVPGVERQPLKKLEPDSTALLRLIERWRNEAMHSGRPISRIALAYEAGRDGFWLARWLIARGIEPHVIHSASVAVSRERKRAKTDRLDAAMLMRVFLGWLRGERGHCGMVVIPTMEEEAARRPSRERENLVNERSRITNRMQSALARLGIRGFKPHLRKAPERLAGLRTAEGTGLPANVIEEFRRDMARLALVREQISSIEKTRAKRLERAPDTGPHAMVRLLARVIGIGIETADMLVREILSRKLRDRRAVARYAGLTGSPDESGLKRREKGLAKAGNARVRRGLIQLAWRFLMFQKDSALARWYRTRTEGPSGARKTTMIVALARKLLIALWRLVTTGEVPDGVELRPAA

SEQ ID NO: 203405 - protein, 345 aa, unidentified
MEIRTIGIDLGKTVFHLVGVDVRGEVVVRKKCSRAQLLRFTSNLRECLIGMEACGGSHFLGRALCEQGHHVRLMPAQYVKPYVKTNKNDYIDAEAIAEAVTRPSMRFVPIKTDDQLDLQSLHRVRERWVVRRTAVINQIRGLLLERGITLRKGRQHLEASLPCILEDADSKLSGALRVLLTQLQWEVQYLGRQIEESDKLIVRIAGELEACRRLVAIPGIGPLIATATIAAIGNGAAFKKGRGFSAWLGVVPGEQSTGGRQKLTGTSRRGNKYLRKLFVQGAHAVLLQRTKQASGLSAWLADLVTRKRKQVATVALANKMARMAWAVLFKGQAYRPPPLPHAVPA

SEQ ID NO: 203406 - protein, 371 aa, unidentified
MGESSKTLFVGLDVHKDTIAVAYAAEDRSTEVVSLGMIGTRQCDIDKLIRKLESKGAPFAIAYEAGPCGYWLYRYLTRRGLSCIVVAPSLIPRKPGDRVKTDRRDAVTLARLLRSGDLSAIYVPTVDDEAIRDLSRAREDAVRDLKRSKVRLKAFLLRQDIRYEGRANWNAAHLRWLARVVCPTAAQQIVFQEYVHTVTEQTERVQRLEVELHTAVKTWRLHPIVEAVQALRGVDLTGAVTLIAEVGDLTRFDTPRKLMSYLGLTPSEYSSGERRRQGGITKAGNGHARRALVEGAWAYRYPAKVSRHLQLRLENVPTEVRAIAWKAQLRLCKRYRLLSARGKHVNQVVVAIAREMAAFAWAIARTIPMAS

SEQ ID NO: 203407 - protein, 458 aa, unidentified
MYRELIPLRQALMVELKANLPPDIPGLDPEHLLQAYLDRLTMYVGGDVADQTFTLFAVDAAGNELGHLLDVPNTPAGFDTAWAWLEHLRCQHCLRIILLAIETSGVYYWAWWDFLAARPNLARVLYNPRTTEHMTEVLSKKVRNELVDAYALAEQVRLGSTPEVVPTEDADLLSARFCSRAARDLAQQVNRHKNQLRSLLRAYNPALGQVFPGAKLHHPAVYALLQHYLFPDEFVAVGVDPITTILSEHCRTAFGRDHAHQLVTLCAQTLTHPIGRPPIHQRVRQLTQDILSDQQHKQNFLKTGYTLIQDRTETKLLRAASGAGISNTLALVSELGGFSRFPDGEHMASFLGLTTSKHISGTTLFESKRITKQGSPNGRYAAVNLALHLKRHVPKYQQMYERITNRKPPHKGHFVALVAIARDFIANVLYDMWRHQRPFFEKVEDYRAYRQTHPRSKD

SEQ ID NO: 203408 - protein, 350 aa, unidentified
MEYIAFDSHKRYTFASVEEHTGTILRDARIEHQRGAVKEFLSAWKAGTPVAIETIGNWYWIVDEIEKAGMVPQLVHARRAKMMLASVNKTDKLDCHGLNRLQRTGTLPTVWIPPAQIRDLRDLPRTRMVLSKERTRLKNRIHATLAKYAISIEGTSDLFGKRGREELKKSLDLLPPHSRFSVERLLETLELVQKQIDLFEERMKETFSTNRELQILQTLPGVGFILAVVILLEVGDMSRFPDASRFAGYSGTTPRVSSSGGKTRYGQLRPDVNRYLKWAFIEAGNVVCLFHRRQPYRHVSRLYLRIRQRKGHQKAVGAVARHLAEATYWTLKKGETYREPQKKTVSSTKG

SEQ ID NO: 203409 - protein, 367 aa, unidentified
MFHSPSADASFSGSTHTIYLALELSRRSWLVALHAPDAAKIELHRLPAGDGQAVLDLLARIRTRVERRTGVSPPVSCCYEAGRDGFWLHRLLEAHGVSSHVMDPSSLQVDRRARRVKTDRLDAQALLRALMAWSRGEPKVCSMVRPPSPDEEDARRPSRERATLLQERIRLVNRIQGLCATQGIDDYEPLRPDRRPRLAQLITGDGRPLPPRLSKEIAHQLDWLELVLRQLAEVETRRDAEAAAAAKAASPSKLGALLHVRSIGPELATVLAKEVFYRCFASRRHVASYVGLTPSPFASGRRSREQGITKAGNARARKALIELAWLWVRNQPDSALAVWFRSRVGSATGRVRRIAIVALARKLLMAC

SEQ ID NO: 203410 - protein, 419 aa, unidentified
MAFKILRKNCCGLDVHKTWIYACIGITDADGRTEYKQARFSSFSNGLRELADWLAKYSCADVCMESTGKYWIPVFNILEKTCWVTLAHPKYTKPQKGNKTDRKDAKWICDLYMCGMVKPSFIPPADIRQLRDLMRYRTKLTNMLTSEKNRAQNCLTVSNLKLDDVFSDVFGKSSRSIIQYILEHPGEQFDVAPFLDRRCKHSVEEVQAAVDGAVSREQAAKLRECLQHIDQLNEHRKNIETEILCLAEPYPYQLELLRTVPGFSSAPLTAVALVSEIGVDMSVFPSSKHLVSWAGCCPRNDQSSKTVKSTRISRAGCYLKPLLVQIANAVIKSNKYPECRERYRRIKARRGHKKAIIAVCRMLLTAIWNVLSKLVPYSAEGYLSDKLTEHSVVISKAQGLELLRKRGYIFKDDLPADSA

SEQ ID NO: 203411 - protein, 346 aa, unidentified
MKDVQIIGVDLGKNSCSLVGLEHAGQVVLRRRVRRDGLTALLAKLPSAVVAMEACCGAHHLGRLLVAQGREVRLMSPEYVRPYVKAQKNDDRDAEAIAEAATRPTMRFVALKSEAQLDVQVLHRVRDRLVGQRTSLMNQTRSILLERGLVVAQGRRALLDALQAVEEQGEASKLSGRVRLLLADLLDQWHALDSRIAALDEEFTEMARNDPAARRLATIPGVGVMNATALVAAVGDGRTFSRGRDLAAWLGLVPRQATTGGKPKLLGITKRGSKYLRKLIIQGARAALPSLARSPTPLGAWLRGLLARAHGNKVVVALAAKLIRVAWALLRHGTSWSWAPSQLATA

SEQ ID NO: 203412 - protein, 341 aa, unidentified
MRYFVGLDVSLKMTSVCVIDADGAKVREAAVATEPVALIEFLKPYRRSCVRLGLESGSLSEWLYLELAKAGLPVVCIEARQAHSVLKANINKTDRNDARGIATIMRAGLYRAVHVKSLESRQHRTLLTVRRIVQHKVIDIESAISGILRSFGFRPGRASTRKFEMSVARLLEGRSDLAALLQPLINIRRCLREQFDALDSQMRRVASSDPICRRLMTAPGIGPFTALTYRCVIDVPERFRRSQTIGVHLGLTPKTRQSGAMDIRGRISKRGDRGLRSALYNGANSVLAPHCKDHPLRAWALQIAARRGRCKAVIALARRLAVILHRMWCDGADYKVRPALG

SEQ ID NO: 203413 - protein, 355 aa, unidentified
MSGEKYIGLDVHQATISVAVVDSQGKVVMESILETKASTLLEFLAGLRGSLFVTFEEGTWAAWLYDLLKPHVTEVLVCNPRKIPLLKQGNKSDKIDARKLAERLRLHDLKPVYHGETGVRMLRELARSYLTVVKDLSRVMNRLKALYRSWGTPCAGRDVYYTRHRSQWLEKIPEAGTRRRAEQLYQQLDMLQPLRLQARRELLAESRKHAITAKLRKIPSLGPIRSALAVALIQTPHRFRSKRQLWTYSGLGLETRDSGEYHYVRGQVRRRKKQATIRGLNKDYNHDLKSLFKGAATRASVKPGPFQEFYQRSLAKGIKPTMVRLTLARKIAAITLTLWKKGEDFDINKLNSHAA

SEQ ID NO: 203414 - protein, 395 aa, unidentified
MFSSNPEQLRSLAAWLVEQKAEEIVMESTAQYWKPVWETLERYWKPLCEKREGARRRSGTLHLAQALSNRGRRGRKKDFRDAERLVKRLVARELTLSFVPDAEQRLWRTVTRKKYQLRRACVRIHNQLEALLEEAHIKLSSLVSDLLGVSARRMLKALADGETSPAALAALAHQRLRATPEQLCDALGACTELKPVYRRLLKMTLEHLQILEQQIGQLDQELATLLHPHQDAVQRLAEVPGFAVDSAQQIIAEVGPAAATFPSEKCLSSWVGACPGEEESAGVNYSHRSPKGNRHMRRLLNQTANAAVKAKGSIFEIIYRRCVPRLGHNQAIGVIAHRQCRLIWLILHQGARYEERGPAVSKQSRYQRTWRMIRQLRNLGYRIELPNPQASQAQA

SEQ ID NO: 203415 - protein, 332 aa, unidentified
MYLGIDVHKREAQVAVRNDDGDVIEQVRVKNTDLEEIGEKYAGGKALLEATTNYFYIYDMLSEHLDVVVEIPPKLKTIAQTDKKTDEVDAKGLSRLVYLGSVPESYVPTGEIRECRALVRGRTSLLEERTSFVNKIHSLLQDNGITREVKPLNVSGREFLDELTLQEPWDELLSSYLSVIDTLTEEIEQLNELITERAKEIKEAQLLVTIPGIAHYTALVIHAELGEIDRFDTAKEVVRYVGLNPVVRESGDSRFEGGISKKGPGNVRWLLVQAVHSAVHTVEDEYLSRFYHRLEQKKNKQKAAVATARKLLVSIYHMLDRGEEYDPPGVKA

SEQ ID NO: 203416 - protein, 353 aa, unidentified
MEFYKKEHKYYCGVDLHARNMYICILNQKGEKLLHRNVKANPQTLIEVIKMYLDDLVIAVECMFTWYWLSDFCHENNIEFVLGHALYMKSISGGKAKNDRIDSFKIASLLRGGLIPIAFDYPKDMRSTRDLLRRRNHLMRKRAELSAHVKNTNSQYNLPDIALNLRYKKNRDTLADRFPDKSAQKSVDLDLAMIDFYDQQLGKVEWFIKKELRIFDYQSYYLLKSIHGIGDILAQTILFEIYHISRFPTVQKFASYCRLVKCRSESDGKCCGSSGSKIGNAHLKWAFFEAASLFLRGNPEGQKYLEKLTNKHGKGKALSILAHKLGRAVYFMLKQKKAFNKQQFLDMGGDGVV

SEQ ID NO: 203417 - protein, 354 aa, unidentified
MLRLEYQAYRPVKGLGDHQPFLNAKSKVMKECLIIGVDISKSTLDIFIRPTDVDMKIANTLQGFKKWFNMFKKQFDTHTLVIMEHTGQYSYRFELFLRSKKIGYCKIAALQIKRSLGMIRGKSDKVDARRIADYGWMRRDILVADNYPVEKIMELKSILSLRLKLVRDRSGYIARLKEMRASRTANHDDEIQIQQQVIKFFTSNIAMLNKKIQTLIGSDKDLQHSCELLRTIKGVGWIIAANMIGCTDNFKRFVNARKFNCYAGIAPFKHESGSSIKGKARISHLANKQMKTLLNLAASSAIQHDREMKMYYQRRILEGKHKMNCLNIIRAKLVARMFAVIKRQTPYLEFIQAA

SEQ ID NO: 203418 - protein, 357 aa, unidentified
MTSIARSRGDIVVGVDTHKDNHVGVVLDGVGGRLANLTVSATPAGYARLAEWAGTYGRVVAYGVEGTGSYGAGLASYLRRQGAKVIEVNRPSRKADRRANGKSDTLDAEHAAREVLAGTSTAVPKTADGAIETLRLVKIARDTAVKAHTAAMIALKATLVTGGDDLRAELEHLTDYKLIVACAALAAEDLTSPAGGMRHVLGSLARRWLQLHEEIKVHSRLLKQLTKTTAPALIEAFGIGPDVATELLLAAGDNTDRIRSESAYAKLCGACPIPASSGRTTRHRLNRGGNRQANSALYRTVVVRMRWHEPTIAYVARRTAEGLSKREIIRCLKRYLAREVFLLLPAPVVDNRRLDAA

SEQ ID NO: 203419 - protein, 345 aa, unidentified
MEVSTIGLDLAKTVFQVHGVDAAGEVSIRKTLRRSQVLHFFAKLPPCLVGIEACGTSHHWARELIGLGHEVRLMPPAYVKPYVKRGKNDAVDAEAICEAVTRPTMRFVAVKSREQQAALSLHRVRSLLTGQRTQMVNMIRSQLAEFGIVIPTGLMRALQLARQVVDGKAEIDLPPLAAEVVGMACQQALDIHVRLRELDRRIDALNRTDEVARRLATIPGIGPVGATALAASVADPHQFRSAREFAAWLGLTPRQRSSGGKDRLGRITKMGDRYLRKLLVIGATSLICRAKYKPDAADPRLIALLARKPVRLASVAMANKMARVVWAVMARGEVYQEHHVPKLAA

SEQ ID NO: 203420 - protein, 348 aa, unidentified
MIVIGVDTHKRSHTLVAVDALTGGVLGERTVLASDDGALAALRSVVALDQDRVWAIEDCRHVSGRFERSLVAAGERVIRIPPALTANSRRSARERGKSDRIDALAVAHTALREGVERFPAAFLDEKAMEIRLLCDYRDQLVVERTRAINTLRWHLLALDPELEASLRPSGLAGPRIRAKVARRLTRLGDSAQARIAKALLRRINEITRQELTLRGALNTLITAHSPQLLAERGCGTITAAILIGHTAGAERFPTEAAFARHTGTAPIPASSGNTIRHRLHRGGDRQLNRALHTIALSRARTDPLTRAYLDRRAAEGKTKLEALRCLKRHLARHFWKQLYQNPQTPQPT

SEQ ID NO: 203421 - protein, 375 aa, unidentified
MGHHSEAFIGIDTSKLRNAVAVAEAGRKGEVRYLGEIDTSEAATRKMVAGLAAKYATLTFCYEAGPTGYGLQRLIESLGHSCIVVAPSLIPTRPGDRVKTNRRDAEGLARLLRAGELTAVWVPDARHEAMRELTRARDAARQDLTRKRQQVSSMLLRLGQHYPGIKTWGARHRSWLANLKLEHPEQRFALEEILQAERQAAERIGRLEQAIRDAVANWSLGAIVPALMAMRGIDLVSSVTILAEIGDLSRFENPRQLMAYLGLVPSERSTGDSVKRGGITKAGNGRARRVLVEAAWAYRHPPRVGYEKQALVAAAPRPAREIAWKAQVRLCKRFRTLSRAGKKSTVVATAIARELAAFIWAIAREVRNGTPARAA

SEQ ID NO: 203422 - protein, 412 aa, unidentified
MQAILKSCCGIDVHKAVIVACLMTEDENGKVAKESRQYATMTEDILEMKLWLLKNECFHVAMESTSVFWKPIFNILEDTINVMVVNARLIKNVPGRKTDLNDSEWIATLLRYGLLRNSFIPPKDIRDLRDLTRYRVKLVQNATSEKNRLQKILEDANIKISSILSKTFTVSGIDMIQAIIKGDSTPEQIADLARRRLRSKIPELTKALRGHVTEHHRFMLTEIFDHLNYLSERIADLEKMIEEKLEPYRNIFDLLITIPGINKHCAASIIAEIGVDMSIFQTPKRLASWAGVCPGNNESAGKRLSGKTRKGDNWLRVTLTEAAWAASKTKNNYLSEKFRRLSHRRGQKRAITAIAHKILCITYHVIEKKEPYKDLGPDYLEKIHNDNSKRNAVNRLKSLGYEVLLTPVNAVS

SEQ ID NO: 203423 - protein, 312 aa, unidentified
MEKLSYGGIDVSKDCLDVVVLPEGWFFSVSNDTAGWAELVARLRPLAVSAIGLEPSGGYERGIIRALLAAGLSVRRINPNKLRQFARARGVLAKNDRLDARLIAEYVAIMPTRVVQRDDAVERLAEIVTMRRQLCDEHVAVKNQAAHLEDAMLRRLSKRRLIRLEADIRLLDKRLAEMVATNAAFAQLYELLTSMPGVGPVLAFTLIALLPELGKMSRKQIAALVGLAPYDFDSGKLRGHRSIYGGRMPIRNVLYMAALSASRYNPALKTFSNRLAHANKKSKVIIVAVMRKMITTLNAMLRDNAAWQPQSN

SEQ ID NO: 203424 - protein, 356 aa, unidentified
MNSPHYIGFDVHKKTISFCIKTATGEVVEEGVVAAQRRALQQWASARSQPWRGALEATLFSGWIYDTLRPYGEQLEMAHPAKMKAISAGKKKSDAIDARTIADLVRCNLLPACYVATPRIRELRRLLRYRSLVVSEAVRMKNKMAGLLMETGAIYVKEKLHRKKYFANLLEELEEVPPSVIELLRLSRGALEMFETTQKRLVRELLADPELTQRVERLMTIPAVGEITALTWALEIGDPHRFRSGAEAMSYCGLTAALKSSAGKQQRGPISKQRNRWLQSTLIEAAKLAPRWNPQLAAVHARELERGHRNRATLAVARKLVTYLLAVDKSGHSFQLRGPLIEDLAQQEMPLKIKTS

SEQ ID NO: 203425 - protein, 341 aa, unidentified
MSEVSTIGLDLAKHVFQAHGADASGKVVFRKRLRREKVLEFFASKPACLVAMEACSSAHHWARELARLGHAVRLIPPAYVKPFVKRQKNDTTDAEAICEAAQRPTMRFVAVKSETAQANAVVFRARDLLVRQRTQVINALRGHLGEYGLVVAKGPGHVSKLVEHVENPYSGVPDAASPVLRTLVEALRFVSERIDLLDREIARRARDDDEVRRLTSIPGVGPITATALAALAPPADAFRKGRDFAAWVGLTPLQHSTGGKQKLGTTSKMGERTLRRLLIIGASSVVRKALRQGIAAVSWLGRMLARKPRMLVIVALANKMARIAWALQAKREVYRAPTVVA

SEQ ID NO: 203426 - protein, 341 aa, unidentified
MNKVAIAAIDLGKHSFHLHAQDDRGHELYRKKFTRVTLAQHLANLEPCTVVMEACGGAHFMAQEVAKLGHTPKLIAPHLVRPYVKSNKNDFADAEAICEAATRPTMRFVPPKNQAQQALAMLNSTRDSFIKDRTATANRIHAALLEVGISLAPGFKSIKELPARLEASSLSERFKKILMKLHEHFNHLDEQVKTLDKDVESQAAEDDLAARLMTMPCVGPITSSALAAELGDGKQFKCGRNYAASIGLVPKQHSTGDKTVLLGISKRGDRNQRRLLIQCARVYLMQLERQRGWLADWVRQLLAHHHSNHVVCELANKMARIAWAIAAHHTEFDAGPAAMNT

SEQ ID NO: 203427 - protein, 331 aa, unidentified
MVDDKRYVGIDVAKARLDVALGLNGERFAVANDEGGISALLKRLEPTDLVIIEATGGLEVPVASTLATAGIAVAVVNPRQVRDFARATGQLAKTDALDAQVLVRFGAAVKPQVRALPDAQARALEALVNRRRQLVEMLTAEKNRRANSPKVIHKSIDEHIHWLEKRLAGFDDELTALVRATPIWRERDELLRSVPGVGPVLATTLLAYLPELGALNRKQIAALAGLAPFNRDSGSLRGSRCIWGGRAQVRRVLYMAVVSAVRSNPVIKNFYAQLRARGKYPKSALTACMRKLLVILNAMLHNNTYWHATALTSSTSALYPLGGAVSEHGCC

SEQ ID NO: 203428 - protein, 372 aa, unidentified
MIVIGTDTHKETHTCGAVDGLTAAARGELTVPARNGSFGKLLVWARRLDSERVWAIEDCRHVSGALERFLVARGERIVRVAPKHMAGARRSSRERGKSDSIDAFSVARAALREGIETLPGAYLDGAALDIRLIVDHREDLIATRTSDQQRLRWHLHDLWPDFEIPTGALDTAKWLGKVSRRLARAQQTTRVRIARELVRQITAHTARIRELERELAGLVESYAPQLLTERGCGPLTAAKLIGEIAGAQRFATDAKLARTSGAAPIPASSGNVNRYRLDRGGNRQLNCALHRLAINKAHWDPTTAAYLARKQAEGKSRKEALRCLKRYLARRVWQLLRSTDAPTTTTEPPHPTQPQNDETVPGAAPYLMPCVR

SEQ ID NO: 203429 - protein, 413 aa, unidentified
MRIYCGIDWASDHHDIALVDADGTLVARARISDDIAGLQQLLSLLAEHGDTCETRIPVAIETSRGLLVACLRATGRPVYAINPLAASRYRERHTVVRKKSDHLDAMVLANILRTDASAHRTLPANSELAQAVAVLARAQQDAVWDRTQAGNKLRSHLREYFPGYLAAVQPILGGLCSPLARALLAAAPTPARATSLTRAQLRAVLKRAGRQRGIEAEATRLRAALRSPQMRQLPLVEEAMGRQTLSLLRKLDAACTSADELAEAAVETFGRHPDSEIITSFPGLGSLTGARILAEIGDDRSRFADARALKSYAGAAPVTRASGKSVSVKARRIKNQRLAAAGYIWAFASLTASSGARAHYDRRRTHGDRHISALRNLFNRMIGCLHHCLDNRVRYDESIAFPTQPEPVLATAA

SEQ ID NO: 203430 - protein, 406 aa, unidentified
MSVVAAPVSSSTVVVAVDVGKNCVALSVTDASRHRLFGPIEFAMTRPALERVVARVGEVLPTAGVVKVGVEAAGHYHLPMITASAWPAGWEVLELNPAHVGEQRRVAGRRRVKTDAIDLEAITELVLAGRGIPVTAQEEVVSELTAWAAHRYRRVGTRTSTKNQLLGQLDRSFPGLTLALPDVLGTKVGRLVAAEFADPARLSALGAARFIRFAAHRELRVTRPVAERLVTAARDALPTRDAVIARRVLAADLELLADLDQQITLAELELTELVPKSPFRTLTSVPGWGVIRAAAYGAAVGEPTRWPGPSQLYRASGLSPMQYESAGRRRDGGISREGSVELRRALIDLGIGLWHSDQPAKAYAAGLKARGKHGGIIACALAHRANRIAYALTRDRAAYDPARWVR

SEQ ID NO: 203431 - protein, 319 aa, unidentified
MDSRDVSVGVDVSKDTLEVAVLVGRQVVCTASLANDQQGAEQLVKLCKQHRPQQLVMEATGGWEQLAAAKLAAAGLPVAIVNPRQVRRFAQALGRLAKTDQIDAQVLAQFGQSVPLPRRPLPEEKVAELREKLLRRDQLIRIRTAESHRLATCRSQAVRQSIQTILAAVEEEVKRIEQELDQWIRQSPLWQEQVDLLVSVPGVGHHTAYRLIAMLPELGQCSRQQIAALVGVAPLNRDSGKFRGQRTTWGGRGNLRWGLYLAALTATRTNPVIRRYYQRLLAAGKLKKVAIVACMRKLLTILNAIMREGRPWQFNPVAD

SEQ ID NO: 203432 - protein, 447 aa, unidentified
MSMSTTKHDTDNNSSAAAVPGSAAEPHFAAFIAIDWGDEKHAVALRVAGQTQTEHTTLEQKPQALTEWIAGLRQRFAGGTLAVILEQKRGALLYALQPHEHLVLYPVNPQMSAKFRQAFYPSGAKDDPTDADLQLDILLGHRDRLTAWRPDDATTRQLSLLVEGRRRFVADQVRVTNRLRDALKSYFPQALELAGEDLTSLMACAFLQKWPSLAALQQVKPAVLRKFYYAHHSRSEELIAQRLQLQAQGQPLTTDAAIIAAQSLLVQSLAQELATLQPVLARYEKQIAQLFAVHTDGALWDSFPGAGSALGPRLAVAWGTQRDRFPDPQAMPCFSGIAPVKEASGKQLWIHVRWACPKFLRQTFHEMAKCSLKGCAWALCYYQMQIERGKGHHAAIRALAFKWQRIMWRCWQDHLPYDDAKYVASLKRSASGLYARLSAAPAKERCE

SEQ ID NO: 203433 - protein, 338 aa, unidentified
MDTETGELQERRLQHREEAEKFYRELAAQGMKVRVGMEASGHARWFERLLAELNFELWIGDAAEIRTKRVRKQKTDRQDAELILRLMLKDDFPQIWVPSWENRDLRQLLWHRHRMVQARTRIMNQLQAVALNEGLRSKKRLWREQGREQLESFRLAPWASRRRHDLLELLDRLNPTIAELSQAVEQEVEKCPEARRLMTHPGVGPLTALAFLLIIGRADRFQCGKQIASYLGLVPLEDSSGNRRRLGHITKQGNSLLRFLLVEAAQVTVRSLPEWRSKYVHLTMRRGRKIAKVAMARKLAVRLYWMMRKEWDYEQVKKFGSQGRKLSFHTVLTKGSTR

SEQ ID NO: 203434 - protein, 400 aa, unidentified
MSGSRKPFQGFVGIDVSKDKFDACGIREDGAKLFQFSAPMDRNGFEKLRGHLSSVPMGSVLIGMESTASYHVNLFSYLVSEGYAAVVLNPLLISNYVKMQLRKTKTDKKDAWVIAQFLIANRDSLIRRATSPLISDLRELARQRESLVDQMTSLKNDIKRILNITFPELEHMAGIFTKSVLKLLQRYPSAYALQEVEPDQLTRMLIEDSYGRKRGAFAEALLKAARSSIGTPSPMKDVILKQKVSLHFYLEEALQEITEMLLQTSRGMMGDDMDILNSIKGIGEKSAASFLIEMGGDIQQFDDPNKIIAMAGIDPAVRQSGKHEGSSRITKRGNRHLRRIIWLMTTQVIHYCDVFRVYYRKRRKDGLPYKKAVLATSHKLIRVIYAMLTQRTFFCQAVNS

SEQ ID NO: 203435 - protein, 333 aa, unidentified
MNKTTLIGIDTAKQTFHLVGVDAHGHYVWRKQASRCRLLSTLAQIECCEVVLEACGASHHWARSIQALGHAVRLIAPQHVKPYRRGQKNDYRDAEAIISAALSPGMRFVGVKRVEQQAEQALHRVRSRLMSHRNAAANALRGLLGEYGVVFGRGLKPLRDGARCFAETEEAHILGLVDLVNDVLEEIGVLQARMDHYEHLIEQRVEADETSRRLREELRGVGKLSASALRVKVADVRDYGNGRHFAAYLGLAPGHSGTGGQVHIGHLKRGHDRYLRQLLIHGARSALCHLGDKQDPQSRWLRGLLERRGFNIASVALAHKNARQAWAIMAREQ

SEQ ID NO: 203436 - protein, 351 aa, unidentified
MKKIFIGIDFAKLKFDACIIESCGMKEFGERKVGTFTNDNTGFRQLMKWVKTHYKNVIPEEMLFCGEDTGSCSQSLSKWLFGKGFDIWIENAYAIKHSSGIQRVKTDKADAAMIAEYAWRHQDKARPYEPLNESLSNLREVFLYRYKLVQQKVALTVRKEDKSSQKSKAMTFINRKTDHLIKEIEDAIEECDSMIDSIIENDPELRENYEIVTSVKGVARQNGACLLIYTNNFKKFDMSSRKIACYYGVAPFGKESGTSVHSPARTSHFANKLIKSLLGQAAQSARIHNAEIKDYYQRMMAKGKKHSVAMNNIKNKLLRIIVALVRKKVKYDPKTYEAYKQQWQGNATVAS

SEQ ID NO: 203437 - protein, 332 aa, unidentified
MSVYVGIDVHRKRSQVAVIGQDGEVLANRNVPNGTETILGVIGGLPAGTPAAFEAAFGWGWLVELLEDYGFDPHLVHPLQCKAIASARLKNDKVDAAILAQLLRADLLPEAWIAPPAVRQLRALLRHRAQLVRLRTLLRNRIHAILADHGHGRPAGCWSGVGRRWLASLELPPVSREVIDDGLALMDALQQPIDRLDAEVRQRAKTDPRVTVLTQLPGVGMFTALVLLAEIGDITRFGSARKLASWAGLTPTVRGSDRTVHHGHISKQGPAWVRWVTCEAAQTAKRHPDFAPGYEALARRRGKKIATTAVARKLITRAYHLLTDASATGEPR

SEQ ID NO: 203438 - protein, 408 aa, unidentified
MARYYLGVDWADQSHQLYVSDESGRKIRELEVQQTADGLAELGRWLDESRSQGIELWAAIEKPEGRVVDFLLDHGVVVYPVNPKALDRARDRFRMSPSKSDGFDAYVLAEFLRTDHAHLRALEPNSAEGQELKMLTRDHQRLGRQKTRLLNQIGITLKEYYSVPLEVFESLDTKIALDFLKAYPTPQALSKLTRRGWKRFAKRDHHLSEARCSELWDKLNKPQLAVPAHVVRAKAKLLAALVMQLETSVKAVDSYSQEVQSFFAAMPAAEIAKTLPGGKSGTTVASIWAELGDAPKRWNSFRHLQAEGGAVPVTKASGKSRMVQFRFACNKHLRQAMYWFSFNSLQRSEWAKKYYRNQRAKGHSKHESLRALGAKWLKIIFVMWRDHKPYDENYHLANIARQMMRQAA

SEQ ID NO: 203439 - protein, 312 aa, unidentified
MASITTLPSSFVGCDVGKQEIVIFDSRCRTITRLANKPAILATFAAGLEPDALVICEATGGYEAALLDAVNTAGRASHRADARKVKAYIRSFGTLGKNDAIDARALARYGEDRHGELARWQPVDKDRAQLSALVLTRHDMVTTRAAWRNRRKAPGAITSLIDPICQTLDEQIRAVEAAIERLIDICQPLKRAVVTLRSIKGLGPIVAPALLALMPELGTLGRKQAAALAGLAPHPNQSGSSDGYRRVRGGRSQVRPLLFIAALTASRCDPQLKTFHQRLIANGKKPIIATTAVMRKMITIANARLRETHDNN

SEQ ID NO: 203440 - protein, 312 aa, unidentified
MTFLHHAPVRCLGVDVARDRLAVDDGITAATVANSRAAIRSLLRTSRPDLVVCEPTGGYELLLLEECLRAGIACHRADTLRLKAFIRSFGTLGKSDAIDAAQMAAYGRERWTKLPLWQAPDADETQMQALVRRRADLVAFKVAEQNRSRAPGARAMAASFRAMLATITRQIAALERAIAALVAQNAGLRHRVAICTGMNGIGTVSAVTILALMPELGHLQRRQAAALAGTAPHPNESGTARGRRRQRGGRPQVRTALFMPALRAAAGQGECAAFYARLIANGKPPILAIAATMRKIIITLNARLRDNQNHQS

SEQ ID NO: 203441 - protein, 415 aa, unidentified
MTEQRWYAGVDWASESHHVFLTDGAGRKIGEKIFKHSGDGLAEMAAWLLSASGAASSSQIYVAIETPHGPVVETLIERGFTIHAINPKQMDRFRDRFTLAGAKDDSRDAEVMASALRTDPPCFRLLAALDPTVIELREWSRIASDLGTERNRLTNRLREQLWRYFPAMLELESDLGAPWLLDLWELAPTPGKAARIREGTVAKLLKRHRIRRFDAVHVLDVLRKPAVQVAGGTVKAASAHIKTLIARIRLVNGQIKEANRQLDALTAKLIPVEDTEAGQAKQHDVEILASLPGVGRIVLATLLTEAWDALMRRDYAALRSLAGVAPVTKRSGKSCIVIRRQACSNRLANAMYHWARIAIQHDPRSKAKYAALRGRGHSHGRALRSVADRLLNVTCAMLKTGAFFNPQPEARIAPC

SEQ ID NO: 203442 - protein, 501 aa, unidentified
MASTRTCRRSSRRRTPVAVGKPRGVLHPRVQQVGPEHFGIVCFDCHKVSSKFLLADFYGRPLIPPTVVQHNRPELDAAIAQIRLAFDQHQIRDGVVAIERTGRYHRVVQRAFAAAGFETRILHPFVTKQYRQPVDPGNKTDDTDLAAIHRATVTGCALLEATRDEAWTTLQLVIRHRRDLVCKGAALNCQIRDHLEAAVPGYAACFDKLWESAIPWHLLRHYPTAAQLRAAGRTTLCQGLRQAGIRFQQRTVQTVLDWAEQAASGDVAAGQHLRIALALYDDRQRKTQEIQALECEIAGRLAQTPYVLLLSFPGINVVSAADFAGEAGPMEHYANPRSITGRAGLRPSRYQTAQVDNANGPLVRTCNRALRAAILGIADNLIVCNHHFQHLATRWRSQGKDPRDIHVRVGLRFSRIDYILDKLNGFHREHDTAMPQVLRDLQAAIGQLPCRAYAAEARPLQEEMQRIQDGRRRGPQLLGDILPIVLARLGVGAVQSAESGE

SEQ ID NO: 203443 - protein, 416 aa, unidentified
MNAAGIDVSSRKSTVAVLRPFGEVVRLPFDVAHNTEGLASLAEQLKALDGETRVVLEHTGRYYEPVAKALHEAGLYVSAVNPLLIKEYGANSLRRVKTDKADAVKIARYALDNWADLRDYTPMDTIRYDLKTLNRQFQLASKQRTASANNLIALLEQSFPGIRKCFDSPVRSDGTQKWVDFIHTFWHVECVRKQSLNAFSERYRKWCKHHGYIFKQGNAVEVYSLAKNAVVLVPKSEVTKVLVQEAANQLTSISRSVETYRAEMERLASTLPEYPVVMAMYGVGKSFGPQLMAEIGDVRRFERKQSLVAFAGIDPMPNQSGDKNVRSNKSSKRGSPYLRKTLFNIMGIYLKCSPQDEPVYQFLDHKRSEGKPFYVYMTAASNKFLRRYYAQVRDYLSTLDNLPPVDMDSTGLKPSD

SEQ ID NO: 203444 - protein, 394 aa, unidentified
MKLIGIDIGKNKHFFCVMDQQTGEIISQPVSFSNDKEGFDFLVQKIKSYPKDSILIGMEDTGHYHFTLLKYLLDLQYTVALINPKTTDFNRKMQGGITKNDKLDTINICDVLDTPERKKQYRITKVNSFDLYEQKQLTRHHHNLKEEENVYKNRLQKCIDIVFPEFNKLFNSKYGIVYMNILKMFGSAENIANTDIRTIRKCFEIEGRGNRISLTPERLKECASSSIGISSSAEVIQIKHLTAQIELIEEQLTEIDKKIEEFSIQNNSPILSIPGISHFSGTSILAELGDISNYSKPSQIIKFAGVAPLHYESSQFNAQHTAITKKGSKYLRKTLYQIILPVIRHNPVFNKYYQLKISQGKGHRCAQGHCVRKLLRIIYHLLKTNQQFDPQLLR

SEQ ID NO: 203445 - protein, 326 aa, unidentified
MQSILGIDVSKASFDVVLLRETKKVHTVFSNDQKGFKQLHRWLISQQADEIHACLEATGQYGDGIAEYLFGLGHAVSVVNPARIKRYGESKLHRNKTDKADAELIAEFCLKEKPALWEPLSPESKHLRALVRRLDDLQTNHQQEKNRLKSGEQDIYVIANLTEHVHYLEASIKALKKEIQDYIDQTPDLKSKQDLLSSIPGIGDLTAAKLLAEITDISSFDGAPQLAAYAGLNPKGFRSGSSVHKKTRISKQGRSELRYYLYMPAIVAMKSNSVIRALKERLYERRLPMMAIVAAAMRKLLHMVYGVLKNKKPFEPDYDKQFNYLT

SEQ ID NO: 203446 - protein, 344 aa, unidentified
MPSLPVTVAETYRYVVGVDTHAATHSYAVVDDRGALLDQATFPTSPAGLRRARDWIGRRTQGDLDSVLIAAEGTGSYGAVLSDVLSDAGYRVVEAPTPRRERGRGKTDALDAVLAARASLVMPLASLRDRRAGQAHTALRVLTVAREHLNVERTRCINALTSMLRSHDLGVDARKSLTSQQVTTIAGWRRREEGIGTATARAEAVRLAKRVLVLDEELFENRQRLTEIVTAEAPELLELRGVGAVTAAIILTVWSHPGRIRSEAAFAAIAGTAPIPASSGNVPCQGSGRVSPSGKLGVPGSARPRCTSRGRFQESASWGRTVLNSARKSSPCSTRSWMSSICSL

SEQ ID NO: 203447 - protein, 351 aa, unidentified
MLYVGVDAATKESQITVMDERGKVLKRQRVPSSREGIHEALGRYRQPLQAVVEASYNWGPIYDWLEEVADDVVLAHPSKVRAIAEARIKTDTIDSETLAHLLRADLIPAAYAPSQEIRAIKRVLRQRMFFVRLRTMVKNRIHALLSQHALTRPEVSDLYGTVGRTWLRSLTLPDPDGPLLQEDVTLLEVLTQRIAATEALIKRLAAGDEAIGWLASLPGIGKFFSVLIRYEVDDITRFREAKKFASYTGLVPSTYASGQRQVHGRLTKQGNKHLRWAFIEAVTPAICSSPFLRRYYEKLKARLGVKEARTATARKLAELTWTVWTERRHWQEHQRPEHPLKTPAALATSWA

SEQ ID NO: 203448 - protein, 413 aa, unidentified
MDLLHDRCAGLDVSKKDVKACVRSPGARANQRHTEVRTFATTTNALLQLREWLIEQRVTLVAMEATGDYWRPPFYLLEDDLNVILVNPAHAKGLPGRKSDVTDSMWLAQLGECGLLKASFVPPTPIRQLRDLTRYRTTLSREHTREAARLEKELEDAGIKISSVATDILGVSGRAMLEALIAGERDPQVLAQMAKGRMRTKINALTQALVGRFGQHHAFLCRMHLDRLDALEEDIAKLSTRIEAALEPFRETLARLDTIPGVGLDVAEVIIAETGADMSRFPTPGHLASWAGVAPGLNQSGERNKPAHTRHGDHWLTGALGVAAMAANRTKDTTFLGARYRRLARRIGKLKALVAIQHSILTATWHVLSENTNYHDLGGDHYTKRDPQRALRRITRDANRLGYTVRFDPIQAA

SEQ ID NO: 203449 - protein, 343 aa, unidentified
MRYFAGLDVSLEETAICIVDEAGEIVREARVASEPDALVMFFDALGMTMERVGLEACSLTAWLHQGLSEAGIPVVCIEARQAKAAMGAMPNKTDRNDARGIAQIMRTGWYRPVHVKSPSCRSWRALLTARRMVLNKRRDVENGVRALLREAGLKVGTPSRKDFPARVRELAAGDAVLTGLVESLLSVIRVMTDEVARLTKRVLDKVRVEPTCRHLMTVPGVGPLTALAFRATVDRPDRFRRSRDVGAHLGLTPRRYQSGETDVQGRISRCGDELARTALYEAAHSLLIRSTKWSALRAWGMQVAKRRGMARARVAVARKLAVIMHRMWVDKSEFRWGKQAVAA

SEQ ID NO: 203450 - protein, 368 aa, unidentified
MSSVASPEGLIHLGMDTSKNTIVVATLLPGEESPVTDRIFNEEEAIRRLVGRFPDRSVLRAWYEAGPGGYDLYRLLTSMGVACQVVAPSLIPKGGSDKVKTDKRDSRRLARLGRAGELTPVRVPSPAEEAVRDLARARAVVLDDRKRARQRLTAVLMRHGRIWRGASYWTAAHRAWIAAQRFGEPALALAVGHYRAALEVREAELAAIEAELAPWAAREPLAGPVARLGCYRGIAELSGLTLAAEVVDWRRFPAARAFMSYTGLVPAEYSSGERTRRGHITKAGSEPVRTALTEAAWAYRHAPAIGAGLRRRQAGAAPETLARSWTAQRRLHARYVHLVHAGGKAAPEAVVAVARELAGFVWAEMTAA

SEQ ID NO: 203451 - protein, 391 aa, unidentified
MTKPKTKTVNDFSRCLDPLDMDATLIAVIEMSQSSWLVAGIVPGVERQPLKKLAIDEHALLGLLNRWRAEAEKNGHRITRIAVAFEAGHDGFWLARWLAAHGVEAHVIHASSVAVTREHRRAKTDRLDTELLKRGFLGWLRGERGHCKMVAVPTLAEEDAKRPSRERETLVGEASRIITRIKSAFVRLGIRSFNPKLKAAAARLETLRTPEGEPIPPNTLAALKRDLERHQIVKKQIRELEQTRLENLAQAPAKGSNVMVLLLARVIGIGVETADMLVREVLSRTMRDRRAVARYAGLTGSPDESGAKRREKGLARSGNARVRHGMIQLAWRFLLFQKDSALAQWYRQRTANAPSTRKPLIVALARKLLIGLWRFARDGVVPEGVRLRPAA

SEQ ID NO: 203452 - protein, 412 aa, unidentified
MEGETVIAGVDTHKDVHVLCLLDGLGRKIWSGSFGADPEGYDRLAEAIGDPGSCMVVGVEGTASYGAGLTRRLVELGYNVVEVLRPKRDKARPGEGKSDPLDAERAARKAASGKGCSVPKSQDGWVEAVRQLYVARRLAVATSTSCVACAKSMLTTAPGALRERFRGRERPKDLMPLLARGRKAGDALEESVLASLRSVAAVWKEARSQVESLDERIRALLEANAPALLGVEGCGTTTAAALVVAAGDNPGRLRGEAAFSMMCGASPIPASSGKTDRHRLNRGGNRQANWALYEIAIKRMAYDERTRRYVARRTSEGKSRREAVRCLKRYIAREVYRVLMDPNPDGAAPEGPELAKMRKAMRVTQKKAAAELGLSAATLGHLEHGRRRSTKLERRYYELLCELERALPQTAS

SEQ ID NO: 203453 - protein, 346 aa, unidentified
MEHYAGIDVSLELSSVCVVDGQGKIMKEAKVASEPETLVCFFKELGFPVKRIGLEAGPLSQWLHAGLAQAGFETVLLETRHVKAALSAMTVKTDRKDACGLAQLLRMGWFQQVHAKSIGSQEIRALLVARKQLLGRLLDVELSIRGILRGFGLKVGQVTRKTFEARIRELVTGQATLERIAGAMLSARATLKVEYEKLHKAVLAIVREDAVCRRLMTVPGVGAVVAVTFKSAVDDPSRIAKSKAVGALFGLTPKKYQSGEKDVTGGITRTGDEMVRTALYEAANVLLSRITRFSKLKRWGMDVAKRRGSKRAKVALARKIAVILHRMGIDGTTYRWAEARRIAAQA

SEQ ID NO: 203454 - protein, 355 aa, unidentified
MSQDKYIGMDVHQATISVAVMDAQGKLMMECLLETKAATIVEFLRGLHGTLSLTFEEGTSAAWLHDLLKPHVSRLVVCDPRKNALLKDGNKSDRIDARKLAELLRGDQLHPVYHGEHGVRTLKELGRSYLTITQDVTRVMNRIKALYRSWAIPCAGTTVYSPRHRAEWLAKIAEPGVRVRAERLYQQLDLLQPVRLEARRELLTESQKHSAVKLLRQIPSIGPIRSALLVALLQTPHRFRTKRQLWAYSGFAVQTHDSGEYRSVRGKLQRNRERMTVRGLNDNHNRDLKNLFKSAAISASTRPGPLRDFYVARVEKGMRPTMARLTLARKIAAISLTVWKKGVEFDPQQLQRQTA

SEQ ID NO: 203455 - protein, 351 aa, unidentified
MERFIGLDVHAASTTCAVIDARGKRVRVDVVETNGQALIEFLKLQPGTLRLCLEEGTQATWLAEILTPHVAQLAVVHVSQSRGPKDDERDALALAEQMRNGKLETTVYKHVGPFGALRNLVKTHAMVVRDVVRTQNRIRALFRSRGVPVVGKAVYGTKDREAWVAKLPANAQGAGRLLYAQYDAVNEVREEAEKKMVEESHRHPITRVLETCPGVGPIRAAQIVSVVVTPDRFRKRQQFWSYCGLGLVMRSSSDWVKSEKGSWERATVNKTRGLNFNHNHLLKQVFKGAATTIVTQLSEHPLHADYQRMLDGGTKPNLAKVTLARKVASIVLAMWKHQEVYDTVKYNKPSS

SEQ ID NO: 203456 - protein, 377 aa, unidentified
MKKELYLGLDVHKDCIITAAAEEGRKGEVRESGAISNDLHAVEKWIGRLRQAHGKEVILRACYEAGPCGFGLARRLKQLGMECAVVAPSLIPTRSGDRVKTDRRDARKLARLLRAGELTPVYIPDARDEAIRDLCRARSDAVDDRRRSRHRLKGFLLRHGYRYQGKSSWSAAHERYLRELVLPHPAMKVILEEYLQSIAAAGERIARCEEAMRVLLEQWRLAPAVRALTAMKGFQTVAAMILVSELGEVHRFVHPRQVMAYLGLVPTENSSSERRRQGHITKCGNAHARWLLVECAQHYASPPKVSKELSRRQEGQSQEVRAISWRAQNRLHRRYTRLLARRLQRNKAMVAVARELCGFIWELLRTQPCYQAQSRSV

SEQ ID NO: 203457 - protein, 315 aa, unidentified
MTNQKKSKTVINVGVDVGKQFLDICIHENGLYWQVENNPQGIGQLLKRLAHYQVERLVMEATGRYEFNLAQAAYNKAMPVCIVKPLSVRRYAGAIEQLAKTDKIDAVLIAEFAAIVQPRITPRKSKNLIAIKDLIARRRQLMGIRTQELNRVKVMGKAFEVSCRRMIRHLDTEIARMEKKLAKHVLDQAEWTEKQAILKSAPGVGNTLIYTLLADLPELGTLNNKEIAALVGVAPINRDSGKMRGKRRIQGGRASIRTVLYMATLSATQCNPVIKAFYKKLVDQGKHKKVALTACMRKFITMLNAMVRDECEWAY

SEQ ID NO: 203458 - protein, 410 aa, unidentified
MALKIVYKICCGIDVHKTFVVACIASTDKHGVTSYERHRFSTYTKGLKNLLQWLLEHNCKDVCMESTGKYWIPVYNILEASCNICLAHPKYVKAIRGKKTDKKDAQWIADLYKHDLVSGSFIPPLKIRQLRDLFRYQMKLTQLQTSEKNRYQNVLTWSNLQIASVVSDVFGKSAQSMITSILDNPEEPLDIQVHMKKNMKATVEELTLATDCDITHEQADKLRVIKSHFDAITFCKNNLDELIRELGQEYEKQQKLVQTVPGFKNPETALRVLSEIGVDMNQFPTVGNLCSWAGVVPANNESAGKKFSTRVSKGGQYLKPLLVQVANAVVRSEKTPEIRNKYLQLKKRRGHKKAIMAICHRLLVAIYHILKNNEPYNPELYSKVEYIPPDKTITIQEASRYAQSHGFKVI

SEQ ID NO: 203459 - protein, 438 aa, unidentified
MKTKRAKAFPIIYPNAAGIDISSKEHYVAVNPETSLNPIRAFGCFTEDLKSISDWLKECNVNTVAMEATGIYWVSLYLLLEEAGFEVVLVTAKHVKNVRGKKTDVSDAEWIRQLHSCGLLSASFQPDAYTRKLRTYMRHRKNLIEMSATHVRMMHKALEQMNIKLQHVITDITGKSGQEIIQSIISGERNPLKLASLCDGRINKNKKDSIIKSLEGVWKEEHIFELEQSFTIYHMYHKKIVECDIKIENHLREKSGTTKDPNEKMKAKSNKNNLNFEAKEILQNIIGTDLSEIFGITTSNAIEIISEVGLDMNKWHSAKHFTSWLNLAPNNKISGGKILSSRIPKKKNHAGQIFKMAAYAVQRSKNWLALFFHRIKAKKGAPKAIVATARKIATIFYKLVKEKISFSPIPIEKYSDSFRQQQIKKLKRQAQTLGFQLV

SEQ ID NO: 203460 - protein, 400 aa, unidentified
MLSIGIDVSKGKSTVCGMKPGGEIVYTPFEIQHTREGMSELLSLLRGSGEEVRAVLESTGSYHCPVVAALLESGIFVSVVNSLRMKRFCSQSIRKVKTDRIDAMQIALYGLAYWQELQPTRLPEDTYRELQLLARQYYQMTSLLIKAKVDFNALCDQVLPGMQELMNDHAGRHKLSDFVLRYRHTTHILEMGETRFRKDYCKWAEKKGYRNRERMAAHIFATAQNGIPVLPNAPSTQIVITEAIRVLHTVEASRDAILTQMQALAKTLPEYSLVREMPCIGDTLAPRLIAEIGDVRRFHSKRALIAYAGIDAPPYQSGKFCANNRHISKRGNRYLRKTGYEVMQSYVMHKPANDPIFTFIEKKRSEGKCGKLAMVAGLNKFLRVYYGKVTELYRSLPVIE

SEQ ID NO: 203461 - protein, 355 aa, unidentified
MDSKKYIGMDVHKESISIAVMNGAGKVVMECIIETKAGMILQFIDGLRGDLQVTFEEGTSAAWLYDLLRPHVTKLVVCDPRKNKSMREGNQSDKIDARRLAELLRLDHLTPVYHGEHGLRTLKELVRTYLTVTKDLTRVMSRVKAIYRSWAIPCTGKQVYAQRHRAEWLGKINEPGVHRRAEFYYQQLDALRVVRQEVRRDLLAESKKQKAWKRLCEIPSIGPIRAAVLLGILQTPHRFRTKRPLWNYGGLAIEMHSSADHRKVDGQLQRSRKNVLVRGLNRNCNHDLKNLFKGAAAVASSKPGPFQEFYTALLAKGMRPEMARLTLARKIATIVLIVWKRGVCFDAQHLKPQTA

SEQ ID NO: 203462 - protein, 348 aa, unidentified
MNSPHYIGFDVHKKAISFCVKTAAGEIVEEGSVLAQREVLRQWASVRPQPWRGAMEATLFSAWIYDTLKPYGEHLEMAHPAKMKAISAGKKKSDTIDARTIADLVRCNLLPACYVAPPRIRELRRLLRYRSLLVSEAVRMKNKIAGLLMETGALYVKEKLHRKKYFASLLEELEEVPESVIDLLRLSRGALEMFESTQKRLVRELLADPDLAERVERLMTIPAVGEITALTWALEVGDPQRFPSCSDAMSYCGLTAALKSSAGKQQRGPISKQRNHWLQTTLIEAAKLAPRWNPQLGALHARELERGHRNRATLAVARKLVTYLLAVDKSRQPFQLRVPLEEPTQKAA

SEQ ID NO: 203463 - protein, 358 aa, unidentified
MDGSKEHPLMTAGLDLGDKYSYLCLIDQHSGEVIEEGRLRTTPEAFRRRFASEQPMRIAIEAGTHSPWASRVLEECGHEVLVANARKTRLIYANKRKTDEIDAENLARLARLDPKLLYPLKHRGEESQAHMAIIRSREALVSCRTQLVNHVRGAVKSFGARLPKCPAVSFHNKAAEHIPEALIPALGPILEQIGALTQRIRDYDRQLETISKERYPETELLRQVEGVGPLTALTFVLTLEDPYRFEKSRSVGAYLGLVPAQDQSGDRDPQRRISKEGDELLRRLLVSCAHYILGPFGSDSDLRRHGEKIAARGAKNSKKRAVVAVARKLAVLLHSLWISAEVYEPLRNTQRSSGGQAA

SEQ ID NO: 203464 - protein, 350 aa, unidentified
MADGCRVVTGGVDTHKDAHAAAVLDAAGALLGARPFPADAGGYASMLAWMRGFGEVSAVGVEGTGGYGAGLARALALAGVPVLEVVSPDRSERRRRGKDDGFDAVQAARAALAGARCAPAKSRGLEAEALGALEAAYEGAVKARTAALNALQARVVSLPEGMRAPLRGMGSSELARACASMRPGAGATPEASLRAALRSLARRALALEKEAGDLEARIDALTEKLVPSVRALVGAGPHVAARLLLAAGANVSRLRSEASFSMLCGASPVPASSGRTSRHRLSRGGDRRANSALYTMAITRMAHDERTRAYVARRMSEGKTKREAIRCLKRYIAREAYHAIVRDMEAPGMA

SEQ ID NO: 203465 - protein, 359 aa, unidentified
MSSISPPGPLSKIIIGVDTHKHVHVAVAIDDDGQRLGDLRVPVDSLGYQELDRWAQSFGRVLAYGIEGTGSYGANLTSYLRRQGRKVVEVNRGDRRARRANGKSDTLDAELAARSIIAGTSTAVPKSADGTVEMIRKIKVARDIACKNRTSAIISLKTVIVNTPQELKEQLDSLGDKALIQKCSGFRPGTVDDPISAAKHTLRALARRWEFLNAEVKDHDAVIAKLTTSLSPTLCDGFGIGPDTAAEILIVFGDNPDRVRSEAAFAKLCGVAPIPASSGMTTRHRLAWNGHRQANAALYRTAIVRMQHHQPTKDYVAKRTAEGLSKRDIIRCLKRFIAREVYGRVMADFHARTALSAAA

SEQ ID NO: 203466 - protein, 427 aa, unidentified
MTDQLKHKAYHSWVAIDIAKDYNVVMVELTDGKTRRFRMANSGKDHDRLIEVIRELPQPCHIGFEATGNYHRPLAYRLLTEGFDVSLISSLASARYREAIFNSWDKNDPKDAGILLELLKRGIVQTYVDPIRSGYHDIQELSKTYSNITLSRTRLQHSILTHYLPLYFPEMAKFWCSTRNAWWINYLLHFPTPASVIQYSEQAFCQIASPIIGRKMNKQAKLLELYEAAQHSIGLPIASDSLACQTFQLQLQRYQELTNQRQQLEQQAETTLSMNPDYCLLKTIPGIGPIVAMTILAEGGDLRRFNHHRQFLKYCGLDLAKNQSGNFRGQDKLSKRGNARLRLALYMASLHAIRQTENSFRNKFHRYTQATPKDADCKRKGMTAVMAKMARVIHALIKSGTPYQGYFEVSPSGSIPLCRAVGATRTP

SEQ ID NO: 203467 - protein, 331 aa, unidentified
MEEVKRFVGIDVAKAALDVCIGSEGTAFSIANEEVGIRQLLRALTPADFVIMEATGGLEVPIASALASAGLAVAIVNPRQVRDFARATGRLAKTDRLDAQILARFGETVRPAPRPLATEEAQALEALVTRRRQLVEMLTAEKNRRSMAPKVLHRSIDEHIRWLEKRLSGLDEELGTMIRETPLWRERDELLRSVPGVGQVLSSTLLAQLPELGTLNRKQIAALAGLAPFNRDSGALRGSRCIWGGRAEIRRVLYMATVAGIRSNPIIRTFYLQLRARGKHAKRALTACMRKLLVILNAMLRSKTHWQAPALATMTSTISPHADAVSEHGCC

SEQ ID NO: 203468 - protein, 359 aa, unidentified
MTVTMTFAGLDVHARSTHAAAIDVHSGELRRARFGGGCEEVVAWLAALPQPLRACYEAGPTGFSLYRAARQAEVPLEVIAPSKTPRAPGDRVKSDRKDAELLARLLMAGQLKMVCVPTETLEAARHLCRAREQVRGDLMRCRHRVSKLLLLHGRVYQEPTTWTVRHRQWLARQRFDEPAAELAYLDALAAVDGLVARKAALDERLSRLALADEWWPTVARLRCFRGIDTLSALALCLEIGDFARFRRPAQLASWLGLVPSLDQSGESRVQGSITKTGSSYARRLLVEAAWHYLREPRIGVTLQNRQQGQPAHVLQIAWRAQHRLYRLQQRLRGRGKPGNVATVAVARELACFLWAAAVA

SEQ ID NO: 203469 - protein, 398 aa, unidentified
MLSIGIDVSKGKSTVCGMKPGGEIVYTPFEVQHTREGMSELVSLLRGSGEEVRVVLESTGSYHCPVVAALLENGIFVSVVNSLRMKRFCSQSIRRVKTDQIDAMQIALYGLAYWQELQPTRLPENTYRELQLLARQYYQMTSLLIKAKVDFNALCDQVLPGMQELMNDHAGRHKLSDFVLRYHHTAHILKMGETRFRKDYCKWAEKKGYRNHERMAALIFATAQNGIPVLPDAPSTQIVITEAIRVLHTVEASRDAILTQMQALAKTLPEYSLVREMPCIGDTLAPRLIAEIGDVRRFHSKRALIAYAGIDAPPYQSGKFSANNRHISKRGNRYLRKTGYEVMQSYVMHKPANDPIFTFIEKKRSEGKSGKLAMVAGLNKFLRVYYGKVTELYRSLPQ

SEQ ID NO: 203470 - protein, 361 aa, unidentified
MLPIFWGQIMQNDIQSPETVILGVDTHLDIHVGAVIRQAGKLLGTRIIQTSQTGYQELLDLAEYFGVLKRAGIEGTGTYGAALTRFLIKNGLYIVEVNRPDRSKRRLEGKSDPLDAENASRTVLSGSSKAIPKMQSGACEALRIISVARRSAVKARTQAINQLRALLVSAPQDVRDQLWKSKPHDCVAACISCEASEYSPLRVALCCSLRSLAKRWVALTEELNELDKLTRKYASSLRSQFGVGPQTAAILLAVAGDNPARLKNEAALASLCGVNPLPASSGKTVRHRLNRGGSREANNALWTIALVRMRSDPCTRVYVDRRTGEGLSTKEILRCLKRYIVRELYPLILSDLAYANRPLLT

SEQ ID NO: 203471 - protein, 388 aa, unidentified
MKNFDYSIGIDVSKDNFVVSIIKENYFIKTNLSFSMDKAGFESFLYSTHQFKDSSICVFEPTGIYHINLFNFLKINGYNVSMVNPYKVKQFFKLKKSKPTKTDNIDSKVLAEFAQFNQNTTQSISEEKENFRQLIREKENISTQIAQIKSEIKRLLYLLFPEIVRNGNVFSSGIISILKIFPSAWAIKNVSEEKFISSVEKYLPKKGKRPDLKLIYQMAKNSIAYHYPHYEKILKMKIDYLAFLENQKYQLDQLIEEFADKLYKREIEILTSIPGIAKNSAIYFISEIMDIRRFPDAKKLIGYCGLDPVIKQSGKYKGQWKISKKGNSHARRIVFIMASSVRKNCPYFEQYYEKKRNEGKSYMEAVIATSTKLIRVIYSLLFENRSFI

SEQ ID NO: 203472 - protein, 402 aa, unidentified
MDFESTKPIASFAVPNNEPGAEKMAKKISEFFTPESGLRRLVISLESTSFYGVHIANYLSTCRILMPFHTEVYCLNPKSIANYKKSYIGLGKNDYVDAFIIADFARVGRITTKPWRGCQYLALQRLTRHRLHLVKALTREKTYMLSNIFLKFSEFTMLDAEEQPFSNEFGATASAVLTEFLSTEEIVDMPMEKLVEFICEKGRNRFTDPQKTANLLQAAARNSYRLDKCLYEPLTVAIASSFTMISTYNAEIKKVNKAIETTIKGLNPNAFLSLQSIPGIGPVMAAGIMAEIGDIHIFKSQESLAKYAGLVWHENQSGQFKADDTPMSKAGNSYLRYYLLEATSHIRIHCPEYGEYYSKKYAEVKTHQHKRALALTARKAIKLIFGLLARNQLYSRNRVGQA

SEQ ID NO: 203473 - protein, 438 aa, unidentified
MTEAIQIERRAAGIDVGSEQLFVAVGPGSVRVFSSFTASLIQLKYHLLEQKVTTVAMEATGVYWLPVYEVLEEAGLEVCVVNAAHARNLPARKTDMKDCQWLAELHSKQMLNSGFIPPTAIRELRDYTRLRQDHIQMSSPHILHMQKALDQMNIKIHEVLSDITGASGQRLVQAIIEGVRDRELLLSLCDAQVLKHKRQRMLDALEGRWKPSQLFALRQAYENWLHYQKQIAACDQQIAQVLERLAAVPAAGPVAKTKSKRLHKNAPAIANLNQLMIRITGGHDLSQLPCLSSYSIMQIIAEVGTDMTRWQSAKHFTAWLGVAPGSRQSGKTRKSQPRFRGKAGRLFCVVSQSLAKSKYLALGGFYRRLRGRKGGQVANIAAARKLAVLFYNTLRFGWAYVEQGLAEYENKYKEQYIKRLRAAAKHLGMQLFPEPASP

SEQ ID NO: 203474 - protein, 359 aa, unidentified
MQRKEFSFSGQKIFIGIDVHKDSWRVAIAPEVGVVKGHSGKPSAKELFDFLKKHYPNGEYHAVYESGFSGFSTYYALREVGIHCLVIHAADVPTTQYEETMKTDKVDAVKLVKSLKAGLLTGIYIHKRDDIDARAVVRLRKTIQKQLGGYKSRVKHLLHSNGVVFPERFSNPGSHWSKAFLNWLKKEVGLLSSTRTSLDLLIAQVEGIRQNLLLATRKVRELSRSERYRHDYELLTSIPGIGISVAMALLTEIGDFNRFRNEREFASYLGLVPTSHSSGNKIVHGEKTFRGNKKLGPQIVEAAWISIYRDRGLGCAYISYKKRMEPQEAIVRVARKLSNIIFSVLKTGKEYEPYQWNDK

SEQ ID NO: 203475 - protein, 452 aa, unidentified
MAKKKPTSSKGIKLPKHLQHLNQKAAGIDIGSRSHFVAIPEGMAEQSVREFSTFTDDLEALADWLVSCGITTVAMESTGIYWIPVFEIIERRGIEVRLVNAHHVKNVPGRKSDVLDCQWLQQLHTYGLMRGAFRPKSQVCELRSYVRQRATLIRNAASHIQHMQKALAQMNILLHNVVTDITGMTGMRIIKAILAGERNPHKLAAMRDIRCKNDAATIARSLHGTYSKEHLFSLKQAVELYEFYLKQIADCDQQILEQLKSFDTKHDDKDSDNDNDPKAPRTVEEALQKMSGVDLSAIDGISTVTALKVIAEIGIDMSQWKTEKHFASWLGLCPGSKISGGKVLSRATRQVANRAAAALRMSAVSLQNSKSALGAYFRRMRTRLGTPKAITATAHKLARLVYSMLKNGTEYVDFGQKQYEERYKARVVQNIKKRAQELGFEMIPIQPEMQNA

SEQ ID NO: 203476 - protein, 348 aa, unidentified
MTTTVYCGVDFHARVQTVAYCVIADGEIHLHELDHRKDDVRGFYSQFSGEVVVGLEASGYSPWFEQMLEELGHTVWLGHAAEIRRLANRRQKNDRRDAELILDLLLKEEFPKIHRPSAQSIEILRMLRYRHRLVKMRTMIINNLQALAIGSGLSLQSRLLTRPGRLRLLATQMSPVMSRQREEWLSLLDDLNARIASVVKWLEQQAETDSKVQLLRTHPGLGLLTAIGLVHSMEPVTRFGNQRKVVAYFGMEPMERSSAEKKRYIGISKAGSRLVRFLLVEAAQTAARNDQELKRFYQRLIPRRGRPKALVAVGRKLLTRSYIMLRDNIDYAEFLRRGVEARPARQDA

SEQ ID NO: 203477 - protein, 474 aa, unidentified
MIRSVGIDFHQGKHIVRCLDEKAQLSDSFSFETTADGLATLEEHIFKDGANPVIVFEPAGLSWVILAVCLRAHRPECRLVRAKGQKVAALRRYLRGASKSDRLDALTLAKMPFIDPEQLDEVYLPPAKIYALQRLARQRKHLENGIGGRKMRIGSIVDGYLPGVRQAFSNPWSCQARAFLRCCLNPMAVVREGEKALHTILAKAGHYNKANALESYRVYAACESAASLYQISSPIGVVNDEFFNVLQEEIARELKLLEVEEAESEAVAKHMQELYQELHPSDNLRTIPGVGPITAPVFLATVGDSGRFRNQSAFANWTGVVPRARQSSESEAKGLRMTKAGPAVMKWALFQAGDIGRRFDPQLAGIYHREMVYHGKNHKQAMGAVMSHLGARILRVLQDDRPYQLRDNEGNPVTRSEARKLIMLNYQVPENVRRERRRRNPVKHDNLKSQGMALPRTNEAANAPQPVKTTIPSN

SEQ ID NO: 203478 - protein, 439 aa, unidentified
MDIEDIEVFIGIDVGKSEHWATALSRQGRKVLDRALPNDEERLRALYKKLADHSNLLVVVDQPATIGALAVAVAQDMGITVGYLPGLSMRRIADLTPSSAKTDAKDAAVIAGAARTMPHTLRAINASDEDAAALSMLTGFDLDLARQVNQTEGRIRGLYTQIHPALEQVLGPWLEHDAVLEVIAAWPTPAELKRAGRARIDARLKKHGCRRHTTWAGQIVSALEHQTVVVVGTDAAAVVLPHLARQLIALHTQRTDVAAQVETLVQAHPLYQVLTSMPGIGVRTAAVFLAETLGKTFDTGAHLASYAGLAPVTRRSGSSIRGEHVSHGGNKRLKRAMFLSAFASLRSDPVSRAYYQRKRDQGKRHNQAVLALAHRRILTLHAMIRNDTLYSPNQPRNYLPPLDTPHRGTPRARRAPVDWLPSPQAPTRAPPAPTNPQIQ

SEQ ID NO: 203479 - protein, 367 aa, unidentified
MKKVSTGAGRQAKNFSEQKLTIGLDLGDRSSWYWVLDEAGVILLEQRLSTTPKAMREVFGGMPHSRIALETGMHSPWVSRVLNELGQEVIVAHARNVRLIGESRKKDDRMDAQTLARLARIDPELLCPVKHRSAKAQADLTVIRARAGLVRARTALVNTARGLAKSYGERLRGCNVRNMNPEKAQGLSPELRTALEPLLAGIESLSERIRECNEGIERLAQESYPQVALLKQVKGVGTLIALTFLLTLEDAHRFRKSRDVGCYLGLQPGRRNSGQSEPQMHISKEGDPYLRTLLVQGAHHILGPFGADSDLRRWGLKLAEGGGRNGKKRAIIATARKLAVLLHRLWVSAEVYEPLRNRSRRTMPAAA

SEQ ID NO: 203480 - protein, 327 aa, unidentified
MRQAKSLTEKAKTTVAFDVCKAALDVHIRVDGKAFQVPNTYEGFDQIALVLADYDVSLLLMESTGGYEDAAACNFQSLGYDVAVINPRHGRNFAMAMGKFAKTDRIDAAILADFAAVIDSRSDRARFIKPPTDEERKFLSQMVARRRQVVDLLSTEKQRLSHADDYAKQSINKVVAFIESQLDEINKDVSFYLKKNYSGLSKMLSEIPGIGELSVGLLVGDVPELGQIGNRQLSAVIGVAPFNHDSGKMRGKRCISGGRQNVRNVLFMGVMSATRYNPVIKAFYDRLINKGKPKRVAYIACVHKLLRIINAMVRDGTSFNPDLHAVI

SEQ ID NO: 203481 - protein, 391 aa, unidentified
MYSDGSKHSSFSVLNNRNGAKIIVDRVTSVLLLQDIPQVVIGMEATSVYGDNLMRFLRESGSLGRFERSLHMLNPKQVKKFRDAYSDLPKNDHVDSYVIADHLRFGRINKEVYMDDYKYQALKMYTRARHQLVQELTREKQRFLNTVFISFSGLTQEKIFSNKFGATSMALIEEFSSLDELAYMSTDELVDYIRKKGKNHFENPEEIAEAVQRAAKNSYRPPQVIADAAKQMLAISMNTIRLLQKQIKEYDKAIEKMLEAFPQTLTSVKGIGNIYAAGIIAEIGDINRFPSQASLAKYAGLVWTQHQSSDFEAEDKRMIQGGNHHLKYYLCEAANALRRCDPEFKRFYALKYKEANKHNHKRALALTARKLVRLVYTLLKTNRLYIPPEEY

SEQ ID NO: 203482 - protein, 341 aa, unidentified
MSKVSTIGLDLAKNVFQVHGADASGAVLVRKKLRRDQVLKFLAAQPTCTVAMEACASSHYWAREIAKLGHEVRLIAPDYVKPFVRRQKNDAADAEAICEAAQRPTMRFVAVKSEEQQAAAVVFRARDLLVRQRTQTINAMRGHLAEFGIVAAKGPFHVAKLVAAIEDDRSGIPEMARPILRLLVEQLRSLDERVALLDRELARRAKEDAEAKRLMTIPGIGPITATALAALAPTAQAFKRGRDFAAWLGLTPLQRSTGGKQKLGETSRMGERTLRRLLIIGASAAVRWAMRKGSTADPWLARMLNRKPPMLVIVALANKTARIVWALIARGGTYRAPAAAK

SEQ ID NO: 203483 - protein, 391 aa, unidentified
MIYIGIDVAKDKHDCFITNSDSEVLFKAFTIFNNLDGFNDLYQKIESVMDDVTKVKVGLEATGHYSYNLLGYLIDKGLPTYVINPLHTNLYRKSLSLRQTKTDKVDARTIASMLMSDVNLKSYSDTSYHNKELKSLTRYRFDKVKERAKLKTSVSRLVCILFPELEKLVPTLHMASVYALLSEFPSAKHVATAHLTRLTNLLSESSKGRYGKDTAITFRDSARASIGSNMPAKSLELKHTIKLIQELDSEIDEIENEIKIIMDEINSPILSIPGINYRMGSMIIAEIGDFNRFDSPDKILAYAGFSPSTYQSGQLDGAYAHMEKRGSRYLRYALYNATKYVCHWDPTFAAYLAKKRAEGKHYNVAISHAVKKLVRVIYHLEKTKQQYIKAA

SEQ ID NO: 203484 - protein, 343 aa, unidentified
MEAKRYIGIDLHRNCFTACVRLENGREYLKEWKLEDMAKFTAKLRPTDQVAVEVTGNTRLFHDAVAPHVERVVAVNPSQFKVITHSVKKTDPNDARNLALYLAKDLLPEVRMKDKTQAQIASLTQTRDTMVKLRTALKNKVNNLCSAHGVNLNKESLASEKGLRAVLEMHFDQLVNLELKIIIDQIRSLNKSIAELEETIGKESQKLEGHKNLTSIKGIGGLSGGILLSIIGDIGDFADEGKLAAYFGIVPRVSNSNETERSGRITKRGTKLGRTTLIQCALIAQRYSPYLKTYYEKMKNRRGTGKAIVALARKFLGIIYRTLKNKWVFADFPNFVLAEEATA

SEQ ID NO: 203485 - protein, 398 aa, unidentified
MHQSFILGLDIAKRIHYATLIDRSGKVLDSFKFANSKQGFHSLVSHLNKWVDNTAHLIVGLEATGHYWLNLYQFFADHAINVIVLNPLQTKSFRNTSIRGAKTDKIDSRQIADFIRFSDEPVSVAPAEDLIVLKQLTRFRSDLVNQIANTKKKLIALLDKVFPEFQELFSDIAGITSMALLEEYCLPEEIAKISTAKLTKFIQKTSRSRLGEAKAKLLKQQAEQSIGLTFGIDAFTLEMKILIEQIKHLEAQVKKVAKKILEVSKRQKTTLTTIPGISDTIAAVVIAELGNINKFAKAKDPAKAIAAYAGLDAKPKESGSSNGKRKMSKRGSRYLRTAIWQASFIAYQRDPMFQAIYQKHKEKGKHHNVAISHVARKMVNVIYSLLRSNAIYKPVMSS

SEQ ID NO: 203486 - protein, 398 aa, unidentified
MTESSDDESVQVFIGVDVGKDTHHAVAINRSGKRLFDKALPNDENKLRSLISDLKQHGQILLVVDQPAAIGALPVAVARSEGVLVGYLPGLAMRRIADLHAGEAKTDARDAAIIAEAARTLPHALRTLKLADEQIAELSMLCGFDDDLAAQTTQTSNRIRGLLTQIHPALERVLGPRLDHPAVLDLLQRYPSPEKLASLGEKKLAAQLCKLAPRLGKRLAADIAQALAEQTVVVPGTNAAAVVLPRLALPLITLRKQRDEVALEVEQRVLAHPLYPVLTSMPGVGVRTAARLLTEVACRAFASVAHLAAYAGLAPVTRRSGSSIRGEHPSRRGNKALKRALFLSAFAALRDPLSRAYYTRKMSQGKRHNQALIALARRRCDVLFAMMRDGSFYTPQAS

SEQ ID NO: 203487 - protein, 358 aa, unidentified
MRGGTELFPKITVGLDLGDRVSEVCEVDWRGREVGRGRVVTTRAGLREYFGGRERCRVVLEAGTHSPWVSRELQVLGHEVVVGDPSRMYGGRRKKKNDRLDARFLARQGRADVELVYPIRHRGEQAQRDLAVIRARDQVVRSRTKLINHVRGAVKSVGGRIGRCSAEAFAKRAASELPEGVGEALLPLLELIEELTARIRAYDRQVERLVERYPEAVRLMQIKGVGPVTAVAYVLLVEDAWRFLRSRDVGAYFGLVPRLDDSSGREPQLRISKAGDELGRRLLVSAAHYILGPHGPECDLRRYGERICARGGKNAKKRAVVAVARKLAVLMHRLWLSERVYDPDYQLRRRERRRLQLA

SEQ ID NO: 203488 - protein, 272 aa, unidentified
MEHELHYIGIDTAKEKLDVDVLRPDGRHRTKKFANTTKGHDELVSWLKGHKIDHAHICIEATVTYMEPVAECLYDAGYIVSVINPALGKAFAQSEGLRNKTDTVDARMLAEFCRQKRPAAWEAPHPLERALRALVVRHQALTDMHTQELNRTETAREVQRPSIDAHLLWLEAELKRLEKQIKDLTDDDPDMKHRRKLLESIPGIGEKTSAVLLAYIGLKDRFAHARQFAAFAGLTPRRYESGSSVRGASRMSKAGHVSLRRALYMPAMVATK

SEQ ID NO: 203489 - protein, 403 aa, unidentified
MSIFVGLDWGGASHAVCLLDGSGKVLERFLVTHDLDGLADLVARLRRWGPPAGTPVAIERPGGLIVDCLVDAGFIVTPIHPNVVKACRPRYRAVAAKSDPGDAYILADILRTDGHRLTPLSPQSDAIKALRALVRGRDDLVATKVVLANQLRALLDSFWPGAIACFADIASPIALAFLDRYPTPGSAVRLGEKRMAAFLGQNQYSGRRAAAEVLARLRAAACGLAAEAEADAKGQLVKALARALETIVTQIAKLTSRIEHAVAELPEGRIVMSFPRAGKICAAQIAAELGDVRARFQSEHHLAAEAGVAPVTYQSGKSRGVGWRWACNKRLRAAVTCFADNSRHASPWAALVYRKARERGCNHAHAVRILARAWLRILWRAWQDGSAYDPAKHSSAKELIASG

SEQ ID NO: 203490 - protein, 338 aa, unidentified
MEYGAIDLHTRKTLIRIVDAEGRVVLDRTITTTRDGLVGVFGAHPRMRVLLETGTESEWVAQTIEGCGHEVVVADPNYALMYGVHVRAVKTDRRDVAALAEACRLGIYRAAHRVSAAQRQVRRQLRVRDQLIRMRTQAINLLRAQLRQAGYRLPSGASPNAATRCRRLALSPELGVDLAPVLTLLDALAPLIKARDQEAETQAAADPVVRQLMTAPGVGPIVGLTYRAVLDDVARFRDASSSTAFLGLVPREDSSGTRHRKGAITKRGPTTLRVLLIQAAWTIWRQRQGRAALHAWVERLAARRGRRIAVVALARRLARILYAMWRDRCDYRPVPIAA

SEQ ID NO: 203491 - protein, 465 aa, unidentified
MDRTHVGGLNRKQRKDLARRVRLDDPGLDVVHPDAAGLDVGNSVHYVAVRPDRDPDSVRRFECFTADLHRLADWLVQCRVTTVAMQSTGVYWIPLYEILEERGLEVFLVTGRHTKNLPGRKSDVQESQWLLKLHTYGLLRNSFHPPADIRVVRTYWRQRGDHVHAVSTCIQRMQKVLTQMNIQLANVISDLSGWTGQRIVRAILAGERDPDTLAALSHPGIHATRQTISKSLEGTWQPDLVFVLQQEVATYDACQQRIAACDQALEQHLQHLATKAGAPATPHAPKRRRKAGSHAPQFDLRGELHRISGVDLTRIDGIDVGVAQTVVSEVGVDMTRWATEAHFASWLGLCPDNRISGDRVLRTGTRHVVNRAATALRLAATTLRRSQSYLGAQYRRLRSTLGAPKAITAMAHKLARLVYRMLRWGHEYVDKGLQFYEERHHQQQVHLLIKRAAKFGLQVVEPGPA

SEQ ID NO: 203492 - protein, 489 aa, unidentified
MHTLLAHLKCQIKRASFPLSDKNADAHSAVKLFLFPDWYRCTQKEKLLLILRSRLHPLKVRNPDFTFSPKKGGETTLPNILNVGVDISLKKAVCSLLDQQGTYLLKVFEIANNPDGFKMLAERLAELIHNRGFDEIRIGLEASSMYGYHLIEYFTNTDLPAEIKPYMINAKYIHRFKKAFPEKEKTDLVDAEFIAEYLRFGKLPAKYETDSRYLPLRRLVRYRYHLVKTIEREKKLFCANLFLSFPGWLQEKPIKTLTKTSLDILTELSLDEIIDMSLADLSLFVAKAGNNRSPQPQVIAAQIKKAVRESYRIRPELCSSITFILASIHRTLCALKEGLRAINKAIEAEAKGFINPLISVNGIGPVYSAGIIASIGDISRFSSHNKLARFAGLTWKRIQTGQSESEDTHLVRECDKYLRYYLVEAANSLRVHNEIFKTYYQKKYQEVKKHRHKRALVLTARKLVRLVFALLTKKQLYDRLKGLPVLKAN

SEQ ID NO: 203493 - protein, 404 aa, unidentified
MELTAIYRCVAALDVHQSKLTVCILYENESGEIITELKEFGGFKRDRRAMADWVESFQPELVVMESTGIYWKSPYAALEKQGLTIWVVNARHVKQVPGRKTDFADAQWLAILARNGLLRGGFVPPAVFRELRLIARQMQKLTGILSGEKNRLHKILSDGGIRLGVVVSDIHGKSAKAMIKGLLAGESPEQVLKYASNRLKASEEELLDALAGDLSPAHQFVLTELMAHIDELEARIETFRQALLQGLAPYQAILRSLQTIPGLDETGAALLLVEIGDDMSAFGTPERLASWAGVCPGNNESAGKKKTGKTRKGNPYVRRILCEASNAASRTQCRLQDMFKGLLIRRGRKRAIFALAHKILKIVFLLIERGDYYRDATVDYEKLSVQRNAPRWIKTLKKYGYIAA

SEQ ID NO: 203494 - protein, 350 aa, unidentified
MTTLPLRITAGVDTHLDVHVVAALDDTGGLLGVESFATTTAGYRRLLALLRGFGQLELVGVEGTGSYGAGLTRLLLSESVRVVEIDRPNRQRRRRRGKSDPQDAITAARTAQSGDACGEAKTRDGNVEAMRVLRVARFSARKARTQALNQMRSLISTAPEPIREELRHLKAGPMLDCASAYRPGTKRDPVSLTKFSLRLLARRAIALETEVAELDALLIPLVAETAPELLAVMGLGTDTASALLVAAGDNPERLRSEATFAHLCGVSPLDASSGKNERHRLNRGGDRQANSALWRIVITRMVCDARTRDYIERRMKEGLSKKEAFRCLKRYIAREVYNHLPRAELALDSP

SEQ ID NO: 203495 - protein, 345 aa, unidentified
MNKPVSASPATVFCGIDVSAGSLAVALIAPDGSLAQREFANSASGHKALLAGLAKSNAKVRVSLEATGIYSLDLALALDAAAFIELAVLNPKLVNRFAQTLRRSKTDAADAVVLAEYSQRMPFTAWQRPGIQELGLRTISRHIVSLGADLAAAKNRLHAAQSASTTPRAVIADLKQAQAALLRRLTKMRRQAMKLVQADVSLQQRFVLLVGIPGIAEISALQILSELVLLSPTMTVRQWVASSGLDPVHQQSGTSQHRPSQISRAGNRRLRRALYMPALSAVRSDPHVRAFYQALQQRHKTGLQALMAVERKLLHGIYGIFKSGKPFDGKLLFPNIQLEIKSSAG

SEQ ID NO: 203496 - protein, 372 aa, unidentified
MKNTTTYGGVDAHKKDLFIAMLIGTEQTPVTWQLQNEPNAVRRLVRKLERDAPGPVRVCYEAGPCGYALQRQVTTARVHCQVIAPSLIPRKPGERIKTNRRDARKLAELFRAGLLTEVRPPTPEDEAVRDLCRARDDAREDLQRSRHRLGKLLLRRGLHYSGGRNWTQGHRRWIASLEWTQPAERVVVDDYLLAIDHLEARLIELDARLVEIAATEPYRERVGWLRCFRGIDTLSAILMLAELHDFQRFPSAPALMAYVGLVPGEDSTGEKHRRGRITRTGNALVRRLLVETAWHYQHRPSIGVALTRRRKGQPGRVIAIADKAQQRLCRRFRRLMEQHKPAPKVAVAIARELAGFVWAALQPAPVPTSTRV

SEQ ID NO: 203497 - protein, 343 aa, unidentified
MVTVTRFLGLDYHQDSVQVCVMDAEGNTLTNRSVPNSWRCIGAVVGGTVLPAEFVAVRASIECCSGAEHLAEELIEQLGWSVTLAHPGIVNRMKQNPEKSDWADAHILADLMRLGYLPRVWLAPTEIRQLRSLVRYRYQQVKQQTRLKLRIRALLREHRIPKPKEFGAWSLMWFAWLKCLELDDVTRFLMDQYLEELRQVQKKIADAKQMLFDRTRNDALIAKLLKLDGIGPITAITMRAEIARFDRFDTGKQLARYCGLTPRNASSGKRQADAGLVKAGNTQLRMVIIQAAQRLINFNPHWGQFAARLMQRGKPRNVAVAAVANRWIRRLYHQMQPEQLVAI

SEQ ID NO: 203498 - protein, 355 aa, unidentified
MIVVGVDPHTQTHTAAAAKQTGEAVAEVTVKARLKAHQRLLSWARELYDERVFALEDCRHVSGNLERFLIDRGEKVVRVPPKLMAGARRSARTSGKSDGVDALAVAHAALREPDLPEAHLEGIERDIRQLLDHREDQVWERTRIQQRLRWHLHDIDPSLEIPERALDRYCWLDRVEAHLASLAVSTQVRIALELVEDCRRITRRVSSLERELSSLVERHFPRLLALPGCGALTAAKLVGEIAGIERFSSDAKLAMHAGVGPLEASSGQRQRHRLNRKGNRQLNTALHRIAVTQCRVHAPAKDFMAKKMREGKTKREALRCLKRHLVRSIFRILGGHKTRDLAANSTALDLRPVAA

SEQ ID NO: 203499 - protein, 316 aa, unidentified
MAQHVQPISLGADVDSRFIEIAVYGAKTSERIENTPEAIRAWLARQSAATELALEVTGNYHCELLEQAYQAGVRVYLINPLWLRHYRQGVGHRTKSDRADARLLARYVAHEREELRPWTPPPAGQRALCSLLKRRAKLVQVQTTLEQSFAAEKTIAEAFARTRAELQRLARAIEHRIKALVREQGWWAHYRRCCSIYGVGEITAAALVAAFQRGPFKSADAFVAYLGLDVRRRQSGRYEGLAKLTKQGESEYRRLLHNAARAAARRDLKAYYEGLRARGFQPTQAHVAVARKLVRIAFSLMKHQTTYDPTQIRAAA

SEQ ID NO: 203500 - protein, 397 aa, unidentified
MSALPEIRVSLDIGSRHHSVAVGLADGSFLESFDITHTKIGFEQFFRKIEQYELTYGLPVAIAMEGYNGYARPLDQMIRARNYRLFNINNLKLARFKEIFPGAAKTDALDAHKGLELFQLSDHLPMAKDVLTEVRPTPIVNEQLKRVTRRRRRLVNERGRVINSLQSDLQAVCPGLCDLTKDVSQVWYLNFLASAKQNLSELSRKRKGSLLKIKRIGKTLVERILSWQKVACFSSDIELVSPFILEDVNRITTLNNTIKALDRQIASLTATSTIATLLKSIHGFGKTTCAELAGEVGTIDRFASESSLALYLGMAPLDNASGNYRGTKTPKQVNRRAKAAMMVAVDHHRRSVEESGRYYEKKRAEGKKHNQAVRALGRQLCRVIFKMLRNEQEYINR

SEQ ID NO: 203501 - protein, 340 aa, unidentified
MTITTVGIDLAKNVFAVHCVDQNGKTVLVKPKVSRAALPELIASLPPCVIGMEACSGAHYWARVFRQYGHEPRLMAAKFVSPYRMAGKSGKNDAADAQAICEAVRRPHMRFVPVKDESQQAMQCLHRTRQGFIEEKTATYNRLRGLISEFGVIAPQSTDALRHIVSEQKNSLPLQVQQCVDDLLEHINRIEDNIAEYDRILSRMAKTDHRSQRLMELKGIGPTTACALVASIGNAHDFKNGRQLAAWLGLTPSQYSSGGKSKLGRITKAGDSYLRTLLVQGARSVLIGSEKRTDSFSRWVCKLVERRGYWRAVVAIAAKNARLCWASLHYGDDFRLYSAS

SEQ ID NO: 203502 - protein, 346 aa, unidentified
MNYIGMDCHISTLDFAVVNDAGRLVKAGSVATSVNRFIEFVKKIPLPRTIYIEESTLAAWVLEICIRYGEKLVITDPKKNLWIASSGQKGDSIDALKLAQLARGGYIKEIHHPVGQRRRFRELMEAYHDTVRSEVRIKCKIKAKFRQNGIQCTGDTVYVKNHRQEWKDKLPQEATLLLILEGLWLQLEQLEQTEKEILKAAKAQAKHYPEIKHFEDIPGIGFINAATISAILETPYRFPNKRKVWMYAGLGLMKRSSGGKLYSEKLSTDYNRLLKYTIKQAAEAAIRAEDNPLRRKYLDTTLLHGIAPNLAKLTIARGMLASMWAMWEKGEKYNPEIRERATHKQG

SEQ ID NO: 203503 - protein, 353 aa, unidentified
MKCDKYMGMDVHQATTVVDVLDADGKPVLETIVATEAAAIIRLLQSLSGSLHVTFEETTQAAWLYEVIRHFVAEVVVCDPRRNKLLGEGSKADKPDARKLAELLRAGMLRSVYHGHEATRKLKELVRAYETLSVDTERTMVRIKAIYRGRGIRTPGRGVYQLKQREQWLEQLSEPGVRQRVSFLYEELEQLRPLRRRAKQAMLAESRNHRAVTLLRSIPQLGPIRSAMIVATVDTPHRFRTKRQFWSYSGLAVVTHMSSEYEIKAGRVVRRRKPVATRGLNRNCNRRLKELFIGASAGGGQTEPYRTYLEGLKQNGMRAEMARLTLARKIATLALTVWKKGESFDPKKLNWTT

SEQ ID NO: 203504 - protein, 411 aa, unidentified
MRVVGLDLSRTFAEIAYAEDGRVTAGGRVTLTHGALHEWAASQLRAADHVVLEATANTMAVVNAVRSHVARVVVANPCQVRLIAEARVKTDKIDAAVLGQLYASGFLPEVWVPDDATQTLRRQVARREQVVRQRVRLKNEIHGVLHTYLIPRCPAADLFGRKGRQWLATQPLPLEERLGIEQRLRELDRLHDDLLAIERLMAEAVVGHEDVQQLLTITGVNTTVAIGIWAAIGDVTRFRSPEKLVSYFGLNPSVYQSGLQPARHGRISKRGRAHARAMLVEAAWAAAKAPGPLRAFFHRVRAKRGMQVAAVATARKLAVIVWHVLTKHEPYAHTRPLLTAIKHRGLQLQAGRPSQRGQKGQAADYNVKRLRDRERATVEREEREYARRIARWRPQRPDGETTPPRRSRSSG

SEQ ID NO: 203505 - protein, 404 aa, unidentified
MKQFTAELEEVKSHSSLNLILSHRTLDDYCAYIGLDVHKETIAVAVATRGRGKVSYRNELPNRPKSIKKMVDKLIKEFHGELLLFSYEAGPCGYDVYHQLMALGQDCEVVAPSLIPKKAGDRVKTDRRDAMGLARLSRSGELTAVWVPEPEQEAIRDLTRAREDSKGIETRTKQQLGAFLLRHGRVYETGKSRWTKGHFNWLETVKFESAIQQIVLQEYINAVKDATQRVAGIVTEMHKALQTWSLRPVVEGLIALRGIDIITAMTIMAELGDISRFDKPRQLMAFLGLVPSEYSSGGKRRLGGITKTGNGHVRRVLVESSWSYRFPARKTRHLRQKESKASEPVQSIAWEAQKRLCGRYQHLLGSGKVKQQACTAVARELSGFIWAIVCEVMNKPHASKCLVM

SEQ ID NO: 203506 - protein, 387 aa, unidentified
MPQLNDLSRSLVALDQDSTIIAVVELSQSSWLVAGVLPGIERQPQKKLEPSAERLLGLLHRWRDEAVRAGKKITRIALAFEAGRDGFWLARWLNARGVEAHVIHPSSVAVSREHRRAKTDRLDTEMLKRGFLGWLRGERGHCTMARVPTIAEEDAKRPNRERECLVGERTRIVNRIKSTLARLGIRNFKPTLRKAAERLATVHTPEGMPLPPNTLAELQRDMARLGFVVSQIREIEQARQKRLEQETETGPHAKVRQVARVIGIGIETADMLVHEVLSRPMRDRKAVARYAGLTGSPDESGARRREQGLARTGNARVRRGMIQLAWRFLRFQKQSALAQWYRARTADSRLGMRKTMIVALARKLLIALWRFVTTGEILEGVILRPAG

SEQ ID NO: 203507 - protein, 370 aa, unidentified
MVSLPALMQYHNDTELSSLEETRCQFNGGKCVIKLGIDVHQEFYVVVEQVGGNNPKPPQRFGKGVFLGWAAKLKRPAAEVHAVYEACGFGFTLQRQLVALGIKCYVVCPQKLDERNKRVKTDSLDAKALCLKLDRFVEGNRDALALVRVPAEKEEQLRAIHRQREQLVKARKQLEAQGRSLMVNHAIEPVQQWWKRRAFAQLQVPQWMRTLLLNSQPILLVLEEKIRALTVQRQSAATPNQPRGLGQMTSVVIDREIGNWHRFNNRRQVGSYTGLCPGEYSSGNTRLQSCVTKHGNPRLRAALVELAWRMVRFQPNYKPILKWRALLAKGRLASGAARKKAIVAVARQLAIDLWRFRTGRGTPEQVGLTI

SEQ ID NO: 203508 - protein, 356 aa, unidentified
MDGTKYIGMDVHQGSIVAVVLDTSGRVVMESILETRAETVLQFIGGLSGTLWVTFEEGISAAWLHDLLKPQVGRVVVCDPRKNALLKAGNKNDQIDARKLAELLRAGLLSPVYHGESQERLLKELARSYRALTQDTTRVMNRLKAVYRGRAIRCPGQGVYSPRHRDDWLQQLGEAGARRRAARLYEQLDGQQRLRRQARQELVSEVRKHPATVHLTTIPFLGPVRAAVLIAIVGTPHRFRTKRQFWAYLGLGLQTRISGEYQLWGGRVQRTKRVLGLRGLNRNHNPELKRLFKSMATEASTRPGPWHNWFQARVKEGLNPALVRLTLARKLAALTLAIWKKGRKYDDDEALKSQAA

SEQ ID NO: 203509 - protein, 343 aa, unidentified
MDQYIGLDVSLKDTAISIRQEGKRIWRGKCPSDPKLLAEIIRKHAPYARRVVFETGPLSTWFYHALTAEGVPATCIEARHAQKVLNETLNKTDANDADGLAQLAEAGFYKAVRVKAFDSMLTRTLIGGRNQLLSISTQLSNQIRGLMKTFGLLVPKGRGRVFDGNVRELVDGNDGLARIILPLLEAWRDIRKRAAELDRQLLAAARQSQATKLLMTIPGIGAVTAVSYVAAIEDPENFRTSRSVGAWLGLTTRRYQSGEVDYDGHISRRGDNHLRGLLYEAATVILTRTNSKNESSLKSWGLKLRERLGFKRAAVAVARKLAVIMHSMLKTGEVFNALVGAAA

SEQ ID NO: 203510 - protein, 367 aa, unidentified
MSNYVTAIGLDVHARSISACAFDPMTGEVSRARFGYDPASVAEWALGFESPKAVYESGPTGFHLCRALRAPGVDCAVGAVSKMHRPAADRGRKNDRRDAEWLARLLACRNVVEVWVPDERTEAARDLSRALEDARDDLQRARQRMSKFLLRHGLVFDETTPTGRRRSNWTEAHWRWARPIEFDEADDAAAYERYTDAVDRCGEAKRELERRVVEAASRPERAPTVDALCPVKGVDVAAAFLLAAEAGDFSRFPSAPSFAARCGLAPSERSSGETESRGGITRAGNSHVRRALVEASWHVPMSTRHPKKPRPGHGVAPAASRHAAKCNRRLRDRRDAMSQAGKRPCVANCATAREMACWVWAIAPMVR

SEQ ID NO: 203511 - protein, 372 aa, unidentified
MEEISALYIGLDVSKLKISVALADDGRNGEVRFFGDIDARPATIAAVAAKLAKRGSRLHFCYEAGPTGYDLYRQIVALGHDCVVVAPSLIPQRPGDRVKTNRRDALSLAKLHRAGELTPVWVPDAGHEAVRDLVRARECAMESLRRARQQLLSFLLRHGRVYTGRTPWSKAHSSWLCRQTFEHPAHQIVLAEYRHAIEEAEVRLKRLTEQVTETAASWSMAPVVKAYQAMRGVAFMIAVTFVAEIGDVRRFDNPRQLMAYLGLVPSESSTGERVRRSEITKAGNSRVRRVLIEGAWTYRFPARMSRRIEERQDDLPKAVREIAWKGQVRLCGRYRKLIAAGKLKAVTVTAIAREMAAFLWAIGQEVVPVLQA

SEQ ID NO: 203512 - protein, 456 aa, unidentified
MDFSNFSVPNNTVDNTFQKREARPGDVVMLNDLAADAISKNPVVPDWADAANYAISQPLAESLVRLGTLNAGGADEAWQIVRDARCSEDCSYIGMDLHSTNVVVSIVRNVRDSHGRIVRRKLLNRRVDTRDGGVVLAQVLEPFCDEGRPHIAVVESTYNIYFIADLFELKGWTLLIADPCAVSQARLKATNDYTDAEYLAEKLCSDSLHVSLLLPHEDRATRDLVRLRMNVVQERARAKIIFINMASNQLGFTVDGSLDKLARIAFEKGTDCQELVDIYPDSKVREKAAFFLRHIHYLNNEVEHLNEIIHPDIRKLDDAKLLKAIPGCGDVIASTIVSEIWDINRFPSAKDFVSYCRLAPTSRLSNGKLKGTGNAKNGNAYLSWAVTELANLIVRFNKTAAKMYARLFKKYGKLRVKAIRSLAARLARAIYHVLKTKKPFDEEKCFGFRVVEAESC

SEQ ID NO: 203513 - protein, 376 aa, unidentified
MPDVSSNAPADVRLWVSFDVHKLSIVAATLPPIGGQPDVHQIETTRAAIRRFIDRLGGPEGLAVSYEAGPGGFDLLRMLSEMGVACDVIAPSLIPVRVGDRIKTDRRDAKKLVRLYRSGELSFVAPPTPQTEGLRDLMRARDDLRCARTAACHRVSKQLLRHGRIYRDGKSQWTKMHRAWIARQRLDDDLAHAALCQMLTHLDGLDRQLDALDRDLEQIARHQRWARVVEILTRFRGISTRTALGLIAEIGDFARFSHPRELCAWLGIVPSEYSSGSQRHRGHITKTGNQHARRLLIEAAWSYRHRPRRPDRGPEPDARAWQAEIRLHRRYRHLTDHGKRSTVAIVAVARELVGFLWAAMTEQPLAREAIAASRNP

SEQ ID NO: 203514 - protein, 320 aa, unidentified
MKKHATSMRVFVGVDVSKDSLDVYRPDTAEQIKIDNSEAAVADLCQQLQKKKRHLIVVMEATGGYERLLVNQLALHDIKAAVINPRRVRDFAKGVGMDAKTDPIDAKILSQYGEVVSPKPMAVKSEHEQKHAAFVARRNQLLELISQENNRLQQTWDDDVKQSIRDVLEMLKKQLKSIDSQLAKMLKADAKNQRTIEILQSAKGVGPVMISTLIAELPELGRLNRAEIAKLVGVAPINRDSGKKSGKRFIGGGRGQVRRVLYMATIVAIRHNEKIKTFYQHLKSKGKVSKVAIVACMRKFITILNLLVKKDQLWQTKTSV

SEQ ID NO: 203515 - protein, 332 aa, unidentified
MYLGIDVHKRYAQVAVMDEAGEIVEEVRVENANLDDLAQRYAGAKAAIEATSNYYHIHDTLSEHLDVTVASPGKLNQIANTDKKTDRVDAKELARMVRLNSVPESYVPTDEVREARALVRGRQTLVENRTKYANKIHGLLSDHGITEDVKPLSVEGREFLRELSLPTPWDTLLESYLDLIETLTEEIQNLEETIEERAGSLKETQLLMTIPGVSYYTALTIYAELGEISRFDGDKSVVSYVGLNPMIRESGDSRIEGSISKRGSSRVRWLLVQAANTAVHTCNDAYLSRFYERLASRKNSQKAIVATARKLLVSIYHMLDRGEIYDPPGVSA

SEQ ID NO: 203516 - protein, 344 aa, unidentified
MPIITVGIDLAKAVFAVHGVDEAGKATLVKPKVARDQLVPLIAQLPPCLIGMEACSGAHHWARVFAEHGHTVKLMAPKLVSPYRMSGKRGKNDAADAAAICEAVTRPSMRFVPVKDEHQQATLCLHRTRQGFIEERTSTYNRLRGLLSEFGVVLPQSPERLRKEIGSCLDSLPGWARRCMSELLEHTSHIEDRLVELDRAINQIAREDDRSRRLLQLRGVGSTTASALVASIGDGHDFRNGRQVAAWLGLTPSQYSSGGKQRLGSITKAGDAYLRSLLVLGARSVMANLGDKQDPLSRWIRNLMERRGYWRAAVAIAAKNARMAWAVLHYGDTFKPEQAEPTGA

SEQ ID NO: 203517 - protein, 431 aa, unidentified
MKSTATTPFVARIGIDWGDAKHDICLLPEGATAGERSVLTHSPEAIDEWVGTLRQRFGAAPIAIALELNKGPLVYALQKYDGFVLFPVNPTTLARYRKAFTPSGAKDDPTDAELALDLLCRHPEQLKALCPQSASMRALQQLVEQRRSLVADGVRLTNRVSSALKNYFPQPLQWFDEKGTVLFCDFLARWPILEQVQRARRTSLRSFFLEHNVRREHLVTQRIDAIRFATALTQDDAVIGPNALLVETLVAQLRCVIDAIDKFDRAIAATAAKITDYALFEALPGAGPTLAPRLLVAFGEQRDRYHDAAQIQKYSGIAPVTERSGKSAWVHWRYAAPTFLRQTFVEWAAQTIPRSFWARAFYDQQRAKGSSHQAALRALAFKWIRIVFRCWQDRTPYDETTYLNALKCRGSSLLSSITTPKVLDGAPQGVS

SEQ ID NO: 203518 - protein, 381 aa, unidentified
MKRIIYVGMDVHLSSYTMCCVEPSFKDEDKIFGHMRLEPSVSSVKLYLTKIAERINDPGRSIHFICGYEAGFIGYSLYHEMNAAGLTCVILAPSTMPQHPGHRIKTDKRDAEHIAKSLAYGTYRAVHIPTAEDEQTRDYLRMRNDHQLALKKVKQQINAFCLRLGKHYTSGRTKWSQAHLHWLRNMELPALHREILDEYLTTYETISTRIQAFDQRIEELASRDSYHEPVKQLSCFIGIKTYTALSLLAETGDFTRFARAEHYASYLGLTPSEKSSGETTRRGSITRAGNTQMRTLLVEAAHCMARGRIGYKSKALRKRQEGNSPQVIAYADRANERLRRKYYHMIRHGKKHNVAIVAIARELACFIWGMMNGCLTARPAG

SEQ ID NO: 203519 - protein, 410 aa, unidentified
MEVLYPRCAGLDVHKATVVAAVRLVAGGKVVREVRTFATTTAGLLELAAWLAENGCTHVAMEATGVYWRPVWHVLAEGGFVLVLANAAQVKNVPGRKTDVGDATWLAELLAHGLIRASFVPDGPTAELRSLLRTRKQLVRERASHVQRLQKTLEDANVKLDGVVTDLLGKSGRAMLEALATGEDDPAKLVALAHPRLSATPERLREALRGRVTAHHRFLLRLHLDQVDALDAAVARVDREVAAHLAPFRAAAELLTSIPGIGPLAARVIVAEIGLDMGRFPSAGHLVSWAGLCPRNDESAGKRRSVRLRKGAPWLKTTLVQCAWAASRKRASYLQAQYHRLRARRGPKRAVCAVAASILTAAYHMLKDGTAYRDLGPDHFDRRAKEVQARRLVRRLADLGYAVELAPLTT

SEQ ID NO: 203520 - protein, 351 aa, unidentified
MSAKANSAIAVIGIDIGKNSFHVVGQDKRGAIMLRQKWSRGQAEARLANLPPCLIGMEACVGAHHLSRKLRMLGHDARLMPAKYVRPYSKGQKNDFRDAEAIAEAVQRPTMKFVATKSTEQLDLQALHRVRERLVSQRTGIINQIRAFLLERGVAVRQGLRFLRTELPRILATPCDVLSPRMLRVIEDLAGDWRRLDERIEGLSSEIEALARQDKGCERLMSVPGIGPIISSAMVAAIGMGDAFSKGRDFGAWLGLVPKQISTGDRTILGSISKRGNRYLRALFVQAAWVVLVKVGPKHWERYGLKSWIEAAKKRLHHNVLAIALANKLARIAWSVLAHGRTFEASKIQAA

SEQ ID NO: 203521 - protein, 351 aa, unidentified
MLIIGVDYHPSFQTIAFLMEETGECGEQELNHSDGEAEKFYRDLNQRGVSVRVGLEATGYSRWFERLLAELGFEVWIGDAAEIKKKRVRKQKTDREDARLLLKLLLENRFPRIWVASPENRDVRQLLWHRHRLVQMRTRIMNQLQAVAMNEGYRWKKKLFSKQGRALLEKLSLAPWASRRRKELLELLDQLDPKIAELTAAFEQEANQRPDVLRLMTHPGVGAITGLAYVQVIGTPDRFPCGKQIGSYIGLIPCEDSSAGKQRLGHLSKQGNALLRYLLGEAAQAAARCNPDWRRRYVHLAMRRHKNIAKAAMARKLAVRLYWMWRNGWDYSQLVSFGSHAGKLGTGHGVK

SEQ ID NO: 203522 - protein, 366 aa, unidentified
MPEYILTACDLHDKTLVLKIARGLEPPQQRTFYNDFDGRTALVAELRRRADQAGGAEVIFAYEASGQGFGLYDQLTREGFTCYVLAPTRIERSPKHRRGKNDRQDALRILELLRGHVLAGNPLPAVWIPDAQTRDDREPVRAHLEAGAKLTRLKVQIQSLLKRNQVRRPAEVAKGWTTGHRRWLEQLVQATLSPLGPGGRIVLQSLLRQMTALEQELRELQQAIARLARSPRYTRQVKVLAALPGVGLMTAMVYLTEMGDLSRFRNRRQVAAYLGLVPSSNESGQQNDRKGHITRQGSWRLRKVLCRAFWAQQRCDPTSRTIYQRQVRRNPQHKKIAAVAGMRRLGVNLWHKGLEAALPPGQKAAG

SEQ ID NO: 203523 - protein, 355 aa, unidentified
MQQNSKVFVGLDTSKLKIAVAVAEDGRQGEVRFLGEIDNTPEAVRRLVSKLSGKHRELLFCYEAGPTGYGLQRQISALGHECAVIAPSLIPKRPGERVKTNRRDALTLARLHRAGELTAIWVPDPGHEAVRELVRAREAAMADLREKRQHLQSFLLRHGRIFSGHKPWTRAHARWLSELIFEHPAQYLVLREYRQAIEDAEARLERLNQQVAEVVKTWSMAPVVEAYQALRGVALLTAVTFVAEIGDVRRFESPRQLMAYLGLVPCESSTGERVRRGSITKAGNPRVRRVLIEGAWTYRFPARMSRVLQERQEGLPAIVRAIAWKAQVRLCARYRRLMAAFLWAIGREIEPRSAA

SEQ ID NO: 203524 - protein, 312 aa, unidentified
MNTIICGVDVSKAWLDAKVGPTGASDRFGNDPAGIAKLDAFCRHHGVELVAMEASGGYERLAFMMLWEKGQPCALVNARNVRRFAEAMGFLEKTDDIDAGVIAQYAEVKRVCPTPLPSAAQQRLKALVSRLSQVTGDLTVNKQRRSAAADAETIASLDEIIFLLKRQQRRIEGEIASLIDDDPLWARLNEAFREIKGVASRTVARLMAEVPEIGLLSNKAIAKLVGLAPIANDSGKRQGRRPVRGGREGPRSILFLIARGAAKYDPNLADFYQRLQQAGKPKMVARIALARKLLVILNAKARDARIEFANAT

SEQ ID NO: 203525 - protein, 365 aa, unidentified
MQFVGVDIHTNKFTCCYRSEVKEKKETVTFELNACGIADFIQTLTKETYVLAEATITTFAFVRIIQPLVKEVIVANTYELKQISLARKNTDKIDADILCRVLKMQVLSGEQTISPVTIPPVGIQELRGLFTTYRLYRKQTTQIKNRIHSLLKEKLYGFTQEEIFSQKSRKMVRELEKNTIMSFQINELMDMLEDMESRVQTLEDKVKEHAEPYMREIEILTSMKGIGIFTAIAIIADIISVTRFKNSKMFTSYLRSAPKVSNSNTSEKTKGTNKKGRKVAATLVTQSLSHVLSASKKLSEWYEEKAKEKKPGLVRTGLRRRVFAEMYQMLKKGEFHYGRNKILHEVKISQYKRFLEKRKNLLKTA

SEQ ID NO: 203526 - protein, 330 aa, unidentified
MPLFCVGVDVGARELVVSIDRNGIRESGIVFSNDAGGHRKLIRWATKKGATAQVVLESTGVYGLDLAFALHRAKRVTVMVANPRAIAAFAKASLQRSKTDALDAETILEFSIRMPFVNWNPPAPSILELRALSRRIEALSKTVTQEKNRLHANQQSEKLSNFVREDIRELVELLRSRINRLRKQALLVIEQNPGLAKAFRHLTSIKGIADAAGIQLLAELGTLPKDMTTRQWVAHAGLDPRQYQSGTSVHKPARISKTGNAHLRRALFLPAMVAVRWEPNVKAFYEKLLAKGKTKMQALVAVMRKLLHSIHGMLEYGQDFDGEKFFVMKA

SEQ ID NO: 203527 - protein, 393 aa, unidentified
MYYLGIDIAKHNHVASLIDSDGKIVIKTIKFSNDSEGYQKLVSLVCSAVPNGDKNSIAVAMEATGHYWLSLFSALVDDGFSVSVYNPFQIKSFRSAYHNRKLKTDAVDAIIIANYIRAFGADETTLPNDALLSLKQLTRYRSDLIHNISSAKNQVISVLDKIFPEFAGLLSDTFGETGKAILQVAPTPEMVLALSSKKLLKLVSTASKGRFKQDFVDRLRFAAKTSFGVKITTKACAFELKQLINTIIFLEEQVDELDVEIKALYSGLDEFLTTIPGIGEVLAPIILAEIGDIEKFSNPAKLVAFTGIDPSTSQSGQKMAGDESISKRGSPYLRYAVYQAAFIASNHDPHLRDYYRRKKAEGKHHYVALAGVQRKLLYIIWFVLKEQRPYRPY

SEQ ID NO: 203528 - protein, 428 aa, unidentified
MVRYIGMDVHREFAQLAVLEGGRLRDEGKIGVTPEALRAWAEGLHSDDQVALEATGNSDAIANLLIPLVGRVVVSNPSKTRAIAEAKVKTDKVDARILAQLLAADFLPPVWLPDERTRSLRRQVMRRAHLVRQRTRIKNQVHAILARNLAPTPPVSDLFGKTGRHWLSRQELPVDERATVSALLRQLDFHAGELAIVDKELAREALADPMVARLMTIPGVDAIAGISIVAAVGDFTRFDDPNKLVAYVGLNPRVRQSGNSAPVHGRISKAGRAHVRGVLVEAAWSASRAPGPLRAFYQRVKARRGFQKAVVATARKMTVLAWHLVTKDQDYAFARPSLVTHKRRKLELAAGAPSRRGNYGLPGAAYNDKQRRNEEKLAVEQAEHAYEVLVAHWQPKRANTGVTIAVCGRDKMGGGGRGRQQRDATFKP

SEQ ID NO: 203529 - protein, 463 aa, unidentified
MQQPVEVQVDEHEQIVERVAAIDVAKASGMVCLRVPHESIPGRRVTKVWPVRASTAALVELGDHLRCERVQRVVMESTSDYWRPFYYLLEAAGLTVWLVNAAQAKNVPGRPKSDKIDAVWLAKLAERSMVAPSLVPAEPMRRVRDLARARFDLVADRARVKQRIEKLLEDALIKISSVLTDVLGVSGRAMIEALIAGQRSPTALAELAKGRARARRADLAQALHGRFTDHHAQLARMLLGQLDELTARITQVTDLLDAAIRALPTPTTTTPTTTATTTTTHPSSRADGDQSVPTPEQAGYHSAVKRLCAVPGAGPDSVRAVLGEIGLDMSVFGTAQRICSWAKVAPRTVQSGRKTGRARTGKGNPYLKAALAQIATGAAKTDTFLGARYRRLIKRMPKAKALVALQRSILVIFFHLLADPSTDFDDLGSDFYQRRIDRARRATHLLRQLHALGYQVPLTDTAA

SEQ ID NO: 203530 - protein, 400 aa, unidentified
MEVLYPRCAGLDVHKATVVAAVRLVAGGKVAREVRTFATTTAGLLALAAWLGENGCTHVAMEATGVYWKPVWHVLAEGGFDLVLANAAQVKNVPGRKTDVNDATWLAELLAHGLVRASFVPDAPTQELRSLLRTRKQLVRERASHVLRLQKTLEDANVKLDAVLSDLLGRSGRAMLEALVAGETDPEKLAAFAHPRLAATPERLQEALRGRVTAHHRFLLRLHLDQVDALEAAIGRIDREVEERLAPFSTAVDLLASIPGVGALAARVIVAEIGLDMGRFPTAGHLVSWAGLCPRNDESAGKRRSTRVRKSGTWLKTALVTAAWAGARQKQLSAGPVHAHQSPPRRKEGNPGRCRFDAHRRLLHAPRRCALSRSRSTALRPKPAPHHHQTAHPQTSRSGM

SEQ ID NO: 203531 - protein, 386 aa, unidentified
MQKLNDFSRSLIALEPDGTLIAVIEMSLSSWLVAGIVPGVERQPLKKLTVDESALLKLLHRWREEAEKAGCRIERIVVAFEAGRDGFWLARWLKARSIEAHVIHAASVAVSREHRRAKTDRLDTQLLKRAFLGWLRGERDHCKMVDIPTIKDEDAKRPNRERENLVSEQSRIINRMKAALIRLGIRGFNPKLKRAAGRLEDLRTPEDEAIPPNTLAELRRDMERRRLVRDQIRQIEEARLERLDHAPGDGPHAMVRLLARVIGVGIETADMLVHEVLSRNMRDRRAVARYAGLTGSPDESGRKRREKGLARSGNARVRRGMIQLAWRFLLHQKDSALTRWFRARTENARGTRKPMIVAMARKLLIALWRLVREGIVPDGVVLRPAQ

SEQ ID NO: 203532 - protein, 349 aa, unidentified
MIVVGIDPHKQTHTAVAVKSATGEVIGELTVRARASGFERLVAWARDLDTERLFAVEDGRHVSGHLERHLIARGERSVRVPPRMMGESRRSDRAWGKSDPVDATAVARAALRHPDLPEATLAGPERQIGLLVAHRESMVRERTDKICKLRWLLHDIDPDLAPPLRTLDRFTTLDHLATTLEDLEPRVEIEICLDLIARCRDITLRANELERKIDGLVRTHASPLLQIPGCGILTAAKIVAEVAQVSRFATEGHFARYAGTAPIPASSGNRHRQRFNRRGNRQLNTAIHRIGVTQLRIHEPAKDYVTRKRAEGKTKTEAIRALKRHITRVVFKTMTSMNQPTDRLTAVAA

SEQ ID NO: 203533 - protein, 391 aa, unidentified
MTKRRAKVVNDLSRSLVPLDMDTTLIAVLEMSQSSWLVGGIVPGVERQPLKKLAIDPNALLKLLLQWRSESEKKGHRIGRIAVAFEAGHDGFWLARWLLAQGIEPHVIHASSVAVTREHRRAKTDRLDTELLKRAFLGWLRGERGHCKMVAVPTLAEEDAKRPSREREALVAEATRLMARLKAAFVRLGIRSFNPKLKAAPERLGALRTPSGEPIPGNTLAALKRDMARHRFVKAQIREIETERLARLNAAPAAGTNPMVRLLARVVGISIETADMLVQEVLSRRLRDRRALARYAGLTGSPDESGAKRRERGLARSGNARVRLGMIQLAWRFLWFQKDSALGRWYRERTAAAPGARKTLIVALARKLLIALWRLVREGVVPEGLRLRPAI

SEQ ID NO: 203534 - protein, 339 aa, unidentified
MTEITRIGLDIAKNVFEVHAVNAQEQVVVRRSLRRNQVLSWFAKLPPCLIGMEACGTANHWARELTALGHTVRLIPPAYAKSYVRRNKNDAADAAAICEAVSRPSMRFVPIKTVEQQADTVAHKTRQILIKQRTMAMNSLRSLMAEFGVIVPQGPQHIGKLLASLADPEDTSIPAVARTALNPLGEMLLELEKQIDVLEKDIKRRARANPTARRLDAIPGYGAMLSSAMVAFVTDPRQFDSGRHFSASLGIVPRQDGTGGKVKLGPISKRGNGYLRRLLVNGATAVINGKNARKDPWLAKLLDSKPKKLVAVALANKMARIAWAVMTRQEDFRPRATAA

SEQ ID NO: 203535 - protein, 392 aa, unidentified
MVVSVGIDVSKDKHDCFIVSSEGEVLADAFIIPTTMDGFHYLLQRIRHCTAPQDKIKVGLEATGHYSYNLLGFLLDNGLTTYVLNPLRTNLYRKSLSLRKTKTDRVDARTIASMLLSDAGLKPYTDTAYHNEELKSLTRYRFDKVKERAKLKSSIARLVCILFPELEKLVPSLHIASVYALLEEFPGAKQVANTHLTRLKALLETASNGHYKRDMALEIRNAAKNSIGSQMPAKSLELQHTIRLIRELDREIDEIEEQIQSIMDELHSPITTIPGLGFRMAAMILAEVGDFTRFDSPDKLLAYAGMSPSTYQSGQLKNCYPHMEKRGSRYLRYALYNATKYVCHWDPTFADYLAKKRAEGKHYNIAISHAAKKLVRLIFAMEKSRQPYCSAA

SEQ ID NO: 203536 - protein, 474 aa, unidentified
MTANQRSGKPVEKATPERERLPAELSRMNLNAAGIDVGASSHFVAVSLDRAEPPVREFAAFTADLYRLAAWLEECGVETAVMESTGVYWIPLFGVLEERGFEVMLVDPRRIKNVSGRKTDVLDCQWLQQLHTYGLLSGAFRPEADIRRLRSYLRQRAMLVEYASHHIQHMQKALTQMNVKLQHVISNITGKTGMAIIEAMVGGERDPRQLAKLRDGRIRADEETIAKSLQGHWRDEHIFELTQALELYRFYQGKIAECDREIEAQMERFEDRSDGGSPAGNGRRGQGNAPRFDIRTHLYRMTGVDLTRIDGVDGFTALKVISEIGTDMTKWPSAKHFASWLGLSPDHRITGGRVMSSKTKPNANRAAAALRLAANALHRSDSALGAFLRRKKAQLGAPKAITATAHKLARLIYTMLRDGQEYVDAGAEYYERQYQDRALRAAKRRAAQLGYQLVPMPDPPEHATHSPPGAPIAA

SEQ ID NO: 203537 - protein, 356 aa, unidentified
MSHDVKYIGMDVHKEAIVIAVLNGSGKLVMETILETKGSSILQFLHGLRGELHVTWEEGTWAAWLYDLLQPQVQEVVVCNPRRNALLKEGSKSDKVDARKLADLLRTGMLRPVYHGENGLRTLRELARSYQTISKDLTRVMNRLKALYRGWGIPCAGTQVYAPRYREEWLRKIAQAGVRRRAELLYQQLDGLQALRRNLRPEFLAESRKHKAAKLLRQIPCIGPIRAARLIALMQTPHRFRSKRQLWTYSGLGIETHDSAQYRYVGGQVQRSKKPQQIRGLNQNHNHEMKEIFKSTATRASCASGPFHDFYAALLAKGMKPEMARLTLARKIATITLTLWKKEERFDAEQLKTQAA

SEQ ID NO: 203538 - protein, 323 aa, unidentified
MSSSSPPLTPIGVDIAKAKFDVAAWVNGKYKTKVFPNTPAGFEAFLTWLRPFAPAHVCLEATGRYGEALATFLVEHEITVSVVNPAQIHAFGKAELNRTKSDKSDAKLIARFCHLHQPRAWQPLTPAVRQLQALVRRLDDLMVMRQMERNRQDGADATVQASLRRVLALLDAEIEQTRAAIHDHFEQHPGLREQRDLLDTIPGLGETTIAVLLACLGDIHRFDKAKQVAAFAGLSPAERQSGKHKGQTRLSKTGDALLRKALYLPAVVAGQYNPIVQTFCERLKAKGKAGKVIVCAAMRKLLTLAYGVLKSGRPFDSKLALAN

SEQ ID NO: 203539 - protein, 372 aa, unidentified
MNYNTVYVGMDVHKESFTFCAYTIDAEKGSHFQRTEADYKNVLKYLEFLRTVYGNDANFICGYEAGCLGYTLYDQLTEHHVNCVILAPTTMLEQRSKKRIKTDKRDAEIIAKCLAQHNYSPVHIPTAADEETKEFLRMRDDHKLALKKVKQQILAFCLRHNYRYDGNSHWTAAHIKWLKSLKPEALYKEILDEYLLTYTALSDKLERLDKRIEELASKDEYKESVKKLCCFIGVKTHTALSVLVEVGDFHRFASAQNFASYLGLVPGEDSSGDGQTRLGITKAGNRHVRMLLTEASQCYARGQIGFKSKELKSRQAGNSPQVIAYADKANERLRRRYYKMVLGKSKKHNVAKTAIARELGCFMWGMMTEHIA

SEQ ID NO: 203540 - protein, 356 aa, unidentified
MTSIPHPDTPQLTIGVDTHLEVHVAHANDQLGRPLATLQIPTTPAGYQQLLAWAHELGEPVVWGVEGTGCYGAALARFLAANAQVVVEVNRADRQARRLKGKSDPLDAQAAARAVQAGHARVVPKASDGQVEMIRCLRVARATAMRARTQTINTLKGLVVTAPAELRQQLRGRTATRLVQTAAALEPGPLTSPLAAAAFALGSLARRHQALSAEIDALSRQLDRLTQAAAPGLVARFGVGHDSAGALLVAAGDNPDRIRSEAAFSMLCGASPIPASSGKTTRHRLNRGGDRQANAALHRIVVVRLRYHQPTRDYMTTRLAQGKTKKEIIRCLKRYVAREVFAVLHQLHHDTITPAT

SEQ ID NO: 203541 - protein, 402 aa, unidentified
MIFVGVDWAEDHHDVCLLDEQGANLGKRRVPEGLDGSRQLQELIAEHTEGPEQVVIGIETDRGLLVRSLLAAGYQLYAINPLAVDRYRDRHATSGAKSDIGDAKLLADLVRTDRHNHRPVAGDSELAEAIKVLARAHQNLIWSRQRQLNQLRSTLREFYPGALAAFRDDLGSDDAIALLERAPTPYRGRSISQAKIVSALRKAGRERNLEQKAAEIQAQLRAPQLQMPNSVAQAYGHTLSALVLVIKQLNLQLRELEQELNQGFEMHPDAEIYLSLPGLGNVLGARVLGEFGDDRTRYSDAKARKNYAGNSPITKASGTKQVVLKRFACNRRLADACHLWAFCALKASPGARRYYDQLKARGKTHRQALRALANRLVGILHACLQHRQPYREEVAWPPLAAA

SEQ ID NO: 203542 - protein, 402 aa, unidentified
MTGTGQLAIGVLGGIDTHADTIHVAAIDTLGRPLGDQEFPTTPNGYRHALEYLVGFGDLQGIGIEGTSSYGAGITTAARDGGHHVREVIRPQRTVRRMQGKSDPIDAYQAARAVLSGQAHTMAKTDDVDAIRALLTARRSAVKARTAAMNQIRGMLITAPVEVREKYRSLSEQKLIDALAACRPATQTGVVLAVLTGFKMLAQRHQFLTAQSRELHAQLRELTAAANLALLSAKGVGPVTAAQLLLTAGGNPERLTNEGSFAALCGTAPVPASSGKTTRYRLSRGGDRHANAALHTIATVRWSSDARTKTFVATQRAKGRSNPEILRILKRAIAREIYKLLSRPNSVAAINDLRRTRREKNLPLRKVVEALGSSQIYVSRIERGLTHDNDFTHRYREWLNAA

SEQ ID NO: 203543 - protein, 368 aa, unidentified
MPNIPKQEAQTPMAIVADTYTYVVGVDTHAATHHYAIVETRSGGQIAHGKFPTHAAGLLRAVDWISRRTSVDDNPAVDQVLISMEGTGSYGAQAAELLAARGYRVVDAPSPKRARGSGKNDHIDALVAARGALPKDSERLADRRAGHTRAALQILLTARDSMRRDRTRSKNQLTALLRTHNLDIDARKGTNKVHISLIAGWRKRPTDTTLARIARTEAHRLATRIHTLDADLDSNEKAINALVRELEPTLLDLPGLGPINAAIVLAVWSHPGRIHDEAGFAKIGGVCPLEISSGNSKDHRLNRTGDRQLNSALNSIANTRMRHDETTKAYVKKRKQQGQTKPRIRRCLKRYIARQIFRHLTATSLDKT

SEQ ID NO: 203544 - protein, 350 aa, unidentified
MRIESKQLLPAWNGIDVAKETFDSALYMPVEPGQAPRDIMSLPKKTFARTLEGVKEFHDWSFQVRDKAGLEGGNMRIVMEATGRYSKELAGWLNAEMPFTRPVIEDPRAVKDFIKSLKLRNKTDRIDAGALARYGAERMPEPSEDMPEEYQYLREFTRQREALKDQLTAARARLTEMGEFKKMIKIQQAVIKSMEQAVAKMELEIKRCINDSEELRKSLKYAVTVPGVALIVSATVLGECGPLYRHTSRQLGSYSGIAPQIRQSGTSVCGSRISKRGSGNLRRVLYMASIAAIEHNPEMEIFYNRLIAKGKKPLQARCAVMRKLLILIRAVVVNETEYDKNFAKKSILKT

SEQ ID NO: 203545 - protein, 347 aa, unidentified
MSKYNTIGVDLAKNVIQVSIVSPTNRELLNRELTRKKFTEFLGNQKPALVAFEACATAHYWSRVARRHGHQTKIIPALAVAPFRQGHKTDQNDALAVAEAAGRPNIKEAPIKSVEQQSMQAIQRSRELLIQNRTALSNHIRGLLMEFGLVIPRGFSSLHQNIPLILEDGENELPDSYRPTLHLLYERLCQLRVDLDFLDKQIALLVKENPACSRLMQLEGVGPISSILLFATLGTGEAFKNGREFSAYLGLTPKQYSSGGKTNMIGISRRIANKRLRAVLIQGARAYVHRVKEPKTVKDQWLLALIQRAGYGRAAVALANKNVRTAWALLTKGTEYSKVHGVDMQFA

SEQ ID NO: 203546 - protein, 329 aa, unidentified
MKVQHIIGADLSKRSIDLVYHLSKTHVKISNSADGFNDLIEWLQKLNINISEAMIVMEHTGLYSYCFENFLHQHKIVFCKVNALEIKRSIGLVRGKTDRLDAARIAEYGHEKKDKLKVNKPLSDDLKRLQVLHSTYQRFIRHRAALINALKEYRYIGIAEKDLIIQGQKQLVKNFDEQIQKLMSEIQTIINQQPALKQNFLLLQSIKGVGKILALTVLIKTHNFTRFINARKFACFCGTAPFDHSSGTSIKKKTRVSHLADKQMKTLLDLSAKSAIQYDKELKEYYLKRTQNGKSKMSTINVVRNKILFRMFAVVKRQTPFIENYSQAA

SEQ ID NO: 203547 - protein, 430 aa, unidentified
MNYTQNRKIKQVKESTLVVGIDIAKRTHVARAQDYRGIQYGKPISIENDKLGFERLIYWIKEMEKKHNKAETIVGMEPTGHYWLNLEQYLREYGIKLVLVNPAHVKKSKSLDDNSPTKTDKKDARVIAQLVKDGSYSEPNIPEGIYAELRIAMTHRERLNKDLSRIKAKVHQWLDKYFPEYLNHVFKDWEGKASIVILKTIPLPEQIIKMSPEEIVKVIKENSGRGVGIKRAKKLKGAALNTVGIKEGLEMAALELKNIINQYELLNQQLLDLEEKVIEILDDIPGAKEMKSIHGVGEMTVAGFIAEIGNINNYEHNRQIIKLAGLNLKENSSGQHKGRTTISKRGRPRLRSLLYKVTLPLICHNNEFKTLHEYYTKRSKNPLKSQQSRIALCCKLIRVFFALGKKQIKYDGKRLINDIIRNYDVLQEVA

SEQ ID NO: 203548 - protein, 326 aa, unidentified
MYASLDLHKEYSQVVVLDFDGTVLREERVENEDPTEMERFSESLPPETEVVIESSSTWYWVYRILSRRHRVVLSNPLKTKAIASAKLKTDRVDALTLANLLRGGYIAESYVPSQKVMDLRELVRYRANLVRMRSSIKNRIHAHLLMNNVRVEAGPFTKEFIQQVRAIEDTKVQGYLRLIESLNQEVRTASADISREAMSSEEARLLMTIPGISFYSALLIASEIGDVNRFADSNGLVAYAGLVPSTHSSGGTTYHGRITKTGSPYLRWVLNQCVRANIRTEPDGTVASFYNRLVKKKGSAKSAVAASAKLLRIVYWVLKERRPYHS

SEQ ID NO: 203549 - protein, 350 aa, unidentified
MIIIGVDFHPEFQQIAWVDTDSGELEERQLRHREEAEAFYRGLVTEGKKVRVGMEASGHARWFERLLGELKFELWIGDAAEIRTKRVRKQKTDRQDAQLILKLLLEDRFPRIWVPSWENRDLRQLLWHRHRMVQARTRIMNQLQAVALNEGLRCKKRLWGERGRQQLESFRLAPWASRRRRDLLELLDRLNPTIAELSQAIEQEVERCPEAQRLMTHPGVGPLTALAFVLIIGKAERFQCGKQITSYLGLVPLEESSGNRRRLGHITKQGSSILRFLLVKAAQVTVRSLPEWRSKYFHLMMRRGRKIAKVAMARRLAVRLYWMMRQGWDYQQWVKFGSHAGQPENRHGVQ

SEQ ID NO: 203550 - protein, 406 aa, unidentified
MELVPLHKRVIGLDIHQAQVTACAILEEADGETRIEQRQFGAFKKDRRALAVWAAALNPDEVVMESTGIYWKSPYAALESMGIRATVVNARHAKQVPGRKTDVGDAQWLATLARAGLLRGSFVPPAKLRELRVISRQRQKLVNLLTAEKNRMHKVLTDAGIRLGVVVSDIHGQSARAMIKGILDGQAPHEVLNLASRRLKASREELYDALQGELTASHVFVLNELLRHIEELEARIARFDARLLAELASEHNALALLQTLPGVDVIGAAMLLVEIGSDMSVFGTPDRLASWVGMCPGNNESAGKRQSGRIRKGNPYVRRLLCEFAHAASHTRSAFQSKFQLLIVRRGYKRAIVALAHKMLRTLFFMLKRGEYYRDSATNYEQLSVQRNASRWIKALTRFGFIPAAA

SEQ ID NO: 203551 - protein, 338 aa, unidentified
MFIIGIDPHRGSHAAVVIDRSETVQATLELRADRHQRQRLLEWAAGFTPRAWAVEGATGTGSLLAQQLLAAGERVIDVPPKLAARVRLLDNEQSDKSDRHDARSVAIAALRKRNLNDVAVEDHVAVLRLLAARHHDLVAARTRTVCRLHTVLCHLAEGKFPQRLRADQAAAILSRIHPTSVIGVERKALARELLVEVRRHDRDLDELAGKIRDAVKASGTTVTEVHGVGPIMAAYILGHTRDIRRFPSAGHYARYNATAPISASTSADGRHRLNPYGNRQLNHAMHIAAVTQAGHDTPGRVYYRRKIAEGNSRKEALRALKRQISDAVYRQLVADTNR

SEQ ID NO: 203552 - protein, 369 aa, unidentified
MQNSTFIGLDVHKATISVAVARGERGGEVRHWGSVPHRPDHVRKLVEKLAADGSLLHFCYEAGPCGYGLHRQLVEAGHDCIVIAPSLIPIKAGDRVKTDRRDALMLAKLHRAGELTPVWVPDPAHEAMRDLIRARATGMRTLGKARQHLQGFLLRHGRIYQGKKGWTVAYRRWLTTVRFQHPAQQIVFQDYVDAVADTEARVARLTAQIADLLPVWSLAPVVEAVQAMRGVAFIVAVTVVAEVGDFQRFDNPRQLMAYLGLTPSEHSSGSTVRRGGITKAGSGLARRALIEGAWSYRMQARVSRKLHDRIEGLPQAVRDIAWKGQLRMCHRYRQLVAAGKAKVIVITAIAREMVGFIWAIARAVTAAPI

SEQ ID NO: 203553 - protein, 423 aa, unidentified
MIPAVIERCAGIDVGRKFVMVCVMLGDAHASPTTEIRKFDTLNEDLQRLREWLHDNACTHVVMESTGSYWRPIYNVLDDGRLHVILANSQQVKNLRGHKTDRNDSRWLAHLLRHGMIRPSFIPSRATRELRDLTRRRKQLIGCASEERNRVQRVLQEANVQLGIVLSDVFGESGLNMMDALVNQNATVEQIADLAVKQARKKIPQLRKALEGHHMTDHHRSLIRHSMAHLALLEEEIAELDQEIADRVKADESMQAAVNLLQSIPGIKKTGASAIVAEISADIQQFPTGGQLASWTGVCPGNNESAGKRKSGQTTRGNPWARRTLVECAWSATRKKDSESKKLYERLRHTIKHKRALVAVAHWMVLTIWNVLTTGQPYQADPDPKMTLAQANRLARHHSRRLKHLHKWLRNADRAPASRIAQL

SEQ ID NO: 203554 - protein, 465 aa, unidentified
MHSRPSPFHLGEMSMAKRRKGKIKKVEMLRTIKANAAGIDIGATEIYIAVPGDRDPQSVRHFDTFTADLHAAAKWLKACGIDSIAMESTGVYWIPVFQILESYGFEVVLVNARHVKNVPGRKTDVQDCQWLQYLHSVGLLRGSYRPPQEVCAVRSLLRHRDGLVRTAASHIQHMQKSLTQMNLQIHHVISDITGVTGLAILDAILSGERDPQKLAALKNGRIKATEDTIAKSLEGHYLPEHVFTLKQSLQVYRHYQQMIAECDHEIESHLNKIDSHIDIDKNPPPPATSSSRMGKGNEPNFDLRTQMHRIIGTDLTQIEGISAVTAHVFFAEVGCDVSKFPTVGNFTSWLNLCPANKITGGKVISSHTLPGKNRLAKALQLSAMSLWRSQSYLGNYYRRKRARDGAPSAITDTAHKLARIIYHLVKTGKQFDESVFNAQEEAHQKRALENLKNRANSMGFQLVPC

SEQ ID NO: 203555 - protein, 405 aa, unidentified
MEIFVGIDWAEAHHDISVLDEAGTVLAKRRIAEGLEGVGQLHTLLAKHAAEPNEVVIGIETDRGLLVGTLLAAGYQVYAINPLAASRYRERHVTSGAKSDSGDAKVLADLVRTDRHNHRPVAGDSELAASLQVLARAHQNLIWSRQRLVNQLRNNLREYYPAALAAFGTELAHPVALGVLGAAPVPSMGRTLSESKLAAILRRAGRERGVEEKAAAIQAQLRAPQLAAPALVSEAYGKSVAATVRILRDINTELASLEAELAPSFEKHPDAEIYRSLPGLGIVLGARVLSEFGDDRTRFAHPKARKNYAGSSPITKTSGKSRVVLARLARNRRLADACHQWAFCALTGSAGARDYYHRLRQRGNTHHQALRALANRLVGILHGCLDHRQPYREDIAWPSRLPVAA

SEQ ID NO: 203556 - protein, 377 aa, unidentified
MSNVRFIGLDVHAETIAVAAAQPAGEVRSLGVIPNRIESIRKLVKKLGPVKHLRVCYEAGPTGYVVYWQLTGLGVTCEVVAPTLVPVKAGDRVKTDRRDALKLARSYRAGDLTPVWVPDAAHEALRDLVRAREAAKKDQLRARHRLGKFLLRHGRRPPTTMKAWTQAHVAWVKSAVHFEQAAQEATLLDYIHEVDHVAARIGRLEAAIDTAVQTAPARLRAVIDALQALRGIALVTAVTIAAEVGELSRFAKPRQLMGYSGAVASEHSSGERTRRGGITKAGNAHLRRVIVEAAWAYRHRPAVGAGLRKRQATASAEVKEIAWKAQHRLHARYRALTARGKCKQQVITAIGRELLGFVWAIGVHEDARTAQGKPLAA

SEQ ID NO: 203557 - protein, 353 aa, unidentified
MEYVASDVGKRRLVCCVMNPDGSAEEEEGPYPSTLSDAARFAGYAVERYGECKAVVESAGNLWLEAYEAFEPKGVEVKPANPVKTRAVAEARVKTDRVDARALAHPLRAELIAGCYAPGREVGESRAVLSHRMNPTRELTRIKNRVHSLLDRYDLSCEYGDIFGVNGTGWLRSPGLNGRDQLLLQSLLRQVESLQEEVRVANSATARDAVGSRYAAVIMSMTGFDCYSASLLSAYVADVSRFPSPERLVSWAGLCPSVRQSGDSLHMGRMKGGSTRVRWIMVQAASAAVRSDTRMRAFYERKLKRHDHNVALTHVANRMLRVLWHMLREGRLYDERRERLYRSKLKRMMGVAA

SEQ ID NO: 203558 - protein, 351 aa, unidentified
MNKVTTLGIDLAKTVFQLHGVDLTGKVVWRREVRRAQLMKIVAQLEPCLIGIEACGGANYWARRFAEFGHQVKMMSPQFVKPYRKSDKNDRNDAEAICEAVTRPSMRFVAVKSVEQQDMLTMHRVREGLMKERVALINRIRGSLSEYGIVIAKDVSNLRRELPGILEDAENELTTAARQLFSELYADLGAREQRIRQLEHSIRALGSQHDVVRRLQTVPGIGYLSATALYGTVGDAKHYRNGRQLAAWMGLVPRQSSSGGKQRLLGITKRGDKYLRKLLVHGARSITTRAERTPRPPDRWLNELRERRGKPRSYVAQANKTARIAWAIMAKGEVYRAPTTAALEASAAVAA

SEQ ID NO: 203559 - protein, 344 aa, unidentified
MVTFGVDAHKRTHTIVAVNDRGTPLGQTTVGTTSQDHLVLLRWAARFGAERRWAVEDCRHLSRRLERDLLAAGESIVRVPPKLMAHVRDSARTYGKSDPIDALAVARAAQREPNLPLARLDGPDREVRLLVDHRESLISERTRLICRLRWHLHELDPAWEPKARSLDAQRTLDEVRGRLQDHVGVVARLAVELTERCAELTITIKALEKEITELTTQLAPALLELPGCGALTAAKIIGETAGVDRFKSRDAYARFNGTAPLPVWSSNKARHRLSRTGNRQLNAALHRIALTQARWHPPAKEMIERRKSGGNSGREALRVLKRRLSDAVFQALLHDQTAGLTLAA

SEQ ID NO: 203560 - protein, 369 aa, unidentified
MTENTLFVGLDVHKKTISVAIIGGGAGAAVRFYGTIENTPDAIRSLCRKLSKAGQALHYSYEAGPCGYGVQRQLVRLGHRCDVVAPSLIPRKASDKVKTDRRDAMMLAQALRAGQLTEVWVPDEAHEAMRDLVRLRSQAMRDLRKTRQQLLSFLLRHGRNSPYRHWTKMHRRWLGELGFAHPAQHLALEEMLARIDRAEALCERLKQAIRDLVGQWSLAPVVQALQALRGVSLITAAVIVAEVGSFARFESPRQLMAYLGLNPSEHSSGGTIRRGAIPKTGNALARTSLVEAAWTYRFPARITQIIRDRLKNLPEPIRAVAWKAQVRLSTRYRKLIAGGKAAPIAIVAIARELVGFIWAIARMAEPKFA

SEQ ID NO: 203561 - protein, 416 aa, unidentified
MNDEQWTVGVDWGGAAHEICVMRPDGEVAGTRTVTHTKTAVHDTIAWIVGLIAAPRSEIAVGIETPRGVLVDTLLEQGFAVFAINPKQLDRFRDRFSVGGAKDDPRDARVLADALRTDRRAFRKVQPDDPQVIYLRELCRIDEELQETMNSLANRLREQLYRVDAPWLQLCPAADDAWLWELLRDAAHPDQWPRLSRTRIARVLKTHRIRRVTADDVIAAVRQPRLTAAAGVADAVATRIGSLVPQLLLINEQRTSTGHQLESCLEGLGGVSEGQPREHRDVIILRSLPGVGRTVAATMLTEAAGPLAERDYSTLRAFAGTAPITKRSSKRTFVVHMRYACKQRLRNALFHWSRTSIQGDAGARAYYDQLRARGHRHARALRSVADRWLRILVAMLRSGTTYDPSRFSPPPTPVVA

SEQ ID NO: 203562 - protein, 347 aa, unidentified
MKHYAGIDVSLNSSSVCVVDESGTIVRETKVASEPVALINWFKSLCTRMERIGLEAGPLSQWLYGALRESGLPVELLETRHVKAALSAMPVKTDRNDARGLAQLMRLGWFRPVHCKSIAAQEVRALLTARKLVQSKLYDIEMSLRGILRGFGLKVGPTTSQSFAARINHLVAGQASLETVAQALLSVHAAALREFKILEKQVRQIGRADERVRLLMSAPGVGPLVALTYVSAIDDPKRFTSSKAVGAHFGLTPKKYQSGETDITGRISKIGDSTVRAVLYVAAHIILTRPIHGGALKSWAMRLAKRAGMKKAKVALARKLAVVLHRMWVSASTFDFEKANGCMRAAA

SEQ ID NO: 203563 - protein, 339 aa, unidentified
MNNTQFFIGIDVSKPYFDASLIAVTNHVKAALITERFNNDAKGISSFNAWLKTNKVTYDNNSLVVIENTGIYHRLLWAFCTRKNLSIHIGNAAHIKWSFGIARGKNDKIDSQRLCNYALKESDSLKAAPPLNPVLLQLKDFMTARTKLLSQLNAIRTYIAELRNVNDKTVQKTLEQAYRKAIEGMKESIKNIEAQIKDIVAQHRDINKTYKLLLSVPGIGHLTAVYLICCTNNFAGGITGKRLASYAGVVPFEHSSGISIKKRKKVHPMANKELKKMLFMCAMSAIQNHEEFKQYYIRKEKEGKHGWAILNAIKNKILLRAVAVVNKQTNYVDNSKKVA

SEQ ID NO: 203564 - protein, 347 aa, unidentified
MRFYNRQHPYYCGIDLHVKTMYVCILDGAGQVLVHRNIPSTPAAFLEVVGPYRGDLAVAAECMFTWYWLADVCAAEGITFVLGHALAMKAIHGGKAKNDKIDSHKIAVLLRGGMLPQAYVYPAAMRATRDLIRRRLHLVRKRGQLLAHIQNTRAQYNLPVFGRKLAYRANRDGVVEHFPDPSVQKSIEVDVALIDQYDALVNDLELTIVREAKRHDADAFHRLRSVPGIGKILALTILYEIHDITRFDRVQEFASYARLIKCTKESAGKKLGTGGTKMGNVHLKWAFSEAAVTFLRHNRDGQKLLARLEKKHGKGKALSILAHKIGRAVYYMLSRGTVFSMEKFLAA

SEQ ID NO: 203565 - protein, 465 aa, unidentified
MTKQVEEILDEPHERIVQRVCAVDVGKDSGTVCVRVPAASGTGRRVSKVWDVPARTGAVLGLAAQLSDQGIEKVTLESTSDYWRIWFYLLEAHGLDVQLVNARDVKNVPGRPKTDKLDSVWLAKLTEKGLLRPSFVPSAQIRQLRDYTRMRADLTGDRTRYWQRLEKLLEDALIKVTSVASRIDTLSVRDMIEALIAGQRDPRVLAGMARGRMRLKHADLVESLTGQFDDHHAELARMLLHQIDTLTDQIDVLTARIEALLASLPAGNTPDPDRPAPDGQTRPGTRANAPADEAAQRRKPPTAADMIKILDQIPGIGPSNAQVIIAEIGLDMSRFPTAGHLVSWTRLCPRTIQSGKRSTTGKTGKGNRYLRAVLGEAAATGGKTQTFLGERYRRLIKRRGKLKTIVAIARSILVIIWHLLANPGTTFHDLGVDFNDQRIDIGRRTRNHVRQLEALGFNVTLTAAA

SEQ ID NO: 203566 - protein, 346 aa, unidentified
MMIIGCDFHPSWQQVSWLDSETGETGERKLVHANGDGKAFYQQLAAPALIGMEATGNSQWFIELVQDLGHEIWIGDAAQIRASYVRKQKTDKRDAAHILKLVVEGRFPRLWTPDREQRDLRQLVLHRHKLVMIRSRVKNELQHLSLNKGMQKKRTLWSQAGQKLLRELPLKPWAACRREDLLGLLAMLDEQIGKLDGAVQQAAEENPAAKLLMTQPGVGPNTALAFVLTIGDASRFARGKQVASYLGLIPREESSGGRQKLGAITKQGNRLVRSLLVEAAQIAVRYDPEFRRQYLHRCHHKPKGVAKVAAARKLAVRLYWMLRTQVAYPEIVRIESSPRVPLVGAS

SEQ ID NO: 203567 - protein, 363 aa, unidentified
MRFYKNQHQFYIGIDLHARMMYICVINNIGETVFHKNMECSRDNLELVTNTFGKDIVVGVECIFTWYWVADFCAENGIDFALGHAYYMKSIHGGKTKSDKIDSEKIANLLRGGMFPIAYAYPKEKRTVRDLLRRRLFFVRQRAELSVHLQNTNHQYNINEPLTSSRMRSEVYRNTIPLKFSDPATLKMVNADLAMFQAYHDIITKLEFQIEDSMEVQDPVSYSIINSVPGLGFILSLTILYEIDDIHRFSDVGKFISYCRLVKCSHESAGKKEKGGHNKIGNVHLKWAFSEGAVLFLRNNERGQRWHDKLVQRYGKAKAMSIIAQKLGRTVYYMLKRREAFNPDKFYGDKKIENKDSGGEHLA

SEQ ID NO: 203568 - protein, 390 aa, unidentified
MTKRKTETVNDLSRCLDPLDMDATLIAVIEMSQSSWLVAGIVPGVERQPLKKIAIDEHALLKLLSSWRKEAEKKGHKITRVTVAFEAGHDGFWLARWLAAFGIEVHVIHAASVAVTREHRRAKTDRLDTELLKRGFLGWLRGERGHCKMVLVPTLAEEDAKRPSREREALVGEASRIITRLKAAFVRLGIRSFNPKLKAAAERLATLRTPEGEPIPPNTLAALKRDLERNNIIKRQIREIEQTRLDHLAQAPAKGPHRMVLLLARVVGVGVETADMLVHEVLSRKMRDRRAVARYAGLTGSPDESGAKRREKGLARSGNARVRRGMIQLAWRFLWLQKDSALAEWYRQRTLAAPATRKTLIVALARKLLIALWHLAYDGIVPEGVQMRPA

SEQ ID NO: 203569 - protein, 359 aa, unidentified
MKTRQSNKLDFRGQNIYIGIDVHKKNWAVSVLSEHAVLKKFSQSPEPEALYKFLTTNYPGASYRSVYEAGFCGFWIHHRLTELGIDNIVVNPSDVPTMSKEKLRKTDAVDSVKLARELRSGTLKSIYVPDAELLEIRSLIRLRNSIVKDTTREKNRIKALLHFYGVKMPDEFAKPSSHWSKRFVQWLREIKLSTEYGRKTLDLHIEQFMRLREMLLQETRIIRQLSRSELFSESLRLLMTVPGIGITTGIAFITEIDDIKRFNNAYQLASYVGLIPMCHSSGEKAGVGDITIRKQATLRRNIIEASWIAIGKDPAMTMAYEQYCKRMTANKAIVKIARKLVNRIYFVLKRRQEYVPCVV

SEQ ID NO: 203570 - protein, 345 aa, unidentified
MSNNIHFSCICGIDIAKKVMQVFKVTSDGVVTNTSVSRKDFLEHFRNIPPALIGMEACATSQHWGRELQGLGHTVKLLSPKAVKPYVKSLKNDRNDAEGIYRALIMGVREVSIKSTAVRDLSLLQTMRAKRQRDKVATINHIRGILAEYGLVMGKSVRAFLSNAGTLIARLKESETTSQLVISELEKLLKEVKEIVSRIEELESSIKKIASENKNYDLFRSAPGVGPITAAMMVVLLCNPTVFKNGRDFAAYLGLAPMSFGSGGRNQVTGIPSKYRCHNEARSLLVQCAHSITRLKYKSDWVASILSRKPKKVAIIAIANKLARQLWVMAKKGDKFEKRLVLAAV

SEQ ID NO: 203571 - protein, 364 aa, unidentified
MFYSGIDLHKDNCFITTINEAGKRVRQERLPNVPAIILAYFAAMAGPHRAVVECTAGWYWLNDLLEAHGIELVLAHAKYLKAIAYAKVKTDKVDSETLAMLLWLDTIPRAHKIVREKRDLRDVMRARLRIVQKHTSSCVSIHNLGRKFNCDDRIDIEQRSVPDDLPDPCKLQLHCHYQQIDLLHEQILSLERFLHPMLIPNDDIQHMLYIPGIGKVTAFTIYLEIDGIERFASDSRFFSYCRLVPGAKNSNRTLRHKSGNKDGNKYLKIAFSDAAVHAMQYYPEIRAFYQRLRRRANEPIARTVVAKELARIVYYMLKNKTEYRGFKGRPISRQKSLQWPRLKTHRLSLNAKPNEASPSPANSI

SEQ ID NO: 203572 - protein, 358 aa, unidentified
MSNLKYSIGIDVSKKDFHCCLSVIDTEQSVKVKSTHKFTNSTSGFKLLIEWVRRNRKEDLQIFCVMEATGVYHEQLAWYLHDKDFSISILLPNKAKKYLQANGAKSKNDKIDARGLAQIGAEKKLDLWMPPSRKLYDLRSCTRQHQSLSEMHSAINNQLEAITHSQFQSKDIIRQMKKTMRLLEQQINEMDKIIKKIVKEDEVLYFHYKNISEIKGIAMLSFAVIAAETNGFVLFKDAGSLVSYAGYDVVENQSGNHVGRTKISKKGNSRIRRILHMPALCAVREDQPQFKNLYERVYKRTGIKMKGYVAVQKKLLVMAYYLWRKKMKYQADFDYSEKIIAPEKSEATHDKIPEGRFH

SEQ ID NO: 203573 - protein, 353 aa, unidentified
MITIGVDAHKHVHMAVALDERGRVAGQWQGENSVAGWDEATQWARALGDERRWGIEGGGGYGRGLAQHLVDGGEVVYDINPRLTATERRRSRRTDKSDAFDAQAIAQVVQREDAKLPRVAAEDETVALDLLTAEREDAQAEATRLRNRLHHLLLQLDPQYHLHLPALTSVAGVQAATGYTTTSSSLVQQERAAVVRRLAGRLRLAMEQVAELGRRIEALAQARYAPLTRLCGVSLLTAGSLAGILGPGRRFASEAQLAAYAGVAPLETSSAGRVRHRLNRGGNRRLNAIVYRIALVQARWSPEAKAYLARRVAEGKTKREAFRALKRYLIRAIWRLWGACLSPAATETAHRAA

SEQ ID NO: 203574 - protein, 402 aa, unidentified
MNSVGIDISKGRSTIAVMRPFGEVVISPFEVRHTDSELSELARQLKSLDGETRVVMEATGNCHASVAKLLHDAGLYVSVVNAKLVHDYGNNELRRVKTDRKDAVKPANYGLDRWLTLPRYVPEEDTRLLLKNCYRQYRQYSKVQTVLKNNLISLLDTVFPNANRLFSSPIRGDGSEKWVDFVAEFWHCRCVSEKSQKAFTNKYQRWCRKHGYNFSQDKALDIYASACGRFGVMPKTNTAKLLVEQAISQLQTTSAALAALKQEMQSLAASLPEYPVVMEMFGVGPTLGPQLIAEIGDVRRFHSKKALVAFAGIDAPPYQSGQIDVRSRSISKRGSASLRRTLFLVMGVLLQCAPMDEPVYQFMNKKRSEGKPYRVYMMASANKFLRIYYASVKAYLDSLEHD

SEQ ID NO: 203575 - protein, 367 aa, unidentified
MKDSMFIGLDVHESTISVAVADGERGGEVRDWGKLPNRPDRVRKLAEQLGSKGHQLYFCYEAGPCGYGLYRQLVELGHDCLVVAPSLIPVKAGDRVKTDRRDARMLAKLHRANELTAVWVPDVEHEAMRDLVRARATAVRVANQARQHLQSFLLRHGRQYPGKKSWTKAYRRWLSTNRFEHSAQQIVFQDYIHAVTDAEARVVRLEAQIAELLPDWSLAPVVQAIQAMRGVAFIVAVTVVAEIGDFRRFPTPRQLMAYLGLTPTEHSSGNTVRRGGITKVGSSLARRVLIEGAWSYRMQPRVGRKQVDRMEELPQAVRDIAWKGQLRMCQRYKHLVGSGKPPVVANTAIAREMAGFIWAIAQEVTPA

SEQ ID NO: 203576 - protein, 350 aa, unidentified
MIIIGCDYHPSFQQIAFVDTETGELQERRLQHREDAEKFYRDLAAQGRKVRVGMEASGHARWFERLLAELQCELWIGDAAEISAKRVRKQKTDRQDAQLILRLMMKDDFPQIWVPSWENRDLRQLLWHRHRMVQARTRIMNQLQAVALNEGLRSKKRLWREAGREQLEAIRLAPWASQRRRDLLELLDRLNPTIAKLTQAIEEEVEKCPAARRLQTHPGVGPLTALAFVLIIGKADRFQCGKQIASYLGLVPLEKSSGNQRRLGHITKQGNSLLRFLLVEAAQVTARSLPEWRSKYVHLTMRRGRKIAKVAMARRLAVRLYWMMRKEWNYGQVKKFGSHAGQPGPGDGVR

SEQ ID NO: 203577 - protein, 403 aa, unidentified
MDHTTIEVIVGIDMAKGDHFAQAITTAGEELFARTLPNDQAAIESMIDTASEHGAVALVIDMTASVAQLLLTVAAERCVPVAYVTGLQMRRAADLHAGTAKTDPRDAFVIADFARRNIDRLTWLEVSDELLVELRVLNGRDVDLASDANRTINRCRDALVAVSPALERAIGGRLTQPGLRDALKKFPTPSALKTAGRTRITTAIKKRSPRLASKVADEIWSAIDAQSVTLPAEAAWGEVIADLLADLERIQTRRDALADQIEKVFLSHPLGQVLVTLCGFGPRTGARTLAEIGDPSRFENGSRLAAYAGLAPTDWRSGRSINGAFQHRGGNHRLKNAMFLAAFVATQHDPDARAYYQRKRDEGKKHNAAVICVARRRCDLVLAMLKTATPYDPHRHENLPIAA

SEQ ID NO: 203578 - protein, 417 aa, unidentified
MDVLFKHCAGLDVHKRMIVACVLLASSEGVHRFVKKFATTMADLEALDAWLTSLEVTHVAMESTGVYWKPVFNVLSATFDVWIVNARELKQVPGRKTDINDAEWICQLMSIGLLKRSYIPEVAQRDLRDLTRYRKRLIEERTAASNRLEKILEDSNIKLAAVVSHIQGVSARAMIEALIQGETDTTAVAALAKGSLRKKLPELEAALVGKIREHHRFMWRELLYHLDELNLRLAAINERIGELVAPHEAVIERLDAIPGINRWTAEVILAEIGPDVSAFPSAQHLASWACLCPGNDISANMRRSGRTRHGQNWLRPALVEAAWATAHSETYFGSQFHRLRARRGDKRAAVAVAHSILIVVYHLLANPEAVYTELGADYFVKRDVEKEQRRAVRKLETLGFTVTLSPVQAGASAPAPS

SEQ ID NO: 203579 - protein, 476 aa, unidentified
MGKHSEVFVAFDVAKKKHAVAIAEGGRAGEVRFLGEVENSPGPIERTIKRLAERYDRLHVCFEAGPTGYGLYRQIKALGHDCLVVAPALIPKRAGERIKTNRRDAVTLAKLHRAGELTGVWAPDVAHEAVRDLVRAREAAADDLRRKRQQLLYFLLRHSRIYSGGGHWTLAHRRWLAGQKFEHLAQQIVFQEAIDAIEDALQRLRRLEKQLALIVPAWSMVPVVAAYQAMRGASFLVAVTFAAEIGDVRRFDTPRQLMSFLGLVPAERSTGDTIRRKGLTLAGNRRARRALVEAAWTYRYPARVSETLRARREGLPKSVRVSPPHRRGQEAAGRGGRYRPRDRRFPVGHRTGGRAGVRQRRSLYIPLRRAGSGARRWGTPVASYVAELTLDARPLDRGKPRDEDTEGGNQPADKSLINRRLSLRSQLCAATVPSRQRPSAQPALNHALSLDREHKRLGACPSSGGNFAANLIPFAT

SEQ ID NO: 203580 - protein, 348 aa, unidentified
MRFYTGQHRYYCGIDLHARTMYVCIQEHASGEVVLHRNLRCDPELFLKTIAPYRDDLVVATECIFCWYWLADLCAREGITFVLGHALYMKAIHGGKAKNDKIDSRKITVLLRAGALPQAYVYPPGMRATRDLLRRRLFFVRKRGELFAHIRITFHQYNLPIPGGQLLYQCNRAKVPDAFCDPIVRASVEADLALAGHYDGLIRSMERTILEQAKVEDLSTLILLQTIPGVGPILSLTLLYEIHDITRFPRVQDFVSYARLVKSQKSSAGKVLGTSGAKIGNAHLKWAFSEAAVLFLRKNPRGQKYLDRLRSKHGKGKALSILAARIGRASYFMLRRNTAFDPDRFMSH

SEQ ID NO: 203581 - protein, 409 aa, unidentified
MLFVGDDWAEDHHDVEIVDETGRTLARRRFPEGLAGITRLHALIAEHLPEPAGSADPAPQVVVGIETERGPWAAALVSAGYRVFAINPMSSARYRERHSTSGAKSDAADAHLLAEIVRLDRAHHRQVAGDSALAEAVKLAARTHQSLIWDRTRQILRLRSALREFFPAALKAYNDLDAADTLQLLRLAPDPDQAARLTKRQVLTALARANRRNPEVVAEQIMAVLRASELRQAPPVQAAFAAIVAAQVEVITTLNNQIDTLGEVVADHFGRHPDAELITSLPGLGVILAARVLGEFGDDPSRYVDAKARKAYAGTAPITRASGTKKVVMARYARNKRLGDALQQWAFCSMRGSAGAKAYYKELRTRKIGHQAALRQLANRWVGILHGCLKTGQPYNETLAWDHHTSAAA

SEQ ID NO: 203582 - protein, 388 aa, unidentified
MNYVGIDISKYKHDCFILSDFGEIVKDGFSFANNAEGFCVLQKELERCGKDNVQIGFEATGNYSINLKLFLERIGFSFMEINPLLIKEHIKSNTLRRTKTDKLDARAIAGYILSKEYRPHTTSFYPKFALKQLTRMRSSLVTGRSRYLIQLTNVLDCVFPEFKPLFNNKFSVTALYILANYPSQEAISNMNARSFDILRRKSRGKFSMDKFVKLKALAKNTVGVSDVCYRIELETLLDLYLQVDAKINDLETEIAKIIEKLNPPTLSIKGIGSMSAAVIVSEFGDFSRFSNPNKMLSFAGLEPGYFQSGTSEHNGHMVKRGSSHLRCALMNCSRSILLHNETFAVYYQKKIAEGKPHYVAVNHVAKKLIRLIFALETKGVMFDPNILR

SEQ ID NO: 203583 - protein, 355 aa, unidentified
MLRSNKGSKEVQHFVYPKPKVMKNYLFHIGVDISKLKLDVNILNVSSFLSEHFVIENNPKAITNFLKMISKKGIDINESLFCCENTGVYTNHLVHVLLNLTLDLWVVPAIEMKRAKGISRGKNDKIDAKDISLYSYRNIDKLSLYTITEVDVQKLKILYSEREKALKSLMLIETSSENLEFVNKEIFKEIAGFNKSLTASIKKTIKKIETRIKEIIQANEKLKTQSLLIQSIPGIGEQTSLYFIIATKGFAAFENWRKFACYSGVAPFEYSSGSSVRARTKVNHFADKKIKSLLHLVALNAIKYDNELKEYYQRKRNEGKHTLLVLNNIKCKIVSRAFAVISRESPFVNTYKFAS

SEQ ID NO: 203584 - protein, 865 aa, unidentified
MVAHNPLNRSGRAELPHPALASGNDAKAVQRIGVIDAGRGQPASNQPSHAVPPHSTSLATTRQRAMPEPAGLEAEQVERRSVHGHSVIPGVSFDYRAQPLAHSRDGVVHTPLEFGFHLTQLGLQSLAYGLPKHREPSVTSLLPADMCEAEEVEGLGLSLATPRSVFGRERAELQEAGLLGMQFQAELAQSLAEFLPEPLGIRAVLESEHDIVGKPDNNHVTARLLVTPYPDPQVEHVVEIEVGEQWRCTTALWRPLLHPRPLALLQHARVQPFLDESHNALVRNPVLDKLHQPAVVDGIKESTDVQVEHPVHLSRQQSGVERIQRVMRAASRPKAVREAEEVSFVDDVEHLDRGALEQLIFQRRHSERPLPSVWLRDEHSTHWLGSVGPALDPLSEVTEVFLQSLAIVSPRLTVDARGGFPLQAEVGSPQRGQSVDMVQERGEPHLPIPGCCQAYPLQRTKRALPALSPGRVLLEQVPFGQPPCILSSDTQDRSERGRSWLPGPGEAVGKLESPRLDRNRPRVRTVEGTGNKPGRMSQGGIRSAHMEEKMDGQGIYVGVDVSKARLDVAVRPSGEGFAEANAKPAVSRLVKRLKALDCTRVVVEATGGYETIIVAALYAAGVAVVVVNPRWVRNFAKGMGWLEKTDRIDAKLLALYAERAELKVQQLPDEATRQLAELCARRIDVLEMMETERNRLEHASSAVRRAINSHIDYLRKQLKRIEHDIDGAVRGSELWRHKDELMDSVPGVGPTLRACMLAWLPELGQLNRGEAGKLVGVAPLPDDSGTVRGVRRIFGGRAPLRKVLYMATMGAMLHNPHLRAHYDRLRTRGKLHKVALVATMRKLLLILNAIIKTDTPWSESCLESA

SEQ ID NO: 203585 - protein, 368 aa, unidentified
MKRVQMVEVPEQVGHHAARPQPGSEVVLAIDLSRSKLVYCLRWDGVEQRRLSTPAGMEHVRAVIEPYRWCRLHVVYEACGFGYELAWWLQAQAIQTTVIAPSRVERAPGLAVKTDGLDVGKMARQLETGQLRGIYIPPPALHQRRQIGRTYAQCVKERKRAQVRLRSLLQEQGRLGPPPSAGWSAYTQWLAAQVLPAPVQQCVYSLQHLRTVADQQAQRLRRELVQLARHPDYAALTTAILAQPGIGALSAIRLVLELGDMARFARADSLPRYLGLTPSEYSSGEMVRRGHILKCGPGTLRALFLQCAWAAVRKANDPQLSAVFERLAPRIGRKRAIVAVARRLAIAVRRRWLAAQGQGVACAPEASV

SEQ ID NO: 203586 - protein, 344 aa, unidentified
MTMVEDARAITGGVDTHSEVHVAAALDPVGGLLGTREFPASAAGYAGLLAWLGGFGDLALVGVEGTGSYGAGLARYLAAHGVRVVEVDRADRQDRRRKGKSDPLDAVSAARAAQSGRAAGAPKGRDGAVEAIRALMVAKRSARNERTQAINQARALILTGPDELRARFAGHRASALAEAIAALRPRPGDAAEYAVRIALRELGRRVEFLDAQIERLDDLIVPLVTVRAPGLLSLYGVGPDTAALLLIAAGDRPERLRSEAAWAHMCAVAPIPASSGKTRRHRLNRGGNREAGHALWRIVITRMSAHPATRAYVERRTKEGLSKKEIIRCLKRYVAREVYPHLRG

SEQ ID NO: 203587 - protein, 374 aa, unidentified
METIITYVGMDTHKKEHKVALHYPGEEQVVQFAIKNNARDIKKMVNKIKRQASAEAKFCYEAGVCGFTLKRRIEALGCKCMVIAPSLTPIKPGDHVKTDRRDARKLLAMFKAGLLTEVHAPEPEQEAARELTRCRQTARENLTRIRHQILKFLVRHGYVYRDGNHWTLKHFRWLRSLEFDLHSLRDVFDSYFTEMQHCLQRLDSLDKEVVKLSESKPYKEVVGLLRCFNGIDTLSAITVITEIFEFGRFSTPGELMSYLGLTCSEDSIGQKERKGSITKAGNKRVRRLLIEASWHYRHPYVATSRSLKQRRKEQPQWAIDIADRAGQRLRKRYWYLINHGKAPCVATVAIARELAGFIWSVFNEYEIRNQEEAA

SEQ ID NO: 203588 - protein, 339 aa, unidentified
MKYMGIDHHKQYSHMTIMDKDGKELKSGNVQNSSYEVETFLDGKGDEIKAVIEAGRSSYVMVDLLKEFGVDIRVAHPAEVKAIAKAKIKTDKRDSRILAHLLRTDFIPEVYARSEENRRAQRVLRHRAFFVGTRTRVKNKIRVLVAQQRMELQEEASRVKNIFSLKGLEVLMGVNFPSSDKDLLESLVRMYRELEERIKESDWLVRKLYSELREAQFISTVPGFGEFFSVLVTTEIADVRRFESVEKLHSYAGVIPSTYSSGEKTYHGKIIKEGNVWLRWAAVEAVWPAIKSDFDLRVFYDKRARRKDANVAKVATARRLLTIIYRVLKDGRRYIPYKR

SEQ ID NO: 203589 - protein, 429 aa, unidentified
MQNESTPDARGPVFCGVDTHADSHWLYVLDWRGRKVLSRQFPADAAGYEALAGAIAAAGEPACIAMKGTSSYGAGLTRHLASLGMPVHEALSPARTQRRRPGQGKCDEADAERAARAAMSGSKLGTPKSQDGWVDGVRCMLAARSGAVKARTSAINTARSLLTTAPEGLRSRFRGMGGPRLMEELPSVRAEGALGAALGALADLWAAARDAALDMELAIEASLEENCPALLAMYGCGPVSAAKLAVAAGDNPGRLRSEASFAAICGACPVPASSGKTVRHRLNRGGDRQANSALHEIARQRVMRDPETAEYAERARGRGKSDREVMRCLKRYVAREAYRALMRPHEIRRPEDASELVAARRAAKVSQVRAASILGTSEKYISMLERGQRELKPIRRAYEAWVEAGLPLDWDRQAFEAERKMDSKKHLAK

SEQ ID NO: 203590 - protein, 320 aa, unidentified
MTEEPVCVGVDVAKSTLDVAVSNSKETRQFDNDHKGITSAVRYIAGLKPARIIIEATGHLEMPLAASLQASRLPVVVINPRQVRDFARATGVLAKTDKIDARILALFGLQVKPEVRLLPDQKAREMSNLLARRRQLIEMLTAEHNRLLQADDSIRPSIEIHIKWLEEAVSAINDDLDRQIRSSPSWLEKDNLLKSVPGVGKVVSTTLLIELPELGILNRRKIAALVGVAPLNRDSGTLRGKRTVWGGRAKLRAVLYMAALVGVRCNPVMAAFYQRLLNAGKAKKVALVACMRKLLTILNAMIRSKTVWQVGKFQNIVMEA

SEQ ID NO: 203591 - protein, 327 aa, unidentified
MAQVVLGIDVAKETLDVALIDEKRVLFTQVENTPTGHQRLVLWQRKQGLGQVHVCMEATGQYGDGVAEYLYQQGYQVSVVNPARIKYYANSKLSRNKTDKADAKLIAEYCLREKPALWCPPPVSFKRLQTMVRHLDDLQVELTRETNRLSSGVRTDEVIAHLKALIAVLKQQIQETKAMIQAHINSSPDLKRKQILLMSISGIGALTAAKILGEIRDTADFDNARQLSAYAGLTPRNFFSGTSVHKKSCLSKTGNSNLRKDLFLPAIVAKRYNQIVKAFCVRLEESGHRPMEVIGAAMHKLLHLIYGVLKTGRPFDENYLVKTQVHS

SEQ ID NO: 203592 - protein, 350 aa, unidentified
MRIESKQLLPTWNGLDVAKETFDSALYMPVEPGQAPRDIMSLPKKTFARTLEGVKEFHDWSFQVRDKAGLEGGNMRIVMEATGRYSKELAGWLNAEMAFTRPVIEDPRAVKDFVKSLKLRNKTDRIDAGALARYGAERMPEPSEDMPEEYQYLRELTRQREALKDQLTAARARLTEMGEFKKMIKIQQAVIKSMEQAVAKMELEIKRCINDSEELRKSLKYAVTVPGVALIVSATVLGECGPLYRHTSRQLGSYSGIAPQIRQSGTSVCGSRISKRGSGNLRRVLYMASIAAIDHNPEMKMFYNRLIAKGKKPLQARCAVMRKLLILIRAVVVNETEYDKNFAKKSILKT

SEQ ID NO: 203593 - protein, 369 aa, unidentified
MKKNSTQSQSPKRATARQQGPITIGMDLGDKTSCYCVLNAAGEVVKEGKVATTRKGLAQAFGAMRRCRIAMEVGTHSPWVSRWLSQMGHEVIVANARQVKLISASSRKDDRLDAQTLARLARVDPQLLRPIRHRSAEAQMHLMTIRVRAALVELRTALINQARGMAKAVGERMPSCGSGQVSVERMEGLPEPLRTVLRPLLEQAESLTAQIQACEVKIEQIAREQYPETALLRQVSGVGTLIALTFVLTVEDRDRFPKSRDVGCYVGLRPKRSESGESQPQLRITKEGDVYLRKMLVQGAHCILGWRGPDTDLRRWGLKLAERGGKNAKKRAVVAVARKLGILLHRLWVTGEAYEPLRNSAGQPRKRAA

SEQ ID NO: 203594 - protein, 338 aa, unidentified
MTIIATGIDLAKNVFAVHGESAGGAVQMRQPKVARGKLNALIASLPPGVVGMEACSGAHHWARQFQAHGHTVRLMAPKLVTPYRMSGKRGKNDAADAAAICEAMQRPNMRFVSIKTEEQQAQLMVHRARQGFVTERTACINRIRGLLSEFGVVLPLKAEVVRRQAREHLEDLPGYANLVIGDLLSEVAHLDERIAQYDKHVHAIARQSTPAQQLMQLMGIGETTATALVAMVGNATEFSCGRQFAAWIGLVPGQYSSGGKTRLGRITKAGDAYLRSLLVMGARAVLNAAKNKTDSISRWALAVEQRRGYWKAVVAIAAKNARLAWAVLTKGEAFKLPA

SEQ ID NO: 203595 - protein, 422 aa, unidentified
MNTLTDNAFTAYVGIDWADAKHDICVQAEGDQQREFDCISHQVDQIDQWAQSLHGRFGGVIAVALELSKGPVVYALQKYDFFVIFPVNPSTLAKYREAFTPSRAKDDPTDAELALDLLVRHPERFAPLKPQSVEMRTLVCLVEQRRSLVNDKIRITNRLRSALKQYYPQMLECFEYLDTILVCDFITRWPTLKQVKRARKNTLEKFFHAHNMRFSHVLDARLKSIKAAMPLTLDAAVVTPYSLQALVLTDQLRVSLQAIHRYDDEIAELAPKPPDYGLFSALPGAGPSLAPRLLVAFGEQRGRFDSAAALQKYSGIAPVTERSGKKHWVHWRWQCPTFLRQTFVEWAAQTINKSFWAGAYYRQQRDKGCTYQAALRALPFKWIRILYRCWQTRTPYNESVYLNALKYRGSPLLNPSTTVKMT

SEQ ID NO: 203596 - protein, 424 aa, unidentified
MDAKNQNSWEQHRYYMGLDWAKKEHAIAVVDGHGRIMVETTIEHTAEGWHRLREKLVDLAGPDLSFVAATIETNRGPAVERLLELGCVVYPINPNAAQCYRSRKSPSGSKTDRLDALSFADALRTDGHGWRPLNPEDPKTQELRLLCRDEMSLIEQRTTLVNQLQQALHEYYPAALEAFDDWTSPSSWAFVERFPTPEVLKKAGKRHWEKFLHTHRLYRPETYQKRIEIFAGATEFCGSQAVTNAKSMLAVSLAKQLRLLEQQLKAYRERIDALFQDHCDYSIFASLPGIGQKLGPRLLGEFSDDRDRFPAYEGLQCYAGTAPVSFQSGQIHRVRFRYACNKNLRAAVHLWANLSRKKCAWAQVYYHQKRLEGKSHACALRCLGQRWLKILWKMWQTKTPYDEQMHTRNQIKHGSWVLALTASK

SEQ ID NO: 203597 - protein, 391 aa, unidentified
MKQYCYFCGVDVAKNSFVVSIKNGRPLMKNRVFAMNKAGLRDFEQIIKDFGTNVVVGMEPTGIYHYNLLNFLQKKGYNSVAVNPYMLHQFFKFTNNKPTKTDRKDSKTIAEFLEFKQDDFKKNPVDERFSVRYFVREKERITRDIAKTKTEIKRMLSLVFPEAERLLGVFSQEFLALLLEFGGAAKIRNISKTEFVSLAKQVLDRGRGRKPKFSPERIYELASSSIAGDWPDYEKLLKIKIKRLKSLLEEKEEVTKLIEEKAQKFFRREIEILCSIPGIGKESAIYLMAEIVDIKRFVSYRRLVGFCGLDPVIKQSGKFKAKLRISKRGNAHARRIIWIMAGCIKRNCPYFREYYLKKRTEGKSYKEAVIATSTKLLRTIFALLNENRCFK

SEQ ID NO: 203598 - protein, 350 aa, unidentified
MPHKLNSGIAVIGVDIGKNSFHVGHDKRGAIVLRQKWSRGQVEARLANLRPCLIGMEACVGAHHLSRKLQMLGHDARLMPAKYVRPYSKGQKNDFRDAEAIAEAVQRPTMKFVATKTAEQLDLQALHRVRERLVSQRTGIINQIRAFLLERGIAVRQGLRFLRAELPRILAASCDALSPRMLRVIEDLAGDWRLLDQRIEGLSSEIEALARKDKDCERLMTVPGIGPIISSAMVAAVGTGDAFSKGRDFGAWLGLVPKQISTGDRTILGSISKRGNRYLRTLFVQAAWVVLVRIGPKHWDRYGLKSWIEAAKKRLHHNVLAIALANKLARIAWSVLAHGRAFEATKIQAA

SEQ ID NO: 203599 - protein, 339 aa, unidentified
MKVSTLGIDLAKNVFQLHGVGCNGQTVLKKKLTRDKFLPFLMQLEPCLIGMEACASSHHFARVLRQYGHEVKLIPPQYVKPYVKTNKTDAADAEAICEAVARPNMRFVQIKTAEQQAILVLHTERNILIRERTACANSMRAILAEFGIIMPRTLSQLYKKIPEILEEYDNELSPFVRCSVARQLEHLQSVEDQITLIEQELSRWAKTQPACQRVMKVPGVGLMTATYLVASVGNGQQFHSAKQFAAWLGLVPREFSSGGKQRLGRISKRGDCYFRYLLVHGARAVAVVIERHKDNMPWLYRLLNKKAYNVAVVAQANKTARILWSMLVHHTEYRTLSVV

SEQ ID NO: 203600 - protein, 424 aa, unidentified
MTIMAVPPAAANPSGNTNPGRYAGVDTHRDTHHVAVVDELGRTVADRQFVATNTGYRQIVDFLHDHGPVLAVGVEGTGSYGAELARILAAAGVTVIEVMRANRQHRRLKGKSDPLDAEQAALTVAAGRATVVPKQRDGLVESLRILLAERTLATKARTAVLNQIHALLITAPGDVRTDFHRYHGQKLMDVLARTRPGPGDDPDQVARASLKRLAGRHRVLTEEITVLDDQLAQIAARLNPALLATHGVGPVVAATLLATVGDNPDRIATQAQFAALCGVAPIPASSGRTHRHRLSRGGNRQANHALHRIVLIRMRFREPRTMAYFARRRAEGLADRDIIRCLKRHIANEVFALLTHPPADPLPGPLLRRQRQALGIRLTDAARTLEVPYQRLRRLELGTRTDPELVHRCQHWLEETDQQRLKTA

SEQ ID NO: 203601 - protein, 416 aa, unidentified
MRFIALDVHRDFCEVAIAEGGRVRRAGRVETTPATLELFAQSLARDDQVVLEATGNALAIARIIEAHVGRVVLANPKAVKNATQSAKTDKRDARTLAKLLAAGFLPEVWTPDERTRVLRRRISRRAQLVRQRTREKNQVHAILIRNLKGRSPAADLFGVAGRCWLAAQQLPVDEREMVEACLRGIDFLDAEVAAIDRALAELVLGSAELRRLLTLPGVNFVTACALLAAIGDARRFPSARQLVSYLGLDPRVRQSGSEPARHGRISKQGPGETRHVLVEAAWHAARTTGPLRAFHERIAARRGRNIATVAVARKLAVIAWHMLSRGEDYAFARPSLTREKIRKLELATGAERRKGKRNPVRIFATPAQHRLEKELAAQAEIAYRRLARDWQPVITGAGAAAGRVAWTLVARRHLPG

SEQ ID NO: 203602 - protein, 504 aa, unidentified
MVHETVFTRMMLPENVKQKQSSMKLYLGGDVSKGYADWVILSEKKQNVLENFQLDDTYAGHCKLYSTLEAYFDKHKGLEMYAAVESTGGYENNWFNTLKSYQKVFNLKVARINPSGVNYNRRASMKRNVTDAISAVSIAEYMINHTENIAFDQDDKWKTLCRHWNFVEMQKKQRTQTINQLETILYCSNPILLRFKKDNLPNWLVELIIKCPTADKLAKARPVSLAKIPYLTLKRAQELVAEAKQNIASATDRNAELLVSQIALQIKAFDQNIKSQMQLIEQDLISPEMELLKSFQGIDTTSAIGLLLEIGAISRFPTVKGFSCNYGVHPKFKKSGDKIIGVRMSKQGSKNMRKILFNIAKGAITYNPLIAAVYEKKLSEGMSKMAAIGVCMHKILRIIYGMLKNNQPFNPLIDKQNYERSKSKQQEKQLQENANIEKSRRYQEFDTTAPISKKQTKKRKEHDLSQCEITSQSTGSTCSSDTKLQNVKNNNLKLQSNKKLSRLQ

SEQ ID NO: 203603 - protein, 387 aa, unidentified
MKIMAGIDLHSNNAVCGLVDSEGKRLLHKKVPCDLRCVLAVLEPYKQRLESVAVESTFNWYWLVDGLQDHGYKVALANPAAMQQYNGLKHTDDKSDAFFLGELQRLKILPTAHIYDRNTRPVRDLLRRRLLLVHQRTSLLLSLKSLHARTTGYSLSLALAKALPPEEAAKLFTHPADQLIAREQAQHIRQLSQSIQAIEKMVLGDVKKLPCYRQLQTLPGVGSILALTITLETGDITRFPSAGDYASYCRTVDSARLSNERKKGQNNEKCGNKYLAWAYVEAANFAQRSDGPCRRFFDRKLAKSNRFVATKALACKLSKAAWYVMSQGVDFDSARAFPGPKPEAQTQSSGKAQQRQATQQTELKKKTDLGRASVNPSKGSGSKTLRD

SEQ ID NO: 203604 - protein, 420 aa, unidentified
MKSFVPVAGVDVSKHFSDLCVLSPDNNVLLRQKIYHDMVSMKLAEKKLHEIELECGARPVVVMESTSHYHLILFQFFTDAGFEVVVVNPIQSGALKNINVRKVKNDRVDAYRIAMLYRLKVLRPSQIPTSSLRGLRLLTRQRSELKGDVARFKNRMTAYLDQIFPGYGEVFSDVGGSASRAVLHMCPTPEELLNADGSLLAKVICEAGNKGPKFGAEKAAKLREAAGSAQVIGVRSASNASLIKNVLDIIEGLLAAIQRIEGEIKELVTQDTRLDEDVKLLCSIPGIGFSSAVVIVAEMGNISLFRKPKQLAAYLGLDPGERQSGTFKGRKNKLSKRGSPQVRAALHMAAVSSVSRNRDGTYRNPVLAEYYERKCAEKPCKVARVAVMRKLSNIIYAVLRDRRPFELRTPQEHMALLAAA

SEQ ID NO: 203605 - protein, 481 aa, unidentified
MVKNNGKEAGMLVLGCDVSKGYADIAVLTETGKQIFPTKRYDDSHEGELLLNAMLGELHQRFPGEPLVAAMESTGGYEANLVRFFRNTKIQARVFNPQKIKSFRRIQLHRAQTDAKAAEDIALYVVKNPQDTGSRELTPKERAIKKLARMTDKLTRQCAAAENALTSTLFTIFPEIIPIVRADFPQWLLVVLKRYPVPEKLRRARVSSLTRIPYVTQEKAMHLLELARHSRGADNDDTFALLVKIQVNHLLLLSEQRKMWQKALEKQFQEMYPENILSTIPGVSEHGAAGIMAMTGDFHHYASSSRLVAFVGLDPRPNDSGDVVRHRSITKRGPSLVRALLFMECLTMLKMPGHPIRRFYDRLIGQGRPFYYVMTACMRKLLRIMYAVEMSGRPFDMDYEDKVKAREQSERDRNRSNRRFRASASLSLTAPVSTREAKRRKLARAEAQKGSGEDLNGLQALSQGRALRPKKKKEVLPHVIK

SEQ ID NO: 203606 - protein, 370 aa, unidentified
MKKNSTCSQSWKGRGSWRQGSVTIGMDLGDKNSRYCVLNENGEIVKEGRLATSKKGLAQEFGALRRCRIALEVGTHSPWVSRYLSQLGHEAIVANAQQVQRISQSSRKDDRLDAEMLARLARVDAQLLRPIRHRSESAQMHLMRIRVRAAMVETRTSLINTARGLSKSAGERLPQCDAAHMGVERMALLPAELQRVLGPLLEEVEALSQRISACEAELKQIAQTEYPETRLLEQVSGVGTLIALTFVLTLEDPARFAKSRDVGCYVGLRPKRSESGESQRQLRITKEGDVYLRKLLVQGAHYILSERGPDTNLKRWGQKLASSGGKTGKKRAVVAVARKLAILLHRLWVSGEVYEPLHKAPDRRPWRAAG

SEQ ID NO: 203607 - protein, 343 aa, unidentified
MKDIIYDHYIAIDWSIKNMAIARMTKKSNKIILIDVPSDIAEMKVYLKGLKGTKILVVEETTTSQWLYTELTDYVDRMIVCDPYRNKLLNDGPKTDKIDASKLVHLLKAGFTKEVYHSADKYLYLRRFVSGYEDLVKAGVRLKNQRYSLLRACGKRGYERTGTELESEGDQFVLDCMDRQLEAHKQEKESYEKEFERLASEYPEIRHQKSLPGIGPIHAVKIVARIVTPYRFADNGNFMSYTGLVKLEKVSGGRSYGRKNSRYCRQLKSIYKTSTWAAIGGNNPINDYYEYLIEEKGYSEHNARHKACRRLAILSLGVFKSGKKYQPYRRQNVKANQEVETGL

SEQ ID NO: 203608 - protein, 340 aa, unidentified
MTSADVAGLLARFAQLKQKALARLGRDFPIICIQEAGLDGFWIHRLLQSQGIESWVVDPASIAVSRRRRRAKTDKIDGEALIRTLLAYKRGEPRVCAMVRAPTPEEEDLRRLCRERRTLTAERVEHVNRIKGLLFAQGIFDYEPLRRDRRRRLDELTTGDGRALPAHLKQQIIRELDRLELLIAHVKAVEAERDALLAARRETDPTSPAASLPRLKGIGEEFAAVLWLEGLFKSFDNRRQVAAYAGLAPSPWRSGKIDHEQGVSKAGNPRLRTTMIQLSWLWLRHQPSSALTLWFLERVKQNKGRIRRVMIVALARKLLVALWKYVVTGVLPEGAELKAA

SEQ ID NO: 203609 - protein, 351 aa, unidentified
MPRTSTVHAVTTIGIDTGKNTLHMIGLDMRGAIVLREKVSRGRIASRLANLPSCLIGIEAGLATHYVARELAALGHDVKQVPPTYAKPFRQGHKNDFRDAHSVAEAVQRPTTRFVPAKTDEQLDLQALHRVRSRLVSERTAIINQIRGFLLERGIIVRQGLRFLRQALPDILAKRTDVLSPRMVRIVTDLASDWRQLDERIEPVTDEIESLAKSDDGCRRVMTVPGIGPIISSAMVAAIGNGAAFARGRDFSAWIGLVPKQMSTGDRTILGRITKRGNGYLRTLFVQAARVILLRPASWPKHSFGVWLARAAQRLHRNVLAAALANKLARIAWTVLAQERSYEARVTKPAA

SEQ ID NO: 203610 - protein, 292 aa, unidentified
MEHELHYIGIDTAKEKLDVDVLRPDGRHRTKKFANTTKGHDELVSWLKGHKIDHAHICIEATGIYMEPVAECLYDAGYIVSVINPALGKAFAQSEGLRNKTDTVDARMLAEFCRQKRPAAWEAPHPLERALRALVVRHQALTDMHTQELNRTETAREVQRPSIDAHLLWLEAELKRLEKQIKDLTDDDPDMKHRRKLLESIPGIGEKTSAVLLAYIGLKDRFAHARQFAAFAGLTPRRYESGSSVRGASRMSKAGHVSLRRALYMPAMVATSKTEWGRAFRDRLAANGKKER

SEQ ID NO: 203611 - protein, 337 aa, unidentified
MEREYVGIDLHRRRSVIVRKNADGELLSKTRIMNDPLEMARAVGAAGPEPEVVLEATFGWYWAADLLEEMGAHVHLAHPLGNDWGNRRVKNDVRDANDLVDLLRLGRLAEAWIAPPEVRELREFVRYRAKLVRLRSGLKAQVHAVMGKHGVLPSRVDMFGLGGTAQLDSLQLPAAYDWRLKSLRDLIATYDKEVTRLDRAIAARMKNDRGYRAIQAIDGVGPVLGAVMVAEIGDITRFASADRLCSWAGLTPKHRESDTKVRRGKISKQGSRLLRWAAVEAASKNHAGGDFKIAYRRIAERRGKNIAKVAAARRLLTLVFYGLRDGEIRCLANPARG

SEQ ID NO: 203612 - protein, 326 aa, unidentified
MQGKVPLERSATPVYVGIDVCKARLDVYIHPTGQKLTVSNDRDGLKRLKRVLKTCKVALVVMEATGKLHRLAHRNLHAGGFAVAVVNPLRSRLFAEALGTLAKTDAVDARMLAILGESLKPTASEPQAEHLETLRELVGGRDAAVAARTALKNQLGVTQARVLANEIKRQLHAIETAIAHLEAEITRLIAEDPQLARRLAVLTSIPGVGITTTAALLAGLDELGSLSARQAAMITGLAPIACDTGDRSGARHIKGGRPQVRRALYMAAITAVRHNPPLKAFYDRLRAIGKKPKVALTAVMRKLVILANALVRENRPWQPTRPVKSP

SEQ ID NO: 203613 - protein, 347 aa, unidentified
MTLYCGVDFHSRRQTVCYCNTGDGEVKIKDLHHYDDDVRSFYEQFKNERVIVGYETSGYVRWFETMLFELGIEVWVGDAAEISRLGKRRQKNDRRDAEHILDLMLKGEFPKLYRMSERSQEIMRLLRHRNKLVKHSVMIKNSLRRILIETGSIFKEGLASKKGKQKFRDLKLPSLLANERDRWLELLIEIEKQIAELERLLKTEAEADERVQRLLTHPGIGLLTALCIVHSLGEVKRFASVRKVAAYAGLEPIEHSSGEKRRYGAISKAGNRLLRFLLGEAAHMAAWSDDELKQFFRRLKAKCGTAKAITATARKLLIRCFIMLRDQIDYAEFRQRGIEAGSARVYT

SEQ ID NO: 203614 - protein, 319 aa, unidentified
MQSKLTIGMDIGKAQVVVACHESAFAVLKMANAVPVLRRWLATLPAGSRLGLEATGGYHEPVAELAHSLGFTVYILNPKDVHHYARALGARGKTDRLDAQVIAAYVAEHNARLHAFVPLSADEKLLRELARRRATLVNAKSMLQQSLRVLPGFEREGRELLRAMGSFADRLERKLAEIAARSSERAALVKRLQTIDGVGTLTSIRCATLFTRVPFHSSDAVVAFFGLDPRPNDSGQHRGRRRLSKRGPSEDRRLLYNAAMSAIRTPAWRPLYLHLRNRGLASTEAIIIIARRIVRIAFAMYQNHSNFNPRLVPRPYCPA

SEQ ID NO: 203615 - protein, 382 aa, unidentified
MRNVALDLGSRITYCEVKDGKVIVRDTGTSLSGLERLIGPNTPPARVAFEACREAWAVHDQLEAWGHDPLMLDTTRVRQLGVGQHKRKNDRIDAETMALALEVGRIPLAHVLSPHRRELRLQLGARRALVGTRAEYVTQIRGLLRANGKRVPGCDTENFVEHLSKTPLDETTRALVEPLVGVLEVLTPQITLVETKLEQLCASEPVIHRLRTVPGVALVVAAAFVSVIDQAKRFRRAHEVEAYLGLVPSENTSVHRRLGAITKQGNTYVRALLVQAAHSVFRLRADDPLKKWGEAVEQRRGKRIAVVAVARRLVGILWAMWRDGSVYSPTKLGFATASGLSSHARELTAEAADHRAAVAVTGNRPSKPRARARKTPREVAMS

SEQ ID NO: 203616 - protein, 336 aa, unidentified
MRYIGVDLHTTQVTVCYLKTLDEYSFKQYRLDEIEAFLDSLCAGDELAVEATGNSRWLVGLVKERVRRVVVVNPSGFEVIKRSAKKTDKRDALNPARFPAVDMLPEVRVKSELAEAVQRLVETRNKLVGLKTSLLNKIHALAVSRGWKLKKESLASKKGLTKVMEFDWSAIERIELEIIIAHIQALKESLRRLDEAIGENSQKLEGFENLIRITGIGARSAGVLLSVIGVVEDFSSEDKLASYFGIVPRVSNSNERTSHGRITKRGSKTGRTTLVQCALVATRYSPYLKKFYEQVKGRRGHGKAKIAVARKFLGIIYNTLKNNWVFEDFNNFVLAE

SEQ ID NO: 203617 - protein, 295 aa, unidentified
MAIIGMDIHRSFAQAAFLQDGQVKREQRVDLVHDRLVKFGKSLSVEDEVVIEATGNSAAVDRILRPFVKRVVVANPRMVRAIAYARVKTDKIDAVILARLHAGGFLPEVWVADDNTQRQRRQTVERMGVLEQVVRTKGRIHAILHANLIPKYSGHLFGKAGKKWLAGLPLPEEEKAIVGRLVDELERNSGQLAKLDMTIIGEALENPRVVRLMTIPGIGPVVASTVLASIGDISRFETPEKLSCYFGLTPKVRQSGDRPARHGRISKQGNTHARKMLVEAAWSAKSIRPAATALL

SEQ ID NO: 203618 - protein, 416 aa, unidentified
MKLFVGLDVSSEKLDACFMTDDSTCSVLKEASYGNSQLGASQIKEYILEFSQKFEIESLVIGMEATSLYSFHPAMFFKEDLELNQLNLMVSVEQPNKIKKYRDIFEENKNDQIDAFYISDYFRIQRQVNSIIKEEEYLALQHLTRTRYQLIKQLVRTKQHFIENIYYKCNTLSKELKAEGGSVLSATLVTLMTEDYTMDQLAELSLEEFANLIQKLGKYRFKNPEGIAKAISKAIRSSYRLGKVHQDSVDIVLGVLAKEIRSLEKLIKDLDKAIDDLVVVLPEYQCLTSIPGIGPVYAAGILAEIGPINRFSDESKLAKYAGLYWRQNQSGNSEYENTPMAKRGNRYLRYYLVEATNSVRRYEPEYHAYYKKKYAETPKHKHKRAIVLTARKFTRLVDTLLRNHQLYMPPRSVIDK

SEQ ID NO: 203619 - protein, 323 aa, unidentified
MNKYRETFGIDISKDVFDCYGSVQGHLQFNNTETGFKNFQAILSKGSLVVMEATGYYHYRFAQFLYHKKVYVSVVNPLSVKRFIQMKLAKVKTDKSDAKAICEYGLTQEVPLYSALTNVQSECLQLFRLMDNFLKKRTATKNKIHGEEVLGVPSNWVYRSLQRDKKHLDKELKGIEQKLLSLVKQDQQQQLSLLQSIPGIGLKTALFLIVVTDGFKKFETSSQLCSYVGITPTIRVSGSSVRGRSRISKVGNRKLRNLLFLCSFTACKHNKGCRELFQRITNKGKSKKLALIAVSNKLLKQAFAIAKSGHPYDPTFVSVFEVK

SEQ ID NO: 203620 - protein, 332 aa, unidentified
MQKFSNAIGIDVSKSALDLHDHLNGVRLQVDNTSSGLKKLLEWSRKHNKDFASVFFCFEHTGLYSLPLAIFLTENKVPYAVVPGMEVKRSIGISRGKSDRIDAQRIAEYAYLRREKIDLYQLPSSSLLELKSLLTLREKMVTQRAGYLANRKETLDFFQIAKSSSVLIRVQDKMISELDNQIEKVEAEIKKIINNDPHLKKIFHLVTSVKGVGLVVGVSLIVYSNCFSTFSDWRKFASYCGIAPFEYSSGTSIKGKTKIHYLGNKRLKSLLSNSATVSIRHNPEMKMYYQKRLQERKNKMSTINIIRNKILSRVFAVVQRGTPYVDTLRFAG

SEQ ID NO: 203621 - protein, 369 aa, unidentified
MKKNSINRGRCKETREKEGKRTIGMDLGDKTSRYCVLGASGAVVEEGSVATSRKGMTQVFGRMGRCRIAIEVGTHSPWVSRLLNSMGHEVIVANARQVKLISASSRKDDRLDAQTLARLARVDRQLLRPIQHRSEKAQQHLMKIRVRAKLVDTRTSLVNAGRGMSKAVGERLPACDADAMGLEQMAGLPAGLKETLKPLLELVESLTKKIKECEKEIEQIARMEYPETYVLRQVSGVGNLIALTFVLTVEDRERFQKSRDVGCYVGLRPKGSESGQSQPQLRITKEGDNYLRKMLVQGAHCILSHRGPDSDLKRWGLKLAERGGKNAKKRAIVAVARKLAVLLHALWVSGEVYEPLRNAEARQRMRQVA

SEQ ID NO: 203622 - protein, 403 aa, unidentified
MNAVGIDVSKGKSTVAIFQPGEKVVLKPRDFRHTQSGIGSLIEIIRGLDGDTKVCMEHTGRYYEPVATWLSDAGIFVSAVNPTLIRSFGDDSLRAPKTDKADAKKIARYTLDRWTKLKQYGRMDETRNQLKTMNRQFGFYMDQKTAMKNNLIALLDQTYPGANAFFDSPARSDGSQKWVDFVYTYWHADCVRGKSLNAFTEHYKSWCKRKGYNFCAAKAEKIYNDSADLIAVFSKNANTKMLIHQAVEMLNLASTTVESLREEMNRLAATLPEYPVVMAMNGVGPTLGPQLMAEIGDVTRFEKRGSLTAFAGVDPGKNDSGQHSQKSVPTSKKGSPHLRKTLFLIMESLIQRAPEDDPVYAFMDKKRAQGKPYYVYMTAGANKFLRIYYGRVNEYLSSLSEGK

SEQ ID NO: 203623 - protein, 427 aa, unidentified
MQSASTTSTRNPAHAHATLPADPPGDVTAGLDWARDDHAVAIVDHRGTQIGRHTIDHTAAGLRELVALLRRAGAAEVAIERPDGPVVDTLLQAGITVVVISPNQVKNLRGRYGSAGNKDDRFDAYVLADTLRTDRARLAPLTPDRPETATLRRACRTRKDLVGHRVAGANQLRAHLRTVLPGVVGLFADIDSAISLTFLRSFATQDHIDALTTAGLAAWLSEVGYCGRTAPAVLHARLRTAPRGLTGHDAEINTEITHALTNVLTTLNTQIATVSAQIERQLAEHADAHVFTNLPRAGRVRAARLLAEIGDCRARFPTPEALTCLAGVAPSTRQSGKHRSVGFRWACDKQLRDAVCDFAGDSRRANPWADDLYQRARDRGHDHAHAVRILGRAWLFVIWHCWQDNLAYDPTRHRALQRLLEDQQAAG

SEQ ID NO: 203624 - protein, 410 aa, unidentified
MAERFVGIDVALREHRIAVLDRDGEAVGPSFTIAASPDGVATLLRTLDARGATAAQTLVGLEASGHLWENLEAALVGAGYRVMVLNPLQTRRYRDVVRRKAKTDDIDAHVIAGLLRSGAAQASYVPDEQIQSLRELARLRARLMADRQDYLRQLIAQLDVVLPEHRAVLGDLLTARARGILAQFPTAQHLATANPRAIRRAAAEAGARGFSLDDATGVRDSARRSLYSGKAAAARAHVVRTLVRQLERLTSAIDEVDRAATTLLPPSEPGTGPSDAELLQTIPGIGPQTAATLLGELGALTRFTDARALVAYVGFYPVISESGDRAATPRLSRVGSRIARHSLYLAAVNAVRRSGEWRTIYLRKKAQGKTGKQALVVVAVKLLHALYAMLKHRQPYNPSRLLVAPATIGT

SEQ ID NO: 203625 - protein, 339 aa, unidentified
MRESMSLWKRVACALWTQQERLCEVKIASEPAVLVRYFDELELPVGCIGLEAGPLSQWLHAGLVAAGRNAVLLETRHVKAALSAMTVKTDRKDARGIAQLLRMGWYRPVHAKSVTCKDSRALLVGRKLLQGKLLDVELSIRGILRGYGLKVGEVSRGKFEARIRELTAGHITLETVIGAMLAARTALWCEFTKLHREMLKIARADKVCRRLMSTPGVGALVALTYRSAVDEPMRFGKSSTVGAYFGLTPKKYQSGETDRDGGVSKVGDAMVRTALFEAAHIMLTRATRFSSLKHWALNVAKRRGMKRAKVALARKLGVVLHRMWVDATDFRWSRTAAMA

SEQ ID NO: 203626 - protein, 343 aa, unidentified
MQSITTVGLDIAKSVFQVHGVDAAGEVIIRRQLKRRQVLPFFERLPACLVGMEACATSHHWSRELRALGHTVRLMPPAYVKPYVKRQKNDAADAEAICEAVTRANMRFVETKTPEQQACLMLHRTRHLFIRQQTSVINAIRAHMAEFGIVARVGRNGVAELLAVAADPTDRRLPEVARSCVAALGVQLRMLKAQILEFDRRIGAWHRSNQMSKQLDQVPGIGPALATALVASVPDPKAFRSGRDFSAWIGLVPRQHSSGGKDRLGSISKQGDRYLRGLFTAGALAVIRYAKMHGTEHRPWLTALLARRPTKVAAIALANKLARMAWAIMAKGEHYKEPTALAA

SEQ ID NO: 203627 - protein, 347 aa, unidentified
MSISMIGLDTAKSVFQVHAVDKHGKAQMRRKVQRDELIPFFEKQETCTIVMEACGAAHHWARMLTALGHDVKLIAPEAVRPFVKKGKKNDAADAAEICEAASRPDIKFVPVKKLEQQGILALHSARSLLVKQQTMLANAMRGLATEFGLTVPKGISKLDELVALVDTDEAFPEKARQVFIGLLDQCRATAETIKAFEAEIVVHARQDETARRLATIPGVGPITASLIAATVVDISLFRTARHFAAWLGLVPRQYSTGGKTRLGRITKSGNREIRRLLVLGATSMTSRASQWNSAVGAWTRAIQERRPFRLVTVALANKMARIAWASMTRKEVYHAKGRGAATTGAAA

SEQ ID NO: 203628 - protein, 346 aa, unidentified
MTLYIGVDFHPHQQTIAYCDTGDGEIRFLTLKHSDKPAILSFYQGLKRPAVIGVEATGGLDWFEEMIFENGHKLLVGHPQKIRRRAMSRHKSDRRDAETILDLLIHDEFPEVWRRDEQSRITLDMLRFRQNLVKHRTSVGNQLQAVARKRGLPRFATRTKKGRNLLLTAGLSEPDIYLRDSLYGLFDELTAQIERVDERLQKLALENERARLLMTYSGVGFRTALAVTATLGDVRRFNNMRQVSAFVGLDPLNKSTGENLRIGRISKRGSRVCRFLLGQAAARSSDPRLRASYKRISSRRTTAVAKVAAARRLLSNCYIMLRDSIDYEEFTRRGEVGLHGNTPASK

SEQ ID NO: 203629 - protein, 593 aa, unidentified
MMDIDRQNLLQRLRGAGLRPTIPRIAVLQVFEDAGGQALSVEEVFHRICLRGLHASLGTIYRVAQQMSKHGLLEPLRAGGRKQLFRLRACQAQARLHEARLWAVNRISFSWCIAPPTTDETGVQYRCGVRHRGRFVVGVPNPCISWTGGLTSTPHCRQGLGILEHALQTSMTWAACRCRRDMEAIMEVIYPRCAGLDVHKQSVVACARIAGEGSLVQEVSTFATTTSGLLELADWLDSFGVEHVAMEATGVYWKPVWHVLEGHFELVLANAAHVKNVPGRKTDVNDSMWLADLLAHGLIRASFVPPVAVQELRTLTRTRKQFVRERAQHVQRIEKVLEDANIKITSVLSDILGTSGRAVLQALIDGCSDPVHLASLVRGNRLKASRAELTEALGGRVRAHHRFMLKLHLGHIDALDKAIADIEKEVGLGLEPFRAAARLLSTMPGLSQISANVVVAEIGIDMSRFATPGHLLSWACMCPRNDESAGKHRSTRLRRGGKWLKTTLVQAAWAAVKVKGSYLQAQFHRIRARRGAKKAIIAVAASMLTAAWHMLRDGTEWHDLGAAHFDRADAEKTANRLIRRLQQIGYAVHAAPA

SEQ ID NO: 203630 - protein, 310 aa, unidentified
MGQTFVGIDVSKDRLDVHVRPDGAAFAVSRDGKGLEALVDRLRVVAPVLIAVEATGGFETIVAAAIGGAQLPLVVVNPAQVRHFAQALGKRAKTDPIDAEVIARFAEAVKPEPRAIPDEATRLLSELVARRRQIVEMLVAERQREKRAGNVRVRKSLARHIKVLERELQELTDDIGELIRGSPAWRETEDLLTSVPGVADKTSSSLLAELPELGRLTRRQIASLVGVAPFTRQSGRWKGKSMIAGGRAAVRTAIYMAALAASQHNPVLKAFYRRLVAAGKPKMVALIAVARKLLTILNAMIRDRKPWQHA

SEQ ID NO: 203631 - protein, 408 aa, unidentified
MGRAAEVVAPSSSIRTDGGCPVVQVNDLSRSLAAFDPISTLVVVVEMSKASWLVSSVVPGVERQPLKKLEPDATAVLRLIERWRNEAVRVGRPISRIALAYEAGRDGFWLARWLIARGIEAHVIHSASVAVSRERKRAKTDRLDAAMLMRVFLGWLRGERGHCGMVAIPTMEEEDARRPNRERESLVKERSRIINRMKSALARLGIRGFKPHLRKAPERLAGLRTAEGTGLPANIIEEFRRDMARLALVREQISSIEKTRAERLERAPDTGPHAMVRLLARVIGIGVETADMLVREILSRKLRDRRALARYAGLTGSPDESGLKSREKGLAKAGNARVRRGLIQLAWRFLMFQKDSALARWYRTRTEGPSGARKTTMIVALARKLLIALWRLVTTGEVPDGVELRPAA

SEQ ID NO: 203632 - protein, 344 aa, unidentified
MVFHTALDVSLRSVSICIIDGNGNICFEDKVVSEVDEIAAALQRFSPEIRSVGFEAGTLTQYLSYGLQAAGFEVICMEARQVSAALSAMRNKTDRNDARGIAQILRSGWYSRVYVKSMESHLTRALLSGRKAVLKKCVDLENEIRGLIRLLGVKLPGTLKHGAFDGLVRPIIEEHGLMIDSLIPLLDARLMLYQTYLKLDAQVTAMARKDEVCQRLMTVPGVGAITALTFKAGVDNPNRFKRSRTVAAHFGLTPRRFQSGELDNPGHISRAGDADVRSALYIAAHSLVIRSDKWTYLKAWGVRLSKTKGHRRAVIAVARKLAVILHRMWIDNTDFRYNSTEVKL

SEQ ID NO: 203633 - protein, 311 aa, unidentified
MTSQFAGIDVGKDSLTGNLYGQDAVKEYPNTSRGIQRLSTWLQKHEVHLVVMEATDGNEKMASLKSERAGLAVAVVNPTYVRRFAQGMGTLAKTDPIDARMIAWYASVKQPKPRPPRSEAAEALSACVDRRDQLVAMRTMEKNRLGSAAAYVQPSITAHIESIDEQIKQMEVEIDHLIDQEEEWQSRIACMTSCKGVGKVTAVTLLAEMPELGHEKREQIAALAGVAPMNRDSGRKSGRRKTRGGRSKLRRVLFMAAMSAAKFNPVIHAFYQRLIKKGKPKSVVMVACMHKLLTILNAMLRKNEMWRPDFA

SEQ ID NO: 203634 - protein, 424 aa, unidentified
MNLTQNDRLKQVTSDTLIVGVDVGSQTHFCRAFDWRGFELSRRVFKFSNTGMGFLTFLRWAEELMNKTEMKKVIVGCEPTGCYWLTFQKFLQDHDIQLVTVNPFTVNRSMELDDNSPEKSDLKDPKTIALLVKDGRFSTSYLPSGVYAEIREASVCRDQIMKQHVRLSNQIQGWLQKFFPEYFECYTDWDSTSGLMLLREAPLPQDILKIGAGGINQIWRDAKVRAAGIKRAQTLVEAAQNSVGLEAGEAARLEIWVLVNDYILKAEQLKRLDEYLEEKIKEVPNVEKLLAIKGVGMSTVIGFIAEVGDIGRFTDPKQIQKLAGLEIVKKSSGKKKGQPRISKRGRRKLRRTMYESARALMTWNPAFQDVFLYYRNRTKNPLGGRQAKIAVACKAIRIFYVVLQTGCDFDEEKFRKDIIRPEAA

SEQ ID NO: 203635 - protein, 388 aa, unidentified
MIYVGIDIAKLNHFASAISSDGEILMEPFQFSNDADGFHMLVSRLDSLESDNIIIALESTAHYGDNLVRYLVASSFNVCVLNPIKTSSMRKNNIRKTKTDKVDTYIIAKTLMMQDSYRFVTFYDLDLMDLKQLGRFRQKAIKQRTRLKIQLTSYVDQAFPELQYFFKSGLHHKAVYALLKEAPSPQDIASMHMTHLSHLLTTASHGHFKKEQANELRVLARKSVGANDSALSIQITQTIAQIELLDSQLKKVETEMTEIMKFHDSVIMTIPGIGYINGGIILGEIGDIHRFSTPSKLLAFAGLDPSVYQSGNFQARRTRMSKRGSRVLRYALINAAHNVVKNNATFKAYYDKKMAEGRTHYNALGHCAGKLVRVIWKMLTDEVEFNLD

SEQ ID NO: 203636 - protein, 429 aa, unidentified
MPYRIAGIDVHKKMLAVVVSDVEIDSEYQFERKRFSSNPEQLRSLAAWLLEQAVEEVVMESTAQYWKPVWEALERYWKPTCEKRAGARRKSGTLHLAQALSNRGRRGRKRDFPDAERLVKRLVAQELTLSFVPDTEQRLWRTVTRKKYQLRCDRIRLQNQLESLLEEAHIKLSSFVSDLLGLSAQRMLKAISEGETDPAVLAALADKHLRATPEQLCDALGACTQLNPVYRRLLNLALEELRLIDDQIGRLDREMASLLGEHQDAVQRLAEVPGLGVDSAQQIIAEVGPTAATFPSAKCLSSWVGACPGDDETAGVNHSHRSPKGNRQMRRILNQSANAAARTKGSIFEIVYHRSVPRLGHNQAIGAIAHRHCRLIWLILHQGVRYEERGPAVTKRSKQLRTWRMIRQLRSLGYHIELPNPQASQARAQ

SEQ ID NO: 203637 - protein, 298 aa, unidentified
MEITTLGIDLAKSVFQLHGVDADGAVVLQKKLRRGAVLHFLGKLGPCLIGMEACPTSHFWARSIAALGHEVRLIPPAYVKPYVKRQKNDAADAEAICEAVTRPNMRFVPVKTEEQQSVLVLHRSRDLLMRQRTMILNAIRAHLAEFGIITAQGPRRVAELVRRLRDPDDLGLPAIARFALLALGAQLFRLAAEIGNIERQLMAWHRQNVASQRLETIPGIGIITATALAASVPDPAVFGSGRQFAAWLGLVPRQNSSGGKDRLGHVSKMGNGYLRRLLVVGATSVTRRAATINTQTGA

SEQ ID NO: 203638 - protein, 486 aa, unidentified
MAKPKKPSPRAVAKQEKPKQTGRRKRSRAAKGKRLEDRPLLEANAAGIDIGAREIFVAVPPDRDRTPVRIFKTHTEDLELMAQWLVVCKITTVAMESTGVYWSPIADVLEGYGLKVCVVDARGMKNVPGRRTDWHECQWIQYLHSVGLLRAAFRPETAVRAVRTLMRHRTEQVLMANQHIQHMHKALTQMNVQLHHCINDLTGVTGMAIVDAIIGGERDAAVLAKLRMPNVKASEEEIRKSLEANWQEEHLFTLKQSRESLTHYQQQIAACDEEIEKLLVQFQPRVDPEKKPLPANRKRKPKGRKKQQQLKNPKTGFDMRQEAYKLFGVDLTQVPGLMLMVLTLFSEIGRDMSRWPTAGHFVSWLGLCPDNDITGGKVRWRGMRKVKSRAGTLFRLAAHSLHHEESGLGDYLRRMKSKLGPAGATTATAHKIAVIFYTMVKKQVEYDPTIWGQRDTQRVQRMEAKLQRLARKMGYQLVPVEEKPAA

SEQ ID NO: 203639 - protein, 410 aa, unidentified
MPEDYRWFVGIDWGSRDHQVTVVRPDRTVLHERKVPHTGADVAALAHGLADLADGAAATVAVALEVPRGPLVDALLAQGVHVYALNPKQLDRFRDRYTVAGAKDDRRDARVLATSLVTDRAAFRRLDPEDGRVVQLREITRLEEDLDAERRRLSNRLREQLYRLAPGLLTLCAGADEPWLWALLERAPTPAAAARLTRAAVARVLAEHRIRRFTAEAVLAVLRAPAFVVAPGVLEAAQEHLAILLPRLWLAHEQQRRCAARGERLLDDLAQPQEHRDVAILRSLPGVGRKVSATMLAEASRLLAARDYHGLRAHAGCAPVTKESGKRRVVAMRYACNPRLRNAVHYWAQTSVHHDALGAALYARLRARGCSHGRALRGVGDRLLAVLIAMLRTQALYDPARRRAPREIAA

SEQ ID NO: 203640 - protein, 417 aa, unidentified
MEEGEKASTCRNIAMDIHKYYSVIGGVDRDGKEVMEMCRVEHVDLEDWLPKHLLKTDRVVIESTTNAWHVYDLLEPLVAEVLVANPIKVKQIACARVKTDKKDTLILARLLAANLVPTVWVPPKHVRELRQLVSHRRRMAGMHTQVVNRMHSVAHRHHLNHPKGKDFQPKNTGWQRDERLSQLEKLQLELDMETRKHLEKQIERMTHELGRMSHEEPWASEMLYLMQVPGCGVVTGMTILAAIGDITRFESPKALASYSGLTPGLEQSGVKLRGKGITKEGRRELRWVMVEVAWRAVKADPHWKKYFEELKRRMHKNQAIVAIARHLLTMVWYLLTQHEPYSHYSPERIAYKYLTWSWALGEEQRQGMTGPQFARYYLMRLGIGNELKRVALNPKFPYKLATVEEVLALWPELRPPE

SEQ ID NO: 203641 - protein, 348 aa, unidentified
MTIAMIGLDTAKNLFQVHGVDEGGRAVLRRKLHRSELVGFCERQPRCTVFLEACGAGHYWGRLLSGFGHEVKLIAPEAVRPFVKKGRKNDAADAAALCVAGTRPETRFVPIKSVEQQAVLALHAARSLLVKQQTMLANALRGLAGEFGVTVPRGLHKLEELAALVSAEEGIPAAGRQAMAELHAHGRAVAGRVATLEERIVRHARQDATARRLATIPGIGPITASLIAATVGDHIGAFRSARHFAAWLGLVPRQHSTGGRTRLGGITKAGNAEIRRLLVLGATSMVWRATCWDSKAGLWVRGVLARRPVRLVTVALANKLARIAWALMTRGEVYQAQGRAPAAAAAVA

SEQ ID NO: 203642 - protein, 285 aa, unidentified
MKKTVEIFVGIDVSKAWLEVAVHEQKETYRFSNDEAGIASLVKALKKLKPKLIVLEPTGGFEMLVVAELSQAGLPVGVVNGKRIRDFAKATGQIAKTDKLDARVLAHFAAAIRPEVRPLRTEEEEQLTALLTRRRQILDMLTVEKNRRVSVRAKMRADLEAHIHWLSDHLQELDQEIEEFVKGSPAWKEKDTLLQSVPGVGPVTSATLLGMLPELGLLNRQEIAALVGVAPMNKDTGNKKGKRSIYGGRADVRSVLYMAALSAKKHNPFIRKFYERLIRHGKEKK

SEQ ID NO: 203643 - protein, 416 aa, unidentified
MKLFVGIDVSSEKLDTCYLTDEMVVLLNHTYGNDTQGAWELKEQILSFHETYSFDQIVIGMESTSMYSYHPAVNFHQDEQLQAIHAITTIENPHRIKQYMKMFDADKTDPIDAFMIADYLRIQRYTNSPIKGEKYMALQRLTRTRYQIVRQLVEVKQHFIENLSYKCNTLKKELREAEGSTTVFSAAIMDIFTQDLSLDDLANLPLKDLAEWLQSKGRGRFKDPEGLAKTIQRAVRSSYRLDQVMSESIDMILGILVREIRSLEKAVKDCDQGIEDLVQTVPEYQCLTSIPGVGPVYAAGLLAEIGQIERFPDQTSLAKYAGLTWPKHQSGRHEAENTPLTKKGNRYFRYYLIEAANSVSRHLPEYQAFYRKKYQETPKHQHKRALVLTARKFVRLVDTLLRNHQLYTPPRSVIEK

SEQ ID NO: 203644 - protein, 348 aa, unidentified
MALTIVETRAITGGVDTHADAHVAAALDPIGGLLGVREFPATAAGYGRLLSWLGGFGTVCLIGIEGTGSYGAGLARHVTAAGVRVVEVDRSDRQDRRRQGKSDPLDAVSAARAAQSGRARGAPKGRDGAVEAIRALMVARRSAAGERTRTNGQARALLLTGPGDLRARFTRHTPAALVTGLASLRPRPGDVAGYAVRVALRELGRRAQFPDGQLGRLDELIVPLVTARAPGLLAVYGLGPRTAALLLIAAGDHPGRLRSEAAWAHLCGVAPIPASSGKVARHRLNPGGDRQANHALWRIVFTRLGSDPATRAYAERRTAEGKSKAEIIRCLKRYVAREVYRHLRPAAG

SEQ ID NO: 203645 - protein, 403 aa, unidentified
MANWIGIDVSKSTHKYRIVDDAGEAVGKAVTFANSRDGFDAFVQKLRALGEAKIALEATGPYWLALYDFLTNAGFKVTVLNPLQVNAFRGTGLRKTKCDSKDAYWIAEFLRIGYGKPMSVPEPAVQTLRELSRYRFALVDEICDHKRRVLGMLVRVFPEYEGLFSDVFLVSSMKLLETAATPEDILALDTDKLVELLHKASRGRFGQEKADLIREAAANTIGVSWLADAARIEIVSILQIVGFLELQVKQLEVELARLMESQCEFLTTVTGVGTVLGAAIVGEIVDIDRFETGKAFVAFAGIDPAVHQSGQFDGKQMHMSKRGSPHLRRALWLVACNAYREDPDMQAFYERKKAEGKHHNTIIGAIARKMAGRIYAVWKGNQPYRSAGPTEAGTLDGNQAQDQ

SEQ ID NO: 203646 - protein, 403 aa, unidentified
MFYLGIDVSQKTSSCLLLNAEGRKGKAFTFENSPEAFQSLVQWLEEQSVPKHDLLIGFEATGNFWENLYVYLKEKGFAVVLLNPFHVKRYREALAKKAKTDHIDALVIAQFLRTGEYVQSQVAEETIQSLREMTRLRYELLKEKKNYQRQVCSLLTVVFPEYAQTILKNPFTISALAVLQKFPTAKDLAQAKPKQIEKIIRSIPGNSFGAQEIDTLISVAQHSMYSGRAKEARAISLRILLTHIAHLVHSIQELEEETQKVLSPQRPDDPFPGENLLTIPGVGQNTVAAVLSYLGEDGANFSSSTRAVGYVGYYPKIYQSGQSKRDNTISKRGPKMLRWALYMAAVASLRHNPEMKTLYHRKRSQGKTKKQALICVAKKLLQIMLAMLKSGEPYKPQMVFVQS

SEQ ID NO: 203647 - protein, 334 aa, unidentified
MQTATLIGIDLGKYSFHVHCQDRQGNALLRKKFSRSQLATFLATYPACTVVMESCAGAHYMARTVSQLGHRVKLIAPQFVRPFVKSNKNDFVDAEAICEAASRPSMRFVTPRTEDQQAMSALHRVRSSLIRERVKTTNQIHAFLLEFGISLPRGSAVIKRLPSVLEENGIPPDLERLLARLHTHYGYLSEQIKEIDNELKTHLNEDETAQRLLTIPGVGPVTASLLATRLGDGKNYASSRDFAASTGLVPRQYSTGGKPTLMGISKRGNKVLRSLLVQCARAFMRRLEHNSGRLAEWVKKQLASHHSNVVACALANKLARIAWAVTAHQTEFSK

SEQ ID NO: 203648 - protein, 326 aa, unidentified
MIDATGQLIEEGRLRTNKEALQKRFEGSPCRVVMEAGVHSPWMSRLFEEMGYEVVVANPRRVQLIAQSTRKNDRADAETLARLGRVDPKLLGPISHRNARAQMDLASIRGRNALVAARTLLINHIRGSVKSTGGRLPACDAHSFHKKVLAHLPPLLEPSLRPLVDAIAELTGRIKELDRLVLELIESRYQEAKCLQQVAGVGPLISLSFVLTISDPNRFKKSRQLGPYLGLVPKQRESGGSAPALRISKAGNGFLRQLLVNGAHYILGFRGPDCDLRRWGLQRAAGGKAAKKRAIVGVARRLAILLHRLWVTGEVYQPLRHLEVAA

SEQ ID NO: 203649 - protein, 453 aa, unidentified
MTNPTTGGHPDLKMVNSNAAAIDIGSTMHMAAVHPDACDMPVRAFGTFTQDLHALAAWFKSCGVTSVAMESTGVYWIPAFEILEAHGLHVILVNARYAKNVPGRKTDVSDAGWLRQLHSYGLLRGSFRPEAEIATLRAYMRQRERLTEYAAAHIQHMQKALMEMNLQLHHVVSDITGVTGMRIIRAIVGGERDPEALAAFRDVRCKSSIETIKAALVGNDREEHVFALTQSLALYDFYKAQIEACDRKLEAAVGALTARANGDLAPLPKARIKGKQHNAPSFDVRAALYGVLGTDLTQIHGLGPSLALKLVAECGTDLRAWKTAKHFTSWLCLAPGNKISGGKLLSSRTRRSSSRAAALLRLAATTIGRSDTALGAFYRRLSSRIGKQKAVTATARKIAVQFYNAVRHGITYQDQGAAAYDERHRQRVLSNLQRRAKTFGFALAPIPEAAAVS
